United States Patent Application Publication US 2024/0309320 A1 - sequence listing, part 5

SEQ ID NO: 5526 - DNA, 5652 bp, Homo sapiens
  source 1..5652: mol_type = genomic DNA
atggatttatctgctcttcgcgttgaagaagtacaaaatgtcattaatgctatgcagaaaatcttagagtgtcccatctgtctggagttgatcaaggaacctgtctccacaaagtgtgaccacatattttgcaaattttgcatgctgaaacttctcaaccagaagaaagggccttcacagtgtcctttatgtaagaatgatataaccaaaaggagcctacaagaaagtacgagatttagtcaacttgttgaagagctattgaaaatcatttgtgcttttcagcttgacacaggtttggagtatgcaaacagctataattttgcaaaaaaggaaaataactctcctgaacatctaaaagatgaagtttctatcatccaaagtatgggctacagaaaccgtgccaaaagacttctacagagtgaacccgaaaatccttccttgcaggaaaccagtctcagtgtccaactctctaaccttggaactgtgagaactctgaggacaaagcagcggatacaacctcaaaagacgtctgtctacattgaattgggatctgattcttctgaagataccgttaataaggcaacttattgcagtgtgggagatcaagaattgttacaaatcacccctcaaggaaccagggatgaaatcagtttggattctgcaaaaaaggctgcttgtgaattttctgagacggatgtaacaaatactgaacatcatcaacccagtaataatgatttgaacaccactgagaagcgtgcagctgagaggcatccagaaaagtatcagggtagttctgtttcaaacttgcatgtggagccatgtggcacaaatactcatgccagctcattacagcatgagaacagcagtttattactcactaaagacagaatgaatgtagaaaaggctgaattctgtaataaaagcaaacagcctggcttagcaaggagccaacataacagatgggctggaagtaaggaaacatgtaatgataggcggactcccagcacagaaaaaaaggtagatctgaatgctgatcccctgtgtgagagaaaagaatggaataagcagaaactgccatgctcagagaatcctagagatactgaagatgttccttggataacactaaatagcagcattcagaaagttaatgagtggttttccagaagtgatgaactgttaggttctgatgactcacatgatggggagtctgaatcaaatgccaaagtagctgatgtattggacgttctaaatgaggtagatgaatattctggttcttcagagaaaatagacttactggccagtgatcctcatgaggctttaatatgtaaaagtgaaagagttcactccaaatcagtagagagtaatattgaagacaaaatatttgggaaaacctatcggaagaaggcaagcctccccaacttaagccatgtaactgaaaatctaattataggagcatttgttactgagccacagataatacaagagcgtcccctcacaaataaattaaagcgtaaaaggagacctacatcaggccttcatcctgaggattttatcaagaaagcagatttggcagttcaaaagactcctgaaatgataaatcagggaactaaccaaacggagcagaatggtcaagtgatgaatattactaatagtggtcatgagaataaaacaaaaggtgattctattcagaatgagaaaaatcctaacccaatagaatcactcgaaaaagaatctgctttcaaaacgaaagctgaacctataagcagcagtataagcaatatggaactcgaattaaatatccacaattcaaaagcacctaaaaagaataggctgaggaggaagtcttctaccaggcatattcatgcgcttgaactagtagtcagtagaaatctaagcccacctaattgtactgaattgcaaattgatagttgttctagcagtgaagagataaagaaaaaaaagtacaaccaaatgccagtcaggcacagcagaaacctacaactcatggaaggtaaagaacctgcaactggagccaagaagagtaacaagccaaatgaacagacaagtaaaagacatgacagcgatactttcccagagctgaagttaacaaatgcacctggttcttttactaagtgttcaaataccagtgaacttaaagaatttgtcaatcctagccttccaagagaagaaaaagaagagaaactagaaacagttaaagtgtctaataatgctgaagaccccaaagatctcatgttaagtggagaaagggttttgcaaactgaaagatctgtagagagtagcagtatttcattggtacctggtactgattatggcactcaggaaagtatctcgttactggaagttagcactctagggaaggcaaaaacagaaccaaataaatgtgtgagtcagtgtgcagcatttgaaaaccccaagggactaattcatggttgttccaaagataatagaaatgacacagaaggctttaagtatccattgggacatgaagttaaccacagtcgggaaacaagcatagaaatggaagaaagtgaacttgatgctcagtatttgcagaatacattcaaggtttcaaagcgccagtcatttgctccgttttcaaatccaggaaatgcagaagaggaatgtgcaacattctctgcccactctgggtccttaaagaaacaaagtccaaaagtcacttttgaatgtgaacaaaaggaagaaaatcaaggaaagaatgagtctaatatcaagcctgtacagacagttaatatcactgcaggctttcctgtggttggtcagaaagataagccagttgataatgccaaatgtagtatcaaaggaggctctaggttttgtctatcatctcagttcagaggcaacgaaactggactcattactccaaataaacatggacttttacaaaacccatatcgtataccaccactttttcccatcaagtcatttgttaaaactaaatgtaagaaaaatctgctagaggaaaactttgaggaacattcaatgtcacctgaaagagaaatgggaaatgagaacattccaagtacagtgagcacaattagccgtaataacattagagaaaatgtttttaaagaagccagctcaagcaatattaatgaagtaggttccagtactaatgaagtgggctccagtattaatgaaataggttccagtgatgaaaacattcaagcagaactaggtagaaacagagggccaaaattgaatgctatgcttagattaggggttttgcaacctgaggtctataaacaaagtcttcctggaagtaattgtaagcatcctgaaataaaaaagcaagaatatgaagaagtagttcagactgttaatacagatttctctccatatctgatttcagataacttagaacagcctatgggaagtagtcatgcatctcaggtttgttctgagacacctgatgacctgttagatgatggtgaaataaaggaagatactagttttgctgaaaatgacattaaggaaagttctgctgtttttagcaaaagcgtccagaaaggagagcttagcaggagtcctagccctttcacccatacacatttggctcagggttaccgaagaggggccaagaaattagagtcctcagaagagaacttatctagtgaggatgaagagcttccctgcttccaacacttgttatttggtaaagtaaacaatataccttctcagtctactaggcatagcaccgttgctaccgagtgtctgtctaagaacacagaggagaatttattatcattgaagaatagcttaaatgactgcagtaaccaggtaatattggcaaaggcatctcaggaacatcaccttagtgaggaaacaaaatgttctgctagcttgttttcttcacagtgcagtgaattggaagacttgactgcaaatacaaacacccaggatcctttcttgattggttcttccaaacaaatgaggcatcagtctgaaagccagggagttggtctgagtgacaaggaattggtttcagatgatgaagaaagaggaacgggcttggaagaaaataatcaagaagagcaaagcatggattcaaacttaggtgaagcagcatctgggtgtgagagtgaaacaagcgtctctgaagactgctcagggctatcctctcagagtgacattttaaccactcagcagagggataccatgcaacataacctgataaagctccagcaggaaatggctgaactagaagctgtgttagaacagcatgggagccagccttctaacagctacccttccatcataagtgactcttctgcccttgaggacctgcgaaatccagaacaaagcacatcagaaaaagattcgcatatacatggccaaaggaacaactccatgttttctaaaaggcctagagaacatatatcagtattaacttcacagaaaagtagtgaataccctataagccagaatccagaaggcctttctgctgacaagtttgaggtgtctgcagatagttctaccagtaaaaataaagaaccaggagtggaaaggtcatccccttctaaatgcccatcattagatgataggtggtacatgcacagttgctctgggagtcttcagaatagaaactacccatctcaagaggagctcattaaggttgttgatgtggaggagcaacagctggaagagtctgggccacacgatttgacggaaacatcttacttgccaaggcaagatctagagggaaccccttacctggaatctggaatcagcctcttctctgatgaccctgaatctgatccttctgaagacagagccccagagtcagctcgtgttggcaacataccatcttcaacctctgcattgaaagttccccaattgaaagttgcagaatctgcccagagtccagctgctgctcatactactgatactgctgggtataatgcaatggaagaaagtgtgagcagggagaagccagaattgacagcttcaacagaaagggtcaacaaaagaatgtccatggtggtgtctggcctgaccccagaagaatttatgctcgtgtacaagtttgccagaaaacaccacatcactttaactaatctaattactgaagagactactcatgttgttatgaaaacagatgctgagtttgtgtgtgaacggacactgaaatattttctaggaattgcgggaggaaaatgggtagttagctatttctgggtgacccagtctattaaagaaagaaaaatgctgaatgagcatgattttgaagtcagaggagatgtggtcaatggaagaaaccaccaaggtccaaagcgagcaagagaatcccaggacagaaagatcttcagggggctagaaatctgttgctatgggcccttcaccaacatgcccacagatcaactggaatggatggtacagctgtgtggtgcttctgtggtgaaggagctttcatcattcacccttggcacaggtgtccacccaattgtggttgtgcagccagatgcctggacagaggacaatggcttccatgcaattgggcagatgtgtgaggcacctgtggtgacccgagagtgggtgttggacagtgtagcactctaccagtgccaggagctggacacctacctgataccccagatcccccacagccactac

SEQ ID NO: 5527 - DNA, 2277 bp, Homo sapiens
  source 1..2277: mol_type = genomic DNA
atggatttatctgctcttcgcgttgaagaagtacaaaatgtcattaatgctatgcagaaaatcttagagtgtcccatctgtctggagttgatcaaggaacctgtctccacaaagtgtgaccacatattttgcaaattttgcatgctgaaacttctcaaccagaagaaagggccttcacagtgtcctttatgtaagaatgatataaccaaaaggagcctacaagaaagtacgagatttagtcaacttgttgaagagctattgaaaatcatttgtgcttttcagcttgacacaggtttggagtatgcaaacagctataattttgcaaaaaaggaaaataactctcctgaacatctaaaagatgaagtttctatcatccaaagtatgggctacagaaaccgtgccaaaagacttctacagagtgaacccgaaaatccttccttgcaggaaaccagtctcagtgtccaactctctaaccttggaactgtgagaactctgaggacaaagcagcggatacaacctcaaaagacgtctgtctacattgaattgggatctgattcttctgaagataccgttaataaggcaacttattgcagtgtgggagatcaagaattgttacaaatcacccctcaaggaaccagggatgaaatcagtttggattctgcaaaaaaggctgcttgtgaattttctgagacggatgtaacaaatactgaacatcatcaacccagtaataatgatttgaacaccactgagaagcgtgcagctgagaggcatccagaaaagtatcagggtgaagcagcatctgggtgtgagagtgaaacaagcgtctctgaagactgctcagggctatcctctcagagtgacattttaaccactcagcagagggataccatgcaacataacctgataaagctccagcaggaaatggctgaactagaagctgtgttagaacagcatgggagccagccttctaacagctacccttccatcataagtgactcttctgcccttgaggacctgcgaaatccagaacaaagcacatcagaaaaagtattaacttcacagaaaagtagtgaataccctataagccagaatccagaaggcctttctgctgacaagtttgaggtgtctgcagatagttctaccagtaaaaataaagaaccaggagtggaaaggtcatccccttctaaatgcccatcattagatgataggtggtacatgcacagttgctctgggagtcttcagaatagaaactacccatctcaagaggagctcattaaggttgttgatgtggaggagcaacagctggaagagtctgggccacacgatttgacggaaacatcttacttgccaaggcaagatctagagggaaccccttacctggaatctggaatcagcctcttctctgatgaccctgaatctgatccttctgaagacagagccccagagtcagctcgtgttggcaacataccatcttcaacctctgcattgaaagttccccaattgaaagttgcagaatctgcccagagtccagctgctgctcatactactgatactgctgggtataatgcaatggaagaaagtgtgagcagggagaagccagaattgacagcttcaacagaaagggtcaacaaaagaatgtccatggtggtgtctggcctgaccccagaagaatttatgctcgtgtacaagtttgccagaaaacaccacatcactttaactaatctaattactgaagagactactcatgttgttatgaaaacagatgctgagtttgtgtgtgaacggacactgaaatattttctaggaattgcgggaggaaaatgggtagttagctatttctgggtgacccagtctattaaagaaagaaaaatgctgaatgagcatgattttgaagtcagaggagatgtggtcaatggaagaaaccaccaaggtccaaagcgagcaagagaatcccaggacagaaagatcttcagggggctagaaatctgttgctatgggcccttcaccaacatgcccacagatcaactggaatggatggtacagctgtgtggtgcttctgtggtgaaggagctttcatcattcacccttggcacaggtgtccacccaattgtggttgtgcagccagatgcctggacagaggacaatggcttccatgcaattgggcagatgtgtgaggcacctgtggtgacccgagagtgggtgttggacagtgtagcactctaccagtgccaggagctggacacctacctgataccccagatcccccacagccactac

SEQ ID NO: 5528 - DNA, 5448 bp, Homo sapiens
  source 1..5448: mol_type = genomic DNA
atgctgaaacttctcaaccagaagaaagggccttcacagtgtcctttatgtaagaatgatataaccaaaaggagcctacaagaaagtacgagatttagtcaacttgttgaagagctattgaaaatcatttgtgcttttcagcttgacacaggtttggagtatgcaaacagctataattttgcaaaaaaggaaaataactctcctgaacatctaaaagatgaagtttctatcatccaaagtatgggctacagaaaccgtgccaaaagacttctacagagtgaacccgaaaatccttccttgcaggaaaccagtctcagtgtccaactctctaaccttggaactgtgagaactctgaggacaaagcagcggatacaacctcaaaagacgtctgtctacattgaattgggatctgattcttctgaagataccgttaataaggcaacttattgcagtgtgggagatcaagaattgttacaaatcacccctcaaggaaccagggatgaaatcagtttggattctgcaaaaaaggctgcttgtgaattttctgagacggatgtaacaaatactgaacatcatcaacccagtaataatgatttgaacaccactgagaagcgtgcagctgagaggcatccagaaaagtatcagggtagttctgtttcaaacttgcatgtggagccatgtggcacaaatactcatgccagctcattacagcatgagaacagcagtttattactcactaaagacagaatgaatgtagaaaaggctgaattctgtaataaaagcaaacagcctggcttagcaaggagccaacataacagatgggctggaagtaaggaaacatgtaatgataggcggactcccagcacagaaaaaaaggtagatctgaatgctgatcccctgtgtgagagaaaagaatggaataagcagaaactgccatgctcagagaatcctagagatactgaagatgttccttggataacactaaatagcagcattcagaaagttaatgagtggttttccagaagtgatgaactgttaggttctgatgactcacatgatggggagtctgaatcaaatgccaaagtagctgatgtattggacgttctaaatgaggtagatgaatattctggttcttcagagaaaatagacttactggccagtgatcctcatgaggctttaatatgtaaaagtgaaagagttcactccaaatcagtagagagtaatattgaagacaaaatatttgggaaaacctatcggaagaaggcaagcctccccaacttaagccatgtaactgaaaatctaattataggagcatttgttactgagccacagataatacaagagcgtcccctcacaaataaattaaagcgtaaaaggagacctacatcaggccttcatcctgaggattttatcaagaaagcagatttggcagttcaaaagactcctgaaatgataaatcagggaactaaccaaacggagcagaatggtcaagtgatgaatattactaatagtggtcatgagaataaaacaaaaggtgattctattcagaatgagaaaaatcctaacccaatagaatcactcgaaaaagaatctgctttcaaaacgaaagctgaacctataagcagcagtataagcaatatggaactcgaattaaatatccacaattcaaaagcacctaaaaagaataggctgaggaggaagtcttctaccaggcatattcatgcgcttgaactagtagtcagtagaaatctaagcccacctaattgtactgaattgcaaattgatagttgttctagcagtgaagagataaagaaaaaaaagtacaaccaaatgccagtcaggcacagcagaaacctacaactcatggaaggtaaagaacctgcaactggagccaagaagagtaacaagccaaatgaacagacaagtaaaagacatgacagcgatactttcccagagctgaagttaacaaatgcacctggttcttttactaagtgttcaaataccagtgaacttaaagaatttgtcaatcctagccttccaagagaagaaaaagaagagaaactagaaacagttaaagtgtctaataatgctgaagaccccaaagatctcatgttaagtggagaaagggttttgcaaactgaaagatctgtagagagtagcagtatttcattggtacctggtactgattatggcactcaggaaagtatctcgttactggaagttagcactctagggaaggcaaaaacagaaccaaataaatgtgtgagtcagtgtgcagcatttgaaaaccccaagggactaattcatggttgttccaaagataatagaaatgacacagaaggctttaagtatccattgggacatgaagttaaccacagtcgggaaacaagcatagaaatggaagaaagtgaacttgatgctcagtatttgcagaatacattcaaggtttcaaagcgccagtcatttgctccgttttcaaatccaggaaatgcagaagaggaatgtgcaacattctctgcccactctgggtccttaaagaaacaaagtccaaaagtcacttttgaatgtgaacaaaaggaagaaaatcaaggaaagaatgagtctaatatcaagcctgtacagacagttaatatcactgcaggctttcctgtggttggtcagaaagataagccagttgataatgccaaatgtagtatcaaaggaggctctaggttttgtctatcatctcagttcagaggcaacgaaactggactcattactccaaataaacatggacttttacaaaacccatatcgtataccaccactttttcccatcaagtcatttgttaaaactaaatgtaagaaaaatctgctagaggaaaactttgaggaacattcaatgtcacctgaaagagaaatgggaaatgagaacattccaagtacagtgagcacaattagccgtaataacattagagaaaatgtttttaaagaagccagctcaagcaatattaatgaagtaggttccagtactaatgaagtgggctccagtattaatgaaataggttccagtgatgaaaacattcaagcagaactaggtagaaacagagggccaaaattgaatgctatgcttagattaggggttttgcaacctgaggtctataaacaaagtcttcctggaagtaattgtaagcatcctgaaataaaaaagcaagaatatgaagaagtagttcagactgttaatacagatttctctccatatctgatttcagataacttagaacagcctatgggaagtagtcatgcatctcaggtttgttctgagacacctgatgacctgttagatgatggtgaaataaaggaagatactagttttgctgaaaatgacattaaggaaagttctgctgtttttagcaaaagcgtccagaaaggagagcttagcaggagtcctagccctttcacccatacacatttggctcagggttaccgaagaggggccaagaaattagagtcctcagaagagaacttatctagtgaggatgaagagcttccctgcttccaacacttgttatttggtaaagtaaacaatataccttctcagtctactaggcatagcaccgttgctaccgagtgtctgtctaagaacacagaggagaatttattatcattgaagaatagcttaaatgactgcagtaaccaggtaatattggcaaaggcatctcaggaacatcaccttagtgaggaaacaaaatgttctgctagcttgttttcttcacagtgcagtgaattggaagacttgactgcaaatacaaacacccaggatcctttcttgattggttcttccaaacaaatgaggcatcagtctgaaagccagggagttggtctgagtgacaaggaattggtttcagatgatgaagaaagaggaacgggcttggaagaaaataatcaagaagagcaaagcatggattcaaacttaggtgaagcagcatctgggtgtgagagtgaaacaagcgtctctgaagactgctcagggctatcctctcagagtgacattttaaccactcagcagagggataccatgcaacataacctgataaagctccagcaggaaatggctgaactagaagctgtgttagaacagcatgggagccagccttctaacagctacccttccatcataagtgactcttctgcccttgaggacctgcgaaatccagaacaaagcacatcagaaaaagcagtattaacttcacagaaaagtagtgaataccctataagccagaatccagaaggcctttctgctgacaagtttgaggtgtctgcagatagttctaccagtaaaaataaagaaccaggagtggaaaggtcatccccttctaaatgcccatcattagatgataggtggtacatgcacagttgctctgggagtcttcagaatagaaactacccatctcaagaggagctcattaaggttgttgatgtggaggagcaacagctggaagagtctgggccacacgatttgacggaaacatcttacttgccaaggcaagatctagagggaaccccttacctggaatctggaatcagcctcttctctgatgaccctgaatctgatccttctgaagacagagccccagagtcagctcgtgttggcaacataccatcttcaacctctgcattgaaagttccccaattgaaagttgcagaatctgcccagagtccagctgctgctcatactactgatactgctgggtataatgcaatggaagaaagtgtgagcagggagaagccagaattgacagcttcaacagaaagggtcaacaaaagaatgtccatggtggtgtctggcctgaccccagaagaatttatgctcgtgtacaagtttgccagaaaacaccacatcactttaactaatctaattactgaagagactactcatgttgttatgaaaacagatgctgagtttgtgtgtgaacggacactgaaatattttctaggaattgcgggaggaaaatgggtagttagctatttctgggtgacccagtctattaaagaaagaaaaatgctgaatgagcatgattttgaagtcagaggagatgtggtcaatggaagaaaccaccaaggtccaaagcgagcaagagaatcccaggacagaaagatcttcagggggctagaaatctgttgctatgggcccttcaccaacatgcccacagatcaactggaatggatggtacagctgtgtggtgcttctgtggtgaaggagctttcatcattcacccttggcacaggtgtccacccaattgtggttgtgcagccagatgcctggacagaggacaatggcttccatgcaattgggcagatgtgtgaggcacctgtggtgacccgagagtgggtgttggacagtgtagcactctaccagtgccaggagctggacacctacctgataccccagatcccccacagccactac

SEQ ID NO: 5529 - DNA, 7926 bp, Homo sapiens
  source 1..7926: mol_type = genomic DNA
atgtctggcggcgccgcagagaagcagagcagcactcccggttccctgttcctctcgccgccggctcctgcccccaagaatggctccagctccgattcctccgtgggggagaaactgggagccgcggccgccgacgctgtgaccggcaggaccgaggagtacaggcgccgccgccacactatggacaaggacagccgtggggcggccgcgaccactaccaccactgagcaccgcttcttccgccggagcgtcatctgtgactccaatgccactgcactggagcttcccggccttcctctttccctgccccagcccagcatccccgcggctgtcccgcagagtgctccaccggagccccaccgggaagagaccgtgaccgccaccgccacttcccaggtagcccagcagcctccagccgctgccgcccctggggaacaggccgtcgcgggccctgccccctcgactgtccccagcagtaccagcaaagaccgcccagtgtcccagcctagccttgtggggagcaaagaggagccgccgccggcgagaagtggcagcggcggcggcagcgccaaggagccacaggaggaacggagccagcagcaggatgatatcgaagagctggagaccaaggccgtgggaatgtctaacgatggccgctttctcaagtttgacatcgaaatcggcagaggctcctttaagacggtctacaaaggtctggacactgaaaccaccgtggaagtcgcctggtgtgaactgcaggatcgaaaattaacaaagtctgagaggcagagatttaaagaagaagctgaaatgttaaaaggtcttcagcatcccaatattgttagattttatgattcctgggaatccacagtaaaaggaaagaagtgcattgttttggtgactgaacttatgacgtctggaacacttaaaacgtatctgaaaaggtttaaagtgatgaagatcaaagttctaagaagctggtgccgtcagatccttaaaggtcttcagtttcttcatactcgaactccacctatcattcaccgcgatcttaaatgtgacaacatctttatcaccggccctactggctcagtcaagattggagacctcggtctggcaaccctgaagcgggcttcttttgccaagagtgtgataggtaccccagagttcatggcccctgagatgtatgaggagaaatatgatgaatccgttgacgtttatgcttttgggatgtgcatgcttgagatggctacatctgaatatccttactcggagtgccaaaatgctgcacagatctaccgtcgcgtgaccagtggggtgaagccagccagttttgacaaagtagcaattcctgaagtgaaggaaattattgaaggatgcatacgacaaaacaaagatgaaagatattccatcaaagaccttttgaaccatgccttcttccaagaggaaacaggagtacgggtagaattagcagaagaagatgatggagaaaaaatagccataaaattatggctacgtattgaagatattaagaaattaaagggaaaatacaaagataatgaagctattgagttttcttttgatttagagagagatgtcccagaagatgttgcacaagaaatggtagagtctgggtatgtctgtgaaggtgatcacaagaccatggctaaagctatcaaagacagagtatcattaattaagaggaaacgagagcagcggcagttggtacgggaggagcaagaaaaaaaaaagcaggaagagagcagtctcaaacagcaggtagaacaatccagtgcttcccagacaggaatcaagcagctcccttctgctagcaccggcatacctactgcttctaccacttcagcttcagtttctacacaagtagaacctgaagaacctgaggcagatcaacatcaacaactacagtaccagcaacccagtatatctgtgttatctgatgggacggttgacagtggtcagggatcctctgtcttcacagaatctcgagtgagcagccaacagacagtttcatatggttcccaacatgaacaggcacattctacaggcacagtcccagggcatataccttctactgtccaagcacagtctcagccccatggggtatatccaccctcaagtgtgcctcagtccatggcgcatccgtgtggggggaccccaacatacccagaatcacagatatttttcccaactattcatgaacgtccagtttctttttcaccacctcccacctgcccaccgaaagtagccatttcccagcggcgtaagagcacctccttcctggaagcccaaactcaccacttccaacccctgctgaggactgttggccaaagtcttcttccacctggtggcagcccaactaactggacaccagaggccgtagttatgttgggtactacagccagtagagtaactggagagtcatgtgagatacaggtccatcctatgtttgaaccatctcaagtttacagtgactatagacctggactagtacttccagaagaagctcactattttattcctcaggaagcagtgtatgtagctggggtacattaccaggcccgggtggcagaacagtatgagggcattccatacaactcatcagtactgtcaagtcctatgaaacagatacctgaacagaagccagtacaagggggccctacttcaagttctgtctttgaatttccatctggacaggctttcctggtaggacaccttcagaatctaagattagattctggattgggtccgggatctcccctctctagtatttctgcacctatcagtacagatgctacacgtttgaaatttcaccctgtctttgttcctcattctgcgcctgctgtgttaactcataacaatgagagcagaagcaactgtgtatttgaatttcatgttcacacaccaagctcctcttcaggagaaggaggtggaattttacctcagcgtgtttaccgaaatcggcaggttgcagtggacttgaatcaagaagaactgcctcctcaatcagttggattacatggctacttgcagcctgtgactgaagaaaagcataattaccatgccccagaattgaccgtttctgtggtagagcctatcggacagaactggccaataggaagcccagaatattccagtgattcctcacaaatcacttcttcagaccccagtgattttcagtcacctccccctacagggggagcagctgcaccttttggctctgacgtctcaatgccctttatccatctgcctcagacagtgttacaagaatccccacttttcttctgtttcccccaaggaaccacatctcagcaggtcttaactgcctcattttcttcaggaggatctgcacttcatccacaggcacaggggcagagccagggtcagccatcctcaagtagcttaacaggggtttcatcttcccaacccatacaacatcctcagcagcagcagggaatacagcagacagcccctcctcaacagacagtgcagtattcactttcacagacatcaacctccagtgaggccactactgcacagccagtgagtcagcctcaagctccacaagtcttgcctcaagtatcagctggaaaacagggcttcccacctcgactgccaccacagtacccaggagattcaaatattgctccctcttccaacgtggcttctgtttgcatccattctacagtcctatcccctcccatgccgacagaagtactggctacacctgggtactttcccacagtggtgcagccttatgtggaatcaaatcttttagttcctatgggtggtgtaggaggacaggttcaagtgtcccagccaggagggagtttagcacaagcccccactacatcctcccagcaagcagttttggagagtactcagggagtctctcaggttgctcctgcagagccagttgcagtagcacagacccaagctacccagccgaccactttggcttcctctgtagacagtgcacattcagatgttgcttcaggtatgagtgatggcaatgagaacgtcccatcttccagtggaaggcatgaaggaagaactacaaaacggcattaccgaaaatctgtaaggagtcgctctcgacatgaaaaaacttcacgcccaaaattaagaattttgaatgtttcaaataaaggagaccgagtagtagaatgtcaattagagactcataataggaaaatggttacattcaaatttgacctagatggtgacaaccccgaggagatagcaacaattatggtgaacaatgactttattctagcaatagagagagagtcgtttgtggatcaagtgcgagaaattattgaaaaagctgatgaaatgctcagtgaggatgtcagtgtggaaccagagggtgatcagggattggagagtctacaaggaaaggatgactatggcttttcaggttctcagaaattggaaggagagttcaaacaaccaattcctgcgtcttccatgccacagcaaataggcattcctaccagttctttaactcaagttgttcattctgcgggaaggcggtttatagtgagtcctgtgccagaaagccgattacgagaatcaaaagttttccccagtgaaataacagatacagttgctgcctctacagctcagagccctggaatgaacttgtctcactctgcatcatcccttagtctacaacaggccttttctgaacttagacgtgcccaaatgacagaaggacccaacacagcacctccaaactttagtcatacaggaccaacatttccagtagtacctcctttcttaagtagcattgctggagtcccaaccacagcagcagccacagcaccagtccctgcaacaagcagccctcctaatgacatttccacatcagtaattcagtctgaggttacagtgcccactgaagaggggattgctggagttgccaccagcacaggtgtggtaacttcaggtggtctccccataccacctgtgtctgaatcaccagtactttccagcgtagtttcaagtatcacaatacctgcagttgtctcaatatctactacatccccgtcacttcaagtccccacatccacatctgagatcgttgtttctagtacagcactgtatccttcagtaacagtttcagcaacttcagcctctgcagggggcagtactgctaccccaggtcctaagcctccagctgtagtatctcagcaggcagcaggcagcactactgtgggagccacattaacatcagtttctaccaccacttcattcccaagcacagcttcacagctgtgcattcagcttagcagcagtacttctactcctactttagctgaaaccgtggtagttagcgcacactcactagataagacatctcatagcagtacaactggattggctttctccctctctgcaccatcttcctcttcctctcctggagcaggagtgtctagttatatttctcagcctggtgggctgcatcctttggtcattccatcagtgatagcttctactcctattcttccccaagcagcaggacctacttctacacctttattaccccaagtacctagtatcccacccttggtacagcctgttgccaatgtgcctgctgtacagcagacactaattcatagtcagcctcaaccagctttgcttcccaaccagccccatactcattgtcctgaagtagattctgatacacaacccaaagctcctggaattgatgacataaagactctagaagaaaagctgcggtctctgttcagtgaacacagctcatctggagctcagcatgcctctgtctcactggagacctcactagtcatagagagcactgtcacaccaggcatcccaactactgctgttgcaccaagcaaactcctgacttctaccacaagtacttgcttaccaccaaccaatttaccactaggaacagttgctttgccagttacaccagtggtcacacctgggcaagtttctaccccagtcagcactactacatcaggagtgaaacctggaactgctccctccaagccacctctaactaaggctccggtgctgccagtgggtactgaacttccagcaggtactctacccagcgagcagctgccaccttttccaggaccttctctaacccagtcccagcaacctctagaggatcttgatgctcaattgagaagaacacttagtccagagatgatcacagtgacttctgcggttggtcctgtgtccatggcggctccaacagcaatcacagaagcaggaacacagcctcagaagggtgtttctcaagtcaaagaaggccctgtcctagcaactagttcaggagctggtgtttttaagatgggacgatttcaggtttctgttgcagcagacggtgcccagaaagagggtaaaaataagtcagaagatgcaaagtctgttcattttgaatccagcacctcagagtcctcagtgctatcaagtagtagtccagagagtaccttggtgaaaccagagccgaatggcataaccatccctggtatctcttcagatgtgccagagagtgcccacaaaactactgcctcagaggcaaagtcagacactgggcagcctaccaaggttggacgttttcaggtgacaactacagcaaacaaagtgggtcgtttctctgtatcaaaaactgaggacaagatcactgacacaaagaaagaaggaccagtggcatctcctccttttatggatttggaacaagctgttcttcctgctgtgataccaaagaaagagaagcctgaactgtcagagccttcacatctaaatgggccgtcttctgacccggaggccgcttttttaagtagggatgtggatgatggttccggtagtccacactcgccccatcagctgagctcaaagagccttcctagccagaatctaagtcaaagccttagtaattcatttaactcctcttacatgagtagcgacaatgagtcagatatcgaagatgaagacttaaagttagagctgcgacgactacgagataaacatctcaaagagattcaggacctgcagagtcgccagaagcatgaaattgaatctttgtataccaaactgggcaaggtgccccctgctgttattattcccccagctgctcccctttcagggagaagacgacgacccactaaaagcaaaggcagcaaatctagtcgaagcagttccttggggaataaaagcccccagctttcaggtaacctgtctggtcagagtgcagcttcagtcttgcacccccagcagaccctccaccctcctggcaacatcccagagtccgggcagaatcagctgttacagccccttaagccatctccctccagtgacaacctctattcagccttcaccagtgatggtgccatttcagtaccaagcctttctgctccaggtcaaggaaccagcagcacaaacactgttggggcaacagtgaacagccaagccgcccaagctcagcctcctgccatgacgtccagcaggaagggcacattcacagatgacttgcacaagttggtagacaattgggcccgagatgccatgaatctctcaggcaggagaggaagcaaagggcacatgaattacgagggccctggaatggcaaggaagttctctgcacctgggcaactgtgcatctccatgacctcgaacctgggtggctctgcccccatctctgcagcatcagctacctctctaggtcacttcaccaagtctatgtgccccccacagcagtatggctttccagctaccccatttggcgctcaatggagtgggacgggtggcccagcaccacagccacttggccagttccaacctgtgggaactgcctccttgcagaatttcaacatcagcaatttgcagaaatccatcagcaaccccccaggctccaacctgcggaccact

SEQ ID NO: 5530 - DNA, 6402 bp, Homo sapiens
  source 1..6402: mol_type = genomic DNA
atgtctggcggcgccgcagagaagcagagcagcactcccggttccctgttcctctcgccgccggctcctgcccccaagaatggctccagctccgattcctccgtgggggagaaactgggagccgcggccgccgacgctgtgaccggcaggaccgaggagtacaggcgccgccgccacactatggacaaggacagccgtggggcggccgcgaccactaccaccactgagcaccgcttcttccgccggagcgtcatctgtgactccaatgccactgcactggagcttcccggccttcctctttccctgccccagcccagcatccccgcggctgtcccgcagagtgctccaccggagccccaccgggaagagaccgtgaccgccaccgccacttcccaggtagcccagcagcctccagccgctgccgcccctggggaacaggccgtcgcgggccctgccccctcgactgtccccagcagtaccagcaaagaccgcccagtgtcccagcctagccttgtggggagcaaagaggagccgccgccggcgagaagtggcagcggcggcggcagcgccaaggagccacaggaggaacggagccagcagcaggatgatatcgaagagctggagaccaaggccgtgggaatgtctaacgatggccgctttctcaagtttgacatcgaaatcggcagaggctcctttaagacggtctacaaaggtctggacactgaaaccaccgtggaagtcgcctggtgtgaactgcaggatcgaaaattaacaaagtctgagaggcagagatttaaagaagaagctgaaatgttaaaaggtcttcagcatcccaatattgttagattttatgattcctgggaatccacagtaaaaggaaagaagtgcattgttttggtgactgaacttatgacgtctggaacacttaaaacgtatctgaaaaggtttaaagtgatgaagatcaaagttctaagaagctggtgccgtcagatccttaaaggtcttcagtttcttcatactcgaactccacctatcattcaccgcgatcttaaatgtgacaacatctttatcaccggccctactggctcagtcaagattggagacctcggtctggcaaccctgaagcgggcttcttttgccaagagtgtgataggtaccccagagttcatggcccctgagatgtatgaggagaaatatgatgaatccgttgacgtttatgcttttgggatgtgcatgcttgagatggctacatctgaatatccttactcggagtgccaaaatgctgcacagatctaccgtcgcgtgaccagtggggtgaagccagccagttttgacaaagtagcaattcctgaagtgaaggaaattattgaaggatgcatacgacaaaacaaagatgaaagatattccatcaaagaccttttgaaccatgccttcttccaagaggaaacaggagtacgggtagaattagcagaagaagatgatggagaaaaaatagccataaaattatggctacgtattgaagatattaagaaattaaagggaaaatacaaagataatgaagctattgagttttcttttgatttagagagagatgtcccagaagatgttgcacaagaaatggtagagtctgggtatgtctgtgaaggtgatcacaagaccatggctaaagctatcaaagacagagtatcattaattaagaggaaacgagagcagcggcagttggtacgggaggagcaagaaaaaaaaaagcaggaagagagcagtctcaaacagcaggtagaacaatccagtgcttcccagacaggaatcaagcagctcccttctgctagcaccggcatacctactgcttctaccacttcagcttcagtttctacacaagtagaacctgaagaacctgaggcagatcaacatcaacaactacagtaccagcaacccagtatatctgtgttatctgatgggacggttgacagtggtcagggatcctctgtcttcacagaatctcgagtgagcagccaacagacagtttcatatggttcccaacatgaacaggcacattctacaggcacagtcccagggcatataccttctactgtccaagcacagtctcagccccatggggtatatccaccctcaagtgtggcacaggggcagagccagggtcagccatcctcaagtagcttaacaggggtttcatcttcccaacccatacaacatcctcagcagcagggaatacagcagacagcccctcctcaacagacagtgcagtattcactttcacagacatcaacctccagtgaggccactactgcacagccagtgagtcagcctcaagctccacaagtcttgcctcaagtatcagctggaaaacagagtactcagggagtctctcaggttgctcctgcagagccagttgcagtagcacagacccaagctacccagccgaccactttggcttcctctgtagacagtgcacattcagatgttgcttcaggtatgagtgatggcaatgagaacgtcccatcttccagtggaaggcatgaaggaagaactacaaaacggcattaccgaaaatctgtaaggagtcgctctcgacatgaaaaaacttcacgcccaaaattaagaattttgaatgtttcaaataaaggagaccgagtagtagaatgtcaattagagactcataataggaaaatggttacattcaaatttgacctagatggtgacaaccccgaggagatagcaacaattatggtgaacaatgactttattctagcaatagagagagagtcgtttgtggatcaagtgcgagaaattattgaaaaagctgatgaaatgctcagtgaggatgtcagtgtggaaccagagggtgatcagggattggagagtctacaaggaaaggatgactatggcttttcaggttctcagaaattggaaggagagttcaaacaaccaattcctgcgtcttccatgccacagcaaataggcattcctaccagttctttaactcaagttgttcattctgcgggaaggcggtttatagtgagtcctgtgccagaaagccgattacgagaatcaaaagttttccccagtgaaataacagatacagttgctgcctctacagctcagagccctggaatgaacttgtctcactctgcatcatcccttagtctacaacaggccttttctgaacttagacgtgcccaaatgacagaaggacccaacacagcacctccaaactttagtcatacaggaccaacatttccagtagtacctcctttcttaagtagcattgctggagtcccaaccacagcagcagccacagcaccagtccctgcaacaagcagccctcctaatgacatttccacatcagtaattcagtctgaggttacagtgcccactgaagaggggattgctggagttgccaccagcacaggtgtggtaacttcaggtggtctccccataccacctgtgtctgaatcaccagtactttccagcgtagtttcaagtatcacaatacctgcagttgtctcaatatctactacatccccgtcacttcaagtccccacatccacatctgagatcgttgtttctagtacagcactgtatccttcagtaacagtttcagcaacttcagcctctgcagggggcagtactgctaccccaggtcctaagcctccagctgtagtatctcagcaggcagcaggcagcactactgtgggagccacattaacatcagtttctaccaccacttcattcccaagcacagcttcacagctgtgcattcagcttagcagcagtacttctactcctactttagctgaaaccgtggtagttagcgcacactcactagataagacatctcatagcagtacaactggattggctttctccctctctgcaccatcttcctcttcctctcctggagcaggagtgtctagttatatttctcagcctggtgggctgcatcctttggtcattccatcagtgatagcttctactcctattcttccccaagcagcaggacctacttctacacctttattaccccaagtacctagtatcccacccttggtacagcctgttgccaatgtgcctgctgtacagcagacactaattcatagtcagcctcaaccagctttgcttcccaaccagccccatactcattgtcctgaagtagattctgatacacaacccaaagctcctggaattgatgacataaagactctagaagaaaagctgcggtctctgttcagtgaacacagctcatctggagctcagcatgcctctgtctcactggagacctcactagtcatagagagcactgtcacaccaggcatcccaactactgctgttgcaccaagcaaactcctgacttctaccacaagtacttgcttaccaccaaccaatttaccactaggaacagttgctttgccagttacaccagtggtcacacctgggcaagtttctaccccagtcagcactactacatcaggagtgaaacctggaactgctccctccaagccacctctaactaaggctccggtgctgccagtgggtactgaacttccagcaggtactctacccagcgagcagctgccaccttttccaggaccttctctaacccagtcccagcaacctctagaggatcttgatgctcaattgagaagaacacttagtccagagatgatcacagtgacttctgcggttggtcctgtgtccatggcggctccaacagcaatcacagaagcaggaacacagcctcagaaggtttctcaagtcaaagaaggccctgtcctagcaactagttcaggagctggtgtttttaagatgggacgatttcaggtttctgttgcagcagacggtgcccagaaagagggtaaaaataagtcagaagatgcaaagtctgttcattttgaatccagcacctcagagtcctcagtgctatcaagtagtagtccagagagtaccttggtgaaaccagagccgaatggcataaccatccctggtatctcttcagatgtgccagagagtgcccacaaaactactgcctcagaggcaaagtcagacactgggcagcctaccaaggttggacgttttcaggtgacaactacagcaaacaaagtgggtcgtttctctgtatcaaaaactgaggacaagatcactgacacaaagaaagaaggaccagtggcatctcctccttttatggatttggaacaagctgttcttcctgctgtgataccaaagaaagagaagcctgaactgtcagagccttcacatctaaatgggccgtcttctgacccggaggccgcttttttaagtagggatgtggatgatggttccggtagtccacactcgccccatcagctgagctcaaagagccttcctagccagaatctaagtcaaagccttagtaattcatttaactcctcttacatgagtagcgacaatgagtcagatatcgaagatgaagacttaaagttagagctgcgacgactacgagataaacatctcaaagagattcaggacctgcagagtcgccagaagcatgaaattgaatctttgtataccaaactgggcaaggtgccccctgctgttattattcccccagctgctcccctttcagggagaagacgacgacccactaaaagcaaaggcagcaaatctagtcgaagcagttccttggggaataaaagcccccagctttcaggtaacctgtctggtcagagtgcagcttcagtcttgcacccccagcagaccctccaccctcctggcaacatcccagagtccgggcagaatcagctgttacagccccttaagccatctccctccagtgacaacctctattcagccttcaccagtgatggtgccatttcagtaccaagcctttctgctccaggtcaaggaaccagcagcacaaacactgttggggcaacagtgaacagccaagccgcccaagctcagcctcctgccatgacgtccagcaggaagggcacattcacagatgacttgcacaagttggtagacaattgggcccgagatgccatgaatctctcaggcaggagaggaagcaaagggcacatgaattacgagggccctggaatggcaaggaagttctctgcacctgggcaactgtgcatctccatgacctcgaacctgggtggctctgcccccatctctgcagcatcagctacctctctaggtcacttcaccaagtctatgtgccccccacagcagtatggctttccagctaccccatttggcgctcaatggagtgggacgggtggcccagcaccacagccacttggccagttccaacctgtgggaactgcctccttgcagaatttcaacatcagcaatttgcagaaatccatcagcaaccccccaggctccaacctgcggaccact

SEQ ID NO: 5531 - DNA, 7146 bp, Homo sapiens
  source 1..7146: mol_type = genomic DNA
atgtctggcggcgccgcagagaagcagagcagcactcccggttccctgttcctctcgccgccggctcctgcccccaagaatggctccagctccgattcctccgtgggggagaaactgggagccgcggccgccgacgctgtgaccggcaggaccgaggagtacaggcgccgccgccacactatggacaaggacagccgtggggcggccgcgaccactaccaccactgagcaccgcttcttccgccggagcgtcatctgtgactccaatgccactgcactggagcttcccggccttcctctttccctgccccagcccagcatccccgcggctgtcccgcagagtgctccaccggagccccaccgggaagagaccgtgaccgccaccgccacttcccaggtagcccagcagcctccagccgctgccgcccctggggaacaggccgtcgcgggccctgccccctcgactgtccccagcagtaccagcaaagaccgcccagtgtcccagcctagccttgtggggagcaaagaggagccgccgccggcgagaagtggcagcggcggcggcagcgccaaggagccacaggaggaacggagccagcagcaggatgatatcgaagagctggagaccaaggccgtgggaatgtctaacgatggccgctttctcaagtttgacatcgaaatcggcagaggctcctttaagacggtctacaaaggtctggacactgaaaccaccgtggaagtcgcctggtgtgaactgcaggatcgaaaattaacaaagtctgagaggcagagatttaaagaagaagctgaaatgttaaaaggtcttcagcatcccaatattgttagattttatgattcctgggaatccacagtaaaaggaaagaagtgcattgttttggtgactgaacttatgacgtctggaacacttaaaacgtatctgaaaaggtttaaagtgatgaagatcaaagttctaagaagctggtgccgtcagatccttaaaggtcttcagtttcttcatactcgaactccacctatcattcaccgcgatcttaaatgtgacaacatctttatcaccggccctactggctcagtcaagattggagacctcggtctggcaaccctgaagcgggcttcttttgccaagagtgtgataggtaccccagagttcatggcccctgagatgtatgaggagaaatatgatgaatccgttgacgtttatgcttttgggatgtgcatgcttgagatggctacatctgaatatccttactcggagtgccaaaatgctgcacagatctaccgtcgcgtgaccagtggggtgaagccagccagttttgacaaagtagcaattcctgaagtgaaggaaattattgaaggatgcatacgacaaaacaaagatgaaagatattccatcaaagaccttttgaaccatgccttcttccaagaggaaacaggagtacgggtagaattagcagaagaagatgatggagaaaaaatagccataaaattatggctacgtattgaagatattaagaaattaaagggaaaatacaaagataatgaagctattgagttttcttttgatttagagagagatgtcccagaagatgttgcacaagaaatggtagagtctgggtatgtctgtgaaggtgatcacaagaccatggctaaagctatcaaagacagagtatcattaattaagaggaaacgagagcagcggcagttggtacgggaggagcaagaaaaaaaaaagcaggaagagagcagtctcaaacagcaggtagaacaatccagtgcttcccagacaggaatcaagcagctcccttctgctagcaccggcatacctactgcttctaccacttcagcttcagtttctacacaagtagaacctgaagaacctgaggcagatcaacatcaacaactacagtaccagcaacccagtatatctgtgttatctgatgggacggttgacagtggtcagggatcctctgtcttcacagaatctcgagtgagcagccaacagacagtttcatatggttcccaacatgaacaggcacattctacaggcacagtcccagggcatataccttctactgtccaagcacagtctcagccccatggggtatatccaccctcaagtgtggcacaggggcagagccagggtcagccatcctcaagtagcttaacaggggtttcatcttcccaacccatacaacatcctcagcagcagcagggaatacagcagacagcccctcctcaacagacagtgcagtattcactttcacagacatcaacctccagtgaggccactactgcacagccagtgagtcagcctcaagctccacaagtcttgcctcaagtatcagctggaaaacagcttccagtttcccagccagtaccaactatccaaggcgaacctcagatcccagttgcgacacaaccctcggttgttccagtccactctggtgctcatttccttccagtgggacagccgctccctactcccttgctccctcagtaccctgtctctcagattcccatatcaactcctcatgtgtctacggctcagacaggtttctcatcccttcccatcacaatggcagctggcattactcagcctctgctcacgttggcttcatctgctacaacagctgcgatcccgggggtatcaactgtggttcctagtcagcttccaacccttctgcagcctgtgactcagctgccaagtcaggttcacccacagctcctacaaccagcagttcagtccatgggaataccagctaaccttggacaagctgctgaggttccactttcctctggagatgttctgtaccagggcttcccacctcgactgccaccacagtacccaggagattcaaatattgctccctcttccaacgtggcttctgtttgcatccattctacagtcctatcccctcccatgccgacagaagtactggctacacctgggtactttcccacagtggtgcagccttatgtggaatcaaatcttttagttcctatgggtggtgtaggaggacaggttcaagtgtcccagccaggagggagtttagcacaagcccccactacatcctcccagcaagcagttttggagagtactcagggagtctctcaggttgctcctgcagagccagttgcagtagcacagacccaagctacccagccgaccactttggcttcctctgtagacagtgcacattcagatgttgcttcaggtatgagtgatggcaatgagaacgtcccatcttccagtggaaggcatgaaggaagaactacaaaacggcattaccgaaaatctgtaaggagtcgctctcgacatgaaaaaacttcacgcccaaaattaagaattttgaatgtttcaaataaaggagaccgagtagtagaatgtcaattagagactcataataggaaaatggttacattcaaatttgacctagatggtgacaaccccgaggagatagcaacaattatggtgaacaatgactttattctagcaatagagagagagtcgtttgtggatcaagtgcgagaaattattgaaaaagctgatgaaatgctcagtgaggatgtcagtgtggaaccagagggtgatcagggattggagagtctacaaggaaaggatgactatggcttttcaggttctcagaaattggaaggagagttcaaacaaccaattcctgcgtcttccatgccacagcaaataggcattcctaccagttctttaactcaagttgttcattctgcgggaaggcggtttatagtgagtcctgtgccagaaagccgattacgagaatcaaaagttttccccagtgaaataacagatacagttgctgcctctacagctcagagccctggaatgaacttgtctcactctgcatcatcccttagtctacaacaggccttttctgaacttagacgtgcccaaatgacagaaggacccaacacagcacctccaaactttagtcatacaggaccaacatttccagtagtacctcctttcttaagtagcattgctggagtcccaaccacagcagcagccacagcaccagtccctgcaacaagcagccctcctaatgacatttccacatcagtaattcagtctgaggttacagtgcccactgaagaggggattgctggagttgccaccagcacaggtgtggtaacttcaggtggtctccccataccacctgtgtctgaatcaccagtactttccagcgtagtttcaagtatcacaatacctgcagttgtctcaatatctactacatccccgtcacttcaagtccccacatccacatctgagatcgttgtttctagtacagcactgtatccttcagtaacagtttcagcaacttcagcctctgcagggggcagtactgctaccccaggtcctaagcctccagctgtagtatctcagcaggcagcaggcagcactactgtgggagccacattaacatcagtttctaccaccacttcattcccaagcacagcttcacagctgtgcattcagcttagcagcagtacttctactcctactttagctgaaaccgtggtagttagcgcacactcactagataagacatctcatagcagtacaactggattggctttctccctctctgcaccatcttcctcttcctctcctggagcaggagtgtctagttatatttctcagcctggtgggctgcatcctttggtcattccatcagtgatagcttctactcctattcttccccaagcagcaggacctacttctacacctttattaccccaagtacctagtatcccacccttggtacagcctgttgccaatgtgcctgctgtacagcagacactaattcatagtcagcctcaaccagctttgcttcccaaccagccccatactcattgtcctgaagtagattctgatacacaacccaaagctcctggaattgatgacataaagactctagaagaaaagctgcggtctctgttcagtgaacacagctcatctggagctcagcatgcctctgtctcactggagacctcactagtcatagagagcactgtcacaccaggcatcccaactactgctgttgcaccaagcaaactcctgacttctaccacaagtacttgcttaccaccaaccaatttaccactaggaacagttgctttgccagttacaccagtggtcacacctgggcaagtttctaccccagtcagcactactacatcaggagtgaaacctggaactgctccctccaagccacctctaactaaggctccggtgctgccagtgggtactgaacttccagcaggtactctacccagcgagcagctgccaccttttccaggaccttctctaacccagtcccagcaacctctagaggatcttgatgctcaattgagaagaacacttagtccagagatgatcacagtgacttctgcggttggtcctgtgtccatggcggctccaacagcaatcacagaagcaggaacacagcctcagaagggtgtttctcaagtcaaagaaggccctgtcctagcaactagttcaggagctggtgtttttaagatgggacgatttcaggtttctgttgcagcagacggtgcccagaaagagggtaaaaataagtcagaagatgcaaagtctgttcattttgaatccagcacctcagagtcctcagtgctatcaagtagtagtccagagagtaccttggtgaaaccagagccgaatggcataaccatccctggtatctcttcagatgtgccagagagtgcccacaaaactactgcctcagaggcaaagtcagacactgggcagcctaccaaggttggacgttttcaggtgacaactacagcaaacaaagtgggtcgtttctctgtatcaaaaactgaggacaagatcactgacacaaagaaagaaggaccagtggcatctcctccttttatggatttggaacaagctgttcttcctgctgtgataccaaagaaagagaagcctgaactgtcagagccttcacatctaaatgggccgtcttctgacccggaggccgcttttttaagtagggatgtggatgatggttccggtagtccacactcgccccatcagctgagctcaaagagccttcctagccagaatctaagtcaaagccttagtaattcatttaactcctcttacatgagtagcgacaatgagtcagatatcgaagatgaagacttaaagttagagctgcgacgactacgagataaacatctcaaagagattcaggacctgcagagtcgccagaagcatgaaattgaatctttgtataccaaactgggcaaggtgccccctgctgttattattcccccagctgctcccctttcagggagaagacgacgacccactaaaagcaaaggcagcaaatctagtcgaagcagttccttggggaataaaagcccccagctttcaggtaacctgtctggtcagagtgcagcttcagtcttgcacccccagcagaccctccaccctcctggcaacatcccagagtccgggcagaatcagctgttacagccccttaagccatctccctccagtgacaacctctattcagccttcaccagtgatggtgccatttcagtaccaagcctttctgctccaggtcaaggaaccagcagcacaaacactgttggggcaacagtgaacagccaagccgcccaagctcagcctcctgccatgacgtccagcaggaagggcacattcacagatgacttgcacaagttggtagacaattgggcccgagatgccatgaatctctcaggcaggagaggaagcaaagggcacatgaattacgagggccctggaatggcaaggaagttctctgcacctgggcaactgtgcatctccatgacctcgaacctgggtggctctgcccccatctctgcagcatcagctacctctctaggtcacttcaccaagtctatgtgccccccacagcagtatggctttccagctaccccatttggcgctcaatggagtgggacgggtggcccagcaccacagccacttggccagttccaacctgtgggaactgcctccttgcagaatttcaacatcagcaatttgcagaaatccatcagcaaccccccaggctccaacctgcggaccact

SEQ ID NO: 5532 - DNA, 7902 bp, Homo sapiens
  source 1..7902: mol_type = genomic DNA
atgtctggcggcgccgcagagaagcagagcagcactcccggttccctgttcctctcgccgccggctcctgcccccaagaatggctccagctccgattcctccgtgggggagaaactgggagccgcggccgccgacgctgtgaccggcaggaccgaggagtacaggcgccgccgccacactatggacaaggacagccgtggggcggccgcgaccactaccaccactgagcaccgcttcttccgccggagcgtcatctgtgactccaatgccactgcactggagcttcccggccttcctctttccctgccccagcccagcatccccgcggctgtcccgcagagtgctccaccggagccccaccgggaagagaccgtgaccgccaccgccacttcccaggtagcccagcagcctccagccgctgccgcccctggggaacaggccgtcgcgggccctgccccctcgactgtccccagcagtaccagcaaagaccgcccagtgtcccagcctagccttgtggggagcaaagaggagccgccgccggcgagaagtggcagcggcggcggcagcgccaaggagccacaggaggaacggagccagcagcaggatgatatcgaagagctggagaccaaggccgtgggaatgtctaacgatggccgctttctcaagtttgacatcgaaatcggcagaggctcctttaagacggtctacaaaggtctggacactgaaaccaccgtggaagtcgcctggtgtgaactgcaggatcgaaaattaacaaagtctgagaggcagagatttaaagaagaagctgaaatgttaaaaggtcttcagcatcccaatattgttagattttatgattcctgggaatccacagtaaaaggaaagaagtgcattgttttggtgactgaacttatgacgtctggaacacttaaaacgtatctgaaaaggtttaaagtgatgaagatcaaagttctaagaagctggtgccgtcagatccttaaaggtcttcagtttcttcatactcgaactccacctatcattcaccgcgatcttaaatgtgacaacatctttatcaccggccctactggctcagtcaagattggagacctcggtctggcaaccctgaagcgggcttcttttgccaagagtgtgataggtaccccagagttcatggcccctgagatgtatgaggagaaatatgatgaatccgttgacgtttatgcttttgggatgtgcatgcttgagatggctacatctgaatatccttactcggagtgccaaaatgctgcacagatctaccgtcgcgtgaccagtggggtgaagccagccagttttgacaaagtagcaattcctgaagtgaaggaaattattgaaggatgcatacgacaaaacaaagatgaaagatattccatcaaagaccttttgaaccatgccttcttccaagaggaaacaggagtacgggtagaattagcagaagaagatgatggagaaaaaatagccataaaattatggctacgtattgaagatattaagaaattaaagggaaaatacaaagataatgaagctattgagttttcttttgatttagagagagatgtcccagaagatgttgcacaagaaatggtagagtctgggtatgtctgtgaaggtgatcacaagaccatggctaaagctatcaaagacagagtatcattaattaagaggaaacgagagcagcggcagttggtacgggaggagcaagaaaaaaaaaagcaggaagagagcagtctcaaacagcaggtagaacaatccagtgcttcccagacaggaatcaagcagctcccttctgctagcaccggcatacctactgcttctaccacttcagcttcagtttctacacaagtagaacctgaagaacctgaggcagatcaacatcaacaactacagtaccagcaacccagtatatctgtgttatctgatgggacggttgacagtggtcagggatcctctgtcttcacagaatctcgagtgagcagccaacagacagtttcatatggttcccaacatgaacaggcacattctacaggcacagtcccagggcatataccttctactgtccaagcacagtctcagccccatggggtatatccaccctcaagtgtgcctcgtcgtggccgtagcatgtcggtttgtgttcccatctttctgctgttgcctctgtgtcccgcatctctcccagtgctcttccaccccaccgccagtactgtctgcacctctttctccttccctcctccggactgccccgaggaaacttttgccgaaaagctttctaaagcattggagagtgtcctgcctatgcactctgcctctcagcgcaagcaccgacgctccagcctgccttccctctttgtcagtactcctcagtccatggcgcatccgtgtggggggaccccaacatacccagaatcacagatatttttcccaactattcatgaacgtccagtttctttttcaccacctcccacctgcccaccgaaagtagccatttcccagcggcgtaagagcacctccttcctggaagcccaaactcaccacttccaacccctgctgaggactgttggccaaagtcttcttccacctggtggcagcccaactaactggacaccagaggccgtagttatgttgggtactacagccagtagagtaactggagagtcatgtgagatacaggtccatcctatgtttgaaccatctcaagtttacagtgactatagacctggactagtacttccagaagaagctcactattttattcctcaggaagcagtgtatgtagctggggtacattaccaggcccgggtggcagaacagtatgagggcattccatacaactcatcagtactgtcaagtcctatgaaacagatacctgaacagaagccagtacaagggggccctacttcaagttctgtctttgaatttccatctggacaggctttcctggtaggacaccttcagaatctaagattagattctggattgggtccgggatctcccctctctagtatttctgcacctatcagtacagatgctacacgtttgaaatttcaccctgtctttgttcctcattctgcgcctgctgtgttaactcataacaatgagagcagaagcaactgtgtatttgaatttcatgttcacacaccaagctcctcttcaggagaaggaggtggaattttacctcagcgtgtttaccgaaatcggcaggttgcagtggacttgaatcaagaagaactgcctcctcaatcagttggattacatggctacttgcagcctgtgactgaagaaaagcataattaccatgccccagaattgaccgtttctgtggtagagcctatcggacagaactggccaataggaagcccagaatattccagtgattcctcacaaatcacttcttcagaccccagtgattttcagtcacctccccctacagggggagcagctgcaccttttggctctgacgtctcaatgccctttatccatctgcctcagacagtgttacaagaatccccacttttcttctgtttcccccaaggaaccacatctcagcaggtcttaactgcctcattttcttcaggaggatctgcacttcatccacaggcacaggggcagagccagggtcagccatcctcaagtagcttaacaggggtttcatcttcccaacccatacaacatcctcagcagcagcagggaatacagcagacagcccctcctcaacagacagtgcagtattcactttcacagacatcaacctccagtgaggccactactgcacagccagtgagtcagcctcaagctccacaagtcttgcctcaagtatcagctggaaaacagagtactcagggagtctctcaggttgctcctgcagagccagttgcagtagcacagacccaagctacccagccgaccactttggcttcctctgtagacagtgcacattcagatgttgcttcaggtatgagtgatggcaatgagaacgtcccatcttccagtggaaggcatgaaggaagaactacaaaacggcattaccgaaaatctgtaaggagtcgctctcgacatgaaaaaacttcacgcccaaaattaagaattttgaatgtttcaaataaaggagaccgagtagtagaatgtcaattagagactcataataggaaaatggttacattcaaatttgacctagatggtgacaaccccgaggagatagcaacaattatggtgaacaatgactttattctagcaatagagagagagtcgtttgtggatcaagtgcgagaaattattgaaaaagctgatgaaatgctcagtgaggatgtcagtgtggaaccagagggtgatcagggattggagagtctacaaggaaaggatgactatggcttttcaggttctcagaaattggaaggagagttcaaacaaccaattcctgcgtcttccatgccacagcaaataggcattcctaccagttctttaactcaagttgttcattctgcgggaaggcggtttatagtgagtcctgtgccagaaagccgattacgagaatcaaaagttttccccagtgaaataacagatacagttgctgcctctacagctcagagccctggaatgaacttgtctcactctgcatcatcccttagtctacaacaggccttttctgaacttagacgtgcccaaatgacagaaggacccaacacagcacctccaaactttagtcatacaggaccaacatttccagtagtacctcctttcttaagtagcattgctggagtcccaaccacagcagcagccacagcaccagtccctgcaacaagcagccctcctaatgacatttccacatcagtaattcagtctgaggttacagtgcccactgaagaggggattgctggagttgccaccagcacaggtgtggtaacttcaggtggtctccccataccacctgtgtctgaatcaccagtactttccagcgtagtttcaagtatcacaatacctgcagttgtctcaatatctactacatccccgtcacttcaagtccccacatccacatctgagatcgttgtttctagtacagcactgtatccttcagtaacagtttcagcaacttcagcctctgcagggggcagtactgctaccccaggtcctaagcctccagctgtagtatctcagcaggcagcaggcagcactactgtgggagccacattaacatcagtttctaccaccacttcattcccaagcacagcttcacagctgtgcattcagcttagcagcagtacttctactcctactttagctgaaaccgtggtagttagcgcacactcactagataagacatctcatagcagtacaactggattggctttctccctctctgcaccatcttcctcttcctctcctggagcaggagtgtctagttatatttctcagcctggtgggctgcatcctttggtcattccatcagtgatagcttctactcctattcttccccaagcagcaggacctacttctacacctttattaccccaagtacctagtatcccacccttggtacagcctgttgccaatgtgcctgctgtacagcagacactaattcatagtcagcctcaaccagctttgcttcccaaccagccccatactcattgtcctgaagtagattctgatacacaacccaaagctcctggaattgatgacataaagactctagaagaaaagctgcggtctctgttcagtgaacacagctcatctggagctcagcatgcctctgtctcactggagacctcactagtcatagagagcactgtcacaccaggcatcccaactactgctgttgcaccaagcaaactcctgacttctaccacaagtacttgcttaccaccaaccaatttaccactaggaacagttgctttgccagttacaccagtggtcacacctgggcaagtttctaccccagtcagcactactacatcaggagtgaaacctggaactgctccctccaagccacctctaactaaggctccggtgctgccagtgggtactgaacttccagcaggtactctacccagcgagcagctgccaccttttccaggaccttctctaacccagtcccagcaacctctagaggatcttgatgctcaattgagaagaacacttagtccagagatgatcacagtgacttctgcggttggtcctgtgtccatggcggctccaacagcaatcacagaagcaggaacacagcctcagaagggtgtttctcaagtcaaagaaggccctgtcctagcaactagttcaggagctggtgtttttaagatgggacgatttcaggtttctgttgcagcagacggtgcccagaaagagggtaaaaataagtcagaagatgcaaagtctgttcattttgaatccagcacctcagagtcctcagtgctatcaagtagtagtccagagagtaccttggtgaaaccagagccgaatggcataaccatccctggtatctcttcagatgtgccagagagtgcccacaaaactactgcctcagaggcaaagtcagacactgggcagcctaccaaggttggacgttttcaggtgacaactacagcaaacaaagtgggtcgtttctctgtatcaaaaactgaggacaagatcactgacacaaagaaagaaggaccagtggcatctcctccttttatggatttggaacaagctgttcttcctgctgtgataccaaagaaagagaagcctgaactgtcagagccttcacatctaaatgggccgtcttctgacccggaggccgcttttttaagtagggatgtggatgatggttccggtagtccacactcgccccatcagctgagctcaaagagccttcctagccagaatctaagtcaaagccttagtaattcatttaactcctcttacatgagtagcgacaatgagtcagatatcgaagatgaagacttaaagttagagctgcgacgactacgagataaacatctcaaagagattcaggacctgcagagtcgccagaagcatgaaattgaatctttgtataccaaactgggcaaggtgccccctgctgttattattcccccagctgctcccctttcagggagaagacgacgacccactaaaagcaaaggcagcaaatctagtcgaagcagttccttggggaataaaagcccccagctttcaggtaacctgtctggtcagagtgcagcttcagtcttgcacccccagcagaccctccaccctcctggcaacatcccagagtccgggcagaatcagctgttacagccccttaagccatctccctccagtgacaacctctattcagccttcaccagtgatggtgccatttcagtaccaagcctttctgctccaggtcaaggaaccagcagcacaaacactgttggggcaacagtgaacagccaagccgcccaagctcagcctcctgccatgacgtccagcaggaagggcacattcacagatgacttgcacaagttggtagacaattgggcccgagatgccatgaatctctcaggcaggagaggaagcaaagggcacatgaattacgagggccctggaatggcaaggaagttctctgcacctgggcaactgtgcatctccatgacctcgaacctgggtggctctgcccccatctctgcagcatcagctacctctctaggtcacttcaccaagtctatgtgccccccacagcagtatggctttccagctaccccatttggcgctcaatggagtgggacgggtggcccagcaccacagccacttggccagttccaacctgtgggaactgcctccttgcagaatttcaacatcagcaatttgcagaaatccatcagcaaccccccaggctccaacctgcggaccact

SEQ ID NO: 5533 - DNA, 2103 bp, Homo sapiens
  source 1..2103: mol_type = genomic DNA
atgccgaggacgatgatcccgccgggggagtgcacgtacgcgggccggaagcggaggaggcccctgcagaaacagaggcccgccgtgggggcagagaagtccaacccctccaagcgacaccgggaccgcctcaacgccgagttggaccacctggccagcctgctgccgttcccgcctgacatcatctccaagctggacaagctttctgtcctgcgcctcagtgtcagttacctccgggtgaagagcttcttccaagtcgtgcaggagcagagctcacggcagcctgcggccggcgccccctcgcccggagacagctgtcctcttgcagggtctgccgtgctggagggaaggctgctgttggagtctcttaatggctttgctctggtcgtgagtgcagaagggacgatattttatgcatcagcaacgatcgtggactatctgggcttccatcagacggatgtaatgcaccagaacatttatgactacatccacgtggacgaccgccaggacttctgccggcagctccactgggccatggaccctccccaggtggtgtttgggcagcccccgcccttggagacaggagatgatgctatcctggggaggctgctcagggcccaggagtggggcacaggcacgcccaccgagtactcggccttcctgacccgctgcttcatctgccgtgtgcgctgcctgctggacagcacctcgggcttcctgacgatgcagtttcaaggaaaactaaaattcctgtttggacagaagaagaaggcgccgtcaggagccatgctcccgccgcggctgtcgctgttctgcattgcggcacccgttctcctcccctccgcagcggagatgaaaatgaggagcgcgctcctgagggcaaaacccagagcagacaccgcagccaccgcggatgcaaaagtaaaagccaccaccagtctgtgcgaatcggaactgcatggaaaacccaattactcagcaggaaggagcagcagagagagcggcgttttggtgctcagggaacagactgacgctggccgatgggcacaggttcccgccagggccccatgcctgtgcctccggggtggccctgaccttgtccttgaccccaaggggggctcaggggacagggaggaggagcagcacaggatgctgagcagggcctctggagtgacagggcggagggagactccaggacccacaaagcccctgccctggacagcgggaaagcacagtgaggatggtgccaggccgaggctgcagcccagcaagaatgacccgccctccctgcgccccatgccccgcggctcctgcctgccctgcccgtgtgtccagggcactttcaggaactcgcccatctctcacccgccgagcccgtcccccagtgcctactccagccggaccagcagacccatgcgggatgtcggtgaggaccaggtgcaccctcccctctgccactttccccagaggagcctgcagcaccagctccctcagcctggagctcagcgttttgccacgaggggctatcccatggaggacatgaagctgcaaggtgtaccgatgcctccgggggacctgtgtggtccgacgctgctgctagatgtgtccatcaagatggagaaggactctgggtgtgagggtgctgcagacggctgtgtgcccagccaggtgtggctgggggccagtgacaggagccacccagccaccttccctaccaggatgcacctgaaaacagagccagactctcggcaacaggtgtacatctcgcacctggggcacggcgtgcggggggctcagccccatgggagggccactgctgggcgcagcagggagctgacccctttccaccctgcacactgtgcctgcctggagcccacagacggccttccccagtcggagcctccccaccagctctgtgcacggggccgaggtgaacagtcctgcacctgcagagctgctgaggccgcccctgtggtcaagcgggagcccttggactcaccccagtgggctactcacagccagggaatggtgcccgggatgttgcccaaaagtgccttggccacgctggtcccgccccaagcttcggggtgcacattcctgcca

SEQ ID NO: 5534 - DNA, 2157 bp, Homo sapiens
  source 1..2157: mol_type = genomic DNA
atgccgaggacgatgatcccgccgggggagtgcacgtacgcgggccggaagcggaggaggcccctgcagaaacagaggcccgccgtgggggcagagaagtccaacccctccaagcgacaccgggaccgcctcaacgccgagttggaccacctggccagcctgctgccgttcccgcctgacatcatctccaagctggacaagctttctgtcctgcgcctcagtgtcagttacctccgggtgaagagcttcttccaagtcgtgcaggagcagagctcacggcagcctgcggccggcgccccctcgcccggagacagctgtcctcttgcagggtctgccgtgctggagggaaggctgctgttggagtctcttaatggctttgctctggtcgtgagtgcagaagggacgatattttatgcatcagcaacgatcgtggactatctgggcttccatcagacggatgtaatgcaccagaacatttatgactacatccacgtggacgaccgccaggacttctgccggcagctccactgggccatggaccctccccaggtggtgtttgggcagcccccgcccttggagacaggagatgatgctatcctggggaggctgctcagggcccaggagtggggcacaggcacgcccaccgagtactcggccttcctgacccgctgcttcatctgccgtgtgcgctgcctgctggacagcacctcgggcttcctggcccgggggtcacaggcttggcagctgcggctctgctgtcccgagccactcatgacgatgcagtttcaaggaaaactaaaattcctgtttggacagaagaagaaggcgccgtcaggagccatgctcccgccgcggctgtcgctgttctgcattgcggcacccgttctcctcccctccgcagcggagatgaaaatgaggagcgcgctcctgagggcaaaacccagagcagacaccgcagccaccgcggatgcaaaagtaaaagccaccaccagtctgtgcgaatcggaactgcatggaaaacccaattactcagcaggaaggagcagcagagagagcggcgttttggtgctcagggaacagactgacgctggccgatgggcacaggttcccgccagggccccatgcctgtgcctccggggtggccctgaccttgtccttgaccccaaggggggctcaggggacagggaggaggagcagcacaggatgctgagcagggcctctggagtgacagggcggagggagactccaggacccacaaagcccctgccctggacagcgggaaagcacagtgaggatggtgccaggccgaggctgcagcccagcaagaatgacccgccctccctgcgccccatgccccgcggctcctgcctgccctgcccgtgtgtccagggcactttcaggaactcgcccatctctcacccgccgagcccgtcccccagtgcctactccagccggaccagcagacccatgcgggatgtcggtgaggaccaggtgcaccctcccctctgccactttccccagaggagcctgcagcaccagctccctcagcctggagctcagcgttttgccacgaggggctatcccatggaggacatgaagctgcaaggtgtaccgatgcctccgggggacctgtgtggtccgacgctgctgctagatgtgtccatcaagatggagaaggactctgggtgtgagggtgctgcagacggctgtgtgcccagccaggtgtggctgggggccagtgacaggagccacccagccaccttccctaccaggatgcacctgaaaacagagccagactctcggcaacaggtgtacatctcgcacctggggcacggcgtgcggggggctcagccccatgggagggccactgctgggcgcagcagggagctgacccctttccaccctgcacactgtgcctgcctggagcccacagacggccttccccagtcggagcctccccaccagctctgtgcacggggccgaggtgaacagtcctgcacctgcagagctgctgaggccgcccctgtggtcaagcgggagcccttggactcaccccagtgggctactcacagccagggaatggtgcccgggatgttgcccaaaagtgccttggccacgctggtcccgccccaagcttcggggtgcacattcctgcca

SEQ ID NO: 5535 - DNA, 1788 bp, Homo sapiens
  source 1..1788: mol_type = genomic DNA
atgaccagcccctccccacgcatccagataatctccaccgactctgctgtagcctcacctcagcgcattcagattgtcacagaccagcagacaggacagaaaatccagatagtcaccgcagtggacgcctccggatcccccaaacagcagttcatcctgaccagcccagatggagctggaactgggaaggtgatcctggcttccccagagacatccagcgccaagcaactcatattcaccacctcagacaacctcgtccctggcaggatccagattgtcacggattctgcctctgtggagcgtttactggggaagacggacgtccagcggccccaggtggtagagtactgtgtggtctgtggcgacaaagcctccggccgtcactatggggctgtcagttgtgaaggttgcaaaggtttcttcaaaaggagtgtgaggaaaaatttgacctacagctgccggagcaaccaagactgcatcatcaataaacatcaccggaaccgctgtcagttttgccggctgaaaaaatgcttagagatgggcatgaaaatggaatctgtgcagagtgaacggaagcccttcgatgtgcaacgggagaaaccaagcaattgtgctgcttcaactgagaaaatctatatccggaaagacctgagaagtcccctgatagctactcccacgtttgtggcagacaaagatggagcaagacaaacaggtcttcttgatccagggatgcttgtgaacatccagcagcctttgatacgtgaggatggtacagttctcctggccacggattctaaggctgaaacaagccagggagctctgggcacactggcaaatgtagtgacctcccttgccaacctaagtgaatctttgaacaacggtgacacttcagaaatccagccagaggaccagtctgcaagtgagataactcgggcatttgataccttagctaaagcacttaataccacagacagctcctcttctccaagcttggcagatgggatagacaccagtggaggagggagcatccacgtcatcagcagagaccagtcgacacccatcattgaggttgaaggccccctcctttcagacacacacgtcacatttaagctaacaatgcccagtccaatgccagagtacctcaacgtgcactacatctgtgagtctgcatcccgtctgcttttcctctcaatgcactgggctcggtcaatcccagcctttcaggcacttgggcaggactgcaacaccagccttgtgcgggcctgctggaatgagctcttcaccctcggcctggcccagtgtgcccaggtcatgagtctctccaccatcctggctgccattgtcaaccacctgcagaacagcatccaggaagataaactttctggtgaccggataaagcaagtcatggagcacatctggaagctgcaggagttctgtaacagcatggcgaagctggatatagatggctatgagtatgcataccttaaagctatagttctctttagccccgatcatccaggtttgaccagcacaagccagattgaaaaattccaagaaaaggcacagatggagttgcaggactatgttcagaaaacctactcagaagacacctaccgattggcccggatcctcgttcgcctgccggcactcaggctgatgagctccaacataacagaagaacttttttttactggtctcattggcaatgtttcgatagacagcataatcccctacatcctcaagatggagacagcagagtataatggccagatcaccggagccagtcta

SEQ ID NO: 5536 - DNA, 1809 bp, Homo sapiens
  source 1..1809: mol_type = genomic DNA
atggcaaccatagaagaaattgcacatcaaattattgaacaacagatgggagagattgttacagagcagcaaactgggcagaaaatccagattgtgacagcacttgatcataatacccaaggcaagcagttcattctgacaaatcacgacggctctactccaagcaaagtcattctggccaggcaagattccactccgggaaaagttttccttacaactccagatgcagcaggtgtcaaccagttattttttaccactcctgatctgtctgcacaacacctgcagctcctaacagataattctccagaccaaggaccaaataaggtttttgatctttgcgtagtatgtggagacaaagcatcaggacgtcattatggagcagtaacttgtgaaggctgcaaaggattttttaaaagaagcatccgaaaaaatttagtatattcatgtcgaggatcaaaggattgtattattaataagcaccaccgaaaccgctgtcaatactgcaggttacagagatgtattgcgtttggaatgaagcaagactctgtccaatgtgaaagaaaacccattgaagtatcacgagaaaaatcttccaactgtgccgcttcaacagaaaaaatctatatccgaaaggaccttcgtagcccattaactgcaactccaacttttgtaacagatagtgaaagtacaaggtcaacaggactgttagattcaggaatgttcatgaatattcatccatctggagtaaaaactgagtcagctgtgctgatgacatcagataaggctgaatcatgtcagggagatttaagtacattggccaatgtggttacatcattagcgaatcttggaaaaactaaagatctttctcaaaatagtaatgaaatgtctatgattgaaagcttaagcaatgatgatacctctttgtgtgaatttcaagaaatgcagaccaacggtgatgtttcaagggcatttgacactcttgcaaaagcattgaatcctggagagagcacagcctgccagagctcagtagcgggcatggaaggaagtgtacacctaatcactggagattcaagcataaattacaccgaaaaagaggggccacttctcagcgattcacatgtagctttcaggctcaccatgccttctcctatgcctgagtacctgaatgtgcactacattggggagtctgcctccagactgctgttcttatcaatgcactgggcactttcgattccttctttccaggctctagggcaagaaaacagcatatcactggtgaaagcttactggaatgaactttttactcttggtcttgcccagtgctggcaagtgatgaatgtagcaactatattagcaacatttgtcaattgtcttcacaatagtcttcaacaagataaaatgtcaacagaaagaagaaaattattgatggagcacatcttcaaactacaggagttttgtaacagcatggttaaactctgcattgatggatacgaatatgcctacctgaaggcaatagtactcttcagtccagatcatccaagcctagaaaacatggaacagatagagaaatttcaggaaaaggcttatgtggaattccaagattatataaccaaaacatatccagatgacacctacaggttatccagactactactcagattgccagctttaagactgatgaatgctaccatcactgaagaattgtttttcaaaggtctcattggcaatatacgaattgacagtgttatcccacatattttgaaaatggagcctgcagattataactctcaaataattggtcacagcatt

SEQ ID NO: 5537 - DNA, 1449 bp, Homo sapiens
  source 1..1449: mol_type = genomic DNA
atggcaaccatagaagaaattgcacatcaaattattgaacaacagatgggagagattgttacagagcagcaaactgggcagaaaatccagattgtgacagcacttgatcataatacccaaggcaagcagttcattctgacaaatcacgacggctctactccaagcaaagtcattctggccaggcaagattccactccgggaaaagttttccttacaactccagatgcagcaggtgtcaaccagttattttttaccactcctgatctgtctgcacaacacctgcagctcctaacagataattctccagaccaaggaccaaataaggtttttgatctttgcgtagtatgtggagacaaagcatcaggacgtcattatggagcagtaacttgtgaaggctgcaaaggattttttaaaagaagcatccgaaaaaatttagtatattcatgtcgaggatcaaaggattgtattattaataagcaccaccgaaaccgctgtcaatactgcaggttacagagatgtattgcgtttggaatgaagcaagactctgtccaatgtgaaagaaaacccattgaagtatcacgagaaaaatcttccaactgtgccgcttcaacagaaaaaatctatatccgaaaggaccttcgtagcccattaactgcaactccaacttttgtaacagatagtgaaagtacaaggtcaacaggactgttagattcaggaatgttcatgaatattcatccatctggagtaaaaactgagtcagctgtgctgatgacatcagataaggctgaatcatgtcagggagatttaagtacattggccaatgtggttacatcattagcgaatcttggaaaaactaaagatctttctcaaaatagtaatgaaatgtctatgattgaaagcttaagcaatgatgatacctctttgtgtgaatttcaagaaatgcagaccaacggtgatgtttcaagggcatttgacactcttgcaaaagcattgaatcctggagagagcacagcctgccagagctcagtagcgggcatggaaggaagtgtacacctaatcactggagattcaagcataaattacaccgaaaaagaggggccacttctcagcgattcacatgtagctttcaggctcaccatgccttctcctatgcctgagtacctgaatgtgcactacattggggagtctgcctccagactgctgttcttatcaatgcactgggcactttcgattccttctttccaggctctagggcaagaaaacagcatatcactggtgaaagcttactggaatgaactttttactcttggtcttgcccagtgctggcaagtgatgaatgtagcaactatattagcaacatttgtcaattgtcttcacaatagtcttcaacaagatgccaaggtaattgcagccctcattcatttcacaagacgagcaatcactgattta

SEQ ID NO: 5538 - DNA, 2061 bp, Homo sapiens
  source 1..2061: mol_type = genomic DNA
atggagcgggtgaacgacgcttcgtgcggcccgtctggctgctacacataccaggtgagcagacacagcacggagatgctgcacaacctgaaccagcagcgcaaaaacggcgggcgcttctgcgacgtgctcttgcgggtaggcgacgagagcttcccagcgcaccgcgccgtgctggccgcctgcagcgagtactttgagtcggtgttcagcgcccagttgggcgacggcggagctgcggacgggggtccggctgatgtagggggcgcgacggcagcaccaggcggcggggccgggggcagccgggagctggagatgcacactatcagctccaaggtatttggggacattctggacttcgcctacacttcccgcatcgtggtgcgcttggagagctttcccgaactcatgacggccgccaagttcctgctgatgaggtcggttatcgagatctgccaggaagtcatcaaacagtccaacgtacagatcctggtaccccctgcccgcgccgatataatgctctttcgcccccctgggacctcggacttgggcttccctttggacatgaccaacggggcagccttggcagccaacagcaatggcatcgccggcagcatgcagccagaggaggaggcagctcgggcggctggtgcagccattgcaggccaagcctctttgcctgtgttacctggggtggaccgcttgcccatggtggctggacccctatccccccaactgctgacttccccattccccagtgtggcatccagtgcccctcccctgactggcaagcgaggccggggccgcccaaggaaggccaacctgctggactcaatgtttgggtccccagggggcctgagggaggcaggcatccttccatgcggtctatgtggtaaggtgttcactgatgccaaccggctccggcagcacgaggcccagcacggtgtcaccagcctccagctgggctacatcgaccttcctcctccgaggctgggtgagaatgggctacccatctctgaagaccccgacggcccccgaaagaggagccggaccaggaagcaggtggcttgtgagatctgcggcaagatcttccgtgatgtgtatcatcttaaccggcacaagctgtcccactctggggagaagccctactcctgccctgtgtgtgggttgcggttcaagagaaaagaccgcatgtcctaccatgtgcggtcccatgatgggtccgtgggcaagccttacatctgccagagctgtgggaaaggcttctccaggcctgatcacttgaacggacatatcaagcaggtgcacacttctgagcggcctcacaagtgtcagacctgcaatgcttcttttgccacccgagaccgtctgcgctcccacctggcctgtcatgaagacaaggtgccctgccaggtgtgtgggaagtacttgcgggcagcatacatggcagaccacctgaagaagcacagcgaggggcccagcaacttctgcagtatctgtaaccgaggtttctcctctgcctcctacttaaaggtccatgttaaaacccaccacggtgttccccttccccaggtctccaggcaccaggagcccatcctgaatgggggagcagcgttccactgcgccaggacctatggcaacaaagaaggccagaaatgctcacatcaggatccgattgagagctctgactcctatggtgacctctcagatgccagcgacctgaagacgccagagaagcagagtgccaatggctctttctcctgcgacatggcagtccccaaaaacaaaatggagtctgatggggagaagaagtacccatgccctgaatgtgggagcttcttccgctctaagtcctacttgaacaaacacatccagaaggtgcatgtccgggctctcgggggccccctgggggacctgggccctgcccttggctcacctttctctcctcagcagaacatgtctctcctcgagtcctttgggtttcagattgttcagtcggcatttgcgtcatctttagtagatcctgaggttgaccagcagcccatggggcctgaagggaaa

SEQ ID NO: 5539 - DNA, 1923 bp, Homo sapiens
  source 1..1923: mol_type = genomic DNA
atggagcgggtgaacgacgcttcgtgcggcccgtctggctgctacacataccaggtgagcagacacagcacggagatgctgcacaacctgaaccagcagcgcaaaaacggcgggcgcttctgcgacgtgctcttgcgggtaggcgacgagagcttcccagcgcaccgcgccgtgctggccgcctgcagcgagtactttgagtcggtgttcagcgcccagttgggcgacggcggagctgcggacgggggtccggctgatgtagggggcgcgacggcagcaccaggcggcggggccgggggcagccgggagctggagatgcacactatcagctccaaggtatttggggacattctggacttcgcctacacttcccgcatcgtggtgcgcttggagagctttcccgaactcatgacggccgccaagttcctgctgatgaggtcggttatcgagatctgccaggaagtcatcaaacagtccaacgtacagatcctggtaccccctgcccgcgccgatataatgctctttcgcccccctgggacctcggacttgggcttccctttggacatgaccaacggggcagccttggcagccaacagcaatggcatcgccggcagcatgcagccagaggaggaggcagctcgggcggctggtgcagccattgcaggccaagcctctttgcctgtgttacctggggtggaccgcttgcccatggtggctggacccctatccccccaactgctgacttccccattccccagtgtggcatccagtgcccctcccctgactggcaagcgaggccggggccgcccaaggaaggccaacctgctggactcaatgtttgggtccccagggggcctgagggaggcaggcatccttccatgcggtctatgtggtaaggtgttcactgatgccaaccggctccggcagcacgaggcccagcacggtgtcaccagcctccagctgggctacatcgaccttcctcctccgaggctgggtgagaatgggctacccatctctgaagaccccgacggcccccgaaagaggagccggaccaggaagcaggtggcttgtgagatctgcggcaagatcttccgtgatgtgtatcatcttaaccggcacaagctgtcccactctggggagaagccctactcctgccctgtgtgtgggttgcggttcaagagaaaagaccgcatgtcctaccatgtgcggtcccatgatgggtccgtgggcaagccttacatctgccagagctgtgggaaaggcttctccaggcctgatcacttgaacggacatatcaagcaggtgcacacttctgagcggcctcacaagtgtcagacctgcaatgcttcttttgccacccgagaccgtctgcgctcccacctggcctgtcatgaagacaaggtgccctgccaggtgtgtgggaagtacttgcgggcagcatacatggcagaccacctgaagaagcacagcgaggggcccagcaacttctgcagtatctgtaaccgagaaggccagaaatgctcacatcaggatccgattgagagctctgactcctatggtgacctctcagatgccagcgacctgaagacgccagagaagcagagtgccaatggctctttctcctgcgacatggcagtccccaaaaacaaaatggagtctgatggggagaagaagtacccatgccctgaatgtgggagcttcttccgctctaagtcctacttgaacaaacacatccagaaggtgcatgtccgggctctcgggggccccctgggggacctgggccctgcccttggctcacctttctctcctcagcagaacatgtctctcctcgagtcctttgggtttcagattgttcagtcggcatttgcgtcatctttagtagatcctgaggttgaccagcagcccatggggcctgaagggaaa

SEQ ID NO: 5540 - DNA, 1611 bp, Homo sapiens
  source 1..1611: mol_type = genomic DNA
atggagcgggtgaacgacgcttcgtgcggcccgtctggctgctacacataccaggtgagcagacacagcacggagatgctgcacaacctgaaccagcagcgcaaaaacggcgggcgcttctgcgacgtgctcttgcgggtaggcgacgagagcttcccagcgcaccgcgccgtgctggccgcctgcagcgagtactttgagtcggtgttcagcgcccagttgggcgacggcggagctgcggacgggggtccggctgatgtagggggcgcgacggcagcaccaggcggcggggccgggggcagccgggagctggagatgcacactatcagctccaaggtatttggggacattctggacttcgcctacacttcccgcatcgtggtgcgcttggagagctttcccgaactcatgacggccgccaagttcctgctgatgaggtcggttatcgagatctgccaggaagtcatcaaacagtccaacgtacagatcctggtaccccctgcccgcgccgatataatgctctttcgcccccctgggacctcggacttgggcttccctttggacatgaccaacggggcagccttggcagccaacagcaatggcatcgccggcagcatgcagccagaggaggaggcagctcgggcggctggtgcagccattgcaggccaagcctctttgcctgtgttacctggggtggaccgcttgcccatggtggctggacccctatccccccaactgctgacttccccattccccagtgtggcatccagtgcccctcccctgactggcaagcgaggccggggccgcccaaggaaggccaacctgctggactcaatgtttgggtccccagggggcctgagggaggcaggcatccttccatgcggtctatgtggtaaggtgttcactgatgccaaccggctccggcagcacgaggcccagcacggtgtcaccagcctccagctgggctacatcgaccttcctcctccgaggctgggtgagaatgggctacccatctctgaagaccccgacggcccccgaaagaggagccggaccaggaagcaggtggcttgtgagatctgcggcaagatcttccgtgatgtgtatcatcttaaccggcacaagctgtcccactctggggagaagccctactcctgccctgtgtgtgggttgcggttcaagagaaaagaccgcatgtcctaccatgtgcggtcccatgatgggtccgtgggcaagccttacatctgccagagctgtgggaaaggcttctccaggcctgatcacttgaacggacatatcaagcaggtgcacacttctgagcggcctcacaagtgtcagacctgcaatgcttcttttgccacccgagaccgtctgcgctcccacctggcctgtcatgaagacaaggtgccctgccaggtgtgtgggaagtacttgcgggcagcatacatggcagaccacctgaagaagcacagcgaggggcccagcaacttctgcagtatctgtaaccgaggtctccaggcaccaggagcccatcctgaatgggggagcagcgttccactgcgccaggacctatggcaacaaagaaggccagaaatgctcacatcaggatccgat

SEQ ID NO: 5541 - DNA, 1764 bp, Homo sapiens
  source 1..1764: mol_type = genomic DNA
atgccccagctcggcggcgggggcggcggcggcggcggcggcagcgggggaggcggcggctccagcgccggggcggccggcggaggggacgacctcggggcgaacgacgagctgatccccttccaggacgaggggggcgaggagcaggagccgagcagcgatagcgcctcggcgcagcgggacctagacgaggtcaagtcgtccctggtcaacgagtcggagaaccagagcagcagctcggactcggaggcggagaggcgcccgcagcccgtccgggacactttccagaagccgcgggactatttcgccgaagtgagaaggcctcaggacagcgcgttctttaaaggacccccgtaccctgggtaccccttcctgatgatcccggacctgagcagcccgtacctctccaacggacccctgtctcccggaggagcgcgcacctacctgcagatgaaatggcccctcctcgatgtcccctccagcgccacagtcaaggacacgaggtcaccatctccagcacacttgtctaataaagttcctgtcgttcagcacccgcatcacatgcatccgctgactcccctcatcacctacagcaatgaccacttctcccccggctcccctcccacccacctctccccagagatcgatccaaagacaggaatcccccggccccctcacccatccgagctgtcaccgtattacccactctctcccggagctgtcggacaaatcccccaccccctcggctggctcgtcccacagcaaggccagcccatgtactcccttcctcccggtggcttccggcacccttaccccgccctcgccatgaacgcctcgatgtccagcctggtctccagtcggttctctcctcacatggtggctcctgcccaccctggcctgcccacctcagggatcccccaccctgccatcgtctcccccatcgtcaagcaggaaccggcaccccccagcctgagccctgcagtgagcgtgaaatcaccagtcaccgtgaaaaaggaggaggaaaagaagccccacgtgaagaagcctctgaatgccttcatgttgtatatgaaggagatgagggccaaggtggtggctgagtgcaccctgaaggaaagtgcagccattaaccagatccttggaagaaagtggcacaacctgtctcgagaagaacaggccaagtactacgagctggcccggaaggagcggcagcttcactcgcagctctacccaacctggtcagcccgggacaactatggtaagaaaaagaagaggaagagagaaaagcagctgtcccagacacagtcacagcagcaagtccaggaggcagagggtgccctggcctccaagagcaagaagccatgtgttcagtacctgccccccgagaagccctgtgacagccctgcctcctcccacgggagcatgctggactccccggccactccctctgcagctttggcctcaccagctgcccctgctgccacccattcggagcaagcccagcccctctccctcaccaccaaaccagaaacccgggcccagctggctctccactctgccgccttcctgtcggctaaggctgcagcctcctcctctgggcagatgggcagccagcctcccctcctgtcccggcccctcccccttgggtccatgcccacagctctgctggcctctcccccgtccttccccgccacgctccatgcccaccaggccctcccggtgctacaggcccagcctctttccctggtcaccaagtctgcccac

SEQ ID NO: 5542 - DNA, 1377 bp, Homo sapiens
  source 1..1377: mol_type = genomic DNA
atgccgcagctgaacggcggtggaggggatgacctaggcgccaacgacgaactgatttccttcaaagacgagggcgaacaggaggagaagagctccgaaaactcctcggcagagagggatttagctgatgtcaaatcgtctctagtcaatgaatcagaaacgaatcaaaacagctcctccgattccgaggcggaaagacggcctccgcctcgctccgaaagtttccgagacaaatcccgggaaagtttggaagaagcggccaagaggcaagatggagggctctttaaggggccaccgtatcccggctaccccttcatcatgatccccgacctgacgagcccctacctccccaacggatcgctctcgcccaccgcccgaacctatctccagatgaaatggccactgcttgatgtccaggcagggagcctccagagtagacaagccctcaaggatgcccggtccccatcaccggcacacattgtctctaacaaagtgccagtggtgcagcaccctcaccatgtccaccccctcacgcctcttatcacgtacagcaatgaacacttcacgccgggaaacccacctccacacttaccagccgacgtagaccccaaaacaggaatcccacggcctccgcaccctccagatatatccccgtattacccactatcgcctggcaccgtaggacaaatcccccatccgctaggatggttagtaccacagcaaggtcaaccagtgtacccaatcacgacaggaggattcagacacccctaccccacagctctgaccgtcaatgcttccatgtccaggttccctccccatatggtcccaccacatcatacgctacacacgacgggcattccgcatccggccatagtcacaccaacagtcaaacaggaatcgtcccagagtgatgtcggctcactccatagttcaaagcatcaggactccaaaaaggaagaagaaaagaagaagccccacataaagaaacctcttaatgcattcatgttgtatatgaaggaaatgagagcaaaggtcgtagctgagtgcacgttgaaagaaagcgcggccatcaaccagatccttgggcggaggtggcatgcactgtccagagaagagcaagcgaaatactacgagctggcccggaaggagcgacagcttcatatgcaactgtaccccggctggtccgcgcgggataactatggaaagaagaagaagaggaaaagggacaagcagccgggagagaccaatgaacacagcgaatgtttcctaaatccttgcctttcacttcctccgattacagacctgagcgctcctaagaaatgccgagcgcgctttggccttgatcaacagaataactggtgcggcccttgcagtctt

SEQ ID NO: 5543 - DNA, 1446 bp, Homo sapiens
  source 1..1446: mol_type = genomic DNA
atgccgcagctgaacggcggtggaggggatgacctaggcgccaacgacgaactgatttccttcaaagacgagggcgaacaggaggagaagagctccgaaaactcctcggcagagagggatttagctgatgtcaaatcgtctctagtcaatgaatcagaaacgaatcaaaacagctcctccgattccgaggcggaaagacggcctccgcctcgctccgaaagtttccgagacaaatcccgggaaagtttggaagaagcggccaagaggcaagatggagggctctttaaggggccaccgtatcccggctaccccttcatcatgatccccgacctgacgagcccctacctccccaacggatcgctctcgcccaccgcccgaaccctccattttcagtccggcagcacacattactctgcgtacaaaacgattgaacaccagattgcagttcagtatctccagatgaaatggccactgcttgatgtccaggcagggagcctccagagtagacaagccctcaaggatgcccggtccccatcaccggcacacattgtctctaacaaagtgccagtggtgcagcaccctcaccatgtccaccccctcacgcctcttatcacgtacagcaatgaacacttcacgccgggaaacccacctccacacttaccagccgacgtagaccccaaaacaggaatcccacggcctccgcaccctccagatatatccccgtattacccactatcgcctggcaccgtaggacaaatcccccatccgctaggatggttagtaccacagcaaggtcaaccagtgtacccaatcacgacaggaggattcagacacccctaccccacagctctgaccgtcaatgcttccatgtccaggttccctccccatatggtcccaccacatcatacgctacacacgacgggcattccgcatccggccatagtcacaccaacagtcaaacaggaatcgtcccagagtgatgtcggctcactccatagttcaaagcatcaggactccaaaaaggaagaagaaaagaagaagccccacataaagaaacctcttaatgcattcatgttgtatatgaaggaaatgagagcaaaggtcgtagctgagtgcacgttgaaagaaagcgcggccatcaaccagatccttgggcggaggtggcatgcactgtccagagaagagcaagcgaaatactacgagctggcccggaaggagcgacagcttcatatgcaactgtaccccggctggtccgcgcgggataactatggaaagaagaagaagaggaaaagggacaagcagccgggagagaccaatgaacacagcgaatgtttcctaaatccttgcctttcacttcctccgattacaggagaaaaaaaaagtgcgttcgctacatacaaggtgaaggcagctgcctcagcccaccctcttcagatggaagcttac

SEQ ID NO: 5544 - DNA, 1224 bp, Homo sapiens
  source 1..1224: mol_type = genomic DNA
atgccgcagctgaacggcggtggaggggatgacctaggcgccaacgacgaactgatttccttcaaagacgagggcgaacaggaggagaagagctccgaaaactcctcggcagagagggatttagctgatgtcaaatcgtctctagtcaatgaatcagaaacgaatcaaaacagctcctccgattccgaggcggaaagacggcctccgcctcgctccgaaagtttccgagacaaatcccgggaaagtttggaagaagcggccaagaggcaagatggagggctctttaaggggccaccgtatcccggctaccccttcatcatgatccccgacctgacgagcccctacctccccaacggatcgctctcgcccaccgcccgaacctctaacaaagtgccagtggtgcagcaccctcaccatgtccaccccctcacgcctcttatcacgtacagcaatgaacacttcacgccgggaaacccacctccacacttaccagccgacgtagaccccaaaacaggaatcccacggcctccgcaccctccagatatatccccgtattacccactatcgcctggcaccgtaggacaaatcccccatccgctaggatggttagtaccacagcaaggtcaaccagtgtacccaatcacgacaggaggattcagacacccctaccccacagctctgaccgtcaatgcttccatgtccaggttccctccccatatggtcccaccacatcatacgctacacacgacgggcattccgcatccggccatagtcacaccaacagtcaaacaggaatcgtcccagagtgatgtcggctcactccatagttcaaagcatcaggactccaaaaaggaagaagaaaagaagaagccccacataaagaaacctcttaatgcattcatgttgtatatgaaggaaatgagagcaaaggtcgtagctgagtgcacgttgaaagaaagcgcggccatcaaccagatccttgggcggaggtggcatgcactgtccagagaagagcaagcgaaatactacgagctggcccggaaggagcgacagcttcatatgcaactgtaccccggctggtccgcgcgggataactatggaaagaagaagaagaggaaaagggacaagcagccgggagagaccaatggagaaaaaaaaagtgcgttcgctacatacaaggtgaaggcagctgcctcagcccaccctcttcagatggaagcttac

SEQ ID NO: 5545 - DNA, 1857 bp, Homo sapiens
  source 1..1857: mol_type = genomic DNA
atgccgcagctgaacggcggtggaggggatgacctaggcgccaacgacgaactgatttccttcaaagacgagggcgaacaggaggagaagagctccgaaaactcctcggcagagagggatttagctgatgtcaaatcgtctctagtcaatgaatcagaaacgaatcaaaacagctcctccgattccgaggcggaaagacggcctccgcctcgctccgaaagtttccgagacaaatcccgggaaagtttggaagaagcggccaagaggcaagatggagggctctttaaggggccaccgtatcccggctaccccttcatcatgatccccgacctgacgagcccctacctccccaacggatcgctctcgcccaccgcccgaaccctccattttcagtccggcagcacacattactctgcgtacaaaacgattgaacaccagattgcagttcagtatctccagatgaaatggccactgcttgatgtccaggcagggagcctccagagtagacaagccctcaaggatgcccggtccccatcaccggcacacattgtctctaacaaagtgccagtggtgcagcaccctcaccatgtccaccccctcacgcctcttatcacgtacagcaatgaacacttcacgccgggaaacccacctccacacttaccagccgacgtagaccccaaaacaggaatcccacggcctccgcaccctccagatatatccccgtattacccactatcgcctggcaccgtaggacaaatcccccatccgctaggatggttagtaccacagcaaggtcaaccagtgtacccaatcacgacaggaggattcagacacccctaccccacagctctgaccgtcaatgcttccatgtccaggttccctccccatatggtcccaccacatcatacgctacacacgacgggcattccgcatccggccatagtcacaccaacagtcaaacaggaatcgtcccagagtgatgtcggctcactccatagttcaaagcatcaggactccaaaaaggaagaagaaaagaagaagccccacataaagaaacctcttaatgcattcatgttgtatatgaaggaaatgagagcaaaggtcgtagctgagtgcacgttgaaagaaagcgcggccatcaaccagatccttgggcggaggtggcatgcactgtccagagaagagcaagcgaaatactacgagctggcccggaaggagcgacagcttcatatgcaactgtaccccggctggtccgcgcgggataactatggaaagaagaagaagaggaaaagggacaagcagccgggagagaccaatgaacacagcgaatgtttcctaaatccttgcctttcacttcctccgattacagacctgagcgctcctaagaaatgccgagcgcgctttggccttgatcaacagaataactggtgcggcccttgcaggagaaaaaaaaagtgcgttcgctacatacaaggtgaaggcagctgcctcagcccaccctcttcagatggaagcttactagattcgcctcccccctccccgaacctgctaggctcccctccccgagacgccaagtcacagactgagcagacccagcctctgtcgctgtccctgaagcccgaccccctggcccacctgtccatgatgcctccgccacccgccctcctgctcgctgaggccacccacaaggcctccgccctctgtcccaacggggccctggacctgcccccagccgctttgcagcctgccgccccctcctcatcaattgcacagccgtcgacttcttccttacattcccacagctccctggccgggacccagccccagccgctgtcgctcgtcaccaagtctttagaa

SEQ ID NO: 5546 - DNA, 1806 bp, Homo sapiens
  source 1..1806: mol_type = genomic DNA
atgccgcagctgaacggcggtggaggggatgacctaggcgccaacgacgaactgatttccttcaaagacgagggcgaacaggaggagaagagctccgaaaactcctcggcagagagggatttagctgatgtcaaatcgtctctagtcaatgaatcagaaacgaatcaaaacagctcctccgattccgaggcggaaagacggcctccgcctcgctccgaaagtttccgagacaaatcccgggaaagtttggaagaagcggccaagaggcaagatggagggctctttaaggggccaccgtatcccggctaccccttcatcatgatccccgacctgacgagcccctacctccccaacggatcgctctcgcccaccgcccgaaccctccattttcagtccggcagcacacattactctgcgtacaaaacgattgaacaccagattgcagttcagtatctccagatgaaatggccactgcttgatgtccaggcagggagcctccagagtagacaagccctcaaggatgcccggtccccatcaccggcacacattgtctctaacaaagtgccagtggtgcagcaccctcaccatgtccaccccctcacgcctcttatcacgtacagcaatgaacacttcacgccgggaaacccacctccacacttaccagccgacgtagaccccaaaacaggaatcccacggcctccgcaccctccagatatatccccgtattacccactatcgcctggcaccgtaggacaaatcccccatccgctaggatggttagtaccacagcaaggtcaaccagtgtacccaatcacgacaggaggattcagacacccctaccccacagctctgaccgtcaatgcttccatgtccaggttccctccccatatggtcccaccacatcatacgctacacacgacgggcattccgcatccggccatagtcacaccaacagtcaaacaggaatcgtcccagagtgatgtcggctcactccatagttcaaagcatcaggactccaaaaaggaagaagaaaagaagaagccccacataaagaaacctcttaatgcattcatgttgtatatgaaggaaatgagagcaaaggtcgtagctgagtgcacgttgaaagaaagcgcggccatcaaccagatccttgggcggaggtggcatgcactgtccagagaagagcaagcgaaatactacgagctggcccggaaggagcgacagcttcatatgcaactgtaccccggctggtccgcgcgggataactatggaaagaagaagaagaggaaaagggacaagcagccgggagagaccaatgatgcaaatactccaaagaagtgtcgggcactgttcgggcttgaccgacagactttatggtgcaaaccgtgcaggagaaaaaaaaagtgcgttcgctacatacaaggtgaaggcagctgcctcagcccaccctcttcagatggaagcttactagattcgcctcccccctccccgaacctgctaggctcccctccccgagacgccaagtcacagactgagcagacccagcctctgtcgctgtccctgaagcccgaccccctggcccacctgtccatgatgcctccgccacccgccctcctgctcgctgaggccacccacaaggcctccgccctctgtcccaacggggccctggacctgcccccagccgctttgcagcctgccgccccctcctcatcaattgcacagccgtcgacttcttccttacattcccacagctccctggccgggacccagccccagccgctgtcgctcgtcaccaagtctttagaa

SEQ ID NO: 5547 - DNA, 1788 bp, Homo sapiens
  source 1..1788: mol_type = genomic DNA
atgccgcagctgaacggcggtggaggggatgacctaggcgccaacgacgaactgatttccttcaaagacgagggcgaacaggaggagaagagctccgaaaactcctcggcagagagggatttagctgatgtcaaatcgtctctagtcaatgaatcagaaacgaatcaaaacagctcctccgattccgaggcggaaagacggcctccgcctcgctccgaaagtttccgagacaaatcccgggaaagtttggaagaagcggccaagaggcaagatggagggctctttaaggggccaccgtatcccggctaccccttcatcatgatccccgacctgacgagcccctacctccccaacggatcgctctcgcccaccgcccgaacctatctccagatgaaatggccactgcttgatgtccaggcagggagcctccagagtagacaagccctcaaggatgcccggtccccatcaccggcacacattgtctctaacaaagtgccagtggtgcagcaccctcaccatgtccaccccctcacgcctcttatcacgtacagcaatgaacacttcacgccgggaaacccacctccacacttaccagccgacgtagaccccaaaacaggaatcccacggcctccgcaccctccagatatatccccgtattacccactatcgcctggcaccgtaggacaaatcccccatccgctaggatggttagtaccacagcaaggtcaaccagtgtacccaatcacgacaggaggattcagacacccctaccccacagctctgaccgtcaatgcttccatgtccaggttccctccccatatggtcccaccacatcatacgctacacacgacgggcattccgcatccggccatagtcacaccaacagtcaaacaggaatcgtcccagagtgatgtcggctcactccatagttcaaagcatcaggactccaaaaaggaagaagaaaagaagaagccccacataaagaaacctcttaatgcattcatgttgtatatgaaggaaatgagagcaaaggtcgtagctgagtgcacgttgaaagaaagcgcggccatcaaccagatccttgggcggaggtggcatgcactgtccagagaagagcaagcgaaatactacgagctggcccggaaggagcgacagcttcatatgcaactgtaccccggctggtccgcgcgggataactatggaaagaagaagaagaggaaaagggacaagcagccgggagagaccaatgaacacagcgaatgtttcctaaatccttgcctttcacttcctccgattacagacctgagcgctcctaagaaatgccgagcgcgctttggccttgatcaacagaataactggtgcggcccttgcaggagaaaaaaaaagtgcgttcgctacatacaaggtgaaggcagctgcctcagcccaccctcttcagatggaagcttactagattcgcctcccccctccccgaacctgctaggctcccctccccgagacgccaagtcacagactgagcagacccagcctctgtcgctgtccctgaagcccgaccccctggcccacctgtccatgatgcctccgccacccgccctcctgctcgctgaggccacccacaaggcctccgccctctgtcccaacggggccctggacctgcccccagccgctttgcagcctgccgccccctcctcatcaattgcacagccgtcgacttcttccttacattcccacagctccctggccgggacccagccccagccgctgtcgctcgtcaccaagtctttagaa

SEQ ID NO: 5548 - DNA, 1467 bp, Homo sapiens
  source 1..1467: mol_type = genomic DNA
atgccgcagctgaacggcggtggaggggatgacctaggcgccaacgacgaactgatttccttcaaagacgagggcgaacaggaggagaagagctccgaaaactcctcggcagagagggatttagctgatgtcaaatcgtctctagtcaatgaatcagaaacgaatcaaaacagctcctccgattccgaggcggaaagacggcctccgcctcgctccgaaagtttccgagacaaatcccgggaaagtttggaagaagcggccaagaggcaagatggagggctctttaaggggccaccgtatcccggctaccccttcatcatgatccccgacctgacgagcccctacctccccaacggatcgctctcgcccaccgcccgaacctatctccagatgaaatggccactgcttgatgtccaggcagggagcctccagagtagacaagccctcaaggatgcccggtccccatcaccggcacacattgtcagccccctcccttgctgcactcagggacatgactgtcagcacttctaccccccctcagacttcactgtcagcactcaagtcttcagggacatgaaaaggagccactccttacaaaaagttggggagccctggtgtattgagtctaacaaagtgccagtggtgcagcaccctcaccatgtccaccccctcacgcctcttatcacgtacagcaatgaacacttcacgccgggaaacccacctccacacttaccagccgacgtagaccccaaaacaggaatcccacggcctccgcaccctccagatatatccccgtattacccactatcgcctggcaccgtaggacaaatcccccatccgctaggatggttagtaccacagcaaggtcaaccagtgtacccaatcacgacaggaggattcagacacccctaccccacagctctgaccgtcaatgcttccatgtccaggttccctccccatatggtcccaccacatcatacgctacacacgacgggcattccgcatccggccatagtcacaccaacagtcaaacaggaatcgtcccagagtgatgtcggctcactccatagttcaaagcatcaggactccaaaaaggaagaagaaaagaagaagccccacataaagaaacctcttaatgcattcatgttgtatatgaaggaaatgagagcaaaggtcgtagctgagtgcacgttgaaagaaagcgcggccatcaaccagatccttgggcggaggtggcatgcactgtccagagaagagcaagcgaaatactacgagctggcccggaaggagcgacagcttcatatgcaactgtaccccggctggtccgcgcgggataactatggaaagaagaagaagaggaaaagggacaagcagccgggagagaccaatggagaaaaaaaaagtgcgttcgctacatacaaggtgaaggcagctgcctcagcccaccctcttcagatggaagcttac

SEQ ID NO: 5549 - DNA, 1737 bp, Homo sapiens
  source 1..1737: mol_type = genomic DNA
atgccgcagctgaacggcggtggaggggatgacctaggcgccaacgacgaactgatttccttcaaagacgagggcgaacaggaggagaagagctccgaaaactcctcggcagagagggatttagctgatgtcaaatcgtctctagtcaatgaatcagaaacgaatcaaaacagctcctccgattccgaggcggaaagacggcctccgcctcgctccgaaagtttccgagacaaatcccgggaaagtttggaagaagcggccaagaggcaagatggagggctctttaaggggccaccgtatcccggctaccccttcatcatgatccccgacctgacgagcccctacctccccaacggatcgctctcgcccaccgcccgaacctatctccagatgaaatggccactgcttgatgtccaggcagggagcctccagagtagacaagccctcaaggatgcccggtccccatcaccggcacacattgtctctaacaaagtgccagtggtgcagcaccctcaccatgtccaccccctcacgcctcttatcacgtacagcaatgaacacttcacgccgggaaacccacctccacacttaccagccgacgtagaccccaaaacaggaatcccacggcctccgcaccctccagatatatccccgtattacccactatcgcctggcaccgtaggacaaatcccccatccgctaggatggttagtaccacagcaaggtcaaccagtgtacccaatcacgacaggaggattcagacacccctaccccacagctctgaccgtcaatgcttccatgtccaggttccctccccatatggtcccaccacatcatacgctacacacgacgggcattccgcatccggccatagtcacaccaacagtcaaacaggaatcgtcccagagtgatgtcggctcactccatagttcaaagcatcaggactccaaaaaggaagaagaaaagaagaagccccacataaagaaacctcttaatgcattcatgttgtatatgaaggaaatgagagcaaaggtcgtagctgagtgcacgttgaaagaaagcgcggccatcaaccagatccttgggcggaggtggcatgcactgtccagagaagagcaagcgaaatactacgagctggcccggaaggagcgacagcttcatatgcaactgtaccccggctggtccgcgcgggataactatggaaagaagaagaagaggaaaagggacaagcagccgggagagaccaatgacctgagcgctcctaagaaatgccgagcgcgctttggccttgatcaacagaataactggtgcggcccttgcaggagaaaaaaaaagtgcgttcgctacatacaaggtgaaggcagctgcctcagcccaccctcttcagatggaagcttactagattcgcctcccccctccccgaacctgctaggctcccctccccgagacgccaagtcacagactgagcagacccagcctctgtcgctgtccctgaagcccgaccccctggcccacctgtccatgatgcctccgccacccgccctcctgctcgctgaggccacccacaaggcctccgccctctgtcccaacggggccctggacctgcccccagccgctttgcagcctgccgccccctcctcatcaattgcacagccgtcgacttcttccttacattcccacagctccctggccgggacccagccccagccgctgtcgctcgtcaccaagtctttagaa

SEQ ID NO: 5550 - DNA, 1752 bp, Homo sapiens
  source 1..1752: mol_type = genomic DNA
atgccgcagctgaacggcggtggaggggatgacctaggcgccaacgacgaactgatttccttcaaagacgagggcgaacaggaggagaagagctccgaaaactcctcggcagagagggatttagctgatgtcaaatcgtctctagtcaatgaatcagaaacgaatcaaaacagctcctccgattccgaggcggaaagacggcctccgcctcgctccgaaagtttccgagacaaatcccgggaaagtttggaagaagcggccaagaggcaagatggagggctctttaaggggccaccgtatcccggctaccccttcatcatgatccccgacctgacgagcccctacctccccaacggatcgctctcgcccaccgcccgaacctatctccagatgaaatggccactgcttgatgtccaggcagggagcctccagagtagacaagccctcaaggatgcccggtccccatcaccggcacacattgtctctaacaaagtgccagtggtgcagcaccctcaccatgtccaccccctcacgcctcttatcacgtacagcaatgaacacttcacgccgggaaacccacctccacacttaccagccgacgtagaccccaaaacaggaatcccacggcctccgcaccctccagatatatccccgtattacccactatcgcctggcaccgtaggacaaatcccccatccgctaggatggttagtaccacagcaaggtcaaccagtgtacccaatcacgacaggaggattcagacacccctaccccacagctctgaccgtcaatgcttccatgtccagctttctgtcttctaggttccctccccatatggtcccaccacatcatacgctacacacgacgggcattccgcatccggccatagtcacaccaacagtcaaacaggaatcgtcccagagtgatgtcggctcactccatagttcaaagcatcaggactccaaaaaggaagaagaaaagaagaagccccacataaagaaacctcttaatgcattcatgttgtatatgaaggaaatgagagcaaaggtcgtagctgagtgcacgttgaaagaaagcgcggccatcaaccagatccttgggcggaggtggcatgcactgtccagagaagagcaagcgaaatactacgagctggcccggaaggagcgacagcttcatatgcaactgtaccccggctggtccgcgcgggataactatggaaagaagaagaagaggaaaagggacaagcagccgggagagaccaatgatgcaaatactccaaagaagtgtcgggcactgttcgggcttgaccgacagactttatggtgcaaaccgtgcaggagaaaaaaaaagtgcgttcgctacatacaaggtgaaggcagctgcctcagcccaccctcttcagatggaagcttactagattcgcctcccccctccccgaacctgctaggctcccctccccgagacgccaagtcacagactgagcagacccagcctctgtcgctgtccctgaagcccgaccccctggcccacctgtccatgatgcctccgccacccgccctcctgctcgctgaggccacccacaaggcctccgccctctgtcccaacggggccctggacctgcccccagccgctttgcagcctgccgccccctcctcatcaattgcacagccgtcgacttcttccttacattcccacagctccctggccgggacccagccccagccgctgtcgctcgtcaccaagtctttagaa

SEQ ID NO: 5551 - DNA, 1365 bp, Homo sapiens
  source 1..1365: mol_type = genomic DNA
atgccgcagctgaacggcggtggaggggatgacctaggcgccaacgacgaactgatttccttcaaagacgagggcgaacaggaggagaagagctccgaaaactcctcggcagagagggatttagctgatgtcaaatcgtctctagtcaatgaatcagaaacgaatcaaaacagctcctccgattccgaggcggaaagacggcctccgcctcgctccgaaagtttccgagacaaatcccgggaaagtttggaagaagcggccaagaggcaagatggagggctctttaaggggccaccgtatcccggctaccccttcatcatgatccccgacctgacgagcccctacctccccaacggatcgctctcgcccaccgcccgaacctatctccagatgaaatggccactgcttgatgtccaggcagggagcctccagagtagacaagccctcaaggatgcccggtccccatcaccggcacacattgtctctaacaaagtgccagtggtgcagcaccctcaccatgtccaccccctcacgcctcttatcacgtacagcaatgaacacttcacgccgggaaacccacctccacacttaccagccgacgtagaccccaaaacaggaatcccacggcctccgcaccctccagatatatccccgtattacccactatcgcctggcaccgtaggacaaatcccccatccgctaggatggcaaggtcaaccagtgtacccaatcacgacaggaggattcagacacccctaccccacagctctgaccgtcaatgcttccatgtccaggttccctccccatatggtcccaccacatcatacgctacacacgacgggcattccgcatccggccatagtcacaccaacagtcaaacaggaatcgtcccagagtgatgtcggctcactccatagttcaaagcatcaggactccaaaaaggaagaagaaaagaagaagccccacataaagaaacctcttaatgcattcatgttgtatatgaaggaaatgagagcaaaggtcgtagctgagtgcacgttgaaagaaagcgcggccatcaaccagatccttgggcggaggtggcatgcactgtccagagaagagcaagcgaaatactacgagctggcccggaaggagcgacagcttcatatgcaactgtaccccggctggtccgcgcgggataactatggaaagaagaagaagaggaaaagggacaagcagccgggagagaccaatgaacacagcgaatgtttcctaaatccttgcctttcacttcctccgattacagacctgagcgctcctaagaaatgccgagcgcgctttggccttgatcaacagaataactggtgcggcccttgcagtctt

SEQ ID NO: 5552 - DNA, 1428 bp, Homo sapiens
  source 1..1428: mol_type = genomic DNA
atgccgcagctgaacggcggtggaggggatgacctaggcgccaacgacgaactgatttccttcaaagacgagggcgaacaggaggagaagagctccgaaaactcctcggcagagagggatttagctgatgtcaaatcgtctctagtcaatgaatcagaaacgaatcaaaacagctcctccgattccgaggcggaaagacggcctccgcctcgctccgaaagtttccgagacaaatcccgggaaagtttggaagaagcggccaagaggcaagatggagggctctttaaggggccaccgtatcccggctaccccttcatcatgatccccgacctgacgagcccctacctccccaacggatcgctctcgcccaccgcccgaacctatctccagatgaaatggccactgcttgatgtccaggcagggagcctccagagtagacaagccctcaaggatgcccggtccccatcaccggcacacattgtctctaacaaagtgccagtggtgcagcaccctcaccatgtccaccccctcacgcctcttatcacgtacagcaatgaacacttcacgccgggaaacccacctccacacttaccagccgacgtagaccccaaaacaggaatcccacggcctccgcaccctccagatatatccccgtattacccactatcgcctggcaccgtaggacaaatcccccatccgctaggatggttagtaccacagcaaggtcaaccagtgtacccaatcacgacaggaggattcagacacccctaccccacagctctgaccgtcaatgcttccatgtccagctttctgtcttctaggttccctccccatatggtcccaccacatcatacgctacacacgacgggcattccgcatccggccatagtcacaccaacagtcaaacaggaatcgtcccagagtgatgtcggctcactccatagttcaaagcatcaggactccaaaaaggaagaagaaaagaagaagccccacataaagaaacctcttaatgcattcatgttgtatatgaaggaaatgagagcaaaggtcgtagctgagtgcacgttgaaagaaagcgcggccatcaaccagatccttgggcggaggtggcatgcactgtccagagaagagcaagcgaaatactacgagctggcccggaaggagcgacagcttcatatgcaactgtaccccggctggtccgcgcgggataactatggaaagaagaagaagaggaaaagggacaagcagccgggagagaccaatgaacacagcgaatgtttcctaaatccttgcctttcacttcctccgattacagacctgagcgctcctaagaaatgccgagcgcgctttggccttgatcaacagaataactggtgcggcccttgcagatgcaaatactccaaagaagtgtcgggcactgttcgggct

SEQ ID NO: 5553 - DNA, 1821 bp, Homo sapiens
  source 1..1821: mol_type = genomic DNA
atgccgcagctgaacggcggtggaggggatgacctaggcgccaacgacgaactgatttccttcaaagacgagggcgaacaggaggagaagagctccgaaaactcctcggcagagagggatttagctgatgtcaaatcgtctctagtcaatgaatcagaaacgaatcaaaacagctcctccgattccgaggcggaaagacggcctccgcctcgctccgaaagtttccgagacaaatcccgggaaagtttggaagaagcggccaagaggcaagatggagggctctttaaggggccaccgtatcccggctaccccttcatcatgatccccgacctgacgagcccctacctccccaacggatcgctctcgcccaccgcccgaaccctccattttcagtccggcagcacacattactctgcgtacaaaacgattgaacaccagattgcagttcagtatctccagatgaaatggccactgcttgatgtccaggcagggagcctccagagtagacaagccctcaaggatgcccggtccccatcaccggcacacattgtctctaacaaagtgccagtggtgcagcaccctcaccatgtccaccccctcacgcctcttatcacgtacagcaatgaacacttcacgccgggaaacccacctccacacttaccagccgacgtagaccccaaaacaggaatcccacggcctccgcaccctccagatatatccccgtattacccactatcgcctggcaccgtaggacaaatcccccatccgctaggatggttagtaccacagcaaggtcaaccagtgtacccaatcacgacaggaggattcagacacccctaccccacagctctgaccgtcaatgcttccatgtccagctttctgtcttctaggttccctccccatatggtcccaccacatcatacgctacacacgacgggcattccgcatccggccatagtcacaccaacagtcaaacaggaatcgtcccagagtgatgtcggctcactccatagttcaaagcatcaggactccaaaaaggaagaagaaaagaagaagccccacataaagaaacctcttaatgcattcatgttgtatatgaaggaaatgagagcaaaggtcgtagctgagtgcacgttgaaagaaagcgcggccatcaaccagatccttgggcggaggtggcatgcactgtccagagaagagcaagcgaaatactacgagctggcccggaaggagcgacagcttcatatgcaactgtaccccggctggtccgcgcgggataactatggaaagaagaagaagaggaaaagggacaagcagccgggagagaccaatgatgcaaatactccaaagaagtgtcgggcactgttcgggcttgaccgacagactttatggtgcaaaccgtgcaggagaaaaaaaaagtgcgttcgctacatacaaggtgaaggcagctgcctcagcccaccctcttcagatggaagcttactagattcgcctcccccctccccgaacctgctaggctcccctccccgagacgccaagtcacagactgagcagacccagcctctgtcgctgtccctgaagcccgaccccctggcccacctgtccatgatgcctccgccacccgccctcctgctcgctgaggccacccacaaggcctccgccctctgtcccaacggggccctggacctgcccccagccgctttgcagcctgccgccccctcctcatcaattgcacagccgtcgacttcttccttacattcccacagctccctggccgggacccagccccagccgctgtcgctcgtcaccaagtctttagaa

SEQ ID NO: 5554 - DNA, 1563 bp, Homo sapiens
  source 1..1563: mol_type = genomic DNA
atggcatcaaacagcctcttcagcacagtgacaccatgtcagcaaaacttcttttgggatccgagcaccagccggcgcttcagccccccctccagcagcctgcagcccggcaaaatgagcgacgtgagcccggtggtggctgcgcaacagcagcagcaacagcagcagcagcaacagcagcagcagcagcagcaacagcagcagcagcagcaggaggcggcggcggcggctgcggcggcggcggcggctgcggcggcggcagctgcagtgccccggttgcggccgccccacgacaaccgcaccatggtggagatcatcgccgaccacccggccgaactcgtccgcaccgacagccccaacttcctgtgctcggtgctgccctcgcactggcgctgcaacaagaccctgcccgtggccttcaaggtggtagccctcggagaggtaccagatgggactgtggttactgtcatggcgggtaacgatgaaaattattctgctgagctccggaatgcctctgctgttatgaaaaaccaagtagcaaggttcaacgatctgagatttgtgggccggagtggacgaggcaagagtttcaccttgaccataaccgtcttcacaaatcctccccaagtagctacctatcacagagcaattaaagttacagtagatggacctcgggaacccagaaggcacagacagaagcttgatgactctaaacctagtttgttctctgaccgcctcagtgatttagggcgcattcctcatcccagtatgagagtaggtgtcccgcctcagaacccacggccctccctgaactctgcaccaagtccttttaatccacaaggacagagtcagattacagaccccaggcaggcacagtcttccccgccgtggtcctatgaccagtcttacccctcctacctgagccagatgacgtccccgtccatccactctaccaccccgctgtcttccacacggggcactgggcttcctgccatcaccgatgtgcctaggcgcatttcagatgatgacactgccacctctgacttctgcctctggccttccactctcagtaagaagagccaggcaggtgcttcagaactgggccctttttcagaccccaggcagttcccaagcatttcatccctcactgagagccgcttctccaacccacgaatgcactatccagccacctttacttacaccccgccagtcacctcaggcatgtccctcggtatgtccgccaccactcactaccacacctacctgccaccaccctaccccggctcttcccaaagccagagtggacccttccagaccagcagcactccatatctctactatggcacttcgtcaggatcctatcagtttcccatggtgccggggggagaccggtctccttccagaatgcttccgccatgcaccaccacctcgaatggcagcacgctattaaatccaaatttgcctaaccagaatgatggtgttgacgctgatggaagccacagcagttccccaactgttttgaattctagtggcagaatggatgaatctgtttggcgaccatat

SEQ ID NO: 5555 - DNA, 828 bp, Homo sapiens
  source 1..828: mol_type = genomic DNA
atgcgtattcccgtagatccgagcaccagccggcgcttcagccccccctccagcagcctgcagcccggcaaaatgagcgacgtgagcccggtggtggctgcgcaacagcagcagcaacagcagcagcagcaacagcagcagcagcagcagcaacagcagcagcagcagcaggaggcggcggcggcggctgcggcggcggcggcggctgcggcggcggcagctgcagtgccccggttgcggccgccccacgacaaccgcaccatggtggagatcatcgccgaccacccggccgaactcgtccgcaccgacagccccaacttcctgtgctcggtgctgccctcgcactggcgctgcaacaagaccctgcccgtggccttcaaggtggtagccctcggagaggtaccagatgggactgtggttactgtcatggcgggtaacgatgaaaattattctgctgagctccggaatgcctctgctgttatgaaaaaccaagtagcaaggttcaacgatctgagatttgtgggccggagtggacgaggcaagagtttcaccttgaccataaccgtcttcacaaatcctccccaagtagctacctatcacagagcaattaaagttacagtagatggacctcgggaacccagaaaccccaggcaggcacagtcttccccgccgtggtcctatgaccagtcttacccctcctacctgagccagatgacgtccccgtccatccactctaccaccccgctgtcttccacacggggcactgggcttcctgccatcaccgatgtgcctaggcgcatttcagctcgaagccgttactcactccgc

SEQ ID NO: 5556 - DNA, 1455 bp, Homo sapiens
  source 1..1455: mol_type = genomic DNA
atgcgtattcccgtagatccgagcaccagccggcgcttcagccccccctccagcagcctgcagcccggcaaaatgagcgacgtgagcccggtggtggctgcgcaacagcagcagcaacagcagcagcagcaacagcagcagcagcagcagcaacagcagcagcagcagcaggaggcggcggcggcggctgcggcggcggcggcggctgcggcggcggcagctgcagtgccccggttgcggccgccccacgacaaccgcaccatggtggagatcatcgccgaccacccggccgaactcgtccgcaccgacagccccaacttcctgtgctcggtgctgccctcgcactggcgctgcaacaagaccctgcccgtggccttcaaggtggtagccctcggagaggtaccagatgggactgtggttactgtcatggcgggtaacgatgaaaattattctgctgagctccggaatgcctctgctgttatgaaaaaccaagtagcaaggttcaacgatctgagatttgtgggccggagtggacgaggcaagagtttcaccttgaccataaccgtcttcacaaatcctccccaagtagctacctatcacagagcaattaaagttacagtagatggacctcgggaacccagaaggcacagacagaagcttgatgactctaaacctagtttgttctctgaccgcctcagtgatttagggcgcattcctcatcccagtatgagagtaggtgtcccgcctcagaacccacggccctccctgaactctgcaccaagtccttttaatccacaaggacagagtcagattacagaccccaggcaggcacagtcttccccgccgtggtcctatgaccagtcttacccctcctacctgagccagatgacgtccccgtccatccactctaccaccccgctgtcttccacacggggcactgggcttcctgccatcaccgatgtgcctaggcgcatttcaggtgcttcagaactgggccctttttcagaccccaggcagttcccaagcatttcatccctcactgagagccgcttctccaacccacgaatgcactatccagccacctttacttacaccccgccagtcacctcaggcatgtccctcggtatgtccgccaccactcactaccacacctacctgccaccaccctaccccggctcttcccaaagccagagtggacccttccagaccagcagcactccatatctctactatggcacttcgtcaggatcctatcagtttcccatggtgccggggggagaccggtctccttccagaatgcttccgccatgcaccaccacctcgaatggcagcacgctattaaatccaaatttgcctaaccagaatgatggtgttgacgctgatggaagccacagcagttccccaactgttttgaattctagtggcagaatggatgaatctgtttggcgaccatat

SEQ ID NO: 5557 - DNA, 1497 bp, Homo sapiens
  source 1..1497: mol_type = genomic DNA
atggcatcaaacagcctcttcagcacagtgacaccatgtcagcaaaacttcttttgggatccgagcaccagccggcgcttcagccccccctccagcagcctgcagcccggcaaaatgagcgacgtgagcccggtggtggctgcgcaacagcagcagcaacagcagcagcagcaacagcagcagcagcagcagcaacagcagcagcagcagcaggaggcggcggcggcggctgcggcggcggcggcggctgcggcggcggcagctgcagtgccccggttgcggccgccccacgacaaccgcaccatggtggagatcatcgccgaccacccggccgaactcgtccgcaccgacagccccaacttcctgtgctcggtgctgccctcgcactggcgctgcaacaagaccctgcccgtggccttcaaggtggtagccctcggagaggtaccagatgggactgtggttactgtcatggcgggtaacgatgaaaattattctgctgagctccggaatgcctctgctgttatgaaaaaccaagtagcaaggttcaacgatctgagatttgtgggccggagtggacgaggcaagagtttcaccttgaccataaccgtcttcacaaatcctccccaagtagctacctatcacagagcaattaaagttacagtagatggacctcgggaacccagaaggcacagacagaagcttgatgactctaaacctagtttgttctctgaccgcctcagtgatttagggcgcattcctcatcccagtatgagagtaggtgtcccgcctcagaacccacggccctccctgaactctgcaccaagtccttttaatccacaaggacagagtcagattacagaccccaggcaggcacagtcttccccgccgtggtcctatgaccagtcttacccctcctacctgagccagatgacgtccccgtccatccactctaccaccccgctgtcttccacacggggcactgggcttcctgccatcaccgatgtgcctaggcgcatttcaggtgcttcagaactgggccctttttcagaccccaggcagttcccaagcatttcatccctcactgagagccgcttctccaacccacgaatgcactatccagccacctttacttacaccccgccagtcacctcaggcatgtccctcggtatgtccgccaccactcactaccacacctacctgccaccaccctaccccggctcttcccaaagccagagtggacccttccagaccagcagcactccatatctctactatggcacttcgtcaggatcctatcagtttcccatggtgccggggggagaccggtctccttccagaatgcttccgccatgcaccaccacctcgaatggcagcacgctattaaatccaaatttgcctaaccagaatgatggtgttgacgctgatggaagccacagcagttccccaactgttttgaattctagtggcagaatggatgaatctgtttggcgaccatat

SEQ ID NO: 5558 - DNA, 1245 bp, Homo sapiens
  source 1..1245: mol_type = genomic DNA
atgcgtattcccgtagacccaagcaccagccgccgcttcacacctccctccccggccttcccctgcggcggcggcggcggcaagatgggcgagaacagcggcgcgctgagcgcgcaggcggccgtggggcccggagggcgcgcccggcccgaggtgcgctcgatggtggacgtgctggcggaccacgcaggcgagctcgtgcgcaccgacagccccaacttcctctgctccgtgctgccctcgcactggcgctgcaacaagacgctgcccgtcgccttcaaggtggtggcattgggggacgtgccggatggtacggtggtgactgtgatggcaggcaatgacgagaactactccgctgagctgcgcaatgcctcggccgtcatgaagaaccaggtggccaggttcaacgaccttcgcttcgtgggccgcagtgggcgagggaagagtttcaccctgaccatcactgtgttcaccaaccccacccaagtggcgacctaccaccgagccatcaaggtgaccgtggacggaccccgggagcccagacggcaccggcagaagctggaggaccagaccaagccgttccctgaccgctttggggacctggaacggctgcgcatgcgggtgacaccgagcacacccagcccccgaggctcactcagcaccacaagccacttcagcagccagccccagaccccaatccaaggcacctcggaactgaacccattctccgacccccgccagtttgaccgctccttccccacgctgccaaccctcacggagagccgcttcccagaccccaggatgcattatcccggggccatgtcagctgccttcccctacagcgccacgccctcgggcacgagcatcagcagcctcagcgtggcgggcatgccggccaccagccgcttccaccatacctacctcccgccaccctacccgggggccccgcagaaccagagcgggcccttccaggccaacccgtccccctaccacctctactacgggacatcctctggctcctaccagttctccatggtggccggcagcagcagtgggggcgaccgctcacctacccgcatgctggcctcttgcaccagcagcgctgcctctgtcgccgccggcaacctcatgaaccccagcctgggcggccagagtgatggcgtggaggccgacggcagccacagcaactcacccacggccctgagcacgccaggccgcatggatgaggccgtgtggcggccctac

SEQ ID NO: 5559 - DNA, 750 bp, Homo sapiens
  source 1..750: mol_type = genomic DNA
atgcgtatccccgtagatgccagcacgagccgccgcttcacgccgccttccaccgcgctgagcccaggcaagatgagcgaggcgttgccgctgggcgccccggacgccggcgctgccctggccggcaagctgaggagcggcgaccgcagcatggtggaggtgctggccgaccacccgggcgagctggtgcgcaccgacagccccaacttcctctgctccgtgctgcctacgcactggcgctgcaacaagaccctgcccatcgctttcaaggtggtggccctaggggatgttccagatggcactctggtcactgtgatggctggcaatgatgaaaactactcggctgagctgagaaatgctaccgcagccatgaagaaccaggttgcaagatttaatgacctcaggtttgtcggtcgaagtggaagagggaaaagcttcactctgaccatcactgtcttcacaaacccaccgcaagtcgccacctaccacagagccatcaaaatcacagtggatgggccccgagaacctcgaagacatcggcagaaactagatgatcagaccaagcccgggagcttgtccttttccgagcggctcagtgaactggagcagctgcggcgcacagccatgagggtcagcccacaccacccagcccccacgcccaaccctcgtgcctccctgaaccactccactgcctttaaccctcagcctcagagtcagatgcaggaggaagacacagcaccctggagatgt

SEQ ID NO: 5560 - DNA, 1359 bp, Homo sapiens
  source 1..1359: mol_type = genomic DNA
atgcgtatccccgtagatgccagcacgagccgccgcttcacgccgccttccaccgcgctgagcccaggcaagatgagcgaggcgttgccgctgggcgccccggacgccggcgctgccctggccggcaagctgaggagcggcgaccgcagcatggtggaggtgctggccgaccacccgggcgagctggtgcgcaccgacagccccaacttcctctgctccgtgctgcctacgcactggcgctgcaacaagaccctgcccatcgctttcaaggtggtggccctaggggatgttccagatggcactctggtcactgtgatggctggcaatgatgaaaactactcggctgagctgagaaatgctaccgcagccatgaagaaccaggttgcaagatttaatgacctcaggtttgtcggtcgaagtggaagagggaaaagcttcactctgaccatcactgtcttcacaaacccaccgcaagtcgccacctaccacagagccatcaaaatcacagtggatgggccccgagaacctcgaagacatcggcagaaactagatgatcagaccaagcccgggagcttgtccttttccgagcggctcagtgaactggagcagctgcggcgcacagccatgagggtcagcccacaccacccagcccccacgcccaaccctcgtgcctccctgaaccactccactgcctttaaccctcagcctcagagtcagatgcaggatacaaggcagatccaaccatccccaccgtggtcctacgatcagtcctaccaatacctgggatccattgcctctccttctgtgcacccagcaacgcccatttcacctggacgtgccagcggcatgacaaccctctctgcagaactttccagtcgactctcaacggcacccgacctgacagcgttcagcgacccgcgccagttccccgcgctgccctccatctccgacccccgcatgcactatccaggcgccttcacctactccccgacgccggtcacctcgggcatcggcatcggcatgtcggccatgggctcggccacgcgctaccacacctacctgccgccgccctaccccggctcgtcgcaagcgcagggaggcccgttccaagccagctcgccctcctaccacctgtactacggcgcctcggccggctcctaccagttctccatggtgggcggcgagcgctcgccgccgcgcatcctgccgccctgcaccaacgcctccaccggctccgcgctgctcaaccccagcctcccgaaccagagcgacgtggtggaggccgagggcagccacagcaactcccccaccaacatggcgccctccgcgcgcctggaggaggccgtgtggaggccctac

SEQ ID NO: 5561 - DNA, 1902 bp, Homo sapiens
  source 1..1902: mol_type = genomic DNA
atggagccatctcctctgtctcccagtggggcagcacttcccctgccgctgtcgctggctccgcccccactacccctgccagcagctgcagtggtacatgtgtccttccctgaggtgaccagtgccctcttggagtccctcaatcagcagcgtctgcagggccagctctgcgatgtatctatcagagtgcagggccgggagttccgggctcatcgggctgtcctggctgcctcctccccttacttccatgatcaggtcctactcaaaggcatgacctccatctcgctgcccagtgtcatggacccaggcgcctttgagactgtcctagcctccgcttacactggccgcctcagcatggctgctgctgacattgtcaacttccttacagtggggtctgtgctccaaatgtggcacattgtggacaagtgcactgaactactccgagaaggccgggcctcagctaccaccaccatcactactgctgcagccacctctgtcactgtccctggtgctggggtgccatccgggagtgggggcactgtggcccctgctaccatgggctctgcgcgctcccatgcctccagccgggccagtgagaatcaatctcccagcagcagcaactacttcagccccagggagtccactgatttctcatcttcctcccaagaggcatttgcagcttctgcagtgggcagtggggagcgtcgaggaggtggccctgtattcccagcccctgtcgttggcagtggaggggccacatctggaaagctgctgctggaggcagatgagctgtgcgatgatggtggggatgggaggggggcagtggttcctggggctgggctccggagacccacctacacaccccctagcatcatgccacagaaacactgggtatacgtgaagcgaggtggtaattgcccagcgccaacacccctggttccccaagacccagatctggaggaggaagaggaggaggaagatctggtgttgacctgtgaggatgatgaagatgaagaactagggggtagctccagggttccagtggggggagggcctgaggctaccctcagcataagtgatgtccgtaccctgagtgagcccccagacaagggggaggagcaggtcaacttctgtgagtcctccaatgactttggcccatatgagggtgggggtcctgtggcaggtcttgatgactcaggggggccaactccctcttcctatgccccctcccaccctcctcgaccgctccttcccttggacatgcagggcaaccagatcctggtcttcccgtcgtcgtcttcatcctcatcctcacaggctcctggccaaccaccagggaaccaagcagaacacggggcagtgaccgtggggggcacgtcggtggggagcctgggtgtgccgggtagcgttggtggggtccctggagggactggcagtggggacgggaataagatctttctgtgccattgtgggaaggccttctcccacaagagcatgcgggaccggcacgtgaacatgcacctcaatctgcggccgtttgactgccccgtgtgcaacaaaaagttcaagatgaagcaccatctgactgagcacatgaagacgcacacaggtctcaagccctacgagtgcggagtctgcgccaagaagttcatgtggcgagacagcttcatgcgccaccgaggacactgtgagcgccggcaccgcctgggcggggtcggggccgtacctgggcctgggactcccacggggccatccttgccgtccaagagagagtctcccggagtgggcgggggcagcggcgacgaagcgagtgcggccacgcccccgtccagcagacgtgtctggtccccacccagagtccacaaggtggagatgggcttcggtggaggtggaggagcaaac

SEQ ID NO: 5562 - DNA, 2223 bp, Homo sapiens
  source 1..2223: mol_type = genomic DNA
atgctagaacggaagaaacccaagacagctgaaaaccagaaggcatctgaggagaatgagattactcagccgggtggatccagcgccaagccgggccttccctgcctgaactttgaagctgttttgtctccagacccagccctcatccactcaacacattcactgacaaactctcacgctcacaccgggtcatctgattgtgacatcagttgcaaggggatgaccgagcgcattcacagcatcaaccttcacaacttcagcaattccgtgctcgagaccctcaacgagcagcgcaaccgtggccacttctgtgacgtaacggtgcgcatccacgggagcatgctgcgcgcacaccgctgcgtgctggcagccggcagccccttcttccaggacaaactgctgcttggctacagcgacatcgagatcccgtcggtggtgtcagtgcagtcagtgcaaaagctcattgacttcatgtacagcggcgtgctacgggtctcgcagtcggaagctctgcagatcctcacggccgccagcatcctgcagatcaaaacagtcatcgacgagtgcacgcgcatcgtgtcacagaacgtgggcgatgtgttcccggggatccaggactcgggccaggacacgccgcggggcactcccgagtcaggcacgtcaggccagagcagcgacacggagtcgggctacctgcagagccacccacagcacagcgtggacaggatctactcggcactctacgcgtgctccatgcagaatggcagcggcgagcgctctttttacagcggcgcagtggtcagccaccacgagactgcgctcggcctgccccgcgaccaccacatggaagaccccagctggatcacacgcatccatgagcgctcgcagcagatggagcgctacctgtccaccacccccgagaccacgcactgccgcaagcagccccggcctgtgcgcatccagaccctagtgggcaacatccacatcaagcaggagatggaggacgattacgactactacgggcagcaaagggtgcagatcctggaacgcaacgaatccgaggagtgcacggaagacacagaccaggccgagggcaccgagagtgagcccaaaggtgaaagcttcgactcgggcgtcagctcctccataggcaccgagcctgactcggtggagcagcagtttgggcctggggcggcgcgggacagccaggctgaacccacccaacccgagcaggctgcagaagcccccgctgagggtggtccgcagacaaaccagctagaaacaggtgcttcctctccggagagaagcaatgaagtggagatggacagcactgttatcactgtcagcaacagctccgacaagagcgtcctacaacagccttcggtcaacacgtccatcgggcagccattgccaagtacccagctctacttacgccagacagaaaccctcaccagcaacctgaggatgcctctgaccttgaccagcaacacgcaggtcattggcacagctggcaacacctacctgccagccctcttcactacccagcccgcgggcagtggccccaagcctttcctcttcagcctgccacagcccctggcaggccagcagacccagtttgtgacagtgtcccagcccggtctgtcgacctttactgcacagctgccagcgccacagcccctggcctcatccgcaggccacagcacagccagtgggcaaggcgaaaaaaagccttatgagtgcactctctgcaacaagactttcaccgccaaacagaactacgtcaagcacatgttcgtacacacaggtgagaagccccaccaatgcagcatctgttggcgctccttctccttaaaggattaccttatcaagcacatggtgacacacacaggagtgagggcataccagtgtagtatctgcaacaagcgcttcacccagaagagctccctcaacgtgcacatgcgcctccaccggggagagaagtcctacgagtgctacatctgcaaaaagaagttctctcacaagaccctcctggagcgacacgtggccctgcacagtgccagcaatgggaccccccctgcaggcacacccccaggtgcccgcgctggccccccaggcgtggtggcctgcacggaggggaccacttacgtctgctccgtctgcccagcaaagtttgaccaaatcgagcagttcaacgaccacatgaggatgcatgtgtctgacgga

SEQ ID NO: 5563 - DNA, 2004 bp, Homo sapiens
  source 1..2004: mol_type = genomic DNA
atgaccgagcgcattcacagcatcaaccttcacaacttcagcaattccgtgctcgagaccctcaacgagcagcgcaaccgtggccacttctgtgacgtaacggtgcgcatccacgggagcatgctgcgcgcacaccgctgcgtgctggcagccggcagccccttcttccaggacaaactgctgcttggctacagcgacatcgagatcccgtcggtggtgtcagtgcagtcagtgcaaaagctcattgacttcatgtacagcggcgtgctacgggtctcgcagtcggaagctctgcagatcctcacggccgccagcatcctgcagatcaaaacagtcatcgacgagtgcacgcgcatcgtgtcacagaacgtgggcgatgtgttcccggggatccaggactcgggccaggacacgccgcggggcactcccgagtcaggcacgtcaggccagagcagcgacacggagtcgggctacctgcagagccacccacagcacagcgtggacaggatctactcggcactctacgcgtgctccatgcagaatggcagcggcgagcgctctttttacagcggcgcagtggtcagccaccacgagactgcgctcggcctgccccgcgaccaccacatggaagaccccagctggatcacacgcatccatgagcgctcgcagcagatggagcgctacctgtccaccacccccgagaccacgcactgccgcaagcagccccggcctgtgcgcatccagaccctagtgggcaacatccacatcaagcaggagatggaggacgattacgactactacgggcagcaaagggtgcagatcctggaacgcaacgaatccgaggagtgcacggaagacacagaccaggccgagggcaccgagagtgagcccaaaggtgaaagcttcgactcgggcgtcagctcctccataggcaccgagcctgactcggtggagcagcagtttgggcctggggcggcgcgggacagccaggctgaacccacccaacccgagcaggctgcagaagcccccgctgagggtggtccgcagacaaaccagctagaaacaggtgcttcctctccggagagaagcaatgaagtggagatggacagcactgttatcactgtcagcaacagctccgacaagagcgtcctacaacagccttcggtcaacacgtccatcgggcagccattgccaagtacccagctctacttacgccagacagaaaccctcaccagcaacctgaggatgcctctgaccttgaccagcaacacgcaggtcattggcacagctggcaacacctacctgccagccctcttcactacccagcccgcgggcagtggccccaagcctttcctcttcagcctgccacagcccctggcaggccagcagacccagtttgtgacagtgtcccagcccggtctgtcgacctttactgcacagctgccagcgccacagcccctggcctcatccgcaggccacagcacagccagtgggcaaggcgaaaaaaagccttatgagtgcactctctgcaacaagactttcaccgccaaacagaactacgtcaagcacatgttcgtacacacaggtgagaagccccaccaatgcagcatctgttggcgctccttctccttaaaggattaccttatcaagcacatggtgacacacacaggagtgagggcataccagtgtagtatctgcaacaagcgcttcacccagaagagctccctcaacgtgcacatgcgcctccaccggggagagaagtcctacgagtgctacatctgcaaaaagaagttctctcacaagaccctcctggagcgacacgtggccctgcacagtgccagcaatgggaccccccctgcaggcacacccccaggtgcccgcgctggccccccaggcgtggtggcctgcacggaggggaccacttacgtctgctccgtctgcccagcaaagtttgaccaaatcgagcagttcaacgaccacatgaggatgcatgtgtctgacgga

SEQ ID NO: 5564 - DNA, 3198 bp, Homo sapiens
  source 1..3198: mol_type = genomic DNA
atggagggattactgcattacatcaaccctgcacacgccatttctctcctaagtgccctgaatgaggagcgtctcaaaggacagctgtgtgatgtgctgctgattgttggagaccaaaagttccgagctcataaaaacgtcttggctgccagcagcgaatactttcagagtttattcacaaataaggaaaatgagtcacaaactgtatttcagcttgacttctgtgagccagatgcttttgataatgttttaaactacatttattcttcctctctatttgttgagaagagcagccttgctgctgtgcaagaacttggctatagtcttgggatttcctttctgactaacatcgtttctaaaacacctcaagccccctttccaacgtgtcctaatagaaaaaaagtgtttgtagaagatgatgaaaacagttctcaaaagagaagtgtcattgtttgtcaaagtagaaacgaagcgcaaggaaaaactgttagtcaaaatcaacccgatgtaagccatacttcccggccctctcctagcattgcagtcaaggccaataccaataagccacatgtcccaaaaccaatagaaccacttcataatttgtcattaactgaaaagagttggccgaaagatagttctgtggtatatgcaaagtctcttgagcattctggatctttggatgatcctaatagaatcagtttggtgaaaagaaatgcagtgttgccttcaaagcctctgcaagacagagaagctatggatgataaaccaggtgtgagtggtcagcttccaaaaggaaaagctctagagctggctttgaagagaccacggccacctgttttgtctgtttgtagctcatcagagactccctatctattaaaagaaactaacaaaggaaatggtcaaggtgaagatagaaacttgttgtactattcaaagttaggcttagtgatcccatccagtggatctggttctggaaaccaaagcattgacaggagtggcccacttgttaagagtctcctcagacggtcattgtcgatggatagccaggttcctgtctattcaccttccatagatttgaaatcttcccagggatcatcttcggtgtccagtgatgcaccagggaatgtgttgtgtgctttatctcagaagtcatctttaaaagattgtagtgaaaaaacagccctagatgacaggcctcaagtgctacaaccgcatcgcctcaggtcctttagtgcttctcagtcaacagacagggagggagcttcccctgtgactgaggtgcgcataaagactgagcccagcagcccgctgtcggacccctcggacatcatccgcgtcactgtgggagatgcggcaacaacagcagctgcctcatcttcgtcggtcacaagagacctgtctctgaaaacagaagatgaccaaaaagacatgagcagactcccagcaaaaaggaggttccaagcggaccgaagattgccgtttaagaagttaaaggtgaatgagcacgggtctcctgtgtcagaagataattttgaggaaggctcaagccctactctccttgatgcagattttccagattctgatttgaataaagacgaatttggtgagttggaggggacgagaccaaacaaaaaatttaaatgcaaacattgccttaagatctttagatcaacagcaggtcttcaccgtcatgttaacatgtaccataacccagaaaagccctacgcttgtgacatctgtcacaagaggtttcacaccaacttcaaagtgtggacacactgtcagacccaacacggcatagtgaagaacccatcaccagcctctagttcacatgctgttttggatgaaaaattccaaagaaagctgattgacatagtgagagagagagaaattaagaaggccctgatcattaagttaaggcgcggcaagcctggttttcagggacagagtagctcccaagcacagcaagtcatcaagaggaacttgagatctcgagccaaaggagcttacatttgtacttactgcggaaaagcgtaccgctttctctctcaatttaagcagcatataaaaatgcatccaggagaaaaaccccttggagtaaataaagttgctaaaccaaaagagcatgctcctcttgcaagtccagtagaaaacaaggaggtttaccagtgccgcctctgtaatgctaagctctcttctctcctagagcaaggaagccacgagcggctgtgccggaacgcggccgtctgcccttactgcagcctcaggtttttctcgcccgagctgaagcaagaacacgagagcaagtgtgagtataagaagctgacctgcctcgagtgcatgcgcaccttcaagtcctctttcagcatctggcggcaccaggttgaagtccataatcagaacaacatggcacccaccgaaaacttttctttgcccgttttggaccacaatggtgatgtgactggttcttcaaggccccaatcccagcctgagcccaacaaagtaaaccacatcgtcaccacaaaagacgacaacgtgttcagtgattcttcagaacaagttaacttcgactcggaagattcctcttgtcttcccgaagaccttagtctttccaagcaactgaaaatccaagtcaaagaggagcctgtggaggaggctgaagaagaggcacccgaggccagcacagcccccaaagaagcgggtcctagcaaagaagccagcctgtggccctgcgagaagtgtgggaagatgttcacggtgcataagcagctggagcgtcaccaggagcttctgtgctctgtgaaaccatttatttgtcacgtgtgcaacaaagcttttcgcactaattttcgactctggagtcacttccaatcgcacatgtctcaggcttcagaggaatcggcacataaggaatctgaggtgtgccctgttcccacaaactctccctctccaccacctctgccaccgccaccaccactgcccaagatccagcctctggagcctgacagccccacaggcctgtccgaaaacccaactccagccacagaaaaactgtttgtgccccaagaatcagacacccttttttaccatgccccacccctttcagcaatcacatttaaaagacagtttatgtgtaaactttgccacaggacattcaagactgcatttagtctttggagtcacgaacaaacacacaat

SEQ ID NO: 5565 - DNA, 2595 bp, Homo sapiens
  source 1..2595: mol_type = genomic DNA
atggagggattactgcattacatcaaccctgcacacgccatttctctcctaagtgccctgaatgaggagcgtctcaaaggacagctgtgtgatgtgctgctgattgttggagaccaaaagttccgagctcataaaaacgtcttggctgccagcagcgaatactttcagagtttattcacaaataaggaaaatgagtcacaaactgtatttcagcttgacttctgtgagccagatgcttttgataatgttttaaactacatttattcttcctctctatttgttgagaagagcagccttgctgctgtgcaagaacttggctatagtcttgggatttcctttctgactaacatcgtttctaaaacacctcaagccccctttccaacgtgtcctaatagaaaaaaagtgtttgtagaagatgatgaaaacagttctcaaaagagaagtgtcattgtttgtcaaagtagaaacgaagcgcaaggaaaaactgttagtcaaaatcaacccgatgtaagccatacttcccggccctctcctagcattgcagtcaaggccaataccaataagccacatgtcccaaaaccaatagaaccacttcataatttgtcattaactgaaaagagttggccgaaagatagttctgtggtatatgcaaagtctcttgagcattctggatctttggatgatcctaatagaatcagtttggtgaaaagaaatgcagtgttgccttcaaagcctctgcaagacagagaagctatggatgataaaccaggtgtgagtggtcagcttccaaaaggaaaagctctagagctggctttgaagagaccacggccacctgttttgtctgtttgtagctcatcagagactccctatctattaaaagaaactaacaaaggaaatggtcaaggtgaagatagaaacttgttgtactattcaaagttaggcttagtgatcccatccagtggatctggttctggaaaccaaagcattgacaggagtggcccacttgttaagagtctcctcagacggtcattgtcgatggatagccaggttcctgtctattcaccttccatagatttgaaatcttcccagggatcatcttcggtgtccagtgatgcaccagggaatgtgttgtgtgctttatctcagaagtcatctttaaaagattgtagtgaaaaaacagccctagatgacaggcctcaagtgctacaaccgcatcgcctcaggtcctttagtgcttctcagtcaacagacagggagggagcttcccctgtgactgaggtgcgcataaagactgagcccagcagcccgctgtcggacccctcggacatcatccgcgtcactgtgggagatgcggcaacaacagcagctgcctcatcttcgtcggtcacaagagacctgtctctgaaaacagaagatgaccaaaaagacatgagcagactcccagcaaaaaggaggttccaagcggaccgaagattgccgtttaagaagttaaaggtgaatgagcacgggtctcctgtgtcagaagataattttgaggaaggctcaagccctactctccttgatgcagattttccagattctgatttgaataaagacgaatttgagcaaggaagccacgagcggctgtgccggaacgcggccgtctgcccttactgcagcctcaggtttttctcgcccgagctgaagcaagaacacgagagcaagtgtgagtataagaagctgacctgcctcgagtgcatgcgcaccttcaagtcctctttcagcatctggcggcaccaggttgaagtccataatcagaacaacatggcacccaccgaaaacttttctttgcccgttttggaccacaatggtgatgtgactggttcttcaaggccccaatcccagcctgagcccaacaaagtaaaccacatcgtcaccacaaaagacgacaacgtgttcagtgattcttcagaacaagttaacttcgactcggaagattcctcttgtcttcccgaagaccttagtctttccaagcaactgaaaatccaagtcaaagaggagcctgtggaggaggctgaagaagaggcacccgaggccagcacagcccccaaagaagcgggtcctagcaaagaagccagcctgtggccctgcgagaagtgtgggaagatgttcacggtgcataagcagctggagcgtcaccaggagcttctgtgctctgtgaaaccatttatttgtcacgtgtgcaacaaagcttttcgcactaattttcgactctggagtcacttccaatcgcacatgtctcaggcttcagaggaatcggcacataaggaatctgaggtgtgccctgttcccacaaactctccctctccaccacctctgccaccgccaccaccactgcccaagatccagcctctggagcctgacagccccacaggcctgtccgaaaacccaactccagccacagaaaaactgtttgtgccccaagaatcagacacccttttttaccatgccccacccctttcagcaatcacatttaaaagacagtttatgtgtaaactttgccacaggacattcaagactgcatttagtctttggagtcacgaacaaacacacaat

SEQ ID NO: 5566 - DNA, 258 bp, Homo sapiens
  source 1..258: mol_type = genomic DNA
atggacactgccagccatagccttgttcttctccagcagctgaacatgcagcgagaatttggttttctgtgtgattgcacagttgcaattggagatgtttacttcaaagcccacagagcagtgcttgctgctttttctaactatttcaagatgatatttattcaccaaacaagacagcaaatcacccaccttgaggtcataaaggagctggaagctgctgggtgcttgtgctgctctctggacggcctgagccagggc

SEQ ID NO: 5567 - DNA, 1245 bp, Homo sapiens
  source 1..1245: mol_type = genomic DNA
atggcgatgagagagctgaacgcggattcatgctcaagcccccagatgggggctatgtgggagactagtgggtctgtgaaagagaactccagtcagagtaagaaatacagcacaaaaatagagaatcttggtcctgagagcgcttgcaggcacttctggagcttccgttatcatgaagcaaccggaccgcttgagactatcagccaacttcagaaattgtgccatcagtggctgaggccagagatccactcaaaagagcagatcttggaaatgctggtgttagagcagttcctgagcattctgcccaaggagacccagaactgggtgcagaagcatcatccacagaatgtcaaacaggctctggtcctggtggaattcttgcagagggagcctgatggaacaaagaatgagagtttgttgacatttgaagatgtggctgtgtatttttctgaggaagagtggcaattattgaatcctcttgagaagactctctacaatgatgtaatgcaggatatctatgagactgtcatctctctagggttaaagctaaaaaatgacactggaaatgatcatcctatatctgtttctacatcagaaatacaaacatcaggatgcgaagtatcaaaaaagaccagaatgaaaattgcccagaaaacaatgggcagggaaaatcctggtgatacacacagtgtacagaaatggcatcgagcttttccaaggaagaaaagaaagaaacctgcaacttgtaaacaagagcttccaaaacttatggatcttcatgggaaaggccccacaggggagaaaccttttaagtgtcaggaatgtgggaaaagcttcagagttagctctgatcttattaaacaccacagaattcacactggagagaaaccctataaatgtcaacaatgtgacaggaggtttagatggagttcagatcttaataagcacttcatgacccatcaaggaataaaaccatatagatgctcatggtgtgggaaaagctttagtcataacacaaatctacacacacaccaaagaattcacacaggagagaagccctttaaatgtgatgaatgtggaaaaagattcattcagaactcccaccttattaaacaccagagaactcacacaggtgagcagccttatacgtgtagcttatgcaagagaaactttagtaggcgatcgagccttcttagacaccagaaactccacagaagaagggaagcatgtctagtgtctccaaac

SEQ ID NO: 5568 - DNA, 2196 bp, Homo sapiens
  source 1..2196: mol_type = genomic DNA
atggtgcggtcggggaataaggcagctgttgtgctgtgtatggacgtgggctttaccatgagtaactccattcctggtatagaatccccatttgaacaagcaaagaaggtgataaccatgtttgtacagcgacaggtgtttgctgagaacaaggatgagattgctttagtcctgtttggtacagatggcactgacaatcccctttctggtggggatcagtatcagaacatcacagtgcacagacatctgatgctaccagattttgatttgctggaggacattgaaagcaaaatccaaccaggttctcaacaggctgacttcctggatgcactaatcgtgagcatggatgtgattcaacatgaaacaataggaaagaagtttgagaagaggcatattgaaatattcactgacctcagcagccgattcagcaaaagtcagctggatattataattcatagcttgaagaaatgtgacatctccctgcaattcttcttgcctttctcacttggcaaggaagatggaagtggggacagaggagatggcccctttcgcttaggtggccatgggccttcctttccactaaaaggaattaccgaacagcaaaaagaaggtcttgagatagtgaaaatggtgatgatatctttagaaggtgaagatgggttggatgaaatttattcattcagtgagagtctgagaaaactgtgcgtcttcaagaaaattgagaggcattccattcactggccctgccgactgaccattggctccaatttgtctataaggattgcagcctataaatcgattctacaggagagagttaaaaagacttggacagttgtggatgcaaaaaccctaaaaaaagaagatatacaaaaagaaacagtttattgcttaaatgatgatgatgaaactgaagttttaaaagaggatattattcaagggttccgctatggaagtgatatagttcctttctctaaagtggatgaggaacaaatgaaatataaatcggaggggaagtgcttctctgttttgggattttgtaaatcttctcaggttcagagaagattcttcatgggaaatcaagttctaaaggtctttgcagcaagagatgatgaggcagctgcagttgcactttcctccctgattcatgctttggatgacttagacatggtggccatagttcgatatgcttatgacaaaagagctaatcctcaagtcggcgtggcttttcctcatatcaagcataactatgagtgtttagtgtatgtgcagctgcctttcatggaagacttgcggcaatacatgttttcatccttgaaaaacagtaagaaatatgctcccaccgaggcacagttgaatgctgttgatgctttgattgactccatgagcttggcaaagaaagatgagaagacagacacccttgaagacttgtttccaaccaccaaaatcccaaatcctcgatttcagagattatttcagtgtctgctgcacagagctttacatccccgggagcctctacccccaattcagcagcatatttggaatatgctgaatcctcccgctgaggtgacaacaaaaagtcagattcctctctctaaaataaagaccctttttcctctgattgaagccaagaaaaaggatcaagtgactgctcaggaaattttccaagacaaccatgaagatggacctacagctaaaaaattaaagactgagcaagggggagcccacttcagcgtctccagtctggctgaaggcagtgtcacctctgttggaagtgtgaatcctgctgaaaacttccgtgttctagtgaaacagaagaaggccagctttgaggaagcgagtaaccagctcataaatcacatcgaacagtttttggatactaatgaaacaccgtattttatgaagagcatagactgcatccgagccttccgggaagaagccattaagttttcagaagagcagcgctttaacaacttcctgaaagcccttcaagagaaagtggaaattaaacaattaaatcatttctgggaaattgttgtccaggatggaattactctgatcaccaaagaggaagcctctggaagttctgtcacagctgaggaagccaaaaagtttctggcccccaaagacaaaccaagtggagacacagcagctgtatttgaagaaggtggtgatgtggacgatttattggacatgata

SEQ ID NO: 5569 - DNA, 1002 bp, Homo sapiens
  source 1..1002: mol_type = genomic DNA
atggagagaaaaataagcagaatccaccttgtttctgaacccagtataactcattttctacaagtatcttgggagaaaacactggaatctggttttgttattacacttactgatggtcattcagcatggactgggacagtttctgaatcagagatttcccaagaagctgatgacatggcaatggaaaaagggaaatatgttggtgaactgagaaaagcattgttgtcaggagcaggaccagctgatgtatacacgtttaatttttctaaagagtcttgttatttcttctttgagaaaaacctgaaagatgtctcattcagacttggttccttcaacctagagaaagttgaaaacccagctgaagtcattagagaacttatttgttattgcttggacaccattgcagaaaatcaagccaaaaatgagcacctgcagaaagaaaatgaaaggcttctgagagattggaatgatgttcaaggacgatttgaaaaatgtgtgagtgctaaggaagctttggagactgatctttataagcggtttattctggtgttgaatgagaagaaaacaaaaatcagaagtttgcataataaattattaaatgcagctcaagaacgagaaaaggacatcaaacaagaaggggaaactgcaatctgttctgaaatgactgctgaccgagatccagtctatgatgagagtactgatgaggaaagtgaaaaccaaactgatctctctgggttggcttcagctgctgtaagtaaagatgattccattatttcaagtcttgatgtcactgatattgcaccaagtagaaaaaggagacagcgaatgcaaagaaatcttgggacagaacctaaaatggctcctcaggagaatcagcttcaagaaaaggaaaagcctgattcttcactacctgagacgtctaaaaaggagcacatctcagctgaaaacatgtctttagaaactctgagaaacagcagcccagaagacctctttgatgagatt

SEQ ID NO: 5570 - DNA, 1704 bp, Homo sapiens
  source 1..1704: mol_type = genomic DNA
atgtcagggtgggagtcatattacaaaaccgagggcgatgaagaagcagaggaagaacaagaagagaaccttgaagcaagtggagactataaatattcaggaagagatagtttgatttttttggttgatgcctccaaggctatgtttgaatctcagagtgaagatgagttgacaccttttgacatgagcatccaggagctggataatccaggtgcaaaacgaattctagagcttgaccagtttaaggggcagcagggacaaaaacgtttccaagacatgatgggccacggatctgactactcactcagtgaagtgctgtgggtctgtgccaacctctttagtgatgtccaattcaagatgagtcataagaggatcatgctgttcaccaatgaagacaacccccatggcaatgacagtgccaaagccagccgggccaggaccaaagccggtgatctccgagatacaggcatcttccttgacttgatgcacctgaagaaacctgggggctttgacatatccttgttctacagagatatcatcagcatagcagaggatgaggacctcagggttcactttgaggaatccagcaagctagaagacctgttgcggaaggttcgcgccaaggagaccaggaagcgagcactcagcaggttaaagctgaagctcaacaaagatatagtgatctctgtgggcatttataatctggtccagaaggctctcaagcctcctccaataaagctctatcgggaaacaaatgaaccagtgaaaaccaagacccggacctttaatacaagtacaggcggtttgcttctgcctagcgataccaagaggtctcagatctatgggagtcgtcagattatactggagaaagaggaaacagaagagctaaaacggtttgatgatccaggtttgatgctcatgggtttcaagccgttggtactgctgaagaaacaccattacctgaggccctccctgttcgtgtacccagaggagtcgctggtgattgggagctcaaccctgttcagtgctctgctcatcaagtgtctggagaaggaggttgcagcattgtgcagatacacaccccgcaggaacatccctccttattttgtggctttggtgccacaggaagaagagttggatgaccagaaaattcaggtgactcctccaggcttccagctggtctttttaccctttgctgatgataaaaggaagatgccctttactgaaaaaatcatggcaactccagagcaggtgggcaagatgaaggctatcgttgagaagcttcgcttcacatacagaagtgacagctttgagaaccccgtgctgcagcagcacttcaggaacctggaggccttggccttggatttgatggagccggaacaagcagtggacctgacattgcccaaggttgaagcaatgaataaaagactgggctccttggtggatgagtttaaggagcttgtttacccaccagattacaatcctgaagggaaagttaccaagagaaaacacgataatgaaggttctggaagcaaaaggcccaaggtggagtattcagaagaggagctgaagacccacatcagcaagggtacgctgggcaagttcactgtgcccatgctgaaagaggcctgccgggcttacgggctgaagagtgggctgaagaagcaggagctgctggaagccctcaccaagcacttccaggac

SEQ ID NO: 5571 - DNA, 1677 bp, Homo sapiens
  source 1..1677: mol_type = genomic DNA
atgaagaagcagaggaagaacaagaagagaaccttgaagcaagtgtgtatccaaagtgtgtacatcagtaagatcataagcagtgatcgagatctcttggctgtggtgttctatggtaccgagaaagacaaaaattcagtgaattttaaaaatatttacgtcttacaggagctggataatccaggtgcaaaacgaattctagagcttgaccagtttaaggggcagcagggacaaaaacgtttccaagacatgatgggccacggatctgactactcactcagtgaagtgctgtgggtctgtgccaacctctttagtgatgtccaattcaagatgagtcataagaggatcatgctgttcaccaatgaagacaacccccatggcaatgacagtgccaaagccagccgggccaggaccaaagccggtgatctccgagatacaggcatcttccttgacttgatgcacctgaagaaacctgggggctttgacatatccttgttctacagagatatcatcagcatagcagaggatgaggacctcagggttcactttgaggaatccagcaagctagaagacctgttgcggaaggttcgcgccaaggagaccaggaagcgagcactcagcaggttaaagctgaagctcaacaaagatatagtgatctctgtgggcatttataatctggtccagaaggctctcaagcctcctccaataaagctctatcgggaaacaaatgaaccagtgaaaaccaagacccggacctttaatacaagtacaggcggtttgcttctgcctagcgataccaagaggtctcagatctatgggagtcgtcagattatactggagaaagaggaaacagaagagctaaaacggtttgatgatccaggtttgatgctcatgggtttcaagccgttggtactgctgaagaaacaccattacctgaggccctccctgttcgtgtacccagaggagtcgctggtgattgggagctcaaccctgttcagtgctctgctcatcaagtgtctggagaaggaggttgcagcattgtgcagatacacaccccgcaggaacatccctccttattttgtggctttggtgccacaggaagaagagttggatgaccagaaaattcaggtgactcctccaggcttccagctggtctttttaccctttgctgatgataaaaggaagatgccctttactgaaaaaatcatggcaactccagagcaggtgggcaagatgaaggctatcgttgagaagcttcgcttcacatacagaagtgacagctttgagaaccccgtgctgcagcagcacttcaggaacctggaggccttggccttggatttgatggagccggaacaagcagtggacctgacattgcccaaggttgaagcaatgaataaaagactgggctccttggtggatgagtttaaggagcttgtttacccaccagattacaatcctgaagggaaagttaccaagagaaaacacgataatgaaggttctggaagcaaaaggcccaaggtggagtattcagaagaggagctgaagacccacatcagcaagggtacgctgggcaagttcactgtgcccatgctgaaagaggcctgccgggcttacgggctgaagagtgggctgaagaagcaggagctgctggaagccctcaccaagcacttccaggac

SEQ ID NO: 5572 - DNA, 993 bp, Homo sapiens
  source 1..993: mol_type = genomic DNA
atgactgcaaagatggaaacgaccttctatgacgatgccctcaacgcctcgttcctcccgtccgagagcggaccttatggctacagtaaccccaagatcctgaaacagagcatgaccctgaacctggccgacccagtggggagcctgaagccgcacctccgcgccaagaactcggacctcctcacctcgcccgacgtggggctgctcaagctggcgtcgcccgagctggagcgcctgataatccagtccagcaacgggcacatcaccaccacgccgacccccacccagttcctgtgccccaagaacgtgacagatgagcaggagggcttcgccgagggcttcgtgcgcgccctggccgaactgcacagccagaacacgctgcccagcgtcacgtcggcggcgcagccggtcaacggggcaggcatggtggctcccgcggtagcctcggtggcagggggcagcggcagcggcggcttcagcgccagcctgcacagcgagccgccggtctacgcaaacctcagcaacttcaacccaggcgcgctgagcagcggcggcggggcgccctcctacggcgcggccggcctggcctttcccgcgcaaccccagcagcagcagcagccgccgcaccacctgccccagcagatgcccgtgcagcacccgcggctgcaggccctgaaggaggagcctcagacagtgcccgagatgcccggcgagacaccgcccctgtcccccatcgacatggagtcccaggagcggatcaaggcggagaggaagcgcatgaggaaccgcatcgctgcctccaagtgccgaaaaaggaagctggagagaatcgcccggctggaggaaaaagtgaaaaccttgaaagctcagaactcggagctggcgtccacggccaacatgctcagggaacaggtggcacagcttaaacagaaagtcatgaaccacgttaacagtgggtgccaactcatgctaacgcagcagttgcaaacattt

SEQ ID NO: 5573 - DNA, 1203 bp, Homo sapiens
  source 1..1203: mol_type = genomic DNA
atggcgcaaaggtacgatgagctgccccattacggcgggatggacggagtaggggttcccgcttccatgtacggagaccctcacgcgccgcggccgatccccccggttcaccacctgaaccacgggccgccgctccacgccacacagcactacggcgcgcacgccccgcaccccaatgtcatgccggccagtatgggatccgctgtcaacgacgccttgaagcgggacaaggacgcgatctatgggcacccgttgtttcctctgttagctctggtctttgagaagtgcgagctggcgacctgcactccccgggaacctggagtggctggcggagacgtctgctcctccgactccttcaacgaggacatcgcggtcttcgccaagcaggttcgcgccgaaaagccacttttttcctcaaatccagagctggacaatttgatgatacaagcaatacaagtactaaggtttcatcttttggagttagaaaaggtccacgaactgtgcgataacttctgccaccgatacattagctgtttgaaggggaaaatgcccatcgacctcgtcattgatgaaagagacggcagctccaagtcagatcatgaagaactttcaggctcctccacaaatctcgctgaccataacccttcttcttggcgagaccacgatgatgcaacctcaacccactcagcaggcaccccagggccctccagtgggggccatgcttcccagagcggagacaacagcagtgagcaaggggatggtttagacaacagtgtagcttcacctggtacaggtgacgatgatgatccggataaggacaaaaaacgccagaagaaaagaggcattttccccaaagtagcaacaaatatcatgagagcatggctcttccagcatctcacacatccgtacccttccgaagagcagaagaaacagttagcgcaagacacaggacttacaattctccaagtaaacaactggtttattaatgccagaagaagaatagtacagcccatgattgaccagtcaaatcgagcaggttttcttcttgatccttcagtgagccaaggagcagcatatagtccagagggtcagcccatggggagctttgtgttggatggtcagcaacacatggggatccggcctgcaggacctatgagtggaatgggcatgaatatgggcatggatgggcaatggcactacatg

SEQ ID NO: 5574 - DNA, 1182 bp, Homo sapiens
  source 1..1182: mol_type = genomic DNA
atggcgcaaaggtacgatgagctgccccattacggcgggatggacggagtaggggttcccgcttccatgtacggagaccctcacgcgccgcggccgatccccccggttcaccacctgaaccacgggccgccgctccacgccacacagcactacggcgcgcacgccccgcaccccaatgtcatgccggccagtatgggatccgctgtcaacgacgccttgaagcgggacaaggacgcgatctatgggcacccgttgtttcctctgttagctctggtctttgagaagtgcgagctggcgacctgcactccccgggaacctggagtggctggcggagacgtctgctcctccgactccttcaacgaggacatcgcggtcttcgccaagcaggttcgcgccgaaaagccacttttttcctcaaatccagagctggacaatttgatgatacaagcaatacaagtactaaggtttcatcttttggagttagaaaaggtccacgaactgtgcgataacttctgccaccgatacattagctgtttgaaggggaaaatgcccatcgacctcgtcattgatgaaagagacggcagctccaagtcagatcatgaagaactttcaggctcctccacaaatctcgctgaccataacccttcttcttggcgagaccacgatgatgcaacctcaacccactcagcaggcaccccagggccctccagtgggggccatgcttcccagagcggagacaacagcagtgagcaaggggatggtttagacaacagtgtagcttcacctggtacaggtgacgatgatgatccggataaggacaaaaaacgccagaagaaaagaggcattttccccaaagtagcaacaaatatcatgagagcatggctcttccagcatctcacacatccgtacccttccgaagagcagaagaaacagttagcgcaagacacaggacttacaattctccaagtaaacaactggtttattaatgccagaagaagaatagtacagcccatgattgaccagtcaaatcgagcagtgagccaaggagcagcatatagtccagagggtcagcccatggggagctttgtgttggatggtcagcaacacatggggatccggcctgcaggacctatgagtggaatgggcatgaatatgggcatggatgggcaatggcactacatg

SEQ ID NO: 5575 - DNA, 1431 bp, Homo sapiens
  source 1..1431: mol_type = genomic DNA
atggcgcaaaggtacgatgagctgccccattacggcgggatggacggagtaggggttcccgcttccatgtacggagaccctcacgcgccgcggccgatccccccggttcaccacctgaaccacgggccgccgctccacgccacacagcactacggcgcgcacgccccgcaccccaatgtcatgccggccagtatgggatccgctgtcaacgacgccttgaagcgggacaaggacgcgatctatgggcacccgttgtttcctctgttagctctggtctttgagaagtgcgagctggcgacctgcactccccgggaacctggagtggctggcggagacgtctgctcctccgactccttcaacgaggacatcgcggtcttcgccaagcaggttcgcgccgaaaagccacttttttcctcaaatccagagctggacaatttgatgatacaagcaatacaagtactaaggtttcatcttttggagttagaaaaggtccacgaactgtgcgataacttctgccaccgatacattagctgtttgaaggggaaaatgcccatcgacctcgtcattgatgaaagagacggcagctccaagtcagatcatgaagaactttcaggctcctccacaaatctcgctgaccataacccttcttcttggcgagaccacgatgatgcaacctcaacccactcagcaggcaccccagggccctccagtgggggccatgcttcccagagcggagacaacagcagtgagcaaggggatggtttagacaacagtgtagcttcacctggtacaggtgacgatgatgatccggataaggacaaaaaacgccagaagaaaagaggcattttccccaaagtagcaacaaatatcatgagagcatggctcttccagcatctcacacatccgtacccttccgaagagcagaagaaacagttagcgcaagacacaggacttacaattctccaagtaaacaactggtttattaatgccagaagaagaatagtacagcccatgattgaccagtcaaatcgagcaggttttcttcttgatccttcagtgagccaaggagcagcatatagtccagagggtcagcccatggggagctttgtgttggatggtcagcaacacatggggatccggcctgcaggtttgcagagcatgccaggggactacgtttctcagggtggtcctatgggaatgagtatggcacagccaagttacactcctccccagatgaccccacaccctactcaattaagacatggacccccaatgcattcatatttgccaagccatccccaccacccagccatgatgatgcacggaggaccccctacccaccctggaatgactatgtcagcacagagccccacaatgttaaattctgtagatcccaatgttggcggacaggttatggacattcatgcccaa

SEQ ID NO: 5576 - DNA, 918 bp, Homo sapiens
  source 1..918: mol_type = genomic DNA
atggctctggtctttgagaagtgcgagctggcgacctgcactccccgggaacctggagtggctggcggagacgtctgctcctccgactccttcaacgaggacatcgcggtcttcgccaagcaggttcgcgccgaaaagccacttttttcctcaaatccagagctggacaatttgatgatacaagcaatacaagtactaaggtttcatcttttggagttagaaaaggtccacgaactgtgcgataacttctgccaccgatacattagctgtttgaaggggaaaatgcccatcgacctcgtcattgatgaaagagacggcagctccaagtcagatcatgaagaactttcaggctcctccacaaatctcgctgaccataacccttcttcttggcgagaccacgatgatgcaacctcaacccactcagcaggcaccccagggccctccagtgggggccatgcttcccagagcggagacaacagcagtgagcaaggggatggtttagacaacagtgtagcttcacctggtacaggtgacgatgatgatccggataaggacaaaaaacgccagaagaaaagaggcattttccccaaagtagcaacaaatatcatgagagcatggctcttccagcatctcacacatccgtacccttccgaagagcagaagaaacagttagcgcaagacacaggacttacaattctccaagtaaacaactggtttattaatgccagaagaagaatagtacagcccatgattgaccagtcaaatcgagcagtgagccaaggagcagcatatagtccagagggtcagcccatggggagctttgtgttggatggtcagcaacacatggggatccggcctgcaggacctatgagtggaatgggcatgaatatgggcatggatgggcaatggcactacatg

SEQ ID NO: 5577 - DNA, 1164 bp, Homo sapiens
  source 1..1164: mol_type = genomic DNA
atggacggagtaggggttcccgcttccatgtacggagaccctcacgcgccgcggccgatccccccggttcaccacctgaaccacgggccgccgctccacgccacacagcactacggcgcgcacgccccgcaccccaatgtcatgccggccagtatgggatccgctgtcaacgacgccttgaagcgggacaaggacgcgatctatgggcacccgttgtttcctctgttagctctggtctttgagaagtgcgagctggcgacctgcactccccgggaacctggagtggctggcggagacgtctgctcctccgactccttcaacgaggacatcgcggtcttcgccaagcaggttcgcgccgaaaagccacttttttcctcaaatccagagctggacaatttgatgatacaagcaatacaagtactaaggtttcatcttttggagttagaaaaggtccacgaactgtgcgataacttctgccaccgatacattagctgtttgaaggggaaaatgcccatcgacctcgtcattgatgaaagagacggcagctccaagtcagatcatgaagaactttcaggctcctccacaaatctcgctgaccataacccttcttcttggcgagaccacgatgatgcaacctcaacccactcagcaggcaccccagggccctccagtgggggccatgcttcccagagcggagacaacagcagtgagcaaggggatggtttagacaacagtgtagcttcacctggtacaggtgacgatgatgatccggataaggacaaaaaacgccagaagaaaagaggcattttccccaaagtagcaacaaatatcatgagagcatggctcttccagcatctcacacatccgtacccttccgaagagcagaagaaacagttagcgcaagacacaggacttacaattctccaagtaaacaactggtttattaatgccagaagaagaatagtacagcccatgattgaccagtcaaatcgagcaggttttcttcttgatccttcagtgagccaaggagcagcatatagtccagagggtcagcccatggggagctttgtgttggatggtcagcaacacatggggatccggcctgcaggacctatgagtggaatgggcatgaatatgggcatggatgggcaatggcactacatg

SEQ ID NO: 5578 - DNA, 1170 bp, Homo sapiens
  source 1..1170: mol_type = genomic DNA
atggcgcaaaggtacgacgatctaccccattacgggggcatggatggagtaggcatcccctccacgatgtatggggacccgcatgcagccaggtccatgcagccggtccaccacctgaaccacgggcctcctctgcactcgcatcagtacccgcacacagctcataccaacgccatggcccccagcatgggctcctctgtcaatgacgctttaaagagagataaagatgccatttatggacaccccctcttccctctcttagcactgatttttgagaaatgtgaattagctacttgtaccccccgcgagccgggggtggcgggcggggacgtctgctcgtcagagtcattcaatgaagatatagccgtgttcgccaaacagattcgcgcagaaaaacctctattttcttctaatccagaactggataacttgatgattcaagccatacaagtattaaggtttcatctattggaattagagaaggtacacgaattatgtgacaatttctgccaccggtatattagctgtttgaaagggaaaatgcctatcgatttggtgatagacgatagagaaggaggatcaaaatcagacagtgaagatataacaagatcagcaaatctaactgaccagccctcttggaacagagatcatgatgacacggcatctactcgttcaggaggaaccccaggcccttccagcggtggccacacgtcacacagtggggacaacagcagtgagcaaggtgatggcttggacaacagtgtagcttcccccagcacaggtgacgatgatgaccctgataaggacaaaaagcgtcacaaaaagcgtggcatctttcccaaagtagccacaaatatcatgagggcgtggctgttccagcatctaacacacccttacccttctgaagaacagaaaaagcagttggcacaagacacgggactcaccatccttcaagtgaacaattggtttattaatgcccggagaagaatagtgcagcccatgatagaccagtccaaccgagcagtaagtcaaggaacaccttataatcctgatggacagcccatgggaggtttcgtaatggacggtcagcaacatatgggaattagagcaccaggacctatgagtggaatgggcatgaatatgggcatggaggggcagtggcactacatg

SEQ ID NO: 5579 - DNA, 975 bp, Homo sapiens
  source 1..975: mol_type = genomic DNA
atggctcagggcctccgacttcagggctccaggaggaaggggagacaccccctcttccctctcttagcactgatttttgagaaatgtgaattagctacttgtaccccccgcgagccgggggtggcgggcggggacgtctgctcgtcagagtcattcaatgaagatatagccgtgttcgccaaacagattcgcgcagaaaaacctctattttcttctaatccagaactggataacttgatgattcaagccatacaagtattaaggtttcatctattggaattagagaaggtacacgaattatgtgacaatttctgccaccggtatattagctgtttgaaagggaaaatgcctatcgatttggtgatagacgatagagaaggaggatcaaaatcagacagtgaagatataacaagatcagcaaatctaactgaccagccctcttggaacagagatcatgatgacacggcatctactcgttcaggaggaaccccaggcccttccagcggtggccacacgtcacacagtggggacaacagcagtgagcaaggtgatggcttggacaacagtgtagcttcccccagcacaggtgacgatgatgaccctgataaggacaaaaagcgtcacaaaaagcgtggcatctttcccaaagtagccacaaatatcatgagggcgtggctgttccagcatctaacacacccttacccttctgaagaacagaaaaagcagttggcacaagacacgggactcaccatccttcaagtgaacaattggtttattaatgcccggagaagaatagtgcagcccatgatagaccagtccaaccgagcagtaagtcaaggaacaccttataatcctgatggacagcccatgggaggtttcgtaatggacggtcagcaacatatgggaattagagcaccaggacctatgagtggaatgggcatgaatatgggcatggaggggcagtggcactacatg

SEQ ID NO: 5580 - DNA, 2235 bp, Homo sapiens
  source 1..2235: mol_type = genomic DNA
atggaggtgatgaacctgatggagcagcctatcaaggtgactgagtggcagcagacatacacctacgactcgggtatccactcgggcgccaacacctgcgtgccctccgtcagcagcaagggcatcatggaggaggatgaggcctgcgggcgccagtacacgctcaagaaaaccaccacttacacccagggggtgccccccagccaaggtgatctggagtaccagatgtccacaacagccagggccaaacgggtgcgggaggccatgtgccctggtgtgtcaggcgaggacagctcgcttctgctggccacccaggtggaggggcaggccaccaacctgcagcgactggccgagccgtcccagctgctcaagtcggccattgtgcatctcatcaactaccaggacgatgccgagctggccactcgcgccctgcccgagctcaccaaactgctcaacgacgaggacccggtggtggtgaccaaggcggccatgattgtgaaccagctgtcgaagaaggaggcgtcgcggcgggccctgatgggctcgccccagctggtggccgctgtcgtgcgtaccatgcagaataccagcgacctggacacagcccgctgcaccaccagcatcctgcacaacctctcccaccaccgggaggggctgctcgccatcttcaagtcgggtggcatccctgctctggtccgcatgctcagctcccctgtggagtcggtcctgttctatgccatcaccacgctgcacaacctgctcctgtaccaggagggcgccaagatggccgtgcgcctggccgacgggctgcaaaagatggtgcccctgctcaacaagaacaaccccaagttcctggccatcaccaccgactgcctgcagctcctggcctacggcaaccaggagagcaagctgatcatcctggccaatggtgggccccaggccctcgtgcagatcatgcgtaactacagttatgaaaagctgctctggaccaccagtcgtgtgctcaaggtgctatccgtgtgtcccagcaataagcctgccattgtggaggctggtgggatgcaggccctgggcaagcacctgaccagcaacagcccccgcctggtgcagaactgcctgtggaccctgcgcaacctctcagatgtggccaccaagcaggagggcctggagagtgtgctgaagattctggtgaatcagctgagtgtggatgacgtcaacgtcctcacctgtgccacgggcacactctccaacctgacatgcaacaacagcaagaacaagacgctggtgacacagaacagcggtgtggaggctctcatccatgccatcctgcgtgctggtgacaaggacgacatcacggagcctgccgtctgcgctctgcgccacctcactagccgccaccctgaggccgagatggcccagaactctgtgcgtctcaactatggcatcccagccatcgtgaagctgctcaaccagcccaaccagtggccactggtcaaggcaaccatcggcttgatcaggaatctggccctgtgcccagccaaccatgccccgctgcaggaggcagcggtcatcccccgcctcgtccaactgctggtgaaggcccaccaggatgcccagcgccacgtagctgcaggcacacagcagccctacacggatggtgtgaggatggaggagattgtggagggctgcaccggagcactgcacatcctcgcccgggaccccatgaaccgcatggagatcttccggctcaacaccattcccctgtttgtgcagctcctgtactcgtcggtggagaacatccagcgcgtggctgccggggtgctgtgtgagctggcccaggacaaggaggcggccgacgccattgatgcagagggggcctcggccccactcatggagttgctgcactcccgcaacgagggcactgccacctacgctgctgccgtcctgttccgcatctccgaggacaagaacccagactaccggaagcgcgtgtccgtggagctcaccaactccctcttcaagcatgacccggctgcctgggaggctgcccagagcatgattcccatcaatgagccctatggagatgacatggatgccacctaccgccccatgtactccagcgatgtgccccttgacccgctggagatgcacatggacatggatggagactaccccatcgacacctacagcgacggcctcaggcccccgtaccccactgcagaccacatgctggcc

SEQ ID NO: 5581 - DNA, 1350 bp, Homo sapiens
  source 1..1350: mol_type = genomic DNA
atgtttatgtttaattggtttacagactgtctgtggactcttttcctgtcaaattaccagccatctgttgaatcttcaagtccaggaggttcagcaacatcagatgaccatgaatttgatccatcagctgacatgctggttcatgattttgatgatgaacgaacattagaagaggaagaaatgatggaaggagaaacaaacttcagctctgaaatagaagatcttgcaagggaaggcgacatgccaattcatgaacttctcagcctttatggttatggtagtactgttcgactacctgaagaagatgaggaagaggaagaagaggaagaagaaggtgaagatgatgaagatgctgataatgatgacaacagtggctgtagtggggaaaataaagaggagaatataaaggattcatcaggtcaggaggatgaaactcagtcttccaatgatgatccatcacaatctgttgcttctcaagatgcccaggaaataatccgcccacgtcgatgtaaatattttgatacaaatagtgaagtagaagaagaatctgaagaagatgaagattatattccatcagaagactggaaaaaggagattatggtgggctccatgtttcaagcagaaattccagttggcatttgtagatacaaagaaaatgaaaaagtatatgaaaatgatgatcagctcctgtgggaccctgagtacttaccagaagataaagtgattatatttcttaaagatgcatctagaagaacaggtgatgagaagggtgtagaagcaattcctgaaggatctcacataaaagacaatgaacaggctttatatgaattggttaaatgcaattttgatacagaagaagcattgagaagattaagatttaatgtaaaagcagctagagaggaattatctgtttggacagaggaagagtgtagaaattttgaacaagggctgaaggcctatggaaaggattttcatttgattcaggctaataaagtccgaacaaggtcagttggtgaatgtgtagcattctattacatgtggaaaaaatctgaacgttatgatttctttgctcagcaaacacgatttggaaagaagaaatataatcttcatcctggtgtaacggattacatggatcgtcttctagacgaaagtgaaagtgctgcatctagtcgagcaccatcccctcccccaactgcatcaaacagtagtaacagccagtctgagaaagaagatggcactgtaagcactgctaatcaaaatggagtgtcatctaatggaccaggcatactccaaatgcttcttccagttcatttttcagccatcagttcaagagccaatgcctttttaaaa

SEQ ID NO: 5582 - DNA, 1587 bp, Homo sapiens
  source 1..1587: mol_type = genomic DNA
atgtttatgtttaattggtttacagactgtctgtggactcttttcctgtcaaattaccagccatctgttgaatcttcaagtccaggaggttcagcaacatcagatgaccatgaatttgatccatcagctgacatgctggttcatgattttgatgatgaacgaacattagaagaggaagaaatgatggaaggagaaacaaacttcagctctgaaatagaagatcttgcaagggaaggcgacatgccaattcatgaacttctcagcctttatggttatggtagtactgttcgactacctgaagaagatgaggaagaggaagaagaggaagaagaaggtgaagatgatgaagatgctgataatgatgacaacagtggctgtagtggggaaaataaagaggagaatataaaggattcatcaggtcaggaggatgaaactcagtcttccaatgatgatccatcacaatctgttgcttctcaagatgcccaggaaataatccgcccacgtcgatgtaaatattttgatacaaatagtgaagtagaagaagaatctgaagaagatgaagattatattccatcagaagactggaaaaaggagattatggtgggctccatgtttcaagcagaaattccagttggcatttgtagatacaaagaaaatgaaaaagtatatgaaaatgatgatcagctcctgtgggaccctgagtacttaccagaagataaagtgattatatttcttaaagatgcatctagaagaacaggtgatgagaagggtgtagaagcaattcctgaaggatctcacataaaagacaatgaacaggctttatatgaattggttaaatgcaattttgatacagaagaagcattgagaagattaagatttaatgtaaaagcagctagagaggaattatctgtttggacagaggaagagtgtagaaattttgaacaagggctgaaggcctatggaaaggattttcatttgattcaggctaataaagtccgaacaaggtcagttggtgaatgtgtagcattctattacatgtggaaaaaatctgaacgttatgatttctttgctcagcaaacacgatttggaaagaagaaatataatcttcatcctggtgtaacggattacatggatcgtcttctagacgaaagtgaaagtgctgcatctagtcgagcaccatcccctcccccaactgcatcaaacagtagtaacagccagtctgagaaagaagatggcactgtaagcactgctaatcaaaatggagtgtcatctaatggaccaggtgaaatattaaacaaagaggaagtaaaagttgaagggttacacattaatggaccaacaggtggaaataagaaaccacttcatgcagatatggatactaatggttatgaaacagataaccttaccactgacccaaaacttgcccatatgactgcaagaaatgaaaatgattttgatgaaaaaagtgagagacctgccaaaaggcgaagggtaaacagcaatggaaaagaaagtccaggttcttctgaatttttccaagaagcagtctcacatgggaaatttgaagaacttgaaaacacagatgac

SEQ ID NO: 5583 - DNA, 1299 bp, Homo sapiens
  source 1..1299: mol_type = genomic DNA
atggcggagccatctgttgaatcttcaagtccaggaggttcagcaacatcagatgaccatgaatttgatccatcagctgacatgctggttcatgattttgatgatgaacgaacattagaagaggaagaaatgatggaaggagaaacaaacttcagctctgaaatagaagatcttgcaagggaaggcgacatgccaattcatgaacttctcagcctttatggttatggtagtactgttcgactacctgaagaagatgaggaagaggaagaagaggaagaagaaggtgaagatgatgaagatgctgataatgatgacaacagtggctgtagtggggaaaataaagaggagaatataaaggattcatcaggtcaggaggatgaaactcagtcttccaatgatgatccatcacaatctgttgcttctcaagatgcccaggaaataatccgcccacgtcgatgtaaatattttgatacaaatagtgaagtagaagaagaatctgaagaagatgaagattatattccatcagaagactggaaaaaggagattatggtgggctccatgtttcaagcagaaattccagttggcatttgtagatacaaagaaaatgaaaaagtatatgaaaatgatgatcagctcctgtgggaccctgagtacttaccagaagataaagtgattatatttcttaaagatgcatctagaagaacaggtgatgagaagggtgtagaagcaattcctgaaggatctcacataaaagacaatgaacaggctttatatgaattggttaaatgcaattttgatacagaagaagcattgagaagattaagatttaatgtaaaagcagctagagaggaattatctgtttggacagaggaagagtgtagaaattttgaacaagggctgaaggcctatggaaaggattttcatttgattcaggctaataaagtccgaacaaggtcagttggtgaatgtgtagcattctattacatgtggaaaaaatctgaacgttatgatttctttgctcagcaaacacgatttggaaagaagaaatataatcttcatcctggtgtaacggattacatggatcgtcttctagacgaaagtgaaagtgctgcatctagtcgagcaccatcccctcccccaactgcatcaaacagtagtaacagccagtctgagaaagaagatggcactgtaagcactgctaatcaaaatggagtgtcatctaatggaccaggcatactccaaatgcttcttccagttcatttttcagccatcagttcaagagccaatgcctttttaaaa

SEQ ID NO: 5584 - DNA, 1410 bp, Homo sapiens
  source 1..1410: mol_type = genomic DNA
atgtttatgtttaattggtttacagactgtctgtggactcttttcctgtcaaattaccagccatctgttgaatcttcaagtccaggaggttcagcaacatcagatgaccatgaatttgatccatcagctgacatgctggttcatgattttgatgatgaacgaacattagaagaggaagaaatgatggaaggagaaacaaacttcagctctgaaatagaagatcttgcaagggaaggcgacatgccaattcatgaacttctcagcctttatggttatggtagtactgttcgactacctgaagaagatgaggaagaggaagaagaggaagaagaaggtgaagatgatgaagatgctgataatgatgacaacagtggctgtagtggggaaaataaagaggagaatataaaggattcatcaggtcaggaggatgaaactcagtcttccaatgatgatccatcacaatctgttgcttctcaagatgcccaggaaataatccgcccacgtcgatgtaaatattttgatacaaatagtgaagtagaagaagaatctgaagaagatgaagattatattccatcagaagactggaaaaaggagattatggtgggctccatgtttcaagcagaaattccagttggcatttgtagatacaaagaaaatgaaaaagtatatgaaaatgatgatcagctcctgtgggaccctgagtacttaccagaagataaagtgattatatttcttaaagatgcatctagaagaacaggtgatgagaagggtgtagaagcaattcctgaaggatctcacataaaagacaatgaacaggctttatatgaattggttaaatgcaattttgatacagaagaagcattgagaagattaagatttaatgtaaaagcagctagagaggaattatctgtttggacagaggaagagtgtagaaattttgaacaagggctgaaggcctatggaaaggattttcatttgattcaggctaataaagtccgaacaaggtcagttggtgaatgtgtagcattctattacatgtggaaaaaatctgaacgttatgatttctttgctcagcaaacacgatttggaaagaagaaatataatcttcatcctggtgtaacggattacatggatcgtcttctagacgaaagtgaaagtgctgcatctagtcgagcaccatcccctcccccaactgcatcaaacagtagtaacagccagtctgagaaagaagatggcactgtaagcactgctaatcaaaatggagtgtcatctaatggaccaggtgaaatattaaacaaagaggaagtaaaagttgaagggttacacattaatggaccaacaggcatactccaaatgcttcttccagttcatttttcagccatcagttcaagagccaatgcctttttaaaa

SEQ ID NO: 5585 - DNA, 1536 bp, Homo sapiens
  source 1..1536: mol_type = genomic DNA
atggcggagccatctgttgaatcttcaagtccaggaggttcagcaacatcagatgaccatgaatttgatccatcagctgacatgctggttcatgattttgatgatgaacgaacattagaagaggaagaaatgatggaaggagaaacaaacttcagctctgaaatagaagatcttgcaagggaaggcgacatgccaattcatgaacttctcagcctttatggttatggtagtactgttcgactacctgaagaagatgaggaagaggaagaagaggaagaagaaggtgaagatgatgaagatgctgataatgatgacaacagtggctgtagtggggaaaataaagaggagaatataaaggattcatcaggtcaggaggatgaaactcagtcttccaatgatgatccatcacaatctgttgcttctcaagatgcccaggaaataatccgcccacgtcgatgtaaatattttgatacaaatagtgaagtagaagaagaatctgaagaagatgaagattatattccatcagaagactggaaaaaggagattatggtgggctccatgtttcaagcagaaattccagttggcatttgtagatacaaagaaaatgaaaaagtatatgaaaatgatgatcagctcctgtgggaccctgagtacttaccagaagataaagtgattatatttcttaaagatgcatctagaagaacaggtgatgagaagggtgtagaagcaattcctgaaggatctcacataaaagacaatgaacaggctttatatgaattggttaaatgcaattttgatacagaagaagcattgagaagattaagatttaatgtaaaagcagctagagaggaattatctgtttggacagaggaagagtgtagaaattttgaacaagggctgaaggcctatggaaaggattttcatttgattcaggctaataaagtccgaacaaggtcagttggtgaatgtgtagcattctattacatgtggaaaaaatctgaacgttatgatttctttgctcagcaaacacgatttggaaagaagaaatataatcttcatcctggtgtaacggattacatggatcgtcttctagacgaaagtgaaagtgctgcatctagtcgagcaccatcccctcccccaactgcatcaaacagtagtaacagccagtctgagaaagaagatggcactgtaagcactgctaatcaaaatggagtgtcatctaatggaccaggtgaaatattaaacaaagaggaagtaaaagttgaagggttacacattaatggaccaacaggtggaaataagaaaccacttcatgcagatatggatactaatggttatgaaacagataaccttaccactgacccaaaacttgcccatatgactgcaagaaatgaaaatgattttgatgaaaaaagtgagagacctgccaaaaggcgaagggtaaacagcaatggaaaagaaagtccaggttcttctgaatttttccaagaagcagtctcacatgggaaatttgaagaacttgaaaacacagatgac

SEQ ID NO: 5586 - DNA, 1458 bp, Homo sapiens
  source 1..1458: mol_type = genomic DNA
atggatggggcttcttcaggcggtggcggcagcagcgaaggtggcggcggcagcagcggcagcggctatggtgtggtcgctcgattctcccagtgcctggctgagtttcggacgtggttaagaaccaactggttgaggttcaatgcagacaagacggatgtgatgctgccatctgttgaatcttcaagtccaggaggttcagcaacatcagatgaccatgaatttgatccatcagctgacatgctggttcatgattttgatgatgaacgaacattagaagaggaagaaatgatggaaggagaaacaaacttcagctctgaaatagaagatcttgcaagggaaggcgacatgccaattcatgaacttctcagcctttatggttatggtagtactgttcgactacctgaagaagatgaggaagaggaagaagaggaagaagaaggtgaagatgatgaagatgctgataatgatgacaacagtggctgtagtggggaaaataaagaggagaatataaaggattcatcaggtcaggaggatgaaactcagtcttccaatgatgatccatcacaatctgttgcttctcaagatgcccaggaaataatccgcccacgtcgatgtaaatattttgatacaaatagtgaagtagaagaagaatctgaagaagatgaagattatattccatcagaagactggaaaaaggagattatggtgggctccatgtttcaagcagaaattccagttggcatttgtagatacaaagaaaatgaaaaagtatatgaaaatgatgatcagctcctgtgggaccctgagtacttaccagaagataaagtgattatatttcttaaagatgcatctagaagaacaggtgatgagaagggtgtagaagcaattcctgaaggatctcacataaaagacaatgaacaggctttatatgaattggttaaatgcaattttgatacagaagaagcattgagaagattaagatttaatgtaaaagcagctagagaggaattatctgtttggacagaggaagagtgtagaaattttgaacaagggctgaaggcctatggaaaggattttcatttgattcaggctaataaagtccgaacaaggtcagttggtgaatgtgtagcattctattacatgtggaaaaaatctgaacgttatgatttctttgctcagcaaacacgatttggaaagaagaaatataatcttcatcctggtgtaacggattacatggatcgtcttctagacgaaagtgaaagtgctgcatctagtcgagcaccatcccctcccccaactgcatcaaacagtagtaacagccagtctgagaaagaagatggcactgtaagcactgctaatcaaaatggagtgtcatctaatggaccaggcatactccaaatgcttcttccagttcatttttcagccatcagttcaagagccaatgcctttttaaaa

SEQ ID NO: 5587 - DNA, 243 bp, Homo sapiens
  source 1..243: mol_type = genomic DNA
atgtttatgtttaattggtttacagactgtctgtggactcttttcctgtcaaattaccagccatctgttgaatcttcaagtccaggaggttcagcaacatcagatgaccatgaatttgatccatcagctgacatgctggttcatgattttgatgatgaacgaacattagaagaggaagaaatgatggaaggagaaacaaacttcagctctgaaatagaagatcttgcaagggtaaataacatg

SEQ ID NO: 5588 - DNA, 1695 bp, Homo sapiens
  source 1..1695: mol_type = genomic DNA
atggatggggcttcttcaggcggtggcggcagcagcgaaggtggcggcggcagcagcggcagcggctatggtgtggtcgctcgattctcccagtgcctggctgagtttcggacgtggttaagaaccaactggttgaggttcaatgcagacaagacggatgtgatgctgccatctgttgaatcttcaagtccaggaggttcagcaacatcagatgaccatgaatttgatccatcagctgacatgctggttcatgattttgatgatgaacgaacattagaagaggaagaaatgatggaaggagaaacaaacttcagctctgaaatagaagatcttgcaagggaaggcgacatgccaattcatgaacttctcagcctttatggttatggtagtactgttcgactacctgaagaagatgaggaagaggaagaagaggaagaagaaggtgaagatgatgaagatgctgataatgatgacaacagtggctgtagtggggaaaataaagaggagaatataaaggattcatcaggtcaggaggatgaaactcagtcttccaatgatgatccatcacaatctgttgcttctcaagatgcccaggaaataatccgcccacgtcgatgtaaatattttgatacaaatagtgaagtagaagaagaatctgaagaagatgaagattatattccatcagaagactggaaaaaggagattatggtgggctccatgtttcaagcagaaattccagttggcatttgtagatacaaagaaaatgaaaaagtatatgaaaatgatgatcagctcctgtgggaccctgagtacttaccagaagataaagtgattatatttcttaaagatgcatctagaagaacaggtgatgagaagggtgtagaagcaattcctgaaggatctcacataaaagacaatgaacaggctttatatgaattggttaaatgcaattttgatacagaagaagcattgagaagattaagatttaatgtaaaagcagctagagaggaattatctgtttggacagaggaagagtgtagaaattttgaacaagggctgaaggcctatggaaaggattttcatttgattcaggctaataaagtccgaacaaggtcagttggtgaatgtgtagcattctattacatgtggaaaaaatctgaacgttatgatttctttgctcagcaaacacgatttggaaagaagaaatataatcttcatcctggtgtaacggattacatggatcgtcttctagacgaaagtgaaagtgctgcatctagtcgagcaccatcccctcccccaactgcatcaaacagtagtaacagccagtctgagaaagaagatggcactgtaagcactgctaatcaaaatggagtgtcatctaatggaccaggtgaaatattaaacaaagaggaagtaaaagttgaagggttacacattaatggaccaacaggtggaaataagaaaccacttcatgcagatatggatactaatggttatgaaacagataaccttaccactgacccaaaacttgcccatatgactgcaagaaatgaaaatgattttgatgaaaaaagtgagagacctgccaaaaggcgaagggtaaacagcaatggaaaagaaagtccaggttcttctgaatttttccaagaagcagtctcacatgggaaatttgaagaacttgaaaacacagatgac

SEQ ID NO: 5589 - DNA, 1635 bp, Homo sapiens
  source 1..1635: mol_type = genomic DNA
atggcggaggcctcctcgctggggaggcagagtcctcgcgtggtctcctgcctcgagcacagcctgtgcccaggggagccgggcttgcagacaacagcagtggtgtccatgggctctggagaccatcagttcaacctcgcagagatcctgtcacagaactacagtgttaggggggagtgcgaggaggcctcgaggtgcccagacaagcccaaggaggagctggagaaggacttcatctcccagagcaacgacatgccctttgatgagctgcttgcgctctatggctacgaggcgtcagaccccatttcagaccgggagagtgagggtggtgacgtggccccgaacctcccagacatgaccctggacaaagaacaaatagcgaaggatttgctttcaggggaagaagaggaagagacgcaatcatctgctgacgacctcaccccgtccgtgacctcccacgaggcctccgacctcttccctaaccggagtggatctcgtttcctggctgatgaagacagagagcctggctcttctgcctcctccgacaccgaggaggactctcttcctgccaacaaatgtaagaaggagatcatggtgggacctcagttccaagctgacctcagcaacctgcacttgaaccggcactgtgagaagatctacgagaacgaagaccagctgctctgggaccccagcgtcctccctgagagggaggtggaggagttcctgtacagggcggtgaagcggcgttggcacgagatggccgggcctcagctcccagagggagaagccgtgaaagacagtgagcaggcgctgtacgagttggtgaaatgcaacttcaatgtggaggaggccctgcgaaggctgcggttcaacgtgaaggtgatccgagatgggctctgtgcttggagtgaagaggagtgcaggaactttgagcacggcttccgtgtgcatggaaagaactttcacctgatccaggccaacaaggtgcgcacacggtcagtgggcgagtgtgtcgagtactactacctgtggaagaagtcggagcgctacgactacttcgcccagcagacgcggctgggccggaggaagtacgtcccgtccggaaccacggacgcagaccaggacctggatggcagcgaccccgatggccccggccgtccgcgcccggagcaagacaccctgactgggatgcgcacagatccactgagcgtggatggcacggccggtggtctcgatgagcccggagtggcctctgatggactcccgtcctcggagccagggccgtgttccttccagcagctggatgagtcccccgctgtacccctgtcccatcggcccccagccctggccgacccagcctcataccagccagctgtcactgctccggagccagacgccagcccaaggctggccgtggacttcgccctgcccaaggagctgcccctcatctccagccatgtggacctcagcggggatccggaggagactgtggccccagcacaggtggctttgtcggtcaccgagtttggactcatcggcattggggacgtgaaccccttcctggccgcccaccccacgtgcccggcccccgggctacactcggagcccctgtcacactgtaacgtgatgacctgc

SEQ ID NO: 5590 - DNA, 1665 bp, Homo sapiens
  source 1..1665: mol_type = genomic DNA
atggcggaggcttcttttggaagttcgagcccagtttgttttattccagttgggtctttgtcttctgaggatcatgattttgaccccactgctgagatgttggtccatgactatgatgatgaaagaactcttgaagaagaggaaatgatggatgagggtaaaaacttcagttcagaaattgaagacttagaaaaggaaggaaccatgcctctagaagatttactggcattctatggctatgaacctacaattccagcagttgcaaattccagtgcaaatagttccccaagtgaactggcagatgaactaccagacatgacactagacaaagaggaaatagcaaaagacctgttgtcaggtgatgacgaggaaactcagtcttctgcggatgatctgacgccatctgtgacttcccatgaaacttctgatttcttccctaggcctttacgatcaaatactgcatgtgatggtgataaggaatcagaggttgaagatgttgaaacagacagtggtaattcacctgaagatttgaggaaggaaataatgattggtttacaatatcaggcagagattcccccttatcttggagagtacgatggtaatgagaaagtatatgaaaacgaagaccagttactttggtgtcctgatgtggttttggagagcaaagttaaggaataccttgttgagacttcattaaggactggcagtgaaaaaataatggataggatttctgcaggaacacacacaagggacaatgaacaggcattatatgaacttctcaagtgtaaccacaatataaaggaagcaatcgaaagatactgctgcaatggaaaggcctctcaagaaggaatgactgcatggacggaagaagaatgccgaagctttgaacatgcactcatgctttttggaaaagattttcatcttatacagaagaataaggtgagaactaggacagttgctgagtgtgtagcattctactatatgtggaagaaatctgaacgttatgattactttgctcaacagacaagatttgggaaaaaaagatataaccatcaccctggagttacggactatatggatcgtttagtagatgaaacagaagctttgggtgggacggtaaatgcttcagccttaacttctaaccggcctgagcctattcctgatcaacagctaaacattctcaactccttcactgccagtgacttgacagctttgaccaacagtgtagcaaccgtctgcgaccccacagatgtgaattgtttggatgatagctttcctccactgggcaacacaccccgtggacaagttaatcatgtgcctgttgtaacagaagagttactcaccctgcccagcaatggggaaagtgattgttttaatttatttgagactggattttatcactcggagctaaaccctatgaacatgtgcagtgaagagtcagagagaccagcaaaaagattgaaaatgggcattgccgtccctgaatcctttatgaatgaagtttctgtaaataacctgggtgtggactttgaaaatcacacacatcacatcaccagtgccaaaatggctgtttctgtggctgactttggcagtctctctgccaacgagaccaatggtttcatcagtgcccatgctctgcatcagcacgcggccctacactctgag

SEQ ID NO: 5591 - DNA, 1647 bp, Homo sapiens
  source 1..1647: mol_type = genomic DNA
atggcggaggcttcttttggaagttcgagcccagttgggtctttgtcttctgaggatcatgattttgaccccactgctgagatgttggtccatgactatgatgatgaaagaactcttgaagaagaggaaatgatggatgagggtaaaaacttcagttcagaaattgaagacttagaaaaggaaggaaccatgcctctagaagatttactggcattctatggctatgaacctacaattccagcagttgcaaattccagtgcaaatagttccccaagtgaactggcagatgaactaccagacatgacactagacaaagaggaaatagcaaaagacctgttgtcaggtgatgacgaggaaactcagtcttctgcggatgatctgacgccatctgtgacttcccatgaaacttctgatttcttccctaggcctttacgatcaaatactgcatgtgatggtgataaggaatcagaggttgaagatgttgaaacagacagtggtaattcacctgaagatttgaggaaggaaataatgattggtttacaatatcaggcagagattcccccttatcttggagagtacgatggtaatgagaaagtatatgaaaacgaagaccagttactttggtgtcctgatgtggttttggagagcaaagttaaggaataccttgttgagacttcattaaggactggcagtgaaaaaataatggataggatttctgcaggaacacacacaagggacaatgaacaggcattatatgaacttctcaagtgtaaccacaatataaaggaagcaatcgaaagatactgctgcaatggaaaggcctctcaaggaatgactgcatggacggaagaagaatgccgaagctttgaacatgcactcatgctttttggaaaagattttcatcttatacagaagaataaggtgagaactaggacagttgctgagtgtgtagcattctactatatgtggaagaaatctgaacgttatgattactttgctcaacagacaagatttgggaaaaaaagatataaccatcaccctggagttacggactatatggatcgtttagtagatgaaacagaagctttgggtgggacggtaaatgcttcagccttaacttctaaccggcctgagcctattcctgatcaacagctaaacattctcaactccttcactgccagtgacttgacagctttgaccaacagtgtagcaaccgtctgcgaccccacagatgtgaattgtttggatgatagctttcctccactgggcaacacaccccgtggacaagttaatcatgtgcctgttgtaacagaagagttactcaccctgcccagcaatggggaaagtgattgttttaatttatttgagactggattttatcactcggagctaaaccctatgaacatgtgcagtgaagagtcagagagaccagcaaaaagattgaaaatgggcattgccgtccctgaatcctttatgaatgaagtttctgtaaataacctgggtgtggactttgaaaatcacacacatcacatcaccagtgccaaaatggctgtttctgtggctgactttggcagtctctctgccaacgagaccaatggtttcatcagtgcccatgctctgcatcagcacgcggccctacactctgag

SEQ ID NO: 5592 - DNA, 1650 bp, Homo sapiens
  source 1..1650: mol_type = genomic DNA
atggcggaggcttcttttggaagttcgagcccagttgggtctttgtcttctgaggatcatgattttgaccccactgctgagatgttggtccatgactatgatgatgaaagaactcttgaagaagaggaaatgatggatgagggtaaaaacttcagttcagaaattgaagacttagaaaaggaaggaaccatgcctctagaagatttactggcattctatggctatgaacctacaattccagcagttgcaaattccagtgcaaatagttccccaagtgaactggcagatgaactaccagacatgacactagacaaagaggaaatagcaaaagacctgttgtcaggtgatgacgaggaaactcagtcttctgcggatgatctgacgccatctgtgacttcccatgaaacttctgatttcttccctaggcctttacgatcaaatactgcatgtgatggtgataaggaatcagaggttgaagatgttgaaacagacagtggtaattcacctgaagatttgaggaaggaaataatgattggtttacaatatcaggcagagattcccccttatcttggagagtacgatggtaatgagaaagtatatgaaaacgaagaccagttactttggtgtcctgatgtggttttggagagcaaagttaaggaataccttgttgagacttcattaaggactggcagtgaaaaaataatggataggatttctgcaggaacacacacaagggacaatgaacaggcattatatgaacttctcaagtgtaaccacaatataaaggaagcaatcgaaagatactgctgcaatggaaaggcctctcaagaaggaatgactgcatggacggaagaagaatgccgaagctttgaacatgcactcatgctttttggaaaagattttcatcttatacagaagaataaggtgagaactaggacagttgctgagtgtgtagcattctactatatgtggaagaaatctgaacgttatgattactttgctcaacagacaagatttgggaaaaaaagatataaccatcaccctggagttacggactatatggatcgtttagtagatgaaacagaagctttgggtgggacggtaaatgcttcagccttaacttctaaccggcctgagcctattcctgatcaacagctaaacattctcaactccttcactgccagtgacttgacagctttgaccaacagtgtagcaaccgtctgcgaccccacagatgtgaattgtttggatgatagctttcctccactgggcaacacaccccgtggacaagttaatcatgtgcctgttgtaacagaagagttactcaccctgcccagcaatggggaaagtgattgttttaatttatttgagactggattttatcactcggagctaaaccctatgaacatgtgcagtgaagagtcagagagaccagcaaaaagattgaaaatgggcattgccgtccctgaatcctttatgaatgaagtttctgtaaataacctgggtgtggactttgaaaatcacacacatcacatcaccagtgccaaaatggctgtttctgtggctgactttggcagtctctctgccaacgagaccaatggtttcatcagtgcccatgctctgcatcagcacgcggccctacactctgag

SEQ ID NO: 5593 - DNA, 3042 bp, Homo sapiens
  source 1..3042: mol_type = genomic DNA
atggcggagtcttcggataagctctatcgagtcgagtacgccaagagcgggcgcgcctcttgcaagaaatgcagcgagagcatccccaaggactcgctccggatggccatcatggtgcagtcgcccatgtttgatggaaaagtcccacactggtaccacttctcctgcttctggaaggtgggccactccatccggcaccctgacgttgaggtggatgggttctctgagcttcggtgggatgaccagcagaaagtcaagaagacagcggaagctggaggagtgacaggcaaaggccaggatggaattggtagcaaggcagagaagactctgggtgactttgcagcagagtatgccaagtccaacagaagtacgtgcaaggggtgtatggagaagatagaaaagggccaggtgcgcctgtccaagaagatggtggacccggagaagccacagctaggcatgattgaccgctggtaccatccaggctgctttgtcaagaacagggaggagctgggtttccggcccgagtacagtgcgagtcagctcaagggcttcagcctccttgctacagaggataaagaagccctgaagaagcagctcccaggagtcaagagtgaaggaaagagaaaaggcgatgaggtggatggagtggatgaagtggcgaagaagaaatctaaaaaagaaaaagacaaggatagtaagcttgaaaaagccctaaaggctcagaacgacctgatctggaacatcaaggacgagctaaagaaagtgtgttcaactaatgacctgaaggagctactcatcttcaacaagcagcaagtgccttctggggagtcggcgatcttggaccgagtagctgatggcatggtgttcggtgccctccttccctgcgaggaatgctcgggtcagctggtcttcaagagcgatgcctattactgcactggggacgtcactgcctggaccaagtgtatggtcaagacacagacacccaaccggaaggagtgggtaaccccaaaggaattccgagaaatctcttacctcaagaaattgaaggttaaaaaacaggaccgtatattccccccagaaaccagcgcctccgtggcggccacgcctccgccctccacagcctcggctcctgctgctgtgaactcctctgcttcagcagataagccattatccaacatgaagatcctgactctcgggaagctgtcccggaacaaggatgaagtgaaggccatgattgagaaactcggggggaagttgacggggacggccaacaaggcttccctgtgcatcagcaccaaaaaggaggtggaaaagatgaataagaagatggaggaagtaaaggaagccaacatccgagttgtgtctgaggacttcctccaggacgtctccgcctccaccaagagccttcaggagttgttcttagcgcacatcttgtccccttggggggcagaggtgaaggcagagcctgttgaagttgtggccccaagagggaagtcaggggctgcgctctccaaaaaaagcaagggccaggtcaaggaggaaggtatcaacaaatctgaaaagagaatgaaattaactcttaaaggaggagcagctgtggatcctgattctggactggaacactctgcgcatgtcctggagaaaggtgggaaggtcttcagtgccacccttggcctggtggacatcgttaaaggaaccaactcctactacaagctgcagcttctggaggacgacaaggaaaacaggtattggatattcaggtcctggggccgtgtgggtacggtgatcggtagcaacaaactggaacagatgccgtccaaggaggatgccattgagcacttcatgaaattatatgaagaaaaaaccgggaacgcttggcactccaaaaatttcacgaagtatcccaaaaagttctaccccctggagattgactatggccaggatgaagaggcagtgaagaagctgacagtaaatcctggcaccaagtccaagctccccaagccagttcaggacctcatcaagatgatctttgatgtggaaagtatgaagaaagccatggtggagtatgagatcgaccttcagaagatgcccttggggaagctgagcaaaaggcagatccaggccgcatactccatcctcagtgaggtccagcaggcggtgtctcagggcagcagcgactctcagatcctggatctctcaaatcgcttttacaccctgatcccccacgactttgggatgaagaagcctccgctcctgaacaatgcagacagtgtgcaggccaaggtggaaatgcttgacaacctgctggacatcgaggtggcctacagtctgctcaggggagggtctgatgatagcagcaaggatcccatcgatgtcaactatgagaagctcaaaactgacattaaggtggttgacagagattctgaagaagccgagatcatcaggaagtatgttaagaacactcatgcaaccacacacaatgcgtatgacttggaagtcatcgatatctttaagatagagcgtgaaggcgaatgccagcgttacaagccctttaagcagcttcataaccgaagattgctgtggcacgggtccaggaccaccaactttgctgggatcctgtcccagggtcttcggatagccccgcctgaagcgcccgtgacaggctacatgtttggtaaagggatctatttcgctgacatggtctccaagagtgccaactactgccatacgtctcagggagacccaataggcttaatcctgttgggagaagttgcccttggaaacatgtatgaactgaagcacgcttcacatatcagcaagttacccaagggcaagcacagtgtcaaaggtttgggcaaaactacccctgatccttcagctaacattagtctggatggtgtagacgttcctcttgggaccgggatttcatctggtgtgaatgacacctctctactatataacgagtacattgtctatgatattgctcaggtaaatctgaagtatctgctgaaactgaaattcaattttaagacctccctgtgg

SEQ ID NO: 5594 - DNA, 1317 bp, Homo sapiens
  source 1..1317: mol_type = genomic DNA
atggatataaaaaactcaccatctagccttaattctccttcctcctacaactgcagtcaatccatcttacccctggagcacggctccatatacataccttcctcctatgtagacagccaccatgaatatccagccatgacattctatagccctgctgtgatgaattacagcattcccagcaatgtcactaacttggaaggtgggcctggtcggcagaccacaagcccaaatgtgttgtggccaacacctgggcacctttctcctttagtggtccatcgccagttatcacatctgtatgcggaacctcaaaagagtccctggtgtgaagcaagatcgctagaacacaccttacctgtaaacagagagacactgaaaaggaaggttagtgggaaccgttgcgccagccctgttactggtccaggttcaaagagggatgctcacttctgcgctgtctgcagcgattacgcatcgggatatcactatggagtctggtcgtgtgaaggatgtaaggccttttttaaaagaagcattcaaggacataatgattatatttgtccagctacaaatcagtgtacaatcgataaaaaccggcgcaagagctgccaggcctgccgacttcggaagtgttacgaagtgggaatggtgaagtgtggctcccggagagagagatgtgggtaccgccttgtgcggagacagagaagtgccgacgagcagctgcactgtgccggcaaggccaagagaagtggcggccacgcgccccgagtgcgggagctgctgctggacgccctgagccccgagcagctagtgctcaccctcctggaggctgagccgccccatgtgctgatcagccgccccagtgcgcccttcaccgaggcctccatgatgatgtccctgaccaagttggccgacaaggagttggtacacatgatcagctgggccaagaagattcccggtatgtaccctctggtcacagcgacccaggatgctgacagcagccggaagctggctcacttgctgaacgccgtgaccgatgctttggtttgggtgattgccaagagcggcatctcctcccagcagcaatccatgcgcctggctaacctcctgatgctcctgtcccacgtcaggcatgcgagtaacaagggcatggaacatctgctcaacatgaagtgcaaaaatgtggtcccagtgtatgacctgctgctggagatgctgaatgcccacgtgcttcgcgggtgcaagtcctccatcacggggtccgagtgcagcccggcagaggacagtaaaagcaaagagggctcccagaacccacagtctcag

SEQ ID NO: 5595 - DNA, 1485 bp, Homo sapiens
  source 1..1485: mol_type = genomic DNA
atggatataaaaaactcaccatctagccttaattctccttcctcctacaactgcagtcaatccatcttacccctggagcacggctccatatacataccttcctcctatgtagacagccaccatgaatatccagccatgacattctatagccctgctgtgatgaattacagcattcccagcaatgtcactaacttggaaggtgggcctggtcggcagaccacaagcccaaatgtgttgtggccaacacctgggcacctttctcctttagtggtccatcgccagttatcacatctgtatgcggaacctcaaaagagtccctggtgtgaagcaagatcgctagaacacaccttacctgtaaacagagagacactgaaaaggaaggttagtgggaaccgttgcgccagccctgttactggtccaggttcaaagagggatgctcacttctgcgctgtctgcagcgattacgcatcgggatatcactatggagtctggtcgtgtgaaggatgtaaggccttttttaaaagaagcattcaaggacataatgattatatttgtccagctacaaatcagtgtacaatcgataaaaaccggcgcaagagctgccaggcctgccgacttcggaagtgttacgaagtgggaatggtgaagtgtggctcccggagagagagatgtgggtaccgccttgtgcggagacagagaagtgccgacgagcagctgcactgtgccggcaaggccaagagaagtggcggccacgcgccccgagtgcgggagctgctgctggacgccctgagccccgagcagctagtgctcaccctcctggaggctgagccgccccatgtgctgatcagccgccccagtgcgcccttcaccgaggcctccatgatgatgtccctgaccaagttggccgacaaggagttggtacacatgatcagctgggccaagaagattcccggctttgtggagctcagcctgttcgaccaagtgcggctcttggagagctgttggatggaggtgttaatgatggggctgatgtggcgctcaattgaccaccccggcaagctcatctttgctccagatcttgttctggacagggatgaggggaaatgcgtagaaggaattctggaaatctttgacatgctcctggcaactacttcaaggtttcgagagttaaaactccaacacaaagaatatctctgtgtcaaggccatgatcctgctcaattccagtatgtaccctctggtcacagcgacccaggatgctgacagcagccggaagctggctcacttgctgaacgccgtgaccgatgctttggtttgggtgattgccaagagcggcatctcctcccagcagcaatccatgcgcctggctaacctcctgatgctcctgtcccacgtcaggcatgcgagggcagaaaaggcctctcaaacactcacctcatttggaatgaagatggagactcttttgcctgaagcaacgatggagcag

SEQ ID NO: 5596 - DNA, 1422 bp, Homo sapiens
  source 1..1422: mol_type = genomic DNA
atggatataaaaaactcaccatctagccttaattctccttcctcctacaactgcagtcaatccatcttacccctggagcacggctccatatacataccttcctcctatgtagacagccaccatgaatatccagccatgacattctatagccctgctgtgatgaattacagcattcccagcaatgtcactaacttggaaggtgggcctggtcggcagaccacaagcccaaatgtgttgtggccaacacctgggcacctttctcctttagtggtccatcgccagttatcacatctgtatgcggaacctcaaaagagtccctggtgtgaagcaagatcgctagaacacaccttacctgtaaacagagagacactgaaaaggaaggttagtgggaaccgttgcgccagccctgttactggtccaggttcaaagagggatgctcacttctgcgctgtctgcagcgattacgcatcgggatatcactatggagtctggtcgtgtgaaggatgtaaggccttttttaaaagaagcattcaaggacataatgattatatttgtccagctacaaatcagtgtacaatcgataaaaaccggcgcaagagctgccaggcctgccgacttcggaagtgttacgaagtgggaatggtgaagtgtggctcccggagagagagatgtgggtaccgccttgtgcggagacagagaagtgccgacgagcagctgcactgtgccggcaaggccaagagaagtggcggccacgcgccccgagtgcgggagctgctgctggacgccctgagccccgagcagctagtgctcaccctcctggaggctgagccgccccatgtgctgatcagccgccccagtgcgcccttcaccgaggcctccatgatgatgtccctgaccaagttggccgacaaggagttggtacacatgatcagctgggccaagaagattcccggctttgtggagctcagcctgttcgaccaagtgcggctcttggagagctgttggatggaggtgttaatgatggggctgatgtggcgctcaattgaccaccccggcaagctcatctttgctccagatcttgttctggacagggatgaggggaaatgcgtagaaggaattctggaaatctttgacatgctcctggcaactacttcaaggtttcgagagttaaaactccaacacaaagaatatctctgtgtcaaggccatgatcctgctcaattccagtatgtaccctctggtcacagcgacccaggatgctgacagcagccggaagctggctcacttgctgaacgccgtgaccgatgctttggtttgggtgattgccaagagcggcatctcctcccagcagcaatccatgcgcctggctaacctcctgatgctcctgtcccacgtcaggcatgcgaggtcctgtgtatacaag

SEQ ID NO: 5597 - DNA, 1443 bp, Homo sapiens
  source 1..1443: mol_type = genomic DNA
atggatataaaaaactcaccatctagccttaattctccttcctcctacaactgcagtcaatccatcttacccctggagcacggctccatatacataccttcctcctatgtagacagccaccatgaatatccagccatgacattctatagccctgctgtgatgaattacagcattcccagcaatgtcactaacttggaaggtgggcctggtcggcagaccacaagcccaaatgtgttgtggccaacacctgggcacctttctcctttagtggtccatcgccagttatcacatctgtatgcggaacctcaaaagagtccctggtgtgaagcaagatcgctagaacacaccttacctgtaaacagagagacactgaaaaggaaggttagtgggaaccgttgcgccagccctgttactggtccaggttcaaagagggatgctcacttctgcgctgtctgcagcgattacgcatcgggatatcactatggagtctggtcgtgtgaaggatgtaaggccttttttaaaagaagcattcaaggacataatgattatatttgtccagctacaaatcagtgtacaatcgataaaaaccggcgcaagagctgccaggcctgccgacttcggaagtgttacgaagtgggaatggtgaagtgtggctcccggagagagagatgtgggtaccgccttgtgcggagacagagaagtgccgacgagcagctgcactgtgccggcaaggccaagagaagtggcggccacgcgccccgagtgcgggagctgctgctggacgccctgagccccgagcagctagtgctcaccctcctggaggctgagccgccccatgtgctgatcagccgccccagtgcgcccttcaccgaggcctccatgatgatgtccctgaccaagttggccgacaaggagttggtacacatgatcagctgggccaagaagattcccggctttgtggagctcagcctgttcgaccaagtgcggctcttggagagctgttggatggaggtgttaatgatggggctgatgtggcgctcaattgaccaccccggcaagctcatctttgctccagatcttgttctggacagggatgaggggaaatgcgtagaaggaattctggaaatctttgacatgctcctggcaactacttcaaggtttcgagagttaaaactccaacacaaagaatatctctgtgtcaaggccatgatcctgctcaattccagtatgtaccctctggtcacagcgacccaggatgctgacagcagccggaagctggctcacttgctgaacgccgtgaccgatgctttggtttgggtgattgccaagagcggcatctcctcccagcagcaatccatgcgcctggctaacctcctgatgctcctgtcccacgtcaggcatgcgagatggggagaaaagcaattcattcatttgaagttatct

SEQ ID NO: 5598 - DNA, 4515 bp, Homo sapiens
  source 1..4515: mol_type = genomic DNA
atgttgtgcgtagccggagccaggttgaagagagaactcgatgccaccgcaacggtattggcgaaccggcaggatgaaagtgagcagtccagaaagcggcttatcgaacagagccgggagttcaagaagaacactccagaggatttgcgcaagcaggtagcgccgctgctgaagagtttccaaggagagattgatgcactgagtaaaagaagcaaggaagctgaagcagctttcttgaatgtctacaaaagattgattgacgtcccagatcccgtaccagctttggatctcggacagcaactccagctcaaagtgcagcgcctgcacgatattgaaacagagaaccagaaacttagggaaactctggaagaatacaacaaggaatttgctgaagtgaaaaatcaagaggttacgataaaagcacttaaagagaaaatccgagaatatgaacagacactgaagaaccaagccgaaaccatagctcttgagaaggaacagaagttacagaatgactttgcagaaaaggagagaaagctgcaggagacacagatgtccaccacctcaaagctggaggaagctgagcataaggttcagagcctacaaacagccctggaaaaaactcgaacagaattatttgacctgaaaaccaaatacgatgaagaaactactgcaaaggccgacgagattgaaatgatcatgacggaccttgaaagggcaaaccagagggcagaggtggctcagagagaggcggagaccttaagggaacagctctcatcggccaatcactccctccagctggcctcacagatccagaaggcaccagacgtggagcaggccatagaggtgctgacccgctccagcctagaagttgagttggccgccaaggagcgggagatcgcacagctggtggaggacgtgcagagactccaggccagcctcaccaagctgcgggagaattcggccagccagatctcacagcttgagcagcagctgagcgccaaaaacagcacactcaaacaactggaagaaaaactcaaaggccaggctgactatgaagaggtgaagaaagagctgaacattctgaagtccatggagtttgcaccgtccgagggcgctgggacacaggatgcggccaagcccctggaggtgctgttgctggagaagaaccgctcgctgcagtccgagaacgccgcgctgcgcatctccaacagcgacctgagcgggtcagccaggaggaaagggaaagaccagcctgaaagtcggcgcccgggatctttgccggccccccctccttctcagttgccccgcaacccgggggagcaggcttccaatactaatggtacacaccagttctcaccagcggggttaagtcaagactttttcagctcatccctggcaagccccagcctacccctggcttctacaggaaaatttgcactaaactctcttctccagcggcagctaatgcagtccttctactccaaggctatgcaggaagccggaagcacaagcatgattttttcaacaggtccatacagcacaaactccatatcttcccaaagtccattacaacaaagcccagatgtcaatggcatggccccatcccccagccagtcagaaagtgctgggagcgtctccgagggcgaggagatggacactgcagaaatcgcccggcaggtcaaagagcagctgattaagcacaatatcggacaacgtattttcggacattatgtgttgggactgtctcaagggtccgtgagcgagattctggcccggcccaagccatggaataaactgactgttcgtggcaaggagccatttcacaagatgaaacagttcctctccgatgagcagaacatcctggccctccgtagcatccaaggcagacaaagagagaatccaggccagagcctgaacagactatttcaggaagtaccgaaacgaagaaatgggtctgaaggtaacatcaccacccggatccgagcctcggagactggctctgatgaagccatcaagtccatcctagagcaagccaagagggagctccaagtgcagaaaactgcagagccggcccagccttcctccgcatccggcagcgggaactctgatgacgccatccgctccatcctgcagcaagcccgccgggagatggaggcccagcaggctgccctcgaccctgccttaaagcaggcaccactgtcccagagtgacatcaccatcctcacccccaagcttctgtccacctcgcccatgcccaccgtgtccagctacccacctctcgccatctccctgaagaagccctccgcagctcctgaggccggtgcctctgctctgccgaaccccccggccctcaaaaaggaggcccaggacgcccccgggctggacccccagggagcagccgattgtgcacaaggggtcctgagacaggtgaaaaatgaggtgggccgcagcggtgcctggaaggaccactggtggagcgcggtgcagccggagagaagaaatgccgcctcctccgaggaggccaaggccgaagaaacgggcggcgggaaagagaagggcagcggtggcagcggaggtggcagccagcctcgggccgagcgcagtcagctccagggaccctcgtcgtcagagtactggaaggagtggcccagcgctgagtccccatactcccagagctcagagctgagtctgaccggggccagccgcagcgagacaccacagaacagccccctgccatcctccccgatcgtgcccatgtccaagcccaccaagccctcggtccccccgctgacccccgagcagtacgaggtctacatgtaccaggaggtggacaccatcgagctcacccggcaggttaaggaaaagctggccaagaacggcatctgccagagaatcttcggggagaaggtgctgggcctgtcccagggcagcgtcagcgacatgctgtcccgaccgaagccatggagcaagctgacgcagaaaggccgagaacccttcatccggatgcagctctggctgaacggcgagctaggccagggtgttctacccgtccagggccagcagcaagggccagtcctccactccgtgacatcgctccaggacccgctgcagcagggctgtgtgagctcagaaagcactccaaagacctccgccagctgcagccctgcccctgagtccccgatgagttccagtgagtcggtgaagagcctgaccgagctggtccagcagccctgtccccccatcgaggcgagcaaggacagcaagccaccagagcccagtgacccgccagcatccgactcccagcccacaaccccgctgcctctctccggacactcggccctcagcatccaagaattagtagccatgtccccggagctggacacctacggcataaccaagcgggtgaaggaggtgctgacggacaacaacctcggccagcgcttatttggggagaccatcttagggctcacccaaggctctgtctctgacctccttgcccgccccaaaccctggcataagctcagtctgaaaggacgagagcccttcgtccggatgcagctgtggctgaacgaccccaacaatgtggagaagctgatggacatgaaacggatggagaagaaagcctacatgaagcggcggcacagctcagtcagtgacagccagccctgcgaaccgccctctgtcggcaccgagtacagccagggcgccagcccccagccccagcaccagctgaagaaaccccgggtggtgctggctccggaggagaaggaggcgctgaaacgagcgtatcagcaaaagccatacccgtcaccaaaaaccatcgaagacctcgccacccagctcaacctgaaaaccagcaccgtcatcaactggttccacaactacaggtctcggatccgcagagaactgttcattgaggaaattcaggccgggagtcagggccaggcgggcgccagcgactcaccctcggcccgcagcggccgggcggcgcccagctcggagggcgacagctgcgacggcgtggaggccactgagggcccaggcagcgccgacaccgaggagcccaagtctcagggagaggccgagcgggaggaggtgccgcggccggcggagcagacggagccgccgccctcggggaccccgggcccggacgacgcccgcgacgacgaccacgagggaggccccgtggaaggcccggggcccctgcccagccccgcctccgcgaccgccaccgccgcgcccgcggcccccgaggacgccgctacctcagccgccgccgcgccgggggagggccccgcggccccgagctccgcgccgccgcccagcaacagcagcagcagcagcgccccccgcaggcccagctcgctgcagagccttttcggcctccccgaggccgcgggcgcccgggactcgcgcgacaaccccctgcgcaagaagaaggccgcgaacttgaacagcatcatccaccgcctggagaaggccgccagccgggaggaacctatcgaatgggagttc

SEQ ID NO: 5599 - DNA, 4548 bp, Homo sapiens
  source 1..4548: mol_type = genomic DNA
atggcggccaatgtgggatcgatgtttcaatattggaagcgctttgatttacagcagctgcagagagaactcgatgccaccgcaacggtattggcgaaccggcaggatgaaagtgagcagtccagaaagcggcttatcgaacagagccgggagttcaagaagaacactccagaggatttgcgcaagcaggtagcgccgctgctgaagagtttccaaggagagattgatgcactgagtaaaagaagcaaggaagctgaagcagctttcttgaatgtctacaaaagattgattgacgtcccagatcccgtaccagctttggatctcggacagcaactccagctcaaagtgcagcgcctgcacgatattgaaacagagaaccagaaacttagggaaactctggaagaatacaacaaggaatttgctgaagtgaaaaatcaagaggttacgataaaagcacttaaagagaaaatccgagaatatgaacagacactgaagaaccaagccgaaaccatagctcttgagaaggaacagaagttacagaatgactttgcagaaaaggagagaaagctgcaggagacacagatgtccaccacctcaaagctggaggaagctgagcataaggttcagagcctacaaacagccctggaaaaaactcgaacagaattatttgacctgaaaaccaaatacgatgaagaaactactgcaaaggccgacgagattgaaatgatcatgacggaccttgaaagggcaaaccagagggcagaggtggctcagagagaggcggagaccttaagggaacagctctcatcggccaatcactccctccagctggcctcacagatccagaaggcaccagacgtggagcaggccatagaggtgctgacccgctccagcctagaagttgagttggccgccaaggagcgggagatcgcacagctggtggaggacgtgcagagactccaggccagcctcaccaagctgcgggagaattcggccagccagatctcacagcttgagcagcagctgagcgccaaaaacagcacactcaaacaactggaagaaaaactcaaaggccaggctgactatgaagaggtgaagaaagagctgaacattctgaagtccatggagtttgcaccgtccgagggcgctgggacacaggatgcggccaagcccctggaggtgctgttgctggagaagaaccgctcgctgcagtccgagaacgccgcgctgcgcatctccaacagcgacctgagcgggtcagccaggaggaaagggaaagaccagcctgaaagtcggcgcccgggatctttgccggccccccctccttctcagttgccccgcaacccgggggagcaggcttccaatactaatggtacacaccagttctcaccagcggggttaagtcaagactttttcagctcatccctggcaagccccagcctacccctggcttctacaggaaaatttgcactaaactctcttctccagcggcagctaatgcagtccttctactccaaggctatgcaggaagccggaagcacaagcatgattttttcaacaggtccatacagcacaaactccatatcttcccaaagtccattacaacaaagcccagatgtcaatggcatggccccatcccccagccagtcagaaagtgctgggagcgtctccgagggcgaggagatggacactgcagaaatcgcccggcaggtcaaagagcagctgattaagcacaatatcggacaacgtattttcggacattatgtgttgggactgtctcaagggtccgtgagcgagattctggcccggcccaagccatggaataaactgactgttcgtggcaaggagccatttcacaagatgaaacagttcctctccgatgagcagaacatcctggccctccgtagcatccaaggcagacaaagagagaatccaggccagagcctgaacagactatttcaggaagtaccgaaacgaagaaatgggtctgaaggtaacatcaccacccggatccgagcctcggagactggctctgatgaagccatcaagtccatcctagagcaagccaagagggagctccaagtgcagaaaactgcagagccggcccagccttcctccgcatccggcagcgggaactctgatgacgccatccgctccatcctgcagcaagcccgccgggagatggaggcccagcaggctgccctcgaccctgccttaaagcaggcaccactgtcccagagtgacatcaccatcctcacccccaagcttctgtccacctcgcccatgcccaccgtgtccagctacccacctctcgccatctccctgaagaagccctccgcagctcctgaggccggtgcctctgctctgccgaaccccccggccctcaaaaaggaggcccaggacgcccccgggctggacccccagggagcagccgattgtgcacaaggggtcctgagacaggtgaaaaatgaggtgggccgcagcggtgcctggaaggaccactggtggagcgcggtgcagccggagagaagaaatgccgcctcctccgaggaggccaaggccgaagaaacgggcggcgggaaagagaagggcagcggtggcagcggaggtggcagccagcctcgggccgagcgcagtcagctccagggaccctcgtcgtcagagtactggaaggagtggcccagcgctgagtccccatactcccagagctcagagctgagtctgaccggggccagccgcagcgagacaccacagaacagccccctgccatcctccccgatcgtgcccatgtccaagcccaccaagccctcggtccccccgctgacccccgagcagtacgaggtctacatgtaccaggaggtggacaccatcgagctcacccggcaggttaaggaaaagctggccaagaacggcatctgccagagaatcttcggggagaaggtgctgggcctgtcccagggcagcgtcagcgacatgctgtcccgaccgaagccatggagcaagctgacgcagaaaggccgagaacccttcatccggatgcagctctggctgaacggcgagctaggccagggtgttctacccgtccagggccagcagcaagggccagtcctccactccgtgacatcgctccaggacccgctgcagcagggctgtgtgagctcagaaagcactccaaagacctccgccagctgcagccctgcccctgagtccccgatgagttccagtgagtcggtgaagagcctgaccgagctggtccagcagccctgtccccccatcgaggcgagcaaggacagcaagccaccagagcccagtgacccgccagcatccgactcccagcccacaaccccgctgcctctctccggacactcggccctcagcatccaagaattagtagccatgtccccggagctggacacctacggcataaccaagcgggtgaaggaggtgctgacggacaacaacctcggccagcgcttatttggggagaccatcttagggctcacccaaggctctgtctctgacctccttgcccgccccaaaccctggcataagctcagtctgaaaggacgagagcccttcgtccggatgcagctgtggctgaacgaccccaacaatgtggagaagctgatggacatgaaacggatggagaagaaagcctacatgaagcggcggcacagctcagtcagtgacagccagccctgcgaaccgccctctgtcggcaccgagtacagccagggcgccagcccccagccccagcaccagctgaagaaaccccgggtggtgctggctccggaggagaaggaggcgctgaaacgagcgtatcagcaaaagccatacccgtcaccaaaaaccatcgaagacctcgccacccagctcaacctgaaaaccagcaccgtcatcaactggttccacaactacaggtctcggatccgcagagaactgttcattgaggaaattcaggccgggagtcagggccaggcgggcgccagcgactcaccctcggcccgcagcggccgggcggcgcccagctcggagggcgacagctgcgacggcgtggaggccactgagggcccaggcagcgccgacaccgaggagcccaagtctcagggagaggccgagcgggaggaggtgccgcggccggcggagcagacggagccgccgccctcggggaccccgggcccggacgacgcccgcgacgacgaccacgagggaggccccgtggaaggcccggggcccctgcccagccccgcctccgcgaccgccaccgccgcgcccgcggcccccgaggacgccgctacctcagccgccgccgcgccgggggagggccccgcggccccgagctccgcgccgccgcccagcaacagcagcagcagcagcgccccccgcaggcccagctcgctgcagagccttttcggcctccccgaggccgcgggcgcccgggactcgcgcgacaaccccctgcgcaagaagaaggccgcgaacttgaacagcatcatccaccgcctggagaaggccgccagccgggaggaacctatcgaatgggagttc

SEQ ID NO: 5600 - DNA, 2028 bp, Homo sapiens
  source 1..2028: mol_type = genomic DNA
atggcggccaatgtgggatcgatgtttcaatattggaagcgctttgatttacagcagctgcagagagaactcgatgccaccgcaacggtattggcgaaccggcaggatgaaagtgagcagtccagaaagcggcttatcgaacagagccgggagttcaagaagaacactccagaggatttgcgcaagcaggtagcgccgctgctgaagagtttccaaggagagattgatgcactgagtaaaagaagcaaggaagctgaagcagctttcttgaatgtctacaaaagattgattgacgtcccagatcccgtaccagctttggatctcggacagcaactccagctcaaagtgcagcgcctgcacgatattgaaacagagaaccagaaacttagggaaactctggaagaatacaacaaggaatttgctgaagtgaaaaatcaagaggttacgataaaagcacttaaagagaaaatccgagaatatgaacagacactgaagaaccaagccgaaaccatagctcttgagaaggaacagaagttacagaatgactttgcagaaaaggagagaaagctgcaggagacacagatgtccaccacctcaaagctggaggaagctgagcataaggttcagagcctacaaacagccctggaaaaaactcgaacagaattatttgacctgaaaaccaaatacgatgaagaaactactgcaaaggccgacgagattgaaatgatcatgacggaccttgaaagggcaaaccagagggcagaggtggctcagagagaggcggagaccttaagggaacagctctcatcggccaatcactccctccagctggcctcacagatccagaaggcaccagacgtggccatagaggtgctgacccgctccagcctagaagttgagttggccgccaaggagcgggagatcgcacagctggtggaggacgtgcagagactccaggccagcctcaccaagctgcgggagaattcggccagccagatctcacagcttgagcagcagctgagcgccaaaaacagcacactcaaacaactggaagaaaaactcaaaggccaggctgactatgaagaggtgaagaaagagctgaacattctgaagtccatggagtttgcaccgtccgagggcgctgggacacaggatgcggccaagcccctggaggtgctgttgctggagaagaaccgctcgctgcagtccgagaacgccgcgctgcgcatctccaacagcgacctgagcggacgctgtgcggagctgcaagtccgtatcactgaggctgtggccacagccactgagcagagagagctgatcgcccgcctggagcaggacctgagcatcattcagtccatccagcggcccgatgccgagggtgccgctgagcaccgcctggagaagatcccagagcccatcaaagaggccactgccctattctacggacctgcagcaccagccagcggtgccctcccagagggccaggtggattcactgctttccatcatctccagccagagggagcgcttccgtgcccggaaccaggagcttgaggccgagaaccgcctggcccagcacaccctccaggccctgcagagtgagctggacagcctgcgcgccgacaacatcaagctctttgagaagatcaagttcctgcagagctaccctggccggggcagcggcagtgatgacacggagctgcggtactcgtcccagtacgaggagcgcctggaccccttctcctccttcagcaagcgggagcggcagaggaagtacctgagcttgagtccctgggacaaggccaccctcagcatggggcgtctggttctctccaacaagatggcgcgcaccatcggcttcttctacacactgttcctgcactgcctggtcttcctggtgctctacaagctggcatggagcgagagcatggagagggactgtgccaccttctgcgccaagaagttcgctgaccacctgcacaagttccacgagaatgacaacggggctgcggctggtgacttgtggcag

SEQ ID NO: 5601 - DNA, 1986 bp, Homo sapiens
  source 1..1986: mol_type = genomic DNA
atggcggccaatgtgggatcgatgtttcaatattggaagcgctttgatttacagcagctgcagagagaactcgatgccaccgcaacggtattggcgaaccggcaggatgaaagtgagcagtccagaaagcggcttatcgaacagagccgggagttcaagaagaacactccagagattgatgcactgagtaaaagaagcaaggaagctgaagcagctttcttgaatgtctacaaaagattgattgacgtcccagatcccgtaccagctttggatctcggacagcaactccagctcaaagtgcagcgcctgcacgatattgaaacagagaaccagaaacttagggaaactctggaagaatacaacaaggaatttgctgaagtgaaaaatcaagaggttacgataaaagcacttaaagagaaaatccgagaatatgaacagacactgaagaaccaagccgaaaccatagctcttgagaaggaacagaagttacagaatgactttgcagaaaaggagagaaagctgcaggagacacagatgtccaccacctcaaagctggaggaagctgagcataaggttcagagcctacaaacagccctggaaaaaactcgaacagaattatttgacctgaaaaccaaatacgatgaagaaactactgcaaaggccgacgagattgaaatgatcatgacggaccttgaaagggcaaaccagagggcagaggtggctcagagagaggcggagaccttaagggaacagctctcatcggccaatcactccctccagctggcctcacagatccagaaggcaccagacgtggagcaggccatagaggtgctgacccgctccagcctagaagttgagttggccgccaaggagcgggagatcgcacagctggtggaggacgtgcagagactccaggccagcctcaccaagctgcgggagaattcggccagccagatctcacagcttgagcagcagctgagcgccaaaaacagcacactcaaacaactggaagaaaaactcaaaggccaggctgactatgaagaggtgaagaaagagctgaacattctgaagtccatggagtttgcaccgtccgagggcgctgggacacaggatgcggccaagcccctggaggtgctgttgctggagaagaaccgctcgctgcagtccgagaacgccgcgctgcgcatctccaacagcgacctgagcggacgctgtgcggagctgcaagtccgtatcactgaggctgtggccacagccactgagcagagagagctgatcgcccgcctggagcaggacctgagcatcattcagtccatccagcggcccgatgccgagggtgccgctgagcaccgcctggagaagatcccagagcccatcaaagaggccactgccctattctacggacctgcagcaccagccagcggtgccctcccagagggccaggtggattcactgctttccatcatctccagccagagggagcgcttccgtgcccggaaccaggagcttgaggccgagaaccgcctggcccagcacaccctccaggccctgcagagtgagctggacagcctgcgcgccgacaacatcaagctctttgagaagatcaagttcctgcagagctaccctggccggggcagcggcagtgatgacacggagctgcggtactcgtcccagtacgaggagcgcctggaccccttctcctccttcagcaagcgggagcggcagaggaagtacctgagcttgagtccctgggacaaggccaccctcagcatggggcgtctggttctctccaacaagatggcgcgcaccatcggcttcttctacacactgttcctgcactgcctggtcttcctggtgctctacaagctggcatggagcgagagcatggagagggactgtgccaccttctgcgccaagaagttcgctgaccacctgcacaagttccacgagaatgacaacggggctgcggctggtgacttgtggcag

SEQ ID NO: 5602 - DNA, 1917 bp, Homo sapiens
  source 1..1917: mol_type = genomic DNA
atggcggccaatgtgggatcgatgtttcaatattggaagcgctttgatttacagcagctgcaggatttgcgcaagcaggtagcgccgctgctgaagagtttccaaggagagattgatgcactgagtaaaagaagcaaggaagctgaagcagctttcttgaatgtctacaaaagattgattgacgtcccagatcccgtaccagctttggatctcggacagcaactccagctcaaagtgcagcgcctgcacgatattgaaacagagaaccagaaacttagggaaactctggaagaatacaacaaggaatttgctgaagtgaaaaatcaagaggttacgataaaagcacttaaagagaaaatccgagaatatgaacagacactgaagaaccaagccgaaaccatagctcttgagaaggaacagaagttacagaatgactttgcagaaaaggagagaaagctgcaggagacacagatgtccaccacctcaaagctggaggaagctgagcataaggttcagagcctacaaacagccctggaaaaaactcgaacagaattatttgacctgaaaaccaaatacgatgaagaaactactgcaaaggccgacgagattgaaatgatcatgacggaccttgaaagggcaaaccagagggcagaggtggctcagagagaggcggagaccttaagggaacagctctcatcggccaatcactccctccagctggcctcacagatccagaaggcaccagacgtggccatagaggtgctgacccgctccagcctagaagttgagttggccgccaaggagcgggagatcgcacagctggtggaggacgtgcagagactccaggccagcctcaccaagctgcgggagaattcggccagccagatctcacagcttgagcagcagctgagcgccaaaaacagcacactcaaacaactggaagaaaaactcaaaggccaggctgactatgaagaggtgaagaaagagctgaacattctgaagtccatggagtttgcaccgtccgagggcgctgggacacaggatgcggccaagcccctggaggtgctgttgctggagaagaaccgctcgctgcagtccgagaacgccgcgctgcgcatctccaacagcgacctgagcggacgctgtgcggagctgcaagtccgtatcactgaggctgtggccacagccactgagcagagagagctgatcgcccgcctggagcaggacctgagcatcattcagtccatccagcggcccgatgccgagggtgccgctgagcaccgcctggagaagatcccagagcccatcaaagaggccactgccctattctacggacctgcagcaccagccagcggtgccctcccagagggccaggtggattcactgctttccatcatctccagccagagggagcgcttccgtgcccggaaccaggagcttgaggccgagaaccgcctggcccagcacaccctccaggccctgcagagtgagctggacagcctgcgcgccgacaacatcaagctctttgagaagatcaagttcctgcagagctaccctggccggggcagcggcagtgatgacacggagctgcggtactcgtcccagtacgaggagcgcctggaccccttctcctccttcagcaagcgggagcggcagaggaagtacctgagcttgagtccctgggacaaggccaccctcagcatggggcgtctggttctctccaacaagatggcgcgcaccatcggcttcttctacacactgttcctgcactgcctggtcttcctggtgctctacaagctggcatggagcgagagcatggagagggactgtgccaccttctgcgccaagaagttcgctgaccacctgcacaagttccacgagaatgacaacggggctgcggctggtgacttgtggcag

SEQ ID NO: 5603 - DNA, 2034 bp, Homo sapiens
  source 1..2034: mol_type = genomic DNA
atggcggccaatgtgggatcgatgtttcaatattggaagcgctttgatttacagcagctgcagagagaactcgatgccaccgcaacggtattggcgaaccggcaggatgaaagtgagcagtccagaaagcggcttatcgaacagagccgggagttcaagaagaacactccagaggatttgcgcaagcaggtagcgccgctgctgaagagtttccaaggagagattgatgcactgagtaaaagaagcaaggaagctgaagcagctttcttgaatgtctacaaaagattgattgacgtcccagatcccgtaccagctttggatctcggacagcaactccagctcaaagtgcagcgcctgcacgatattgaaacagagaaccagaaacttagggaaactctggaagaatacaacaaggaatttgctgaagtgaaaaatcaagaggttacgataaaagcacttaaagagaaaatccgagaatatgaacagacactgaagaaccaagccgaaaccatagctcttgagaaggaacagaagttacagaatgactttgcagaaaaggagagaaagctgcaggagacacagatgtccaccacctcaaagctggaggaagctgagcataaggttcagagcctacaaacagccctggaaaaaactcgaacagaattatttgacctgaaaaccaaatacgatgaagaaactactgcaaaggccgacgagattgaaatgatcatgacggaccttgaaagggcaaaccagagggcagaggtggctcagagagaggcggagaccttaagggaacagctctcatcggccaatcactccctccagctggcctcacagatccagaaggcaccagacgtggagcaggccatagaggtgctgacccgctccagcctagaagttgagttggccgccaaggagcgggagatcgcacagctggtggaggacgtgcagagactccaggccagcctcaccaagctgcgggagaattcggccagccagatctcacagcttgagcagcagctgagcgccaaaaacagcacactcaaacaactggaagaaaaactcaaaggccaggctgactatgaagaggtgaagaaagagctgaacattctgaagtccatggagtttgcaccgtccgagggcgctgggacacaggatgcggccaagcccctggaggtgctgttgctggagaagaaccgctcgctgcagtccgagaacgccgcgctgcgcatctccaacagcgacctgagcggacgctgtgcggagctgcaagtccgtatcactgaggctgtggccacagccactgagcagagagagctgatcgcccgcctggagcaggacctgagcatcattcagtccatccagcggcccgatgccgagggtgccgctgagcaccgcctggagaagatcccagagcccatcaaagaggccactgccctattctacggacctgcagcaccagccagcggtgccctcccagagggccaggtggattcactgctttccatcatctccagccagagggagcgcttccgtgcccggaaccaggagcttgaggccgagaaccgcctggcccagcacaccctccaggccctgcagagtgagctggacagcctgcgcgccgacaacatcaagctctttgagaagatcaagttcctgcagagctaccctggccggggcagcggcagtgatgacacggagctgcggtactcgtcccagtacgaggagcgcctggaccccttctcctccttcagcaagcgggagcggcagaggaagtacctgagcttgagtccctgggacaaggccaccctcagcatggggcgtctggttctctccaacaagatggcgcgcaccatcggcttcttctacacactgttcctgcactgcctggtcttcctggtgctctacaagctggcatggagcgagagcatggagagggactgtgccaccttctgcgccaagaagttcgctgaccacctgcacaagttccacgagaatgacaacggggctgcggctggtgacttgtggcag

SEQ ID NO: 5604 - DNA, 1896 bp, Homo sapiens
  source 1..1896: mol_type = genomic DNA
atggcggccaatgtgggatcgatgtttcaatattggaagcgctttgatttacagcagctgcagagagaactcgatgccaccgcaacggtattggcgaaccggcaggatgaaagtgagcagtccagaaagcggcttatcgaacagagccgggagttcaagaagaacactccagaggatttgcgcaagcaggtagcgccgctgctgaagagtttccaaggagagattgatgcactgagtaaaagaagcaaggaagctgaagcagctttcttgaatgtctacaaaagattgattgacgtcccagaggttacgataaaagcacttaaagagaaaatccgagaatatgaacagacactgaagaaccaagccgaaaccatagctcttgagaaggaacagaagttacagaatgactttgcagaaaaggagagaaagctgcaggagacacagatgtccaccacctcaaagctggaggaagctgagcataaggttcagagcctacaaacagccctggaaaaaactcgaacagaattatttgacctgaaaaccaaatacgatgaagaaactactgcaaaggccgacgagattgaaatgatcatgacggaccttgaaagggcaaaccagagggcagaggtggctcagagagaggcggagaccttaagggaacagctctcatcggccaatcactccctccagctggcctcacagatccagaaggcaccagacgtggagcaggccatagaggtgctgacccgctccagcctagaagttgagttggccgccaaggagcgggagatcgcacagctggtggaggacgtgcagagactccaggccagcctcaccaagctgcgggagaattcggccagccagatctcacagcttgagcagcagctgagcgccaaaaacagcacactcaaacaactggaagaaaaactcaaaggccaggctgactatgaagaggtgaagaaagagctgaacattctgaagtccatggagtttgcaccgtccgagggcgctgggacacaggatgcggccaagcccctggaggtgctgttgctggagaagaaccgctcgctgcagtccgagaacgccgcgctgcgcatctccaacagcgacctgagcggacgctgtgcggagctgcaagtccgtatcactgaggctgtggccacagccactgagcagagagagctgatcgcccgcctggagcaggacctgagcatcattcagtccatccagcggcccgatgccgagggtgccgctgagcaccgcctggagaagatcccagagcccatcaaagaggccactgccctattctacggacctgcagcaccagccagcggtgccctcccagagggccaggtggattcactgctttccatcatctccagccagagggagcgcttccgtgcccggaaccaggagcttgaggccgagaaccgcctggcccagcacaccctccaggccctgcagagtgagctggacagcctgcgcgccgacaacatcaagctctttgagaagatcaagttcctgcagagctaccctggccggggcagcggcagtgatgacacggagctgcggtactcgtcccagtacgaggagcgcctggaccccttctcctccttcagcaagcgggagcggcagaggaagtacctgagcttgagtccctgggacaaggccaccctcagcatggggcgtctggttctctccaacaagatggcgcgcaccatcggcttcttctacacactgttcctgcactgcctggtcttcctggtgctctacaagctggcatggagcgagagcatggagagggactgtgccaccttctgcgccaagaagttcgctgaccacctgcacaagttccacgagaatgacaacggggctgcggctggtgacttgtggcag

SEQ ID NO: 5605 - DNA, 1323 bp, Homo sapiens
  source 1..1323: mol_type = genomic DNA
atggagcagccacaggaggaagcccctgaggtccgggaagaggaggagaaagaggaagtggcagaggcagaaggagccccagagctcaatgggggaccacagcatgcacttccttccagcagctacacagacctctcccggagctcctcgccaccctcactgctggaccaactgcagatgggctgtgacggggcctcatgcggcagcctcaacatggagtgccgggtgtgcggggacaaggcatcgggcttccactacggtgttcatgcatgtgaggggtgcaagggcttcttccgtcgtacgatccgcatgaagctggagtacgagaagtgtgagcgcagctgcaagattcagaagaagaaccgcaacaagtgccagtactgccgcttccagaagtgcctggcactgggcatgtcacacaacgctatccgttttggtcggatgccggaggctgagaagaggaagctggtggcagggctgactgcaaacgaggggagccagtacaacccacaggtggccgacctgaaggccttctccaagcacatctacaatgcctacctgaaaaacttcaacatgaccaaaaagaaggcccgcagcatcctcaccggcaaagccagccacacggcgccctttgtgatccacgacatcgagacattgtggcaggcagagaaggggctggtgtggaagcagttggtgaatggcctgcctccctacaaggagatcagcgtgcacgtcttctaccgctgccagtgcaccacagtggagaccgtgcgggagctcactgagttcgccaagagcatccccagcttcagcagcctcttcctcaacgaccaggttacccttctcaagtatggcgtgcacgaggccatcttcgccatgctggcctctatcgtcaacaaggacgggctgctggtagccaacggcagtggctttgtcacccgtgagttcctgcgcagcctccgcaaacccttcagtgatatcattgagcctaagtttgaatttgctgtcaagttcaacgccctggaacttgatgacagtgacctggccctattcattgcggccatcattctgtgtggagaccggccaggcctcatgaacgttccacgggtggaggctatccaggacaccatcctgcgtgccctcgaattccacctgcaggccaaccaccctgatgcccagtacctcttccccaagctgctgcagaagatggctgacctgcggcaactggtcaccgagcacgcccagatgatgcagcggatcaagaagaccgaaaccgagacctcgctgcaccctctgctccaggagatctacaaggacatgtac

SEQ ID NO: 5606 - DNA, 1206 bp, Homo sapiens
  source 1..1206: mol_type = genomic DNA
atgcaccaacgagacctctcccggagctcctcgccaccctcactgctggaccaactgcagatgggctgtgacggggcctcatgcggcagcctcaacatggagtgccgggtgtgcggggacaaggcatcgggcttccactacggtgttcatgcatgtgaggggtgcaagggcttcttccgtcgtacgatccgcatgaagctggagtacgagaagtgtgagcgcagctgcaagattcagaagaagaaccgcaacaagtgccagtactgccgcttccagaagtgcctggcactgggcatgtcacacaacgctatccgttttggtcggatgccggaggctgagaagaggaagctggtggcagggctgactgcaaacgaggggagccagtacaacccacaggtggccgacctgaaggccttctccaagcacatctacaatgcctacctgaaaaacttcaacatgaccaaaaagaaggcccgcagcatcctcaccggcaaagccagccacacggcgccctttgtgatccacgacatcgagacattgtggcaggcagagaaggggctggtgtggaagcagttggtgaatggcctgcctccctacaaggagatcagcgtgcacgtcttctaccgctgccagtgcaccacagtggagaccgtgcgggagctcactgagttcgccaagagcatccccagcttcagcagcctcttcctcaacgaccaggttacccttctcaagtatggcgtgcacgaggccatcttcgccatgctggcctctatcgtcaacaaggacgggctgctggtagccaacggcagtggctttgtcacccgtgagttcctgcgcagcctccgcaaacccttcagtgatatcattgagcctaagtttgaatttgctgtcaagttcaacgccctggaacttgatgacagtgacctggccctattcattgcggccatcattctgtgtggagaccggccaggcctcatgaacgttccacgggtggaggctatccaggacaccatcctgcgtgccctcgaattccacctgcaggccaaccaccctgatgcccagtacctcttccccaagctgctgcagaagatggctgacctgcggcaactggtcaccgagcacgcccagatgatgcagcggatcaagaagaccgaaaccgagacctcgctgcaccctctgctccaggagatctacaaggacatgtac

SEQ ID NO: 5607 - DNA, 1029 bp, Homo sapiens
  source 1..1029: mol_type = genomic DNA
atggagcagccacaggaggaagcccctgaggtccgggaagaggaggagaaagaggaagtggcagaggcagaaggagccccagagctcaatgggggaccacagcatgcacttccttccagcagctacacagctatccgttttggtcggatgccggaggctgagaagaggaagctggtggcagggctgactgcaaacgaggggagccagtacaacccacaggtggccgacctgaaggccttctccaagcacatctacaatgcctacctgaaaaacttcaacatgaccaaaaagaaggcccgcagcatcctcaccggcaaagccagccacacggcgccctttgtgatccacgacatcgagacattgtggcaggcagagaaggggctggtgtggaagcagttggtgaatggcctgcctccctacaaggagatcagcgtgcacgtcttctaccgctgccagtgcaccacagtggagaccgtgcgggagctcactgagttcgccaagagcatccccagcttcagcagcctcttcctcaacgaccaggttacccttctcaagtatggcgtgcacgaggccatcttcgccatgctggcctctatcgtcaacaaggacgggctgctggtagccaacggcagtggctttgtcacccgtgagttcctgcgcagcctccgcaaacccttcagtgatatcattgagcctaagtttgaatttgctgtcaagttcaacgccctggaacttgatgacagtgacctggccctattcattgcggccatcattctgtgtggagaccggccaggcctcatgaacgttccacgggtggaggctatccaggacaccatcctgcgtgccctcgaattccacctgcaggccaaccaccctgatgcccagtacctcttccccaagctgctgcagaagatggctgacctgcggcaactggtcaccgagcacgcccagatgatgcagcggatcaagaagaccgaaaccgagacctcgctgcaccctctgctccaggagatctacaaggacatgtac

SEQ ID NO: 5608 - DNA, 1242 bp, Homo sapiens
  source 1..1242: mol_type = genomic DNA
atggcctcgggcgacaccctctacatcgccacggacggctcggagatgccggccgagatcgtggagctgcacgagatcgaggtggagaccatcccggtggagaccatcgagaccacagtggtgggcgaggaggaggaggaggacgacgacgacgaggacggcggcggtggcgaccacggcggcgggggcggccacgggcacgccggccaccaccaccaccaccatcaccaccaccaccacccgcccatgatcgctctgcagccgctggtcaccgacgacccgacccaggtgcaccaccaccaggaggtgatcctggtgcagacgcgcgaggaggtggtgggcggcgacgactcggacgggctgcgcgccgaggacggcttcgaggatcagattctcatcccggtgcccgcgccggccggcggcgacgacgactacattgaacaaacgctggtcaccgtggcggcggccggcaagagcggcggcggcggctcgtcgtcgtcgggaggcggccgcgtcaagaagggcggcggcaagaagagcggcaagaagagttacctcagcggcggggccggcgcggcgggcggcggcggcgccgacccgggcaacaagaagtgggagcagaagcaggtgcagatcaagaccctggagggcgagttctcggtcaccatgtggtcctcagatgaaaaaaaagatattgaccatgagacagtggttgaagaacagatcattggagagaactcacctcctgattattcagaatatatgacaggaaagaaacttcctcctggaggaatacctggcattgacctctcagatcccaaacaactggcagaatttgctagaatgaagccaagaaaaattaaagaagatgatgctccaagaacaatagcttgccctcataaaggctgcacaaagatgttcagggataactcggccatgagaaaacatctgcacacccacggtcccagagtccacgtctgtgcagaatgtggcaaagcttttgttgagagttcaaaactaaaacgacaccaactggttcatactggagagaagccctttcagtgcacgttcgaaggctgtgggaaacgcttttcactggacttcaatttgcgcacacatgtgcgaatccataccggagacaggccctatgtgtgccccttcgatggttgtaataagaagtttgctcagtcaactaacctgaaatctcacatcttaacacatgctaaggccaaaaacaaccag

SEQ ID NO: 5609 - DNA, 420 bp, Homo sapiens
  source 1..420: mol_type = genomic DNA
atgaccaagtttcaggagatggtgacattcaaggatgtggctgtggtcttcaccagggaggagctggggttgctggaccttgcccagagaaagctgtaccaagatgtgatgctggagaacttcaggaacctgctgtcagtgggctatcaacccttcaaactagatgtgatattacagttgggaaaagaagacaagcttcggatgatggagacagaaatccaaggagatgggtgttcaggtgagaaccatggagctctgagtctttgcggggtacagcctagtcctctcctcctcaccacctcctcagccaccagcctggcccaagaccccagaattcatcgccctggtttactgcagcagcttgcacatgaccttcctccttctacctccctccagtccattctccacatagccagatca

SEQ ID NO: 5610 - DNA, 2010 bp, Homo sapiens
  source 1..2010: mol_type = genomic DNA
atgaccaagtttcaggagatggtgacattcaaggatgtggctgtggtcttcaccagggaggagctggggttgctggaccttgcccagagaaagctgtaccaagatgtgatgctggagaacttcaggaacctgctgtcagtgggctatcaacccttcaaactagatgtgatattacagttgggaaaagaagacaagcttcggatgatggagacagaaatccaaggagatgggtgttcaggacacaagaatcaaaatgagatagatacccttcaagaagtaagattaagattcctttcatatgaagaccttatatgctggcaaatatgggaacaatttacaagtaaattaaccagtaatcaagacctaataataaatcttcaaggcaagaggtccaagttgctaaaacaaggtgattccccctgtcaggtgtggacaggagaatctagtcaggtctctgaagatgagaactatgtaataaagctacaaggggagagttcaaatagcataaaaaatcaagagcttccattgaggaccacctgggatttctggaggaaaatgtatctgagagaaccacagaattatcagagtaggtgtcagcaaattgatgtaaaaaataagctctgtaaatgtgatcattgtgttaggcaaagaattgctcatcaacatgatgatcatggagtacacaaaagagagaaagcttttagccacaataattgtggaaaagactgtgtgaaggaatcatcccagcatagcataatccaatcaggagagcaaacctctgatgaaaatggaaaaggcttaagtgttggctctaatcttgaacttcaccagcaactacacttaagagacaagcctcatgtaaatgttgagtacgggaagggcataggttacagctcagggcttcccaggcatcagtgtttccacataggagagaaatgctataggaatggtgacagtggtgagggcttcagtcagggctcacatctgcaacctcatcagagagtcagcacaggagagaacctctacagatgtcaggtatatgcccggagctccaaccagaactcctgtcttccctctcatgagcttactcacccaggagagaagttgtgtacatgtggcaggtgtgggaagggcttccatcatagcttagattttgacattcactgtgtagacagtgctggagagagagcctgtaaatgtgatgtatatgataaaggcttcagtcagacatcacaacttcaagcccatcagagaggtcactctagagacaagacatacaaatgggaagtaagtgacaggatatttaataggaattctggtcttcaccagagagttcacactggagagaaaccatataaatgtgaggtatgtgataagggcttcagtaaggcctcaaatcttcaagcccatcagagaatccacactggagagaaaccctacaaatgtgatgtgtgtgataagaacttcagccgtaattcccaccttcaggcccatcagagagtccatacaggagagaaaccctacaaatgtgacacatgtgggaaggacttcagtcagatctctcatcttcaggcccatcagagagttcacaaaggagagaagccatacaaatgtgagacatgtgggaagggctttagtcagagttcgcatctccaagaccatcagcaagtccatactggagagaatccctacaaatgtgatgtgtgtgggaaaggcttcagttggagttcacatcttcaagcccatcagagagtccacacaggagagaaaccatacaaatgtgaagaatgtaggaaaggcttcatctggaactcatatcttcatgttcatcagaggatccacacgggagagaaaccctataaatgtggcatgtgtggtaagagcttcagtcagacttcacatcttcaagcccatcagagagtccatactggagagaaaccatacaaatgttttgtgtgtggtaagggctttagtaagagttcgttgtcttcagattcatcagagagtcca

SEQ ID NO: 5611 - DNA, 1116 bp, Homo sapiens
  source 1..1116: mol_type = genomic DNA
atggcctccaacgaagatttctccatcacacaagacctggagatcccggcagatattgtggagctccacgacatcaatgtggagccccttcctatggaggacattccgacggaaagcgtccagtacgaggatgtggatggcaattggatctacggtggccacaaccatccgccattgatggtgttgcagccgctcttcacgaacacgggctatggcgaccacgaccaggaaatgcttatgttgcagacacaagaggaagtggtgggctattgcgactcagacaaccagctaggcaacgacttggaggaccagttggccctcccggatagcattgaagacgagcacttccagatgaccctggcctctctgtcggcctcggcggcatcaacatcaacatcaacccagagccgcagcaaaaagcccagcaaaaagcccagcggcaagagtgccaccagcactgaggccaacccggcaggcagcagctccagcctgggcacgaggaagtgggagcagaagcaaatgcaggtcaaaacgctggagggtgagttttccgtgactatgtggtcccctaacgataacaatgaccaaggggcagtgggtgaaggccaggctgaaaacccacctgattattccgagtacttgaaagggaagaaacttcctcctggggggttaccaggcattgatctctcagatcctaaacagctggcagaatttactaaagtgaagcccaaaaggtccaaaggagaacctcccaaaacagtcccttgctcttatagcggctgcgaaaagatgttccgggattacgccgccatgagaaaacatctccacatccacgggcccagagtccacgtatgtgcagaatgtggcaaagcttttcttgagagctcaaagctgagacgacaccagctggtccacaccggcgagaagccctttcagtgcacattcgaaggctgcgggaaacgcttttcccttgatttcaatttgcgcacacacttgcgcatccacaccggcgataagcccttcgtgtgccccttcgatgtttgcaacaggaagttcgctcagtcaaccaacctgaaaacccacatattaacgcatgtgaagaccaaaaacaacccg

SEQ ID NO: 5612 - DNA, 2136 bp, Homo sapiens
  source 1..2136: mol_type = genomic DNA
atgagagagccggcgctggcggccagcgccatggcttaccacccgttccacgcgccacggcccgccgacttccccatgtccgcctttctggcggcggcgcagccctccttcttcccggcactcgcgctgccgcccggcgcgctggccaagccgctgcccgacccgggcctggcgggggcggcggccgcggcggcggcggcggcagcagcggccgaggcggggctgcacgtctcggcactgggcccgcacccgcccgccgcgcatctgcgctccctcaagagcctggagcccgaggacgaggtggaggacgaccccaaggtgacgctggaggccaaggagctgtgggaccagttccacaagctaggcacggagatggtcatcaccaagtccgggaggcggatgttcccccccttcaaggtgcgagtcagcggcctggacaagaaggccaagtatatcctgctgatggacattgtagccgctgacgattgccgctataagttccacaactcgcgctggatggtggcgggcaaggccgaccctgagatgcccaaacgcatgtacatccacccagacagcccagccacgggggagcagtggatggctaagcctgtggccttccacaagctgaagctgaccaacaacatctctgacaagcacggcttcaccatcctaaactccatgcacaagtaccagccgcgcttccacatagtgcgagccaacgacatcctgaagctgccttacagcaccttccgcacctacgtgttcccggagaccgacttcatcgccgtcactgcctaccagaatgacaagatcacacagctgaagatcgacaacaacccgtttgccaagggcttccgggacaccgggaacggccggcgggagaaaaggaagcagctgacgctgccgtctctacgcttgtacgaggagcactgcaaacccgagcgcgatggcgcggagtcagacgcctcgtcgtgcgaccctccccccgcgcgggaaccacccacctccccgggcgcagcgcccagtccgctgcgcctgcaccgggcccgagctgaggagaagtcgtgcgccgcggacagcgacccggagcctgagcggttgagcgaggagcgtgcgggggcgccgctaggccgcagcccggctccagacagcgccagccccactcgcttgaccgaacccgagcgcgcccgggagcggcgtagtcccgagaggggcaaggagccggccgagagcggcggggacggcccgttcggcctgaggagcctggagaaggagcgcgccgaagctcggaggaaggacgaggggcgcaaggaggcggccgagggcaaggagcagggcctggcgccgctggtggtgcagacagacagtgcgtcccccctgggcgccggacacctgcccggcctggccttttccagccacttgcacgggcagcagttctttgggccgctgggagccggccagccgctcttcctgcaccctggacagttcaccatgggccctggcgccttctccgccatgggcatgggtcacctactggcctcggtggcaggcggcggcaacggcggaggtggcgggcctgggaccgccgcggggctggacgcaggcgggctgggtcccgcggccagcgcagcaagcaccgccgcgcccttcccgttccacctctcccagcacatgctggcatctcagggaattccaatgcccactttcggaggcctcttcccctacccctacacctacatggcagcagcagccgcagccgcctcggctttgcccgccactagtgctgcagctgccgccgccgcagccgccggctccctctcccggagccccttcctgggcagtgcccggccccgactgcgtttcagcccctatcagatcccggtcaccatcccgcctagcactagcctcctcaccaccgggctggcctctgagggctccaaggccgctggtggaaacagccgggagcctagccccctgcccgagctggctctccgcaaagtaggggccccatcccgcggtgccctgtcgcccagtggctcggccaaggaggcggccaatgaactgcagagcatccagagactggtgagtgggctggagagccagcgagccctctccccaggccgggagtcgcccaag

SEQ ID NO: 5613 - DNA, 2229 bp, Homo sapiens
  source 1..2229: mol_type = genomic DNA
atgagcctctccatgagagatccggtcattcctgggacaagcatggcctaccatccgttcctacctcaccgggcgccggacttcgccatgagcgcggtgctgggtcaccagccgccgttcttccccgcgctgacgctgcctcccaacggcgcggcggcgctctcgctgccgggcgccctggccaagccgatcatggatcaattggtgggggcggccgagaccggcatcccgttctcctccctggggccccaggcgcatctgaggcctttgaagaccatggagcccgaagaagaggtggaggacgaccccaaggtgcacctggaggctaaagaactttgggatcagtttcacaagcggggcaccgagatggtcattaccaagtcgggaaggcgaatgtttcctccatttaaagtgagatgttctgggctggataaaaaagccaaatacattttattgatggacattatagctgctgatgactgtcgttataaatttcacaattctcggtggatggtggctggtaaggccgaccccgaaatgccaaagaggatgtacattcacccggacagccccgctactggggaacagtggatgtccaaagtcgtcactttccacaaactgaaactcaccaacaacatttcagacaaacatggatttactttggccttcccaagtgatcacgctacgtggcaggggaattatagttttggtactcagactatattgaactccatgcacaaataccagccccggttccacattgtaagagccaatgacatcttgaaactcccttatagtacatttcggacatacttgttccccgaaactgaattcatcgctgtgactgcataccagaatgataagataacccagttaaaaatagacaacaacccttttgcaaaaggtttccgggacactggaaatggccgaagagaaaaaagaaaacagctcaccctgcagtccatgagggtgtttgatgaaagacacaaaaaggagaatgggacctctgatgagtcctccagtgaacaagcagctttcaactgcttcgcccaggcttcttctccagccgcctccactgtagggacatcgaacctcaaagatttatgtcccagcgagggtgagagcgacgccgaggccgagagcaaagaggagcatggccccgaggcctgcgacgcggccaagatctccaccaccacgtcggaggagccctgccgtgacaagggcagccccgcggtcaaggctcaccttttcgctgctgagcggccccgggacagcgggcggctggacaaagcgtcgcccgactcacgccatagccccgccaccatctcgtccagcactcgcggcctgggcgcggaggagcgcaggagcccggttcgcgagggcacagcgccggccaaggtggaagaggcgcgcgcgctcccgggcaaggaggccttcgcgccgctcacggtgcagacggacgcggccgccgcgcacctggcccagggccccctgcctggcctcggcttcgccccgggcctggcgggccaacagttcttcaacgggcacccgctcttcctgcaccccagccagtttgccatggggggcgccttctccagcatggcggccgctggcatgggtcccctcctggccacggtttctggggcctccaccggtgtctcgggcctggattccacggccatggcctctgccgctgcggcgcagggactgtccggggcgtccgcggccaccctgcccttccacctccagcagcacgtcctggcctctcagggcctggccatgtcccctttcggaagcctgttcccttacccctacacgtacatggccgcagcggcggccgcctcctctgcggcagcctccagctcggtgcaccgccaccccttcctcaatctgaacaccatgcgcccgcggctgcgctacagcccctactccatcccggtgccggtcccggacggcagcagtctgctcaccaccgccctgccctccatggcggcggccgcggggcccctggacggcaaagtcgccgccctggccgccagcccggcctcggtggcagtggactcgggctctgaactcaacagccgctcctccacgctctcctccagctccatgtccttgtcgcccaaactctgcgcggagaaagaggcggccaccagcgaactgcagagcatccagcggttggttagcggcttggaagccaagccggacaggtcccgcagcgcgtccccg

SEQ ID NO: 5614 - DNA, 2169 bp, Homo sapiens
  source 1..2169: mol_type = genomic DNA
atgagcctctccatgagagatccggtcattcctgggacaagcatggcctaccatccgttcctacctcaccgggcgccggacttcgccatgagcgcggtgctgggtcaccagccgccgttcttccccgcgctgacgctgcctcccaacggcgcggcggcgctctcgctgccgggcgccctggccaagccgatcatggatcaattggtgggggcggccgagaccggcatcccgttctcctccctggggccccaggcgcatctgaggcctttgaagaccatggagcccgaagaagaggtggaggacgaccccaaggtgcacctggaggctaaagaactttgggatcagtttcacaagcggggcaccgagatggtcattaccaagtcgggaaggcgaatgtttcctccatttaaagtgagatgttctgggctggataaaaaagccaaatacattttattgatggacattatagctgctgatgactgtcgttataaatttcacaattctcggtggatggtggctggtaaggccgaccccgaaatgccaaagaggatgtacattcacccggacagccccgctactggggaacagtggatgtccaaagtcgtcactttccacaaactgaaactcaccaacaacatttcagacaaacatggatttactatattgaactccatgcacaaataccagccccggttccacattgtaagagccaatgacatcttgaaactcccttatagtacatttcggacatacttgttccccgaaactgaattcatcgctgtgactgcataccagaatgataagataacccagttaaaaatagacaacaacccttttgcaaaaggtttccgggacactggaaatggccgaagagaaaaaagaaaacagctcaccctgcagtccatgagggtgtttgatgaaagacacaaaaaggagaatgggacctctgatgagtcctccagtgaacaagcagctttcaactgcttcgcccaggcttcttctccagccgcctccactgtagggacatcgaacctcaaagatttatgtcccagcgagggtgagagcgacgccgaggccgagagcaaagaggagcatggccccgaggcctgcgacgcggccaagatctccaccaccacgtcggaggagccctgccgtgacaagggcagccccgcggtcaaggctcaccttttcgctgctgagcggccccgggacagcgggcggctggacaaagcgtcgcccgactcacgccatagccccgccaccatctcgtccagcactcgcggcctgggcgcggaggagcgcaggagcccggttcgcgagggcacagcgccggccaaggtggaagaggcgcgcgcgctcccgggcaaggaggccttcgcgccgctcacggtgcagacggacgcggccgccgcgcacctggcccagggccccctgcctggcctcggcttcgccccgggcctggcgggccaacagttcttcaacgggcacccgctcttcctgcaccccagccagtttgccatggggggcgccttctccagcatggcggccgctggcatgggtcccctcctggccacggtttctggggcctccaccggtgtctcgggcctggattccacggccatggcctctgccgctgcggcgcagggactgtccggggcgtccgcggccaccctgcccttccacctccagcagcacgtcctggcctctcagggcctggccatgtcccctttcggaagcctgttcccttacccctacacgtacatggccgcagcggcggccgcctcctctgcggcagcctccagctcggtgcaccgccaccccttcctcaatctgaacaccatgcgcccgcggctgcgctacagcccctactccatcccggtgccggtcccggacggcagcagtctgctcaccaccgccctgccctccatggcggcggccgcggggcccctggacggcaaagtcgccgccctggccgccagcccggcctcggtggcagtggactcgggctctgaactcaacagccgctcctccacgctctcctccagctccatgtccttgtcgcccaaactctgcgcggagaaagaggcggccaccagcgaactgcagagcatccagcggttggttagcggcttggaagccaagccggacaggtcccgcagcgcgtccccg

SEQ ID NO: 5615 - DNA, 1680 bp, Homo sapiens
  source 1..1680: mol_type = genomic DNA
atgcttctgctcctcagtgaccagctcctgctcactgccctcagaaagcccaaccctcaggcaatggcggccttgttcctgtctgccccaccccaggccgaggtgaccttcgaggacgtggctgtgtacctctcccgggaggaatggggccgcctgggccctgctcagaggggcctctacagggacgtgatgctggagacctacgggaacctagtctcactgggagtaggacctgcaggccccaagcctggagtgatctcgcagttggagcgaggggatgagccctgggtcctggatgttcagggcacctctgggaaagagcacctgagagtcaacagcccagctcttgggaccagaactgagtacaaggagttgacttcacaggagacatttggtgaggaagatccccagggatctgagccagtagaagcctgtgaccacatcagtaagtcagaggggagcctggaaaagctagtggagcagagaggccccagggcagtcacactgaccaacggggagagcagcagggagtctgggggaaacctcaggttgctgtcaagacctgttcctgatcagagacctcacaaatgtgatatatgtgagcaaagttttgaacagagatcatatctcaacaaccataagcgtgtacacaggtcaaaaaaaacaaatacagttcgtaactctggggaaatcttcagtgcaaacttagttgttaaagaagatcagaaaattcctactgggaaaaaattgcattattgcagttactgtgggaaaacattcaggtacagtgccaaccttgtcaagcatcagcggcttcacactgaagagaagccctacaaatgtgatgagtgtgggaaagccttcagccagagctgcgagttcatcaatcaccgaaggatgcactcaggagagattccctaccggtgtgacgagtgtgggaagacattcacccggaggcccaacctcatgaagcaccagaggattcacactggggagaaaccctacaagtgtggggagtgtgggaagcactttagcgcctactcttccctgatttatcaccagagaatccacaccggagagaaaccctataaatgtaatgactgcgggaaagccttcagtgatggctcaatccttatccgacatcgtcggactcacaccggagagaagccatttgagtgcaaggaatgtggcaaaggctttacacaaagttctaaccttatccaacatcagagaattcacactggagagaaaccctataaatgtaatgaatgtgagaaagctttcattcaaaaaaccaaactcgtggaacatcagagaagccacactggagagaagccctatgaatgcaatgactgtggcaaagttttcagccaaagcacacacctcatccagcaccagagaatccacacaggagagaagccctacaagtgcagcgagtgtgggaaggccttccacaacagttccagactcatccaccaccagaggctgcaccacggagagaaaccctacagatgcagcgattgcaagaaagccttcagccagagcacgtacttgattcagcaccggaggatccacaccggggagaagccctacaagtgcagcgagtgtgggaaggccttccggcacagttccaacatgtgtcagcatcagcggattcacctccgggaggacttctccatg

SEQ ID NO: 5616 - DNA, 1485 bp, Homo sapiens
  source 1..1485: mol_type = genomic DNA
atgcacttcagcaccgtcaccagggacatggaagccttcacggccagcagcctgagcagcctgggggccgcggggggcttcccgggcgccgcgtcgcccggcgccgacccgtacggcccgcgcgagcccccgccgccgccgccgcgctacgacccgtgcgccgccgccgcccccggcgccccgggcccgccgccgccgccgcacgcctacccgtttgcgccggccgccggggccgccaccagcgccgccgccgagcccgagggccccggggccagctgcgcggccgcagccaaggcgccggtgaagaagaacgcgaaggtggccggtgtgagcgtgcagctagagatgaaggcgctgtgggacgagttcaaccagctgggcaccgagatgatcgtcaccaaggccggcaggcggatgtttcccaccttccaagtgaagctcttcggcatggatcccatggccgactatatgctgctcatggacttcgtgccggtggacgataagcgctaccggtacgccttccacagctcctcctggctggtggcggggaaggccgaccctgccacgccaggccgcgtgcactaccacccggactcgcctgccaagggcgcgcagtggatgaagcaaatcgtgtccttcgacaagctcaagctgaccaacaacctactggacgacaacggccacattattctgaattccatgcacagataccagccccgcttccacgtggtctatgtggacccacgcaaagatagcgagaaatatgccgaggagaacttcaaaacctttgtgttcgaggagacacgattcaccgcggtcactgcctaccagaaccatcggatcacgcagctcaagattgccagcaatcccttcgcgaaaggcttccgggactgtgaccctgaggactggccccggaaccaccggcccggcgcactgccgctcatgagcgccttcgcgcgctcgcggaaccccgtggcttccccgacgcagcccagcggcacggagaaagacgcggctgaggcccggcgagaattccagcgcgacgcgggcgggccagcagtgctcggggacccggcgcatcctccgcagctgctggcccgggtgctaagcccctcgctgcccggggccggcggcgccggcggcttagtcccgctgcccggcgcgcccggaggccggcccagtcccccgaaccccgagctgcgcctggaggcgcccggcgcatcggagccgctgcaccaccacccctacaaatatccggccgccgcctacgaccactatctcggggccaagagccggccggcgccctacccgctgcccggcctgcgtggccacggctaccacccgcacgcgcatccgcaccaccaccaccaccccgtgagtccagccgccgcggccgccgccgccgctgccgcagctgccgcggccgccaacatgtactcgtcggccggagccgcgccgcccggctcctacgactattgccccaga

SEQ ID NO: 5617 - DNA, 1116 bp, Homo sapiens
  source 1..1116: mol_type = genomic DNA
atgcacttcagcaccgtcaccagggacatggaagccttcacggccagcagcctgagcagcctgggggccgcggggggcttcccgggcgccgcgtcgcccggcgccgacccgtacggcccgcgcgagcccccgccgccgccgccgcgctacgacccgtgcgccgccgccgcccccggcgccccgggcccgccgccgccgccgcacgcctacccgtttgcgccggccgccggggccgccaccagcgccgccgccgagcccgagggccccggggccagctgcgcggccgcagccaaggcgccggtgaagaagaacgcgaaggtggccggtgtgagcgtgcagctagagatgaaggcgctgtgggacgagttcaaccagctgggcaccgagatgatcgtcaccaaggccggcaggcggatgtttcccaccttccaagtgaagctcttcggcatggatcccatggccgactatatgctgctcatggacttcgtgccggtggacgataagcgctaccggtacgccttccacagctcctcctggctggtggcggggaaggccgaccctgccacgccaggccgcgtgcactaccacccggactcgcctgccaagggcgcgcagtggatgaagcaaatcgtgtccttcgacaagctcaagctgaccaacaacctactggacgacaacggccacattattctgaattccatgcacagataccagccccgcttccacgtggtctatgtggacccacgcaaagatagcgagaaatatgccgaggagaacttcaaaacctttgtgttcgaggagacacgattcaccgcggtcactgcctaccagaaccatcggatcacgcagctcaagattgccagcaatcccttcgcgaaaggcttccgggactgtgaccctgaggactggccccggaaccaccggcccggcgcactgccgctcatgagcgccttcgcgcgctcgcggaaccccgtggcttccccgacgcagcccagcggcacggagaaagggctggtcacagaaggctctgggctccaacctggcttgctggacgtgctcttgaagcccccaagtaagaagtctgagtccctgagaccaccacactgcaaggacact

SEQ ID NO: 5618 - DNA, 1194 bp, Homo sapiens
  source 1..1194: mol_type = genomic DNA
atgcacttcagcaccgtcaccagggacatggaagccttcacggccagcagcctgagcagcctgggggccgcggggggcttcccgggcgccgcgtcgcccggcgccgacccgtacggcccgcgcgagcccccgccgccgccgccgcgctacgacccgtgcgccgccgccgcccccggcgccccgggcccgccgccgccgccgcacgcctacccgtttgcgccggccgccggggccgccaccagcgccgccgccgagcccgagggccccggggccagctgcgcggccgcagccaaggcgccggtgaagaagaacgcgaaggtggccggtgtgagcgtgcagctagagatgaaggcgctgtgggacgagttcaaccagctgggcaccgagatgatcgtcaccaaggccggcaggcggatgtttcccaccttccaagtgaagctcttcggcatggatcccatggccgactatatgctgctcatggacttcgtgccggtggacgataagcgctaccggtacgccttccacagctcctcctggctggtggcggggaaggccgaccctgccacgccaggccgcgtgcactaccacccggactcgcctgccaagggcgcgcagtggatgaagcaaatcgtgtccttcgacaagctcaagctgaccaacaacctactggacgacaacggccacattattctgaattccatgcacagataccagccccgcttccacgtggtctatgtggacccacgcaaagatagcgagaaatatgccgaggagaacttcaaaacctttgtgttcgaggagacacgattcaccgcggtcactgcctaccagaaccatcggatcacgcagctcaagattgccagcaatcccttcgcgaaaggcttccgggactgtgaccctgaggactggccccggaaccaccggcccggcgcactgccgctcatgagcgccttcgcgcgctcgcggaaccccgtggcttccccgacgcagcccagcggcacggagaaaggtggacatgtcctgaaggacaaggaagtgaaagctgagacgtctaggaacacaccagagagagaagtggagcttctgagggatgcaggtggctgtgtgaacctggggctcccctgccccgcagagtgccaacccttcaatacccagggcctggtggctgggaggaccgcaggtgaccgtctttgt

SEQ ID NO: 5619 - DNA, 1308 bp, Homo sapiens
  source 1..1308: mol_type = genomic DNA
atgtaccatccacgagaattgtacccgtccctgggggccggctaccgcctggggcccgcccaacctggggccgactccagcttcccacccgccctagcggagggctaccgctaccccgaactggacacccctaaactggattgcttcctctccgggatggaggctgctccccgcaccctggccgcgcacccacctctgccccttctgccccctgccatgggcactgagccggccccatcagctccagaggccctccattccctcccgggggtcagcctgagcctggagaaccgggagctatggaaggagttcagctctgtgggaacagaaatgatcatcaccaaagctgggaggcgcatgttccctgcctgccgagtgtcagtcactggcctggaccccgaggcccgctacttgtttcttctggatgtgattccggtggatggggctcgctaccgctggcagggccggcgctgggagcccagcggcaaggcagagccccgcctgcctgaccgtgtctacattcaccccgactctcctgccactggtgcacattggatgcggcagcctgtgtctttccatcgtgtcaagctcaccaacagcacgctggacccccacggccacctgatcctgcactccatgcacaagtaccaaccccgcatacacctagttcgggcagcccagctctgcagccagcactgggggggcatggcctccttccgcttccccgagaccacattcatctccgtgacagcctaccagaacccacagatcacacaactgaagattgcagccaatccctttgccaaaggcttccgggagaacggcagaaactgtaagagggagcgagacgcccgtgtgaagaggaaactgcggggcccagagccagcagccacagaggcctatgggagcggagacacaccaggtggtccctgcgactccaccctgggtggagacattcgtgaatcagatccagaacaggccccagcccccggggaagccaccgctgccccggcacctctgtgtggtggccccagtgctgaggcctacctcctgcaccctgcggctttccatggggcccccagtcaccttcccaccaggagccccagcttcccggaggctccagactccgggcgctcagccccctactcggctgcatttctggagctgccgcacgggtcagggggctccgggtacccagcggctccaccggcggtaccctttgccccgcactttctccaagggggccccttccctctaccatacaccgcgcctgggggctatctggatgtgggctccaaacccatgtac

SEQ ID NO: 5620 - DNA, 1638 bp, Homo sapiens
  source 1..1638: mol_type = genomic DNA
atgctgcaggataagggcctgtccgagagcgaggaggccttccgggccccgggcccagcgctcggagaggccagcgcagccaacgcccccgagcccgcgctggcagcgccgggcctcagcggagccgcgctaggcagccccccgggacccggggccgacgtcgtcgccgccgccgccgcggagcagaccatcgagaacatcaaggtggggctgcatgagaaggagctctggaagaagttccacgaggcgggcaccgagatgatcatcactaaggctggcaggaggatgttccccagctacaaggtaaaagtcacaggcatgaaccccaagaccaagtatatcctgctgattgacattgtccctgccgatgaccatcgctacaagttctgtgacaacaaatggatggtggcagggaaggctgagccagccatgccaggaaggctgtatgtccacccggattctcctgccacaggagcccactggatgcggcagctggtctccttccagaagctgaagctgacaaacaaccacctggacccctttggccatatcatcctcaactctatgcacaagtaccagccgcggctccacatcgttaaggctgatgagaacaatgctttcggctccaaaaacactgctttctgcacccacgtgttcccagagacctccttcatctctgtgacctcctaccagaatcacaagatcacccagctgaaaattgagaacaacccttttgccaagggattccggggcagtgatgacagtgacctgcgtgtggcccgactgcagagcaaagaataccccgtgatttccaaaagcatcatgaggcagaggctcatctccccccagctctcagccacaccggacgtgggccccctgctcggcacccaccaggcactccagcactaccagcacgagaacggggcacactcacagctcgcggagccgcaggacctgcccctcagcacctttcccacccagagggactcaagcctcttctatcactgcctgaaaagacgagcagacggtacccgccacctggacttaccttgcaagcgatcctatctggaagccccctcttcggtgggggaggatcactatttccgttccccccctccctacgaccagcaaatgctgagcccctcctactgcagtgaggtgacccccagagaagcatgtatgtactcaggttcagggcccgagattgccggggtgtctggggtggacgacctgcccccacctccgctgagctgtaacatgtggacttcagtgtcgccgtacaccagctatagcgtgcagacgatggagactgtgccgtaccagcccttccccacgcacttcaccgccaccaccatgatgccgcggctgcccaccctctccgctcagagctcccagccaccaggaaatgcccactttagtgtctacaatcagctctcccagtctcaggtccgagagcgggggcccagcgcctcattcccaagagagcgcggcctcccccaagggtgtgagaggaagccaccctcgccacatctaaatgctgccaatgagtttctctactctcaaaccttctccttgtcccgagaatcttccttacagtaccattcaggaatggggactgtggagaactggactgacgga

SEQ ID NO: 5621 - DNA, 1635 bp, Homo sapiens
  source 1..1635: mol_type = genomic DNA
atgctgcaggataagggcctgtccgagagcgaggaggccttccgggccccgggcccagcgctcggagaggccagcgcagccaacgcccccgagcccgcgctggcagcgccgggcctcagcggagccgcgctaggcagccccccgggacccggggccgacgtcgtcgccgccgccgccgcggagcagaccatcgagaacatcaaggtggggctgcatgagaaggagctctggaagaagttccacgaggcgggcaccgagatgatcatcactaaggctggcaggaggatgttccccagctacaaggtaaaagtcacaggcatgaaccccaagaccaagtatatcctgctgattgacattgtccctgccgatgaccatcgctacaagttctgtgacaacaaatggatggtggcagggaaggctgagccagccatgccaggaaggctgtatgtccacccggattctcctgccacaggagcccactggatgcggcagctggtctccttccagaagctgaagctgacaaacaaccacctggacccctttggccatatcatcctcaactctatgcacaagtaccagccgcggctccacatcgttaaggctgatgagaacaatgctttcggctccaaaaacactgctttctgcacccacgtgttcccagagacctccttcatctctgtgacctcctaccagaatcacaagatcacccagctgaaaattgagaacaacccttttgccaagggattccggggcagtgatgacagtgacctgcgtgtggcccgactgcagagcaaagaataccccgtgatttccaaaagcatcatgaggcagaggctcatctccccccagctctcagccacaccggacgtgggccccctgctcggcacccaccaggcactccagcactaccagcacgagaacggggcacactcacagctcgcggagccgcaggacctgcccctcagcacctttcccacccagagggactcaagcctcttctatcactgcctgaaaagacgagacggtacccgccacctggacttaccttgcaagcgatcctatctggaagccccctcttcggtgggggaggatcactatttccgttccccccctccctacgaccagcaaatgctgagcccctcctactgcagtgaggtgacccccagagaagcatgtatgtactcaggttcagggcccgagattgccggggtgtctggggtggacgacctgcccccacctccgctgagctgtaacatgtggacttcagtgtcgccgtacaccagctatagcgtgcagacgatggagactgtgccgtaccagcccttccccacgcacttcaccgccaccaccatgatgccgcggctgcccaccctctccgctcagagctcccagccaccaggaaatgcccactttagtgtctacaatcagctctcccagtctcaggtccgagagcgggggcccagcgcctcattcccaagagagcgcggcctcccccaagggtgtgagaggaagccaccctcgccacatctaaatgctgccaatgagtttctctactctcaaaccttctccttgtcccgagaatcttccttacagtaccattcaggaatggggactgtggagaactggactgacgga

SEQ ID NO: 5622 - DNA, 1404 bp, Homo sapiens
  source 1..1404: mol_type = genomic DNA
atggagggaatcaaagtgtttctccatgaaagagaactgtggctaaaattccacgaagtgggcacggaaatgatcataaccaaggctggaaggcggatgtttcccagttacaaagtgaaggtgacgggccttaatcccaaaacgaagtacattcttctcatggacattgtacctgccgacgatcacagatacaaattcgcagataataaatggtctgtgacgggcaaagctgagcccgccatgcctggccgcctgtacgtgcacccagactcccccgccaccggggcgcattggatgaggcagctcgtctccttccagaaactcaagctcaccaacaaccacctggacccatttgggcatattattctaaattccatgcacaaataccagcctagattacacatcgtgaaagcggatgaaaataatggatttggctcaaaaaatacagcgttctgcactcacgtctttcctgagactgcgtttatagcagtgacttcctaccagaaccacaagatcacgcaattaaagattgagaataatccctttgccaaaggatttcggggcagtgatgacatggagctgcacagaatgtcaagaatgcaaagtaaagaatatcccgtggtccccaggagcaccgtgaggcaaaaagtggcctccaaccacagtcctttcagcagcgagtctcgagctctctccacctcatccaatttggggtcccaataccagtgtgagaatggtgtttccggcccctcccaggacctcctgcctccacccaacccatacccactgccccaggagcatagccaaatttaccattgtaccaagaggaaagaggaagaatgttccaccacagaccatccctataagaagccctacatggagacatcacccagtgaagaagattccttctaccgctctagctatccacagcagcagggcctgggtgcctcctacaggacagagtcggcacagcggcaagcttgcatgtatgccagctctgcgccccccagcgagcctgtgcccagcctagaggacatcagctgcaacacgtggccaagcatgccttcctacagcagctgcaccgtcaccaccgtgcagcccatggacaggctaccctaccagcacttctccgctcacttcacctcggggcccctggtccctcggctggctggcatggccaaccatggctccccacagctgggagagggaatgttccagcaccagacctccgtggcccaccagcctgtggtcaggcagtgtgggcctcagactggcctgcagtcccctggcacccttcagccccctgagttcctctactctcatggcgtgccaaggactctatcccctcatcagtaccactctgtgcacggagttggcatggtgccagagtggagcgacaatagc

SEQ ID NO: 5623 - DNA, 1554 bp, Homo sapiens
  source 1..1554: mol_type = genomic DNA
atggccgacgcagacgagggctttggcctggcgcacacgcctctggagcctgacgcaaaagacctgccctgcgattcgaaacccgagagcgcgctcggggcccccagcaagtccccgtcgtccccgcaggccgccttcacccagcagggcatggagggaatcaaagtgtttctccatgaaagagaactgtggctaaaattccacgaagtgggcacggaaatgatcataaccaaggctggaaggcggatgtttcccagttacaaagtgaaggtgacgggccttaatcccaaaacgaagtacattcttctcatggacattgtacctgccgacgatcacagatacaaattcgcagataataaatggtctgtgacgggcaaagctgagcccgccatgcctggccgcctgtacgtgcacccagactcccccgccaccggggcgcattggatgaggcagctcgtctccttccagaaactcaagctcaccaacaaccacctggacccatttgggcatattattctaaattccatgcacaaataccagcctagattacacatcgtgaaagcggatgaaaataatggatttggctcaaaaaatacagcgttctgcactcacgtctttcctgagactgcgtttatagcagtgacttcctaccagaaccacaagatcacgcaattaaagattgagaataatccctttgccaaaggatttcggggcagtgatgacatggagctgcacagaatgtcaagaatgcaaagtaaagaatatcccgtggtccccaggagcaccgtgaggcaaaaagtggcctccaaccacagtcctttcagcagcgagtctcgagctctctccacctcatccaatttggggtcccaataccagtgtgagaatggtgtttccggcccctcccaggacctcctgcctccacccaacccatacccactgccccaggagcatagccaaatttaccattgtaccaagaggaaagaggaagaatgttccaccacagaccatccctataagaagccctacatggagacatcacccagtgaagaagattccttctaccgctctagctatccacagcagcagggcctgggtgcctcctacaggacagagtcggcacagcggcaagcttgcatgtatgccagctctgcgccccccagcgagcctgtgcccagcctagaggacatcagctgcaacacgtggccaagcatgccttcctacagcagctgcaccgtcaccaccgtgcagcccatggacaggctaccctaccagcacttctccgctcacttcacctcggggcccctggtccctcggctggctggcatggccaaccatggctccccacagctgggagagggaatgttccagcaccagacctccgtggcccaccagcctgtggtcaggcagtgtgggcctcagactggcctgcagtcccctggcacccttcagccccctgagttcctctactctcatggcgtgccaaggactctatcccctcatcagtaccactctgtgcacggagttggcatggtgccagagtggagcgacaatagc

SEQ ID NO: 5624 - DNA, 450 bp, Homo sapiens
  source 1..450: mol_type = genomic DNA
atggcccttactcaggggcaattgtcattcagcgatgtggccatagaattctctcaggaggagtggaaatgcctggaccctgggcagaaagctttatacagggacgtgatgttagagaactacaggaacctggtctccctagatttttcacttctggcctgggacgcgcgcgtcttcagggtggaagcctggcgcgcgtccggaggtgctgaggagccaaccggcccaaactttgtgggaaatgactcccctctgccctcgcccctcgctctgctaccatttccttccgtttctgcttcgcttggcgatgcaaaacgcgcgaggctcacggcagagggccgaggccacgggactctcagggccgggcccgcccctcggccgcgcagtgcggcgccgcacgccccggacgctgtccagcgttggccgcctgagcagaggctgccgcggagc

SEQ ID NO: 5625 - DNA, 579 bp, Homo sapiens
  source 1..579: mol_type = genomic DNA
atggcccttactcaggggcaattgtcattcagcgatgtggccatagaattctctcaggaggagtggaaatgcctggaccctgggcagaaagctttatacagggacgtgatgttagagaactacaggaacctggtctccctaggaatctgtcttcctgacctgagtgttacctccatgttggagcaaaagagagatccctggactctgcagagtgaagtgaaaataataaacaatccagatggcagggagtgcatcaaaggtgtgaacacagatttttcacttctggcctgggacgcgcgcgtcttcagggtggaagcctggcgcgcgtccggaggtgctgaggagccaaccggcccaaactttgtgggaaatgactcccctctgccctcgcccctcgctctgctaccatttccttccgtttctgcttcgcttggcgatgcaaaacgcgcgaggctcacggcagagggccgaggccacgggactctcagggccgggcccgcccctcggccgcgcagtgcggcgccgcacgccccggacgctgtccagcgttggccgcctgagcagaggctgccgcggagc

SEQ ID NO: 5626 - DNA, 1983 bp, Homo sapiens
  source 1..1983: mol_type = genomic DNA
atggcccttactcaggggcaattgtcattcagcgatgtggccatagaattctctcaggaggagtggaaatgcctggaccctgggcagaaagctttatacagggacgtgatgttagagaactacaggaacctggtctccctaggaatctgtcttcctgacctgagtgttacctccatgttggagcaaaagagagatccctggactctgcagagtgaagtgaaaataataaacaatccagatggcagggagtgcatcaaaggtgtgaacacagagaagagttctaaattgggaagcagtgcaggaaacaagtcacttaaaaatcaacatggattaactcttcagttacatctgactgaatggcagccatttcaagctgtaaggaatatttatggatgtaagcatgttgagaaatctatcagtgacaattcttcagtttcaccagttcaaataagttttttcagtgtcaaaacccatatttttaataactacagaaatgattttcttttttctacattactcccacaagaacagaaagtacacattagggaaaagccttatggatgtaatgagcatgggaaagtcttcagagtgtcttcaagccttactaaccgtcaagtaatccacattgcagataaaacttacaaatgtagtgactgtggcgagatctttagtagcaattcaaactttgcacaacatcaacgaatccatactggagagaagccttacaaatataatgaatgtggcaaagtcttcaatcagaattcacaccttgcacaacatcagaaaattcatactggacagaaaccttacaataacaaagaatgtgggaaagtctttagtcaccatgcctaccttgcacagcataggaaaattcatactggagagaagccttacaaatgtagtgaatgtggcaaagcatttagtgtgtgttccagtcttactgctcatcttgtaatccatactggagagaaaccttatgattgtaaggaatgtggcaaggtcttcaggcataagtcttccctaaccactcatcagacagttcatactggagagagaccatacaaatgtaatgaatgtggcaaggggtttagtcgaattgcattccttgcaaggcatcggaaagttcatactggagagaaaccttacaaatgtaatgagtgtggcaaggtctttattggcaattcacgccttgcacgacataggaaaattcatactggggggaggcgttacaaatgtaatgaatgtggcaaagcatttagaacgtgttcagatctcactgcccatcttctaatccatactggagagaaaccttacgaatgtatagactgtggcaaggtcttcaggcacaagtcttccctaacctatcactgtagaattcatactggagagaagccttacaaatgtaacgaatgtggcaaggtcttcagtcagaattcaaaccttcaacgacataggaaaattcatactggagagaagctttacaaatgtaatgaatgtggcaaggtcttccgtcagaattcacaccttgcacaacatagggatattcatactggagagaagccttacagttgtaatgaatgtggcaaggtcttccgtcggaattcacaccttgtgcgacataggaatgttcatactggagaaaagccttacagttgtaatgaatgtggcaaggtcttcagtcggaattcacaccttgcgcgacataggaatattcatactggagagaagcctcacagttgtaatgaatgtggcaaggtcttcagtcggaattcacaccttgcgcgacataggaaaattcatactggagagaagctttacaaatgtaatgaatgtagcaaggtcttcagtcggaattcacgccttgcacaacataggaatattcatactggagtgaagccttacagttgtaatgaatgtggcaaggtctttagtaaaaattccatcctagtacaacattgcagtattcataccagagagaagcct

SEQ ID NO: 5627 - DNA, 2022 bp, Homo sapiens
  source 1..2022: mol_type = genomic DNA
atggcccttactcaggggcaattgtcattcagcgatgtggccatagaattctctcaggaggagtggaaatgcctggaccctgggcagaaagctttatacagggacgtgatgttagagaactacaggaacctggtctccctaggtgaggataatgtccgtccagaagcctgcatctgctctggaatctgtcttcctgacctgagtgttacctccatgttggagcaaaagagagatccctggactctgcagagtgaagtgaaaataataaacaatccagatggcagggagtgcatcaaaggtgtgaacacagagaagagttctaaattgggaagcagtgcaggaaacaagtcacttaaaaatcaacatggattaactcttcagttacatctgactgaatggcagccatttcaagctgtaaggaatatttatggatgtaagcatgttgagaaatctatcagtgacaattcttcagtttcaccagttcaaataagttttttcagtgtcaaaacccatatttttaataactacagaaatgattttcttttttctacattactcccacaagaacagaaagtacacattagggaaaagccttatggatgtaatgagcatgggaaagtcttcagagtgtcttcaagccttactaaccgtcaagtaatccacattgcagataaaacttacaaatgtagtgactgtggcgagatctttagtagcaattcaaactttgcacaacatcaacgaatccatactggagagaagccttacaaatataatgaatgtggcaaagtcttcaatcagaattcacaccttgcacaacatcagaaaattcatactggacagaaaccttacaataacaaagaatgtgggaaagtctttagtcaccatgcctaccttgcacagcataggaaaattcatactggagagaagccttacaaatgtagtgaatgtggcaaagcatttagtgtgtgttccagtcttactgctcatcttgtaatccatactggagagaaaccttatgattgtaaggaatgtggcaaggtcttcaggcataagtcttccctaaccactcatcagacagttcatactggagagagaccatacaaatgtaatgaatgtggcaaggggtttagtcgaattgcattccttgcaaggcatcggaaagttcatactggagagaaaccttacaaatgtaatgagtgtggcaaggtctttattggcaattcacgccttgcacgacataggaaaattcatactggggggaggcgttacaaatgtaatgaatgtggcaaagcatttagaacgtgttcagatctcactgcccatcttctaatccatactggagagaaaccttacgaatgtatagactgtggcaaggtcttcaggcacaagtcttccctaacctatcactgtagaattcatactggagagaagccttacaaatgtaacgaatgtggcaaggtcttcagtcagaattcaaaccttcaacgacataggaaaattcatactggagagaagctttacaaatgtaatgaatgtggcaaggtcttccgtcagaattcacaccttgcacaacatagggatattcatactggagagaagccttacagttgtaatgaatgtggcaaggtcttccgtcggaattcacaccttgtgcgacataggaatgttcatactggagaaaagccttacagttgtaatgaatgtggcaaggtcttcagtcggaattcacaccttgcgcgacataggaatattcatactggagagaagcctcacagttgtaatgaatgtggcaaggtcttcagtcggaattcacaccttgcgcgacataggaaaattcatactggagagaagctttacaaatgtaatgaatgtagcaaggtcttcagtcggaattcacgccttgcacaacataggaatattcatactggagtgaagccttacagttgtaatgaatgtggcaaggtctttagtaaaaattccatcctagtacaacattgcagtattcataccagagagaagcct

SEQ ID NO: 5628 - DNA, 3900 bp, Homo sapiens
  source 1..3900: mol_type = genomic DNA
atggaagaagcgagcctgtgccttggagtgtcttcggcggagccggaagctgagccccacctgagtggccccgtcctcaacggccagtatgccatgagtcagaagctgcaccagatcacctcccagctcagccatgccttccccgagctccatccccggcccaaccccgaggagaagccccccgcatccctggaggagaaggcccacgtgcccatgagcggccagcccatgggcagtcagatggcgctcctggccaaccagctgggccgggaggtggacaccagcctcaacgggagggtggacttgcagcagttcctcaacgggcagaacctgggcatcatgtcccagatgagcgacatcgaggacgacgcccgcaagaaccgcaagtacccgtgcccactctgcggcaagcgcttccgcttcaacagcatcctctccctgcacatgcgcacgcacacgggcgagaagcccttcaagtgcccgtactgcgaccacagggcggcgcagaaggggaacctcaagattcacctgcggacccacaagctgggcaacctgggcaaggggcgtgggcgtgtgcgcgaggagaaccgcctgctgcacgagctggaggagcgcgccatcctgcgggacaagcagctgaaaggcagcctgctgcagccccggccggacctgaagcccccgccgcacgcccagcaggccccgctggccgcctgcaccctggccctgcaggctaaccacagcgttcccgacgtggcccacccggtgccctcgcccaagcctgccagcgtgcaggaggacgcggtggccccggcggcgggcttccgctgtaccttctgcaagggcaagttcaagaagcgcgaggagctggaccgccacatccgcatcttgcacaagccctacaagtgcacgttgtgcgacttcgcggcttcgcaggaggaggagctcatcagccacgtggagaaggcacacatcacggccgagtcggcccagggccagggccccaacggcggtggcgagcagtcggccaacgagttccgctgcgaggtgtgcggtcaggtgttcagccaggcgtggttcctcaagggtcacatgcgcaagcacaaagactcctttgagcactgctgccagatctgcggccggcgcttcaaggagccctggttcctcaagaaccacatgaaggtccacctcaacaagctgtcggtgaagaacaagtcccccagcgaccccgaggtgcctgtgcccatgggcggcatgtcccaggaggcccacgccaacctgtactccaggtacctctcctgcctgcagagtggcttcatgaccccggacaaagccggcctgagcgagcccagccagctctatggcaagggcgagctgcccatgaaggagaaggaagcgctggggaagctgctgtctcccatctccagcatggcccacggcgtcccggagggggacaagcactccctcctgggatgcctcaatctcgtgccgccgctgaaatccagctgcatcgagcggctgcaggcggctgccaaggctgcggagatggaccccgtgaacagctaccaggcttggcagctcatggccaggggcatggccatggaacatggcttcttgtctaaagagcatccgctgcagcgcaaccacgaagacactttggcaaacgccggggttctgtttgataaggagaagcgggagtacgtgttagtgggagcagatggctccaagcagaaaatgcctgctgatttggttcacagcactaaagtgggcagccagagagacctgccaagtaagctcgaccctttagaaagcagtcgggattttttgtcacacgggctgaaccagactctcgagtataacctgcagggtcctgggaacatgaaggagaagcccaccgagtgccccgactgcggccgggtgttccgcacttaccaccaggtggtcgtgcactcccgtgtccacaagcgggaccgcaagggcgaggaggatgggctgcacgtgggcctggatgagcggcgtggctcgggcagtgaccaggagtcccagtcggtgagccgctccaccacgccgggctcctctaacgtcaccgaggagagcggggtcggaggcggcctctcccagaccgggagtgcccaggaggacagcccgcacccctcctcgccatcctcctcagacattggcgaggaggctgggagatctgccggcgtccagcaaccagcgctgcttcgcgacagaagcctgggctcggccatgaaggactgcccgtactgtgggaaaactttccggacatcccatcaccttaaggtgcacctgaggatacacacaggtgagaaaccctacaagtgtccgcactgtgactatgccggcacgcagtcagcatccttaaaataccacttagagcgacaccatcgggagcggcagaacggggctgggccgctgtctgggcaacccccaaatcaagaccacaaggatgagatgtcaagcaaagcttctctgttcatcaggccagacatcctgaggggggccttcaagggtctccctggaatcgacttcagaggaggccctgcatctcagcagtggacatcaggggttctctcctctggagatcactcggggcaggccacgggcatgtcttcggaggtcccctcagatgctctgaaaggcactgaccttccttccaaaagcacccacttctctgagatcggaagagcttatcaaagcattgtgagcaacggtgtgaatttccaagggtccttgcaagctttcatggacagttttgtcctcagttccttgaagaaggagaaggacatgaaggacaaagccctggctgaccccccttccatgaaagtccacggagtggatggtggtgaggagaaacccagtggcaagtcctcccagaggaagtccgagaaatctcagtatgaacccctggacttgtctgtgcggccagatgccgcctccctcccgggctcctcggtaactgtgcaggacagcattgcatggcacggctgcttgttttgtgctttcacaacgtcctccatggagctcatggcccttcatctccaggccaaccacctgggcaaagcgaaacgcaaagataacaccatcggggtcacagtcaactgcaaagaccaagcccgggaggcgagtaagatggccctgctgccctcgttacaatcaaacaaagacctgggcctctccaatatgatcagctctctagactctgcttctgagaagatggcccaaggtcagctcaaggagactctgggagagcagaagagcggtgcatggaccggccacgtggaccctgcattttgtaacttcccatcagacttctacaagcagtttggtgtttacccaggcatggttggctcaggggcctccagttcctgccccaacaaggagcctgatggaaaggcccactctgaagaggatgtccccatcctgatccccgaaaccacgagtaagaacactactgatgacctctctgacattgcctcctcagaggacatggactcctccaagggggagaacaacgatgaagaggatgttgaaaccgaaccggaaatgatgaccaagccactgtctgccctcagcaaagacagcagcagcgatggcggggacagcctgcagcccacaggcacctcccagcccgtccagggactggtctcacctttatcccaagcaccggagaagcagtggcacagccagggtcttctccaagcccaggaccccttggcgggcctgccaaagccggagcgggggccccagagcctggacaagccgatgaacatgctgtcggtcctcagggcctacagttctgatggcttagcagcctttaacggacttgcaagtagcacagcaaattctggatgtatcaagaggccagacttgtgtggtaag

SEQ ID NO: 5629 - DNA, 1797 bp, Homo sapiens
  source 1..1797: mol_type = genomic DNA
atggcggcggcactgagggccccgacccagcaggtttttgtagcctttgaggatgtggccatttacttctcccaggaggagtgggagctccttgatgagatgcagaggctcctgtaccgcgatgtgatgctggagaactttgcagttatggcatccctaggttgctggtgtggagcagtagatgaggggacgccttctgcagagagcgtttctgtggaagaactgtcacagggcaggactccaaaggcagatacatccactgataagagtcacccctgtgagatttgtaccccagtcctgagagacattttacaaatgattgagctccatgcctcaccctgtggacagaaattgtacttgggtggagcatcaagagatttctggatgagttcaaaccttcaccagctccagaagcttgataatggagagaagctctttaaagtggatggggaccaggcctcatttatgatgaactgcaggttccatgtgtcaggaaaacccttcacgtttggggaagtcgggagggacttttcagccacctcaggacttctccagcatcaggtgactcccaccattgagagaccacacagcaggattagacacttgagagttcccactggacgaaagcctctcaaatacactgaatccaggaaatcttttagagagaaatctgtattcattcaacaccaaagagctgactctggagaaaggccttacaagtgcagtgaatgtgggaaatcctttagtcaaagttctggctttcttcgacacaggaaagcacacggtagaacaaggactcatgaatgtagtgaatgtgggaaatcatttagtcgcaaaactcacctaactcaacaccaaagagttcacactggagaaaggccttatgactgcagtgaatgtggcaaatcctttcgccaggtatctgtcctcattcaacatcaacgagttcacactggagaaaggccttatgagtgcagtgaatgtgggaaatcttttagccacagcactaacctctatcgtcacaggagtgcccacactagcacaaggccttatgagtgcagtgaatgtggaaaatcctttagccatagcactaacctctttcgacactggagagttcacactggagtaaggccttatgagtgtagtgaatgtgggaaagcatttagttgcaatatctaccttattcaccaccaaagatttcacactggagaaagaccttatgtgtgcagtgaatgtgggaaatcatttggccagaaatctgtcctcattcaacaccaaagagttcacactggagaaaggccttatgagtgcagtgaatgtgggaaagtttttagccaaagctctggcctctttcgacacagaagagctcacactaaaacaaagccttatgagtgcagtgaatgtgaaaaatcatttagttgcaaaactgacctcattcgacaccagacagttcacactggagaaaggccttatgagtgcagtgtatgtgggaaatcttttatccgaaaaacccacctcattcgacaccagactgttcacactaatgaaaggccttatgagtgcgatgaatgtgggaaatcctatagccaaagctctgccctccttcagcataggagagttcacactggagaaaggccttatgagtgcagagaatgtgggaaatcttttacccgcaaaaatcacctcattcaacacaagacagttcacactggagaaaggccttatgaatgcagtgaatgtggaaaatcctttagccaaagctctggcctcttaagacacagaagagttcatgtgcag

SEQ ID NO: 5630 - DNA, 3903 bp, Homo sapiens
  source 1..3903: mol_type = genomic DNA
[391 bp omitted]cgatctccagtgctgaagagtttgatgacgacgagaagattgaggtggatgacccccctgacaaggaggacatgcgatcaagcttcaggtcgaatgtgttgacggggtcggctccccagcaggactacgataagctgaaggcactcggaggggaaaactccagcaaaactggactctctacgtcaggcaatgtggagaaaaacaaagctgttaagagagaaacagaagccagttctataaacctgagtgtttatgaaccttttaaagtcagaaaagcagaggataaattgaaggaaagctctgacaaggtgctggaaaacagagtcctagatgggaagctgagctccgagaagaatgacaccagcctccccagcgttgcgccatcaaagacaaagtcgtcctccaagctctcgtcctgcatcgctgccatcgcggctctcagcgctaaaaaggcggcttcagactcctgcaaagaaccagtggccaattcgagggaatcctccccgttaccaaaagaagtaaatgacagtccgagagccgctgacaagtctcctgaatcccagaatctcatcgacgggaccaaaaaaccatccctgaagcaaccggatagtcccagaagcatctcaagtgagaacagcagcaaaggatccccgtcctctcccgcagggtccacaccagcaatccccaaagtccgcataaaaaccattaagacatcttctggggaaatcaagagaacagtgaccagggtattgccagaagtggatcttgactctggaaagaaaccttccgagcagacagcgtccgtgatggcctctgtgacatcccttctgtcgtctccagcatcagccgccgtcctttcctctccccccagggcgcctctccagtctgcggtcgtgaccaatgcagtttcccctgcagagctcacccccaaacaggtcacaatcaagcctgtggctactgctttcctcccagtgtctgctgtgaagacggcaggatcccaagtcattaatttgaagctcgctaacaacaccacggtgaaagccacggtcatatctgctgcctctgtccagagtgccagcagcgccatcattaaagctgccaacgccatccagcagcaaactgtcgtggtgccggcatccagcctggccaatgccaaactcgtgccaaagactgtgcaccttgccaaccttaaccttttgcctcagggtgcccaggccacctctgaactccgccaagtgctaaccaaacctcagcaacaaataaagcaggcaataatcaatgcagcagcctcgcaaccccccaaaaaggtgtctcgagtccaggtggtgtcgtccttgcagagttctgtggtggaagctttcaacaaggtgctgagcagtgtcaatccagtccctgtttacatcccaaacctcagtcctcccgccaatgcagggatcacgttaccgacgcgtgggtacaagtgcttggagtgtggggactcctttgcacttgaaaagagtctgacccagcactacgacagacggagcgtgcgcatcgaagtaacgtgcaaccattgtacaaagaacctcgttttttacaacaaatgcagcctcctttcccatgcccgtgggcataaggagaaaggggtggtaatgcaatgctcccacttaattttaaagccagtcccagcagatcaaatgatagtttctccgtcaagcaatacttccacttcaacttccactcttcagagccctgtgggagctggcacacacactgtcacaaaaattcagtctggcataactgggacagtcatatcggctccttcaagcactcccatcaccccagccatgcccctagatgaagacccctccaaactgtgtagacatagtctaaaatgtttggagtgtaatgaagtcttccaggacgagacatcactggctacacatttccagcaggctgcagatacgagtggacaaaagacttgcactatctgccagatgctgcttcctaaccagtgcagttatgcatcacaccagagaatccatcagcacaaatctccctacacctgccctgagtgtggggccatctgcaggtcggtgcacttccagacccacgtcaccaagaactgtctgcactacacgaggagagttggttttcgatgtgtgcattgcaatgttgtgtactctgatgtggctgctctgaagtctcacattcaaggttctcactgtgaagtcttctacaagtgtcctatttgtccaatggcgtttaagtctgccccaagcacacattcccacgcctacacacagcatcctggcatcaagataggagaaccaaaaataatatataagtgttccatgtgcgacactgtgttcaccctgcaaaccttgctgtatcgccactttgaccaacacattgaaaaccagaaggtgtctgttttcaagtgtccagactgttctcttttatatgcacagaagcaacttatgatggaccatatcaagtctatgcatggaacattgaaaagtattgaagggcctccaaacttgggtataaacttgcctttgagcattaagcctgcaactcaaaattcagcaaatcagaacaaagaggacaccaaatccatgaatgggaaagagaaattggaaaagaaatctccatctcctgtgaaaaaatcaatggaaaccaagaaagtggccagtcctgggtggacgtgttgggagtgtgactgcctgttcatgcagagagatgtgtacatatcccacgtgaggaaggagcacgggaagcaaatgaagaaacacccctgccgccagtgtgacaagtctttcagctcgtcccacagcctgtgccggcacaaccggatcaagcacaaaggcatcaggaaagtgtacgcctgctcgcactgcccagactccagacgtacctttaccaaacgtttgatgctggagaagcacgtccagctgatgcatggcatcaaggaccctgacctgaaagaaatgacagatgccaccaatgaggaggaaacagaaataaaagaagacactaaggtccccagtcccaagcggaagttggaagaaccagttctggagttcaggcctccccgaggagcaatcactcaaccactgaaaaagctgaaaatcaatgtttttaaggttcacaagtgtgccgtgtgtggcttcaccaccgaaaacctgctgcaattccacgaacacatccctcagcacaaatcggatggttcttcctaccagtgccgggagtgtggcctctgctacacgtctcacgtctctctgtccaggcacctcttcatcgtacacaagttaaaggaacctcagccagtgtccaagcaaaatggggctggggaagataaccaacaggagaacaaacccagccacgaggatgaatcccctgatggcgccgtgtcagacagaaagtgcaaagtgtgcgcaaaaacttttgaaactgaagctgccttaaatactcacatgcggacacacggcatggccttcatcaaatccaaaaggatgagctcagccgagaaa

SEQ ID NO: 5631 - DNA, 2511 bp, Homo sapiens
  source 1..2511: mol_type = genomic DNA
atggctagcaaacgaaaatctacaactccatgcatggttcggacatcacaagtagtagaacaagatgtgcccgaggaagtagacagggccaaagagaaaggaatcggcacaccacagcctgacgtggccaaggacagttgggcagcagaacttgaaaactcttccaaagaaaacgaagtgatagaggtgaaatctatgggggaaagccagtccaaaaaactccaaggtggttatgagtgcaaatactgcccctactccacgcaaaacctgaacgagttcacggagcatgtcgacatgcagcatcccaacgtgattctcaaccccctctacgtgtgtgcagaatgtaacttcacaaccaaaaagtacgactccctatccgaccacaactccaagttccatcccggggaggccaacttcaagctgaagttaattaaacgcaataatcaaactgtcttggaacagtccatcgaaaccaccaaccatgtcgtgtccatcaccaccagtggccctggaactggtgacagtgattctgggatctcggtgagtaaaacccccatcatgaagcctggaaaaccaaaagcggatgccaagaaggtgcccaagaagcccgaggagatcacccccgagaaccacgtggaagggaccgcccgcctggtgacagacacagctgagatcctctcgagactcggcggggtggagctcctccaagacacattaggacacgtcatgccttctgtacagctgccaccaaatatcaaccttgtgcccaaggtccctgtcccactaaatactaccaaatacaactctgccctggatacaaatgccacgatgatcaactctttcaacaagtttccttacccgacccaggctgagttgtcctggctgacagctgcctccaaacacccagaggagcacatcagaatctggtttgccacccagcgcttaaagcatggcatcagctggtccccagaagaggtggaggaggcccggaagaagatgttcaacggcaccatccagtcagtacccccgaccatcactgtgctgcccgcccagttggcccccacaaaggtgacgcagcccatcctccagacggctctaccgtgccagatcctcggccagactagcctggtgctgactcaggtgaccagcgggtcaacaaccgtctcttgctcccccatcacacttgccgtggcaggagtcaccaaccatggccagaagagacccttggtgactccccaagctgcccccgaacccaagcgtccacacatcgctcaggtgccagagcccccacccaaggtggccaaccccccgctcacaccagccagtgaccgcaagaagacaaaggagcagatagcacatctcaaggccagctttctccagagccagttccctgacgatgccgaggtttaccggctcatcgaggtgactggccttgccaggagcgagatcaagaagtggttcagtgaccaccgatatcggtgtcaaaggggcatcgtccacatcaccagcgaatcccttgccaaagaccagttggccatcgcggcctcccgacacggtcgcacgtatcatgcgtacccagactttgccccccagaagttcaaagagaaaacacagggtcaggttaaaatcttggaagacagctttttgaaaagttcttttcctacccaagcagaactggatcggctaagggtggagaccaagctgagcaggagagagatcgactcctggttctcggagaggcggaagcttcgagacagcatggaacaagctgtcttggattccatggggtctggcaaaaaaggccaagatgtgggagcccccaatggtgctctgtctcgactcgaccagctctccggtgcccagttaacaagttctctgcccagcccttcgccagcaattgcaaaaagtcaagaacaggttcatctcctgaggagcacgtttgcaagaacccagtggcctactccccaggagtacgaccagttagcggccaagactggcctggtccgaactgagattgtgcgttggttcaaggagaacagatgcttgctgaaaacgggaaccgtgaagtggatggagcagtaccagcaccagcccatggcagatgatcacggctacgatgccgtagcaaggaaagcaacaaaacccatggccgagagcccaaagaacgggggtgatgtggttccacaatattacaaggaccccaaaaagctctgcgaagaggacttggagaagttggtgaccagggtaaaagtaggcagcgagccagcaaaagactgtttgccagcaaagccctcagaggccacctcagaccggtcagagggcagcagccgggacggccagggtagcgacgagaacgaggagtcgagcgttgtggattacgtggaggtgacggtcggggaggaggatgcgatctcagatagatcagatagctggagtcaggctgcggcagaaggtgtgtcggaactggctgaatcagactccgactgcgtccctgcagaggctggccaggcc

SEQ ID NO: 5632 - DNA, 2868 bp, Homo sapiens
  source 1..2868: mol_type = genomic DNA
atggccagcaagaggaaatccaccacaccatgcatgatcccagtgaagactgtggtgttgcaagatgccagcatggaggcccagcccgctgagaccttgcctgaaggaccccagcaggatctgcccccagaagcatctgctgccagcagtgaggcagcacagaaccccagcagtactgatggctctacactggccaatgggcatcggagcactttagatggctatttatattcctgtaaatactgcgatttcagatcccatgacatgacccaatttgtgggacatatgaactcagagcacacagactttaataaagacccaacctttgtatgcagtgggtgcagttttctggcaaaaacccctgaggggctttccttgcacaatgccacatgtcactccggggaagccagctttgtgtggaacgtggccaagccagacaatcatgtggttgtggagcagagcatccctgagagcaccagcactcctgacctagcgggtgagcccagtgctgaaggggctgatggacaggcagaaatcatcattaccaaaactccaatcatgaagataatgaaaggcaaagctgaagccaaaaaaattcatacactcaaggagaatgtccctagccagcctgtgggtgaggccttaccaaagctgtcgactggagaaatggaggtgagagagggggaccattccttcatcaatggggcagttccagtcagccaggcatctgccagctctgcaaaaaacccccatgccgccaacgggcccctgataggaacagtgccagttttgccagctggcatagcacagttcctctccctccagcagcagcccccagtgcatgcccaacaccatgtccaccagccactgcccacggccaaggcccttcccaaagtgatgatccccctgagcagcattccaacgtacaatgcagccatggactctaacagcttcctgaagaactccttccacaagttcccctaccccaccaaagccgagctctgctatttgactgtggtgaccaagtatccagaagaacagctcaagatctggttcacagcccaaaggctgaagcaggggatcagctggtcccctgaggagattgaggatgcccggaaaaagatgttcaatacagtcatccagtctgtgcctcagcccacaattacggttctaaataccccactcgtcgccagtgctggcaatgtccagcatctcatccaggccgctcttccaggtcacgttgtggggcagccagagggtacaggagggggacttctggtcactcagccattgatggccaatgggttgcaagcaacaagttcccctctccccctcacggtgacatccgtccccaagcagccaggtgtggcacccattaacactgtgtgttcaaatacaacgtcagctgtgaaggtggtcaatgcggcccagtcgctcctcacggcctgccccagcataacctcccaagccttccttgatgctagcatctacaaaaataagaaatctcatgaacagctgtcagctctgaaagggagcttctgtcggaaccagttcccagggcagagcgaagttgaacatctcacaaaagtgacgggcctcagtaccagagaggtgcggaaatggttcagtgatcgtagataccactgccggaacttgaagggctccagagcgatgatacctggagatcacagttccatcatcattgactctgtgccagaggtgtccttctccccatcgtccaaggtccctgaggtaacctgcattccgacaacagccacactagcaacccacccttctgccaaacgacaatcttggcaccagactcctgacttcacaccaaccaaatacaaggagagagcccctgagcagctcagagccctggagagcagttttgcacaaaaccctcttcctcttgatgaggaactggaccgcctgagaagtgaaaccaaaatgacccgacgagaaattgatagctggttttcagagagacggaaaaaagtgaatgctgaggagaccaagaaggctgaggagaatgcctctcaggaggaagaggaggctgctgaggatgagggtggagaagaggatttggccagtgagctaagggtctctggtgaaaatggctctctggaaatgcccagcagccatatcttggcagagcgcaaagtcagccccattaaaatcaacctgaagaacctgagggtcactgaagccaatggcaggaacgagattccagggctgggtgcctgtgaccctgaggatgatgagtcaaacaaactggcagagcagctcccaggcaaagtgagctgcaaaaagactgcccagcagcggcacttgctgcggcagctctttgtccagacacagtggccaagcaaccaggactatgactccatcatggcccagacgggtctgccacggccagaggtggtgcgctggtttggagatagcaggtacgcactgaagaacggccaactcaaatggtacgaagactataagcgaggcaacttcccaccagggctactggtcattgcccctggcaaccgggagctcctgcaggactattacatgacacacaagatgctgtatgaagaggacctgcagaacctctgtgacaagacccagatgagctcccagcaggtcaagcagtggtttgctgagaaaatgggggaggagaccagagccgtggcagacacaggcagtgaggaccagggccctggtactggtgagctcacagcagttcacaaagggatgggtgacacctattcagaggtgtctgagaacagtgagtcgtgggagccccgtgtccctgaggccagctcagagccctttgacacatcgagtccccaggctggacgtcagctcgaaacagac

SEQ ID NO: 5633 - DNA, 2907 bp, Homo sapiens
  source 1..2907: mol_type = genomic DNA
atggccagcaagaggaaatccaccacaccatgcatgatcccagtgaagactgtggtgttgcaagatgccagcatggaggcccagcccgctgagaccttgcctgaaggaccccagcaggatctgcccccagaagcatctgctgccagcagtgaggcagcacagaaccccagcagtactgatggctctacactggccaatgggcatcggagcactttagatggctatttatattcctgtaaatactgcgatttcagatcccatgacatgacccaatttgtgggacatatgaactcagagcacacagactttaataaagacccaacctttgtatgcagtgggtgcagttttctggcaaaaacccctgaggggctttccttgcacaatgccacatgtcactccggggaagccagctttgtgtggaacgtggccaagccagacaatcatgtggttgtggagcagagcatccctgagagcaccagcactcctgacctagcgggtgagcccagtgctgaaggggctgatggacaggcagaaatcatcattaccaaaactccaatcatgaagataatgaaaggcaaagctgaagccaaaaaaattcatacactcaaggagaatgtccctagccagcctgtgggtgaggccttaccaaagctgtcgactggagaaatggaggtgagagagggggaccattccttcatcaatggggcagttccagtcagccaggcatctgccagctctgcaaaaaacccccatgccgccaacgggcccctgataggaacagtgccagttttgccagctggcatagcacagttcctctccctccagcagcagcccccagtgcatgcccaacaccatgtccaccagccactgcccacggccaaggcccttcccaaagtgatgatccccctgagcagcattccaacgtacaatgcagccatggactctaacagcttcctgaagaactccttccacaagttcccctaccccaccaaagccgagctctgctatttgactgtggtgaccaagtatccagaagaacagctcaagatctggttcacagcccaaaggctgaagcaggggatcagctggtcccctgaggagattgaggatgcccggaaaaagatgttcaatacagtcatccagtctgtgcctcagcccacaattacggttctaaataccccactcgtcgccagtgctggcaatgtccagcatctcatccaggccgctcttccaggtcacgttgtggggcagccagagggtacaggagggggacttctggtcactcagccattgatggccaatgggttgcaagcaacaagttcccctctccccctcacggtgacatccgtccccaagcagccaggtgtggcacccattaacactgtgtgttcaaatacaacgtcagctgtgaaggtggtcaatgcggcccagtcgctcctcacggcctgccccagcataacctcccaagccttccttgatgctagcatctacaaaaataagaaatctcatgaacagctgtcagctctgaaagggagcttctgtcggaaccagttcccagggcagagcgaagttgaacatctcacaaaagtgacgggcctcagtaccagagaggtgcggaaatggttcagtgatcgtagataccactgccggaacttgaagggctccagagcgatgatacctggagatcacagttccatcatcattgactctgtgccagaggtgtccttctccccatcgtccaaggtccctgaggtaacctgcattccgacaacagccacactagcaacccacccttctgccaaacgacaatcttggcaccagactcctgacttcacaccaaccaaatacaaggagagagcccctgagcagctcagagccctggagagcagttttgcacaaaaccctcttcctcttgatgaggaactggaccgcctgagaagtgaaaccaaaatgacccgacgagaaattgatagctggttttcagagagacggaaaaaagtgaatgctgaggagaccaagaaggctgaggagaatgcctctcaggaggaagaggaggctgctgaggatgagggtggagaagaggatttggccagtgagctaagggtctctggtgaaaatggctctctggaaatgcccagcagccatatcttggcagagcgcaaagtcagccccattaaaatcaacctgaagaacctgagggtcactgaagccaatggcaggaacgagattccagggctgggtgcctgtgaccctgaggatgatgagtcaaacaaactggcagagcagctcccaggcaaagtgagctgcaaaaagactgcccagcagcggcacttgctgcggcagctctttgtccagacacagtggccaagcaaccaggactatgactccatcatggcccagacgggtctgccacggccagaggtggtgcgctggtttggagatagcaggtacgcactgaagaacggccaactcaaatggtacgaagactataagcgaggcaacttcccaccagggctactggtcattgcccctggcaaccgggagctcctgcaggactattacatgacacacaagatgctgtatgaagaggacctgcagaacctctgtgacaagacccagatgagctcccagcagaaacagactgaatttgatctgattaatgtgaaggactggccagtctgggaaaccgcctgccacgtggaagagccaaacccgactctctgctgccacatgccgttcccatgcccggctgctgggcacctgggagagcttccagaatcctcgcagacagcccagagcctgccgctaccctcggcctgcccaccaccaagcaagcagcaagcaagatggggttctcatcagttcttcctcccacaatgtaggacctttcctttaccttccaatgga

SEQ ID NO: 5634 - DNA, 2619 bp, Homo sapiens
  source 1..2619: mol_type = genomic DNA
atggcaagcaggcgaaaatcaacaacaccttgcatggtccttgccagtgaacaagatccagaccttgagttgatatcagatttggatgaaggtcctcctgtgcttacacctgtagaaaacaccagagcagagagtatctcaagtgatgaagaggttcatgaatctgtggattcagacaatcagcaaaataaaaaagttgaaggtggatatgaatgtaaatattgtacttttcaaactccagatctaaatatgtttacttttcatgtggattcggaacatcccaatgtagtgctaaattcatcctatgtttgtgtcgaatgcaattttcttaccaaaaggtatgatgcactttctgagcataatctgaaatatcacccaggagaagagaattttaagttgactatggtgaaacgtaataaccagacaatctttgaacaaacaataaatgatctgacttttgatggtagttttgttaaagaggagaatgcagagcaagcagaatctacagaagtttcttcttcgggaatatctatcagtaaaactcctatcatgaaaatgatgaaaaataaagtggaaaataaacggattgcagttcatcataactcagttgaggacgttcctgaagagaaagagaatgaaatcaaaccagaccgtgaagaaattgtagaaaatccaagttcttcagcttctgaatctaatacaagtacttccattgtaaacagaatacatccaagtactgccagcacggtagtgacaccagcagcagttcttcctggattggcacaggtgataactgctgtatctgctcagcagaattctaatttgattcccaaagtcttaatccctgttaatagcattcccacctacaatgctgcattggataacaatccccttttacttaacacctacaacaagttcccttacccaacaatgtcagaaattacagttctttctgctcaagcaaaatatacagaggaacagatcaagatatggttttcagcccaacgtttaaaacatggtgttagttggactcccgaggaagtagaggaggcaagaaggaaacaattcaatggaacagtgcatactgtacctcagaccataactgttattcctacacacatttccacagggagtaatggtttaccatctattttacagacatgccaaatagttggtcagcctggtctggtccttactcaagtggctggaacaaacaccttgccagttacagcacctatagccttgacagtggcaggcgttccaagtcaaaataatatacagaaaagtcaggtacctgctgctcagcctactgcagaaacaaagccagcaacagcagcagttccaacttctcaaagtgtcaaacatgaaactgcattggtaaaccctgattcatttggcattcgggcaaaaaagacaaaagagcaactggcagaattaaaagttagctaccttaaaaatcagtttccccatgattcagaaattatcagacttatgaaaataacaggcctgacgaaaggagagattaaaaaatggtttagtgacacaaggtacaaccagagaaattcaaagagtaatcagtgcttacatctcaacaatgattcctctaccaccattattatagactccagtgatgaaaccacggaatccccaactgttggtactgcacagcctaagcaatcctggaatccttttcctgactttactccccaaaagtttaaagagaaaactgcagagcagcttcgtgtccttcaggcaagttttctcaacagctctgtacttacagatgaagaattaaataggttaagggcacaaaccaaacttaccagaagagaaatcgatgcttggtttacagagaagaagaaatcaaaagctttaaaggaagagaaaatggaaatagatgaaagtaatgcaggtagttccaaagaagaagctggagaaacttctcctgcagatgaatctggtgcacctaagtcagggagtacaggcaagatatgtaaaaaaacacctgagcagctgcacatgcttaagagtgcatttgtccggacacagtggccatcaccagaagagtatgacaagttggccaaagaaagcgggcttgctagaacagacatagttagttggtttggggacacccgttatgcttggaagaatggaaacttgaaatggtactactactatcagagcgccaattcaagtagtatgaatggtctgtcttcccttaggaaaagagggagagggagacccaaaggacggggaagaggaagaccgcgtgggcggcctagaggaagcaaaagaattaacaactgggacaggggaccatcactcataaaatttaaaactggaactgcaatacttaaggattattacctgaagcacaagtttcttaatgagcaagaccttgatgaacttgttaacaaatcacatatgggctatgagcaggtcagagagtggtttgcagaaagacagagaagatcagaattaggtatagaattatttgaggaaaatgaggaggaagatgaagttattgatgaccaggaagaggatgaagaagaaacagatgatagtgacacttgggaacctccacgacatgtgaaacggaagctgtctaaatcagatgac

SEQ ID NO: 5635 - DNA, 4068 bp, Homo sapiens
  source 1..4068: mol_type = genomic DNA
atgcagagcaaggtgctgctggccgtcgccctgtggctctgcgtggagacccgggccgcctctgtgggtttgcctagtgtttctcttgatctgcccaggctcagcatacaaaaagacatacttacaattaaggctaatacaactcttcaaattacttgcaggggacagagggacttggactggctttggcccaataatcagagtggcagtgagcaaagggtggaggtgactgagtgcagcgatggcctcttctgtaagacactcacaattccaaaagtgatcggaaatgacactggagcctacaagtgcttctaccgggaaactgacttggcctcggtcatttatgtctatgttcaagattacagatctccatttattgcttctgttagtgaccaacatggagtcgtgtacattactgagaacaaaaacaaaactgtggtgattccatgtctcgggtccatttcaaatctcaacgtgtcactttgtgcaagatacccagaaaagagatttgttcctgatggtaacagaatttcctgggacagcaagaagggctttactattcccagctacatgatcagctatgctggcatggtcttctgtgaagcaaaaattaatgatgaaagttaccagtctattatgtacatagttgtcgttgtagggtataggatttatgatgtggttctgagtccgtctcatggaattgaactatctgttggagaaaagcttgtcttaaattgtacagcaagaactgaactaaatgtggggattgacttcaactgggaatacccttcttcgaagcatcagcataagaaacttgtaaaccgagacctaaaaacccagtctgggagtgagatgaagaaatttttgagcaccttaactatagatggtgtaacccggagtgaccaaggattgtacacctgtgcagcatccagtgggctgatgaccaagaagaacagcacatttgtcagggtccatgaaaaaccttttgttgcttttggaagtggcatggaatctctggtggaagccacggtgggggagcgtgtcagaatccctgcgaagtaccttggttacccacccccagaaataaaatggtataaaaatggaataccccttgagtccaatcacacaattaaagcggggcatgtactgacgattatggaagtgagtgaaagagacacaggaaattacactgtcatccttaccaatcccatttcaaaggagaagcagagccatgtggtctctctggttgtgtatgtcccaccccagattggtgagaaatctctaatctctcctgtggattcctaccagtacggcaccactcaaacgctgacatgtacggtctatgccattcctcccccgcatcacatccactggtattggcagttggaggaagagtgcgccaacgagcccagccaagctgtctcagtgacaaacccatacccttgtgaagaatggagaagtgtggaggacttccagggaggaaataaaattgaagttaataaaaatcaatttgctctaattgaaggaaaaaacaaaactgtaagtacccttgttatccaagcggcaaatgtgtcagctttgtacaaatgtgaagcggtcaacaaagtcgggagaggagagagggtgatctccttccacgtgaccaggggtcctgaaattactttgcaacctgacatgcagcccactgagcaggagagcgtgtctttgtggtgcactgcagacagatctacgtttgagaacctcacatggtacaagcttggcccacagcctctgccaatccatgtgggagagttgcccacacctgtttgcaagaacttggatactctttggaaattgaatgccaccatgttctctaatagcacaaatgacattttgatcatggagcttaagaatgcatccttgcaggaccaaggagactatgtctgccttgctcaagacaggaagaccaagaaaagacattgcgtggtcaggcagctcacagtcctagagcgtgtggcacccacgatcacaggaaacctggagaatcagacgacaagtattggggaaagcatcgaagtctcatgcacggcatctgggaatccccctccacagatcatgtggtttaaagataatgagacccttgtagaagactcaggcattgtattgaaggatgggaaccggaacctcactatccgcagagtgaggaaggaggacgaaggcctctacacctgccaggcatgcagtgttcttggctgtgcaaaagtggaggcatttttcataatagaaggtgcccaggaaaagacgaacttggaaatcattattctagtaggcacggcggtgattgccatgttcttctggctacttcttgtcatcatcctacggaccgttaagcgggccaatggaggggaactgaagacaggctacttgtccatcgtcatggatccagatgaactcccattggatgaacattgtgaacgactgccttatgatgccagcaaatgggaattccccagagaccggctgaagctaggtaagcctcttggccgtggtgcctttggccaagtgattgaagcagatgcctttggaattgacaagacagcaacttgcaggacagtagcagtcaaaatgttgaaagaaggagcaacacacagtgagcatcgagctctcatgtctgaactcaagatcctcattcatattggtcaccatctcaatgtggtcaaccttctaggtgcctgtaccaagccaggagggccactcatggtgattgtggaattctgcaaatttggaaacctgtccacttacctgaggagcaagagaaatgaatttgtcccctacaagaccaaaggggcacgattccgtcaagggaaagactacgttggagcaatccctgtggatctgaaacggcgcttggacagcatcaccagtagccagagctcagccagctctggatttgtggaggagaagtccctcagtgatgtagaagaagaggaagctcctgaagatctgtataaggacttcctgaccttggagcatctcatctgttacagcttccaagtggctaagggcatggagttcttggcatcgcgaaagtgtatccacagggacctggcggcacgaaatatcctcttatcggagaagaacgtggttaaaatctgtgactttggcttggcccgggatatttataaagatccagattatgtcagaaaaggagatgctcgcctccctttgaaatggatggccccagaaacaatttttgacagagtgtacacaatccagagtgacgtctggtcttttggtgttttgctgtgggaaatattttccttaggtgcttctccatatcctggggtaaagattgatgaagaattttgtaggcgattgaaagaaggaactagaatgagggcccctgattatactacaccagaaatgtaccagaccatgctggactgctggcacggggagcccagtcagagacccacgttttcagagttggtggaacatttgggaaatctcttgcaagctaatgctcagcaggatggcaaagactacattgttcttccgatatcagagactttgagcatggaagaggattctggactctctctgcctacctcacctgtttcctgtatggaggaggaggaagtatgtgaccccaaattccattatgacaacacagcaggaatcagtcagtatctgcagaacagtaagcgaaagagccggcctgtgagtgtaaaaacatttgaagatatcccgttagaagaaccagaagtaaaagtaatcccagatgacaaccagacggacagtggtatggttcttgcctcagaagagctgaaaactttggaagacagaaccaaattatctccatcttttggtggaatggtgcccagcaaaagcagggagtctgtggcatctgaaggctcaaaccagacaagcggctaccagtccggatatcactccgatgacacagacaccaccgtgtactccagtgaggaagcagaacttttaaagctgatagagattggagtgcaaaccggtagcacagcccagattctccagcctgactcggggaccacactgagctctcctcctgtt

SEQ ID NO: 5636 - DNA, 333 bp, Homo sapiens
  source 1..333: mol_type = genomic DNA
atgaacaaatcccaggaacaagtgtcattcaaggatgtatgtgtggacttcactcaggaagagtggtatctgctggaccctgctcagaagattctatacagagatgtgatcctggaaaattatagcaatcttgtctcagtagggtattgcattactaaaccagaagtgatctttaagatcgagcaaggagaagagccctggatattagaaaaaggattcccaagccagtgccacccagaaaggaaatggaaagttgatgacgtgttagagagcagccaggaaaatgaagatgaccatttttgggagcttctattccacaacaacaaaacacat

SEQ ID NO: 5637 - DNA, 366 bp, Homo sapiens
  source 1..366: mol_type = genomic DNA
atgaacaaatcccaggaacaagtgtcattcaaggatgtatgtgtggacttcactcaggaagagtggtatctgctggaccctgctcagaagattctatacagagatgtgatcctggaaaattatagcaatcttgtctcagtagggtattgcattactaaaccagaagtgatctttaagatcgagcaaggagaagagccctggatattagaaaaaggattcccaagccagtgccacccagaaaggaaatggaaagttgatgacgtgttagagagcagccaggaaaatgaagatgaccatttttgggagcttctattccacaacaacaaaacactcaggtttcagctcctcggaagaaagcagttcttg

SEQ ID NO: 5638 - DNA, 357 bp, Homo sapiens
  source 1..357: mol_type = genomic DNA
atgaacaaatcccaggaacaagtgtcattcaaggatgtatgtgtggacttcactcaggaagagtggtatctgctggaccctgctcagaagattctatacagagatgtgatcctggaaaattatagcaatcttgtctcagtagggtattgcattactaaaccagaagtgatctttaagatcgagcaaggagaagagccctggatattagaaaaaggattcccaagccagtgccacccagaaaggaaatggaaagttgatgacgtgttagagagcagccaggaaaatgaagatgaccatttttgggagcttctattccacaacaacaaaacatggaatctgaagcttataaaagttgaa

SEQ ID NO: 5639 - DNA, 993 bp, Homo sapiens
  source 1..993: mol_type = genomic DNA
atgaccgagcggccgccgagcgaggcggctcgcagtgacccccagctagagggacgggacgcggccgaggccagcatggcccccccgcacctggtcctgctgaacggcgtcgccaaggagacgagccgcgcggccgcagcggagcccccagtcatcgaactgggcgcgcgcggaggcccggggggcggccctgccggtgggggcggcgccgcgagagacttaaagggccgcgacgcggcgacggccgaagcgcgccatcgggtgcccaccaccgagctgtgcagacctcccgggcccgccccggcccccgcgcccgcctcggttacagcggagctgcccggcgacggccgcatggtgcagctgagtcctcccgcgctggctgcccccgccgcccccggccgcgcgctgctctacagcctcagccagccgctggcctctctcggcagcgggttctttggggagccggatgccttccctatgttcaccaccaacaatcgagtgaagaggagaccttccccctatgagatggagattactgatggtccccacaccaaagttgtgcggcgtatcttcaccaacagccgggagcgatggcggcagcagaatgtgaacggggcctttgccgagctccgcaagctgatccccacacatcccccggacaagaagctcagcaagaatgagatcctccgcctggccatgaagtatatcaacttcttggccaagctgctcaatgaccaggaggaggagggcacccagcgggccaagactggcaaggaccctgtggtgggggctggtgggggtggaggtgggggagggggcggcgcgcccccagatgacctcctgcaagacgtgctttcccccaactccagctgcggcagctccctggatggggcagccagcccggacagctacacggaggagcccgcgcccaagcacacggcccgcagcctccatcctgccatgctgcctgccgccgatggagccggccctcgg

SEQ ID NO: 5640 - DNA, 1800 bp, Homo sapiens
  source 1..1800: mol_type = genomic DNA
atggcggacgccaacaaggccgaggtgcccggggccactggtggcgacagcccgcacctgcagcccgcagagccgccgggcgagccgcggcgagagccgcaccccgcggaggcggagaagcagcagccgcagcacagcagcagctccaatggcgttaaaatggagaatgatgaatcagcaaaagaagagaaatctgacttaaaggaaaaatctacaggaagtaagaaggccaatagatttcatccttattcaaaagacaagaattcgggcgctggagaaaagaagggtccaaatcgtaacagagttttcattagcaacatcccatatgacatgaaatggcaagctattaaagatctaatgagagagaaagttggtgaggttacatacgtggagctctttaaggatgcggaaggaaaatcaaggggttgtggtgtggttgaattcaaagatgaagaatttgtaaagaaagccctagaaactatgaacaaatatgatcttagtggaagaccccttaatattaaagaggatcctgatggagaaaatgctcgtagggcattgcagcgaacaggaggatcatttccaggaggacacgtccctgatatgggatcagggttgatgaatttaccaccttccatactcaataatccaaacattcctcctgaagtcatcagtaatttgcaggccggtagacttggttccacaatttttgttgccaatcttgacttcaaagttggttggaagaagctaaaggaagtgttcagcatagctggaactgtgaagcgggcagatattaaagaagacaaagatggcaagagcagaggaatgggcactgtcacttttgagcaagcaattgaagcagttcaagcaatttctatgttcaatgggcagtttttatttgatagacctatgcatgtgaaaatggatgacaagtctgttcctcatgaagagtaccgttcacatgatggtaaaacaccacaattaccacgtggtcttggaggcattgggatgggacttggtccgggtggacagcctattagtgccagccagttgaacataggtggagtaatgggaaatttaggtccaggtggtatgggaatggatggtccaggttttggaggaatgaatagaattggaggaggaatagggtttggtggtctggaagcaatgaatagcatgggaggatttggaggagttggccgaatgggagagctgtaccgtggtgcgatgactagtagcatggagcgagattttggacgtggtgatattggaataaatcgaggctttggagattcctttggtagacttggcagtgcaatgattggagggtttgcaggaagaataggatcttctaacatgggtccagtaggatctggaataagtggtggaatgggtagcatgaacagtgtgactggaggaatggggatgggactggaccggatgagttccagctttgatagaatgggaccaggtataggagctatactggaaaggagcatcgatatggatcgaggatttttatcgggtccaatgggaagcggaatgagagagagaataggctccaaaggcaaccagatatttgtcagaaatctaccttttgacttgacttggcagaaactaaaagagaaattcagtcagtgtggtcatgtaatgtttgcagaaataaaaatggagaatggaaagtcaaaaggctgtggaacagtcagatttgactccccagaatcagctgaaaaagcctgcagaataatgaatggcataaaaatcagtggcagagaaattgatgttcgcttggatcgtaatgca

SEQ ID NO: 5641 - DNA, 1728 bp, Homo sapiens
  source 1..1728: mol_type = genomic DNA
atggcggacgccaacaaggccgaggtgcccggggccactggtggcgacagcccgcacctgcagcccgcagagccgccgggcgagccgcggcgagagccgcaccccgcggaggcggagaagcagcagccgcagcacagcagcagctccaatggcgttaaaatggagaatgatgaatcagcaaaagaagagaaatctgacttaaaggaaaaatctacaggaagtaagaaggccaatagatttcatccttattcaaaagacaagaattcgggcgctggagaaaagaagggtccaaatcgtaacagagttttcattagcaacatcccatatgacatgaaatggcaagctattaaagatctaatgagagagaaagttggtgaggttacatacgtggagctctttaaggatgcggaaggaaaatcaaggggttgtggtgtggttgaattcaaagatgaagaatttgtaaagaaagccctagaaactatgaacaaatatgatcttagtggaagaccccttaatattaaagaggatcctgatggagaaaatgctcgtagggcattgcagcgaacaggaggatcatttccaggaggacacgtccctgatatgggatcagggttgatgaatttaccaccttccatactcaataatccaaacattcctcctgaagtcatcagtaatttgcaggccggtagacttggttccacaatttttgttgccaatcttgacttcaaagttggttggaagaagctaaaggaagtgttcagcatagctggaactgtgaagcgggcagatattaaagaagacaaagatggcaagagcagaggaatgggcactgtcacttttgagcaagcaattgaagcagttcaagcaatttctatgttcaatgggcagtttttatttgatagacctatgcatgtgaaaatggatgacaagtctgttcctcatgaagagtaccgttcacatgatggtaaaacaccacaattaccacgtggtcttggaggcattgggatgggacttggtccgggtggacagcctattagtgccagccagttgaacataggtggagtaatgggaaatttaggtccaggtggtatgggaatggatggtccaggttttggaggaatgaatagaattggaggaggaatagggtttggtggtctggaagcaatgaatagcatgggaggatttggaggagttggccgaatgggagagctgtaccgtggtgcgatgactagtagcatggagcgagattttggacgtggtgatattggaataaatcgaggctttggagattcctttggtagacttggtggtggaatgggtagcatgaacagtgtgactggaggaatggggatgggactggaccggatgagttccagctttgatagaatgggaccaggtataggagctatactggaaaggagcatcgatatggatcgaggatttttatcgggtccaatgggaagcggaatgagagagagaataggctccaaaggcaaccagatatttgtcagaaatctaccttttgacttgacttggcagaaactaaaagagaaattcagtcagtgtggtcatgtaatgtttgcagaaataaaaatggagaatggaaagtcaaaaggctgtggaacagtcagatttgactccccagaatcagctgaaaaagcctgcagaataatgaatggcataaaaatcagtggcagagaaattgatgttcgcttggatcgtaatgca

SEQ ID NO: 5642 - DNA, 1485 bp, Homo sapiens
  source 1..1485: mol_type = genomic DNA
atgaccctgggcagctgctgctgcgagatcatgtcctccgagagctccccggccgcgctgtccgaggccgacgcagacatagacgtggtgggcggcggcagcggcgggggggagctcccagctcgctccgggccccgcgccccccgggacgtgctcccccacggccacgagcctcccgcggaggaagccgaggcagacttagccgaggacgaggaggagtctggtggctgctcggacggcgagccccgcgctctggcgtcccggggggcggcggccgcagcggggagcccggggccaggcgccgcggcggcccgcggcgcagcggggcccgggccgggaccgccgtcggggggcgcggcgacgcggagcccgctggtgaagccgccctactcgtacatcgcgctcatcaccatggccatcctgcagagccccaagaagcggctgacgttgagcgagatctgcgagttcatcagcggccgcttcccctactaccgggagaagttccccgcctggcagaacagcatccgccacaacctctctctcaacgactgcttcgtcaagatcccccgcgagccgggcaacccgggcaagggcaactactggacgctggacccggagtcggccgacatgttcgacaacggcagcttcctgcggcgtcgcaagcgcttcaagcggcagcccctgccgccgccgcacccacacccgcaccctcacccggagctgctgctgcgtggcggggccgcggcggcgggggatcccggcgctttcctgcccggcttcgctgcctacggcgcctacggctacggctacgggctggctctcccggcctacggcgcacccccgccggggccggccccgcatccgcacccgcacccgcacgccttcgctttcgccgcggcagccgccgccgctccttgccagctgtcggtacccccaggccgcgccgccgcgcctccacccggacctccgacggcctcggtgttcgcaggcgcgggatcggccccagctcctgcgcctgcctcaggctcgggcccgggcccgggccccgcaggcctgcccgccttcctgggcgcggagctgggctgcgccaaagccttctacgcggcgtccctgagtcctcccgcagccggcaccgcggcgggtctgcccaccgcacttctgcgccagggcctcaagacggacgcgggcggtggtgcaggcggcgggggcgccggggcagggcagaggccttccttctctatagaccacatcatgggccacggtggcggcggggcagcacccccgggcgccggcgagggctctccgggaccgccattcgcggcagccgcgggtcctgggggccaagcccaggtcttggccatgctgactgctccggccctggctcccgttgctggccacattcgcctctcgcatcccggggacgcgctgctgtcctcagggtcccggtttgccagcaaagtcgccggccttagtggctgccacttc

SEQ ID NO: 5643 - DNA, 1434 bp, Homo sapiens
  source 1..1434: mol_type = genomic DNA
atgaccctctccggcggcggcagcgccagcgacatgtccggccagacggtgctgacggccgaggacgtggacatcgatgtggtgggcgagggcgacgacgggctggaagagaaggacagcgacgcaggttgcgatagccccgcggggccgccggagctgcgcctggacgaggcggacgaggtgcccccggcggcaccccatcacggacagcctcagccgccccaccagcagcccctgacattgcccaaggaggcggccggagccggggccggaccggggggcgacgtgggcgcgccggaggcggacggctgcaagggcggtgttggcggcgaggagggcggcgcgagcggcggcgggcctggcgcgggcagcggttcggcgggaggcctggccccgagcaagcccaagaacagcctagtgaagccgccttactcgtacatcgcgctcatcaccatggccatcctgcagagcccgcagaagaagctgaccctgagcggcatctgcgagttcatcagcaaccgcttcccctactacagggagaagttccccgcctggcagaacagcatccgccacaacctctcactcaacgactgcttcgtcaagatcccccgcgagccgggcaacccgggcaagggcaactactggaccctggacccgcagtccgaggacatgttcgacaacggcagcttcctgcggcgccggaaacgcttcaagcgccaccagcaggagcacctgcgcgagcagacggcgctcatgatgcagagcttcggcgcttacagcctggcggcggcggccggcgccgcgggaccctacggccgcccctacggcctgcaccctgcggcggcggccggtgcctattcgcacccggcagcggcggcggccgcggctgctgcggcggcgctccagtacccgtacgcgctgccgccggtggcaccggtgctgcctcccgctgtgccgctgctgccctcgggcgagctgggccgcaaagcggccgccttcggctcacagctcggcccgggcctgcagctgcagctcaatagcctgggcgccgccgcggccgctgcgggcacagcgggcgccgcgggcaccaccgcgtcgctcatcaagtccgagccaagcgcgcggccgtcgttcagcatcgagaacatcataggtgggggccccgcggctcctgggggctcggcggtgggcgctggggtcgccggcggcactgggggttcagggggcggcagcacggcgcagtcgtttctgcggccacccgggaccgtgcagtcggcagcgctcatggccacccaccaaccgctgtcgctgagccggacgactgccaccatcgcgcccattcttagcgtgccactctccggacagtttctgcagcccgcagcctcggccgccgccgctgctgcggccgccgctcaagccaaatggccggcgcaa

SEQ ID NO: 5644 - DNA, 1395 bp, Homo sapiens
  source 1..1395: mol_type = genomic DNA
atgaccctgagcactgagatgtccgatgcctctggcctcgccgaggaaacagacatcgacgtggtgggggagggcgaggacgaagaagacgaggaagaggaggacgacgacgagggcggcggtggcgggccccggctggctgtccccgcgcagcggcggcggcggcggcgctcgtacgccggggaggacgagctggaggatctggaggaggaggaggacgacgatgacatcctgctggccccgcctgctgggggctccccggcgcccccgggcccggccccggcggcgggggcaggagccggtgggggcggcggcggcggcggcgcgggcggcggcgggagcgcgggtagcggcgccaagaacccgctggtgaagccgccctactcgtatatcgcgctcatcactatggccatcctgcagagccccaagaagcggctgacgctgagcgagatctgtgagttcatcagcggccgcttcccctactaccgggagaagttccccgcctggcagaacagcatccgccacaacctctcgctcaacgactgcttcgtcaagatcccccgcgagcccggcaacccgggcaagggcaactactggacgctggacccggagtccgccgacatgttcgacaacggcagcttcctgcgccggaggaagcgcttcaagcggcagccgctgctcccacccaacgccgcggccgccgagtctctgctgctgcgcggcgcgggagccgcagggggcgcgggcgacccggcagccgccgccgcgctcttcccgcccgcgcccccgccgcccccgcatgcctacggctacggcccctacggctgcggctacggcctgcagctgccgccttacgcgccgccctcggccctcttcgccgccgcagcggccgccgccgccgccgccgccttccacccgcactcgcccccgccgcccccgccaccgcacggcgcggccgccgagctggcccggaccgccttcggctaccggccgcacccgctcggcgccgccctacccggccccctgccggcctccgcggccaaggcgggcggcccgggcgcctcagcgctggcgcgctcgcccttctccatcgagagcatcatcgggggcagcttgggcccggccgccgctgccgccgccgccgcgcaggccgccgccgccgctcaggcctcgccctcgccctcgccggtggcggcgccgccagctcccggatccagcggaggaggctgcgcggcgcaggcggccgtgggcccggcggccgcgctcacccgatccctcgtggccgccgcggccgccgccgcctcctcagtctcctcgtccgccgccttggggactctgcaccaagggactgccctgtccagtgtcgagaactttactgctaggatttccaattgt

SEQ ID NO: 5645 - DNA, 783 bp, Homo sapiens
  source 1..783: mol_type = genomic DNA
atgatctacaagtgccccatgtgtagggaatttttctctgagagagcagatctttttatgcatcagaaaattcacacagctgagaagccccataaatgtgacaagtgtgataagggtttctttcatatatcagaacttcatattcattggagagaccatacaggagagaaggtctataaatgtgatgattgtggtaaggattttagcactacaacaaaacttaatagacataagaaaatccacacagtggagaagccctataaatgttacgagtgtggcaaagccttcaattggagctcccatcttcaaattcatatgagagttcatacaggtgagaaaccgtatgtctgtagtgagtgtggaaggggctttagtaatagttcaaacctttgcatgcatcagagagtccacaccggagagaagccctttaaatgtgaagagtgtgggaaggccttcaggcacacctccagcctctgcatgcatcaaagagtccacacaggagagaaaccctataaatgttatgagtgtgggaaggcgttcagtcagagttcgagcctctgcatccaccagagagtccacactggagagaaaccctatagatgttgtggatgtgggaaggccttcagtcagagttcgagcctgtgcatccaccagagagtccacacaggagagaaacctttcaaatgtgatgagtgcggaaaggccttcagtcagagtacgagcctctgcatccaccagagagtccacacaaaggagagaaaccatctcaaaatatcagttata

SEQ ID NO: 5646 - DNA, 3258 bp, Homo sapiens
  source 1..3258: mol_type = genomic DNA
atggccacggtcggagagtggtcctgtgtgcgctgcaccttcctgaacccggccggccagcgccagtgctccatctgcgaggctccccggcacaagcccgacctcaaccacatcctgcggctcagcgtggaggagcagaaatggccctgcgcccgctgcaccttccgcaacttcctgggcaaggaggcctgcgaggtgtgcggcttcaccccggagcctgcgcctggggctgccttcctgccagtcctcaacggggtcctccccaagccacccgccatcctgggggagcccaagggcagctgccaggaggaagcaggtccagtgaggactgcggggctggtggccacggagcccgccagggggcagtgcgaggacaaggacgaggaggagaaggaggagcaggaggaggaggagggagcggcggagcccagagggggctgggcgtgtccgcgttgcacgctgcacaacacgcccgtggccagctcctgctccgtctgcgggggcccacgcaggctctcgctgccacggatccctcctgaggccctggtggtcccggaagtggtggccccggccggcttccacgtcgtgcctgccgcgcctccacctggcctccccggggaaggtgccgaggccaaccccccagccaccagccagggcccagctgccgaaccagagccgcccagggtcccgcccttcagccccttctcgtccaccctgcagaacaaccccgtgccgcgcagccgacgcgaggttcccccccagctgcagccaccggtgcctgaggctgcccagccgtcaccctctgccggctgcaggggagccccccagggctcgggctgggctggggcctcccgcctagcagagttgctgtctggcaagcggctgagtgtgctggaggaagaggccacggagggtggcaccagccgcgtagaggccggcagctccacctcgggcagtgacatcattgacctggccggagacaccgtgcgttacacgcccgccagcccctccagccccgacttcaccacctggtcatgtgccaagtgcacgctcagaaaccccacagtggcccccaggtgctcggcctgcggctgctccaaactgcacggcttccaggagcatggcgagccccccacccactgccccgactgtggggccgacaagcccagcccctgcggcagaagctgcggacgggtgtcctcggcccagaaggccgcccgcgtcctgcccgagcgcccgggccagtgggcctgccctgcctgtaccctgctcaacgcactgcgggccaagcactgcgccgcctgccacacgcctcagctcctggtggcccagcggcggggggccgcgcccctgaggcgcagggagagcatgcacgtggagcagcggcggcagacagacgagggcgaggccaaggcactctgggagaacatcgtggccttctgccgggagaacaatgtgagcttcgtggatgacagcttccctcccgggcccgagtctgtcggcttccccgcgggtgacagcgtgcagcagcgtgtgaggcagtggctgcgaccccaggagatcaactgctccgtcttcagggaccacagggccacgtggtctgtgttccacacactgcggccctcagacatcctgcaggggctgctggggaactgctggttcctgagcgccctggcggtgctggcggagcggccggacctggtggagcgggtgatggtcacgcgcagcctgtgtgcagagggcgcctaccaggtgcggctgtgcaaggacggcacgtggaccacggtgctggtggacgacatgctgccctgtgatgaggccggctgcctcctcttctcacaggcgcagcggaagcagctgtgggtggccctcatcgagaaggcgctggccaagctgcacggctcctactttgcgctccaggcgggccgcgccatcgaaggcctggccacgctcaccggcgccccctgtgagagcctggcgctgcagctcagctccactaacccccgcgaggagcccgttgacactgacctcatctgggccaaaatgctgagttctaaggaggctgggttcctcatgggtgcctcctgtggcgggggcaacatgaaggtggacgattcggcctacgagagcctgggcctgcgcccccggcatgcctactccatcctggatgtccgagatgtccagggcaccaggcttctgcggctccgaaacccgtggggccgtttctcctggaacggcagctggtccgacgagtggccacactggccggggcacctgcgtggcgagctcatgccgcacggcagcagtgagggtgtcttctggatggagtacggcgactttgtcaggtacttcgactccgtggacatctgtaaggtgcactcggactggcaggaggcgcgggtgcagggctgctttcccagctcggccagcgcgcccgtgggggtaacagcgctcacggtgctggagcgggcctcgctggagttcgcgctcttccaggagggcagcaggcgctcggacgccgtggacagccacctgctggacctgtgcatcctggtgttccgggccacgttcggcagcggcggccacctcagcctgggccgcctcctggcccacagtaagcgcgcggtcaagaagttcgtcagctgcgacgtcatgctggagcctggcgagtacgctgtggtgtgctgcgccttcaaccactgggggccgcccctgccgggcacccctgccccccaggcctccagcccctcggcaggggtcccgagagcctccccagagccgccgggccacgtgctggctgtgtacagctcgaggctggtcatggtggagcccgtggaagcccagccgaccacgctggccgacgccatcatcctgctcaccgagagccgcggagagcggcacgagggccgtgagggcatgacctgctactacctgacacacggttgggcggggctcatcgtggtggtggagaaccgacaccccaaggcctacctgcacgtgcagtgtgactgcaccgacagcttcaacgtggtgtccacacgcggcagcctgcgtacccaggatagcgtgccacccctgcacaggcaggtcctggtgatcttgtcccagctagagggcaacgccggcttctctatcacccaccgcctggcacatcgcaaggcagcccaggccttcctcagtgactggacagcctccaaggggacccacagccccccactcacgccagaggtcgccggtctgcatgggccccgaccgctg

SEQ ID NO: 5647 - DNA, 1077 bp, Homo sapiens
  source 1..1077: mol_type = genomic DNA
atgggccggcgccgggcgccagagctgtaccgggctccgttcccgttgtacgcgcttcaggtcgaccccagcactgggctgctcatcgctgcgggcggaggaggcgccgccaagacaggcataaagaatggcgtgcactttctgcagctagagctgattaatgggcgcttgagtgcctccttgctgcactcccatgacacagagacacgggccaccatgaacttggcactggctggtgacatccttgctgcagggcaggatgcccactgtcagctcctgcgcttccaggcacatcaacagcagggcaacaaggcagagaaggccggttccaaggagcaggggcctcgacaaaggaagggagcagccccagcagagaagaaatgtggagcggaaacccagcacgaggggctagaactcagggtagagaatttgcaggcggtgcagacagactttagctccgatccactgcagaaagttgtgtgcttcaaccacgataataccctgcttgccactggaggaacagatggctacgtccgtgtctggaaggtgcccagcctggagaaggttctggagttcaaagcccacgaaggggagattgaagacctggctttagggcctgatggcaagttggtaaccgtgggccgggaccttaaggcctctgtgtggcagaaggatcagctggtgacacagctgcactggcaagaaaatggacccaccttttccagcacaccttaccgctaccaggcctgcagtgaatccggcaccttcctaggcctgggcacagtcactggctctgttgccatctacatagctttctctctccagtgcctctactacgtgagggaggcccatggcattgtggtgacggatgtggcctttctacctgagaagggtcgtggtccagagctccttgggtcccatgaaactgccctgttctctgtggctgtggacagtcgttgccagctgcatctgttgccctcacggcggagtgttcctgtgtggctcctgctcctgctgtgtgtcgggcttattattgtgaccatcctgctgctccagagtgcctttccaggtttcctt

SEQ ID NO: 5648 - DNA, 1656 bp, Homo sapiens
  source 1..1656: mol_type = genomic DNA
atggcccgggtgccattgacattcagcgatgttgccatagacttctctcaggaggagtgggaatatttaaactcggatcagagggatttgtacagagatgtgatgttggagaattatactaacttggtctcattggactttaatttcacaactgaaagcaacaagttatcttcagaaaaaagaaattatgaagtaaatgcgtaccatcaggagacatggaaaagaaataaaaccttcaaccttatgaggtttattttcagaactgacccacagtacacaattgaatttgggagacaacagagacctaaagtgggatgttttagtcaaatgatattcaaaaaacataaatcccttcctctacataagagaaataacacaagagagaaatcatatgagtgtaaggaatataagaagggctttagaaaatatttgcaccttactgaacatctgagagaccatactggtgtgataccctatgaatgtaatgaatgtggaaaagcatttgtagttttccagcattttattagacatcgaaaaatccacactgatttgaaaccctatgaatgcaatggatgtgagaaggcctttaggttttattcacagcttattcagcatcagataattcatactggtatgaaaccctatgaatgtaagcaatgcgggaaggcttttagacgtcattctcaccttacagaacatcagaaaattcatgttggcttgaaaccctttgaatgtaaggaatgtggggaaacgtttagattatatcgacatatgtgtctgcatcagaaaattcatcatggtgtgaaaccctacaaatgtaaagaatgtggaaaggcttttggtcatcgttcaagtctttaccaacataagaaaattcattctggtgagaaaccatataaatgtgaacaatgtgaaaaggcctttgttcgcagctatctacttgttgaacatcaaagaagtcatactggtgagaaacctcatgaatgcatggaatgtggaaaggcttttggtaagggctcaagccttcttaaacataagagaattcatagtagtgagaaactctatgattgtaaggattgtggaaaggccttttgtagaggctctcaacttacacagcatcagagaattcatactggtgagaagccacatgaatgtaaagaatgtgggaagacttttaagcttcattcatatcttattcaacatcagataattcatactgatttgaagccatatgaatgtaagcaatgtgggaaagccttcagtcgtgttggagaccttaagacacatcaatcaattcatgctggggagaaaccctatgaatgtaaggaatgtggaaaaacctttagacttaattctcaactaatttatcatcagacaattcatactggtttgaaaccctatgtatgtaaagaatgtaagaaggcctttcgttctatctcaggtctttctcaacataagagaattcatactggtgaaaaaccctatgaatgtaaagaatgtgataaggcctttaatcgcagtgatcgacttactcaacatgagacaattcatactggtgtgaaaccacagaaatgcaaagaatgtggtaaggcctttagtcattgctatcaacttagtcaacatcaaagatttcaccatggtgagagactcttaatg

SEQ ID NO: 5649 - DNA, 5445 bp, Homo sapiens
  source 1..5445: mol_type = genomic DNA
atgatggatagtgagaataaacccgaaaatgatgaggatgaaaagataaacaaagaagcacaagacttgacaaagctttcatcccataatgaagacggtgggcctgtatctgatgtgatagcaagtttccctgagaattctatgggcaaaagaggtttttcagaatcatcgaactctgatagtgttgttataggagaagacagaaataaacatgcttccaaacgcaggaaattagatgaggcagagccccttaaatctggaaagcaaggtatttgtagattagaaacttctgagagctcagtcacagaagggggtattgcattagatgaaacagggaaggagacctttctgagtgactgcacagttggaggcacatgtctcccaaatgccctctccccttcttgcaattttagcactattgatgttgtttctctgaaaacagacactgaaaaaacatctgctcaggaaatggtttcccttgatctggaaagagaatctcctttccccccgaaagaaattagtgttagttgtaccattgggaatgtagatacagttctcaaatgcagcatctgtgggcatttgttttcttcttgctctgacttggaaaaacatgctgagtctcacatgcagcagcctaaggaacatacctgttgtcactgcagccacaaagcagagagcagctcagcactacatatgcatatcaaacaagcacatgggccacagaaggtcttttcctgtgatctttgtggttttcagtgttcagaagaaaacttgttgaatgcacattatcttggcaaaacacatctccgtcgtcagaatctggctgctcgtggaggatttgtacagatcttaacaaaacaaccttttcctaaaaaatcacgtacaatggcaacaaaaaatgttcactcaaaaccaagaacttctaaatcaatagcaaagaatagtgattcaaaaggattacgaaatgtgggaagcacgtttaaagatttcagaggaagtatttctaaacaaagtggtagtagcagtgagcttcttgttgaaatgatgccttccagaaatactttgtcacaggaagtagagattgttgaagaacatgttacttcccttggtctagctcagaatcctgaaaaccagagtagaaagctagacaccttagtaacctcagagggtctcttagagaaattggaatctacaaaaaatacccttcaggcagcacacggtaacagtgtaacctcgaggccaagacctgagcgaaatattctcgtgttgggtaatagctttcgtcgacgaagcagcactttcaccttgaagggccaggcaaagaaaaggtttaatcttttaggaattaaaagaggtacaagtgaaactcagaggatgtatatgaaacacttgagaacacagatgaaaacacacgatgcagaatcagtgctgaaacacctggaagcgtgcagcagtgtgcagagagtgtgtgtgactacctcagaaacccaggaggcagagcagggccaggggagtgcccgtcctccggactccgggctgcattccctgacagtgaagccagcttctggctctcagacgttgtgtgcttgtacagactgtgggcaagtagctacaaataggacagatttggaaatccatgtgaaaaggtgccatgccagagagatgaaattttactgccgtacttgtgacttctctagtatgtcaagaagggacttagatgaacatttgcacagtaaccagcatcagcaaactgcttctgtcctgagttgtcagtgttgttcatttatatccttggatgaaataaatcttagagaccacatgaaggaaaagcacaatatgcattttctttgcaccccttgtaatctgttctttttgtctgaaaaagatgtggaagaacacaaagccaccgagaagcatattaattcattggttcaaccaaagactttgcaatcatctaacagtgatttggttttacagactttacctttgagtactttagaatcagaaaacgcaaaagagtctatggatgactcaggaaaagcatctcaggaagaacctctgaagtccagggtaagccatggtaatgaagtgaggcattccagtaagcctcagtttcagtgtaagaagtgtttttataaaacaagatcttctactgttctcacgagacatataaagcttcggcatggtcaagactatcattttctttgtaaagcttgtaatctttattcattgagcaaagaaggaatggagaaacacattaaaagaagcaagcatcttgaaaatgctaagaaaaataatattggcttaagctttgaagaatgtattgaaagggtatgtataggtgcaaatgataaaaaagaagagtttgatgtttccggaaatggaaggattgaaggccatataggtgtgcaattacaagagcattcctatcttgagaagggcatgctggcgtctgaggaactgtcacagtctggtggtagcaccaaagatgatgaattagcttcaaccactactccaaagagagggagacctaaaggtaacatctcacggacgtgttcacactgtggccttttggcctctagtattacaaacttgactgttcacattagacgaaaacacagtcaccagtatagttatttatgcaaagtgtgtaagtattacactgtaactaagggagatatggaacgtcattgtgccaccaagaaacataaaggacgggtagaaatagaagcaagtggaaaacacagttcagatatcattgttggccctgaagggggtagccttgaagctggtaaaaagaatgctggctcagcagtgaccatgtcagatgaacatgctaacaaaccagctgagtcacccacctccgttttagagaagccagatcgtggaaactcaattgaagctgaagttgaaaatgtatttcattctctagatggagaagttaacagccatcttcttgataaaaaggagcaaatatcttcagagccagaggacttcgcccagccgggggatgtgtactcccagagagatgttacaggcacaggtgagaataagtgtttgcactgtgagtttagtgctcactcctctgcttctctagagctgcatgtaaaacggaaacatacaaaagagtttgagttttattgcatggcatgcgattactacgcggtgactcgtcgcgagatgaccaggcatgcagcaacagagaagcacaaaatgaaaaggcagtcttatctcaactctgctaatgtagaagctggttctgcagacatgtccaaaaacatcattatgcctgaagaagagcatcaacaaaattctgaggaatttcaaataatttcaggtcaaccatctgatactcttaaatctagaaatgctgcagattgctctattttaaatgagaatactaatttagatatgtctaaagtgctctgcgctgctgactctgtagaagttgagactgaagaagaatctaatttcaatgaagaccattccttttgtgagactttccaacaggctcctgtcaaggataaagttaggaaacctgaggagatgatgtcacttactatgtcctcaaactatggctccccaagcagatttcaaaatgaaaattcaggaagctctgccttaaattgtgagacagcaaagaaaaaccatgagatatcgaatgatgcaggtgagctgcgtgtccattgtgagggtgaaggaggaaacgcaggagacggtggaggtgttgtcccccacagacacctgtgccctgtgacgctcgatggggagcgctcggctgaaagccctgtgctcgttgtgacaagaataaccagagaacagggaaatctggagagcgggggtcagaacagagttgcacgtgggcatggtttggaagacttgaaaggtgtccaagaagatcccgttctggggaataaggaaattctgatgaattcacaacatgaaacagaatttattttggaggaggatggcccagcttctgatagcacagttgaaagtagtgatgtctatgaaactataattagtattgatgataaagggcaggccatgtacagttttggtcgatttgactcctccataataagaataaagaaccctgaagatggtgagttgatagaccagtctgaagagggcttgatagcaacgggagtgagaattagtgagctgcccttgaaagactgtgctcaaggtgtgaaaaagaagaaatctgagggcagttccattggtgagtctacacgaattcgctgtgatgattgtggcttcttagcagatggactgagtggactgaatgttcacatagccatgaagcatcctacaaaagagaagcacttccattgtttactctgtggaaagtcgttctataccgaaagcaaccttcaccagcatctggctagtgccggccacatgagaaatgagcaggccagtgtggaggagcttccggagggaggggccacctttaaatgtgtcaagtgcacagagccctttgattctgaacagaatttatttttacatattaaaggacagcatgaggaattgctgcgggaggtgaataagtatatagtggaagacactgagcaaatcaaccgcgagagggaggaaaaccagggaaacgtctgcaagtattgtgggaagatgtgtcgaagcagcaactcgatggccttcctggcacacattcgcactcacacaggatcaaaaccattcaagtgcaagatatgccattttgcaacagctcagcttggagatgccagaaaccatgtgaaaaggcaccttgggatgagggaatacaagtgtcatgtctgtggggttgcttttgtaatgaagaagcacttaaatactcatctactaggcaagcatggagttggcaccccaaaagaaaggaaatttacatgccacttatgtgatagaagtttcacagagaagtgggccctgaacaaccacatgaaactccacacgggagaaaagccgtttaaatgtacctggcccacgtgccattactcattcctcacagcctccgcaatgaaagaccactacaggacgcacacaggcgagaagtcgtttctgtgtgacctctgcggctttgccggcgggacccgccacgccctcaccaagcatcgcagacagcacacaggagaaaaacctttcaagtgcgatgagtgtaactttgcctccacaactcagtcccatttgactcggcataaacgtgtccacactggagaaaagccctacagatgcccctggtgtgactacaggtcaaactgtgctgaaaatatccgcaaacacattctgcatactggcaaacatgaaggagtcaagatgtacaactgtcccaagtgtgactacgggaccaacgtcccggtggagttccggaaccatttgaaggaacagcatcctgacatcgaaaacccggacctcgcttacctgcatgctggtaagggacagaaactg

SEQ ID NO: 5650 - DNA, 4980 bp, Homo sapiens
  source 1..4980: mol_type = genomic DNA
atgatggatagtgagaataaacccgaaaatgatgaggatgaaaagataaacaaagaagcacaagacttgacaaagctttcatcccataatgaagacggtgggcctgtatctgatgtgatagcaagtttccctgagaattctatgggcaaaagaggtttttcagaatcatcgaactctgatagtgttgttataggagaagacagaaataaacatgcttccaaacgcaggaaattagatgaggcagagccccttaaatctggaaagcaaggtatttgtagattagaaacttctgagagctcagtcacagaagggggtattgcattagatgaaacagggaaggagacctttctgagtgactgcacagttggaggcacatgtctcccaaatgccctctccccttcttgcaattttagcactattgatgttgtttctctgaaaacagacactgaaaaaacatctgctcaggaaatggtttcccttgatctggaaagagaatctcctttccccccgaaagaaattagtgttagttgtaccattgggaatgtagatacagttctcaaatgcagcatctgtgggcatttgttttcttcttgctctgacttggaaaaacatgctgagtctcacatgcagcagcctaaggaacatacctgttgtcactgcagccacaaagcagagagcagctcagcactacatatgcatatcaaacaagcacatgggccacagaaggtcttttcctgtgatctttgtggttttcagtgttcagaagaaaacttgttgaatgcacattatcttggcaaaacacatctccgtcgtcagaatctggctgctcgtggaggatttgtacagatcttaacaaaacaaccttttcctaaaaaatcacgtacaatggcaacaaaaaatgttcactcaaaaccaagaacttctaaatcaatagcaaagaatagtgattcaaaaggattacgaaatgtgggaagcacgtttaaagatttcagaggaagtatttctaaacaaagtggtagtagcagtgagcttcttgttgaaatgatgccttccagaaatactttgtcacaggaagtagagattgttgaagaacatgttacttcccttggtctagctcagaatcctgaaaaccagagtagaaagctagacaccttagtaacctcagagggtctcttagagaaattggaatctacaaaaaatacccttcaggcagcacacggtaacagtgtaacctcgaggccaagacctgagcgaaatattctcgtgttgggtaatagctttcgtcgacgaagcagcactttcaccttgaagggccaggcaaagaaaaggtttaatcttttaggaattaaaagaggtacaagtgaaactcagaggatgtatatgaaacacttgagaacacagatgaaaacacacgatgcagaatcagtgctgaaacacctggaagcgtgcagcagtgtgcagagagtgtgtgtgactacctcagaaacccaggaggcagagcagggccaggggagtgcccgtcctccggactccgggctgcattccctgacagtgaagccagcttctggctctcagacgttgtgtgcttgtacagactgtgggcaagtagctacaaataggacagatttggaaatccatgtgaaaaggtgccatgccagagagatgaaattttactgccgtacttgtgacttctctagtatgtcaagaagggacttagatgaacatttgcacagtaaccagcatcagcaaactgcttctgtcctgagttgtcagtgttgttcatttatatccttggatgaaataaatcttagagaccacatgaaggaaaagcacaatatgcattttctttgcaccccttgtaatctgttctttttgtctgaaaaagatgtggaagaacacaaagccaccgagaagcatattaattcattggttcaaccaaagactttgcaatcatctaacagtgatttggttttacagactttacctttgagtactttagaatcagaaaacgcaaaagagtctatggatgactcaggaaaagcatctcaggaagaacctctgaagtccagggtaagccatggtaatgaagtgaggcattccagtaagcctcagtttcagtgtaagaagtgtttttataaaacaagatcttctactgttctcacgagacatataaagcttcggcatggtcaagactatcattttctttgtaaagcttgtaatctttattcattgagcaaagaaggaatggagaaacacattaaaagaagcaagcatcttgaaaatgctaagaaaaataatattggcttaagctttgaagaatgtattgaaagggtatgtataggtgcaaatgataaaaaagaagagtttgatgtttccggaaatggaaggattgaaggccatataggtgtgcaattacaagagcattcctatcttgagaagggcatgctggcgtctgaggaactgtcacagtctggtggtagcaccaaagatgatgaattagcttcaaccactactccaaagagagggagacctaaaggtaacatctcacggacgtgttcacactgtggccttttggcctctagtattacaaacttgactgttcacattagacgaaaacacagtcaccagtatagttatttatgcaaagtgtgtaagtattacactgtaactaagggagatatggaacgtcattgtgccaccaagaaacataaaggacgggtagaaatagaagcaagtggaaaacacagttcagatatcattgttggccctgaagggggtagccttgaagctggtaaaaagaatgctggctcagcagtgaccatgtcagatgaacatgctaacaaaccagctgagtcacccacctccgttttagagaagccagatcgtggaaactcaattgaagctgaagttgaaaatgtatttcattctctagatggagaagttaacagccatcttcttgataaaaaggagcaaatatcttcagagccagaggacttcgcccagccgggggatgtgtactcccagagagatgttacaggcacaggtgagaataagtgtttgcactgtgagtttagtgctcactcctctgcttctctagagctgcatgtaaaacggaaacatacaaaagagtttgagttttattgcatggcatgcgattactacgcggtgactcgtcgcgagatgaccaggcatgcagcaacagagaagcacaaaatgaaaaggcagtcttatctcaactctgctaatgtagaagctggttctgcagacatgtccaaaaacatcattatgcctgaagaagagcatcaacaaaattctgaggaatttcaaataatttcaggtcaaccatctgatactcttaaatctagaaatgctgcagattgctctattttaaatgagaatactaatttagatatgtctaaagtgctctgcgctgctgactctgtagaagttgagactgaagaagaatctaatttcaatgaagaccattccttttgtgagactttccaacaggctcctgtcaaggataaagttaggaaacctgaggagatgatgtcacttactatgtcctcaaactatggctccccaagcagatttcaaaatgaaaattcaggaagctctgccttaaattgtgagacagcaaagaaaaaccatgagatatcgaatgatgcaggtgagctgcgtgtccattgtgagggtgaaggaggaaacgcaggagacggtggaggtgttgtcccccacagacacctgtgccctgtgacgctcgatggggagcgctcggctgaaagccctgtgctcgttgtgacaagaataaccagagaacagggaaatctggagagcgggggtcagaacagagttgcacgtgggcatggtttggaagacttgaaaggtgtccaagaagatcccgttctggggaataaggaaattctgatgaattcacaacatgaaacagaatttattttggaggaggatggcccagcttctgatagcacagttgaaagtagtgatgtctatgaaactataattagtattgatgataaagggcaggccatgtacagttttggtcgatttgactcctccataataagaataaagaaccctgaagatggtgagttgatagaccagtctgaagagggcttgatagcaacgggagtgagaattagtgagctgcccttgaaagactgtgctcaaggtgtgaaaaagaagaaatctgagggcagttccattggtgagtctacacgaattcgctgtgatgattgtggcttcttagcagatggactgagtggactgaatgttcacatagccatgaagcatcctacaaaagagaagcacttccattgtttactctgtggaaagtcgttctataccgaaagcaaccttcaccagcatctggctagtgccggccacatgagaaatgagcaggccagtgtggaggagcttccggagggaggggccacctttaaatgtgtcaagtgcacagagccctttgattctgaacagaatttatttttacatattaaaggacagcatgaggaattgctgcgggaggtgaataagtatatagtggaagacactgagcaaatcaaccgcgagagggaggaaaaccagggaaacgtctgcaagtattgtgggaagatgtgtcgaagcagcaactcgatggccttcctggcacacattcgcactcacacaggatcaaaaccattcaagtgcaagatatgccattttgcaacagctcagcttggagatgccagaaaccatgtgaaaaggcaccttgggatgagggaatacaagtgtcatgtctgtggggttgcttttgtaatgaagaagcacttaaatactcatctactaggcaagcatggagttggcaccccaaaagaaagagtaaaggttgcatatcgaaagatcgggacgttgccaggaatacagaacaacaggaacgcgtcgagtgcctctgaagcccaaagtctttgtgagcacttttca

SEQ ID NO: 5651 - DNA, 6744 bp, Homo sapiens
  source 1..6744: mol_type = genomic DNA
atgatggatagtgagaataaacccgaaaatgatgaggatgaaaagataaacaaagaagcacaagacttgacaaagctttcatcccataatgaagacggtgggcctgtatctgatgtgatagcaagtttccctgagaattctatgggcaaaagaggtttttcagaatcatcgaactctgatagtgttgttataggagaagacagaaataaacatgcttccaaacgcaggaaattagatgaggcagagccccttaaatctggaaagcaaggtatttgtagattagaaacttctgagagctcagtcacagaagggggtattgcattagatgaaacagggaaggagacctttctgagtgactgcacagttggaggcacatgtctcccaaatgccctctccccttcttgcaattttagcactattgatgttgtttctctgaaaacagacactgaaaaaacatctgctcaggaaatggtttcccttgatctggaaagagaatctcctttccccccgaaagaaattagtgttagttgtaccattgggaatgtagatacagttctcaaatgcagcatctgtgggcatttgttttcttcttgctctgacttggaaaaacatgctgagtctcacatgcagcagcctaaggaacatacctgttgtcactgcagccacaaagcagagagcagctcagcactacatatgcatatcaaacaagcacatgggccacagaaggtcttttcctgtgatctttgtggttttcagtgttcagaagaaaacttgttgaatgcacattatcttggcaaaacacatctccgtcgtcagaatctggctgctcgtggaggatttgtacagatcttaacaaaacaaccttttcctaaaaaatcacgtacaatggcaacaaaaaatgttcactcaaaaccaagaacttctaaatcaatagcaaagaatagtgattcaaaaggattacgaaatgtgggaagcacgtttaaagatttcagaggaagtatttctaaacaaagtggtagtagcagtgagcttcttgttgaaatgatgccttccagaaatactttgtcacaggaagtagagattgttgaagaacatgttacttcccttggtctagctcagaatcctgaaaaccagagtagaaagctagacaccttagtaacctcagagggtctcttagagaaattggaatctacaaaaaatacccttcaggcagcacacggtaacagtgtaacctcgaggccaagacctgagcgaaatattctcgtgttgggtaatagctttcgtcgacgaagcagcactttcaccttgaagggccaggcaaagaaaaggtttaatcttttaggaattaaaagaggtacaagtgaaactcagaggatgtatatgaaacacttgagaacacagatgaaaacacacgatgcagaatcagtgctgaaacacctggaagcgtgcagcagtgtgcagagagtgtgtgtgactacctcagaaacccaggaggcagagcagggccaggggagtgcccgtcctccggactccgggctgcattccctgacagtgaagccagcttctggctctcagacgttgtgtgcttgtacagactgtgggcaagtagctacaaataggacagatttggaaatccatgtgaaaaggtgccatgccagagagatgaaattttactgccgtacttgtgacttctctagtatgtcaagaagggacttagatgaacatttgcacagtaaccagcatcagcaaactgcttctgtcctgagttgtcagtgttgttcatttatatccttggatgaaataaatcttagagaccacatgaaggaaaagcacaatatgcattttctttgcaccccttgtaatctgttctttttgtctgaaaaagatgtggaagaacacaaagccaccgagaagcatattaattcattggttcaaccaaagactttgcaatcatctaacagtgatttggttttacagactttacctttgagtactttagaatcagaaaacgcaaaagagtctatggatgactcaggaaaagcatctcaggaagaacctctgaagtccagggtaagccatggtaatgaagtgaggcattccagtaagcctcagtttcagtgtaagaagtgtttttataaaacaagatcttctactgttctcacgagacatataaagcttcggcatggtcaagactatcattttctttgtaaagcttgtaatctttattcattgagcaaagaaggaatggagaaacacattaaaagaagcaagcatcttgaaaatgctaagaaaaataatattggcttaagctttgaagaatgtattgaaagggtatgtataggtgcaaatgataaaaaagaagagtttgatgtttccggaaatggaaggattgaaggccatataggtgtgcaattacaagagcattcctatcttgagaagggcatgctggcgtctgaggaactgtcacagtctggtggtagcaccaaagatgatgaattagcttcaaccactactccaaagagagggagacctaaaggtaacatctcacggacgtgttcacactgtggccttttggcctctagtattacaaacttgactgttcacattagacgaaaacacagtcaccagtatagttatttatgcaaagtgtgtaagtattacactgtaactaagggagatatggaacgtcattgtgccaccaagaaacataaaggacgggtagaaatagaagcaagtggaaaacacagttcagatatcattgttggccctgaagggggtagccttgaagctggtaaaaagaatgctggctcagcagtgaccatgtcagatgaacatgctaacaaaccagctgagtcacccacctccgttttagagaagccagatcgtggaaactcaattgaagctgaagttgaaaatgtatttcattctctagatggagaagttaacagccatcttcttgataaaaaggagcaaatatcttcagagccagaggacttcgcccagccgggggatgtgtactcccagagagatgttacaggcacaggtgagaataagtgtttgcactgtgagtttagtgctcactcctctgcttctctagagctgcatgtaaaacggaaacatacaaaagagtttgagttttattgcatggcatgcgattactacgcggtgactcgtcgcgagatgaccaggcatgcagcaacagagaagcacaaaatgaaaaggcagtcttatctcaactctgctaatgtagaagctggttctgcagacatgtccaaaaacatcattatgcctgaagaagagcatcaacaaaattctgaggaatttcaaataatttcaggtcaaccatctgatactcttaaatctagaaatgctgcagattgctctattttaaatgagaatactaatttagatatgtctaaagtgctctgcgctgctgactctgtagaagttgagactgaagaagaatctaatttcaatgaagaccattccttttgtgagactttccaacaggctcctgtcaaggataaagttaggaaacctgaggagatgatgtcacttactatgtcctcaaactatggctccccaagcagatttcaaaatgaaaattcaggaagctctgccttaaattgtgagacagcaaagaaaaaccatgagatatcgaatgatgcaggtgagctgcgtgtccattgtgagggtgaaggaggaaacgcaggagacggtggaggtgttgtcccccacagacacctgtgccctgtgacgctcgatggggagcgctcggctgaaagccctgtgctcgttgtgacaagaataaccagagaacagggaaatctggagagcgggggtcagaacagagttgcacgtgggcatggtttggaagacttgaaaggtgtccaagaagatcccgttctggggaataaggaaattctgatgaattcacaacatgaaacagaatttattttggaggaggatggcccagcttctgatagcacagttgaaagtagtgatgtctatgaaactataattagtattgatgataaagggcaggccatgtacagttttggtcgatttgactcctccataataagaataaagaaccctgaagatggtgagttgatagaccagtctgaagagggcttgatagcaacgggagtgagaattagtgagctgcccttgaaagactgtgctcaaggtgtgaaaaagaagaaatctgagggcagttccattggtgagtctacacgaattcgctgtgatgattgtggcttcttagcagatggactgagtggactgaatgttcacatagccatgaagcatcctacaaaagagaagcacttccattgtttactctgtggaaagtcgttctataccgaaagcaaccttcaccagcatctggctagtgccggccacatgagaaatgagcaggccagtgtggaggagcttccggagggaggggccacctttaaatgtgtcaagtgcacagagccctttgattctgaacagaatttatttttacatattaaaggacagcatgaggaattgctgcgggaggtgaataagtatatagtggaagacactgagcaaatcaaccgcgagagggaggaaaaccagggaaacgtctgcaagtattgtgggaagatgtgtcgaagcagcaactcgatggccttcctggcacacattcgcactcacacaggatcaaaaccattcaagtgcaagatatgccattttgcaacagctcagcttggagatgccagaaaccatgtgaaaaggcaccttgggatgagggaatacaagtgtcatgtctgtggggttgcttttgtaatgaagaagcacttaaatactcatctactaggcaagcatggagttggcaccccaaaagaaaggaaatttacatgccacttatgtgatagaagtttcacagagaagtgggccctgaacaaccacatgaaactccacacgggagaaaagccgtttaaatgtacctggcccacgtgccattactcattcctcacagcctccgcaatgaaagaccactacaggacgcacacaggcgagaagtcgtttctgtgtgacctctgcggctttgccggcgggacccgccacgccctcaccaagcatcgcagacagcacacaggagaaaaacctttcaagtgcgatgagtgtaactttgcctccacaactcagtcccatttgactcggcataaacgtgtccacactggagaaaagccctacagatgcccctggtgtgactacaggtcaaactgtgctgaaaatatccgcaaacacattctgcatactggcaaacatgaaggagtcaagatgtacaactgtcccaagtgtgactacgggaccaacgtcccggtggagttccggaaccatttgaaggaacagcatcctgacatcgaaaacccggacctcgcttacctgcatgctggcattgtttccaagtcgtacgagtgccgtctaaagggacaaggagccaccttcgtggagacagacagccccttcaccgcggcggccttggcagaagagcccctcgtcaaggagaagcccctcagaagcagcaggaggccagcgccgccccctgagcaggtgcagcaggtcatcatcttccagggctacgacggggagtttgccctggacccctcggtggaggagacggccgccgccacgctgcagacgctggccatggccggccaggtggcccgggtggtgcatatcacggaggatggccaggtcatcgccacgagtcagagcggggcacatgtaggcagcgtggtgcccggacccatcctccccgagcagctggctgatggagccacccaggtggtcgtcgtggggggctccatggaaggccacggcatggatgagtccctcagtccaggtggcgctgtgatacaacaggtgaccaagcaggagattttaaacctctcggaggctggagtcgctccccccgaggcatcctcagccctggatgcattgctctgtgcggtcactgaattaggggaggtggagggcagggctgggctcgaggagcaaggcaggcccggcgccaaagacgtgctgatccagctgcccgggcaggaggtctcccatgtggctgccgaccccgaggcccccgagatccagatgttcccacaggcccaggagagcccggccgccgtggaggtgctcacccaggtggtccatccctcagcagccatggcctctcaggagcgggcacaggtggccttcaagaagatggtccagggcgtcctccagtttgctgtgtgtgacacggccgcggccggccagttggtcaaggacggtgtcacccaggtggtggtgagcgaagagggtgccgtccacatggtcgccggggagggtgcccagatcatcatgcaggaggcgcagggcgagcacatggatctggtggagtccgacggggagatctcgcagatcatcgtgacggaggagctggtccaggccatggtgcaggagtccagtggcggcttctccgagggcaccacgcactacatcctgacagagctgcccccaggggtgcaggacgagccgggcctgtactcccacaccgtgctggagactgcggactcgcaggaactcctgcaggccggggccacgctaggcacagaggccggggccccaagcagggcagagcagctggccagcgtggtcatctacacccaggagggctcctcggccgcggcggcaattcagagccaaagagaaagcagcgaactccaggaagca

SEQ ID NO: 5652 - DNA, 1902 bp, Homo sapiens
  source 1..1902: mol_type = genomic DNA
atgaccgaagaagcatgccgaacacggagtcagaaacgagcgcttgaacgggacccaacagaggacgatgtggagagcaagaaaataaaaatggagagaggattgttggcttcagatttaaacactgacggagacatgagggtgacacctgagccgggagcaggtccaacccaaggattgctgagggcaacagaggccacggccatggccatgggcagaggcgaagggctggtgggcgatgggcccgtggacatgcgcacctcacacagtgacatgaagtccgagaggagacccccctcacctgacgtgattgtgctctccgacaacgagcagccctcgagcccgagagtgaatgggctgaccacggtggccttgaaggagactagcaccgaggccctcatgaaaagcagtcctgaagaacgagaaaggatgatcaagcagctgaaggaagaattgaggttagaagaagcaaaactcgtgttgttgaaaaagttgcggcagagtcaaatacaaaaggaagccaccgcccagaagcccacaggttctgttgggagcaccgtgaccacccctcccccgcttgttcggggcactcagaacattcctgctggcaagccatcactccagacctcttcagctcggatgcccggcagtgtcatacccccgcccctggtccgaggtgggcagcaggcgtcctcgaagctggggccacaggcgagctcacaggtcgtcatgcccccactcgtcaggggggctcagcaaatccacagcattaggcaacattccagcacagggccaccgcccctcctcctggccccccgggcgtcggtgcccagtgtgcagattcagggacagaggatcatccagcagggcctcatccgcgtcgccaatgttcccaacaccagcctgctcgtcaacatcccacagcccaccccagcatcactgaaggggacaacagccacctccgctcaggccaactccacccccactagtgtggcctctgtggtcacctctgccgagtctccagcaagccgacaggcggccgccaagctggcgctgcgcaaacagctggagaagacgctactcgagatccccccacccaagcccccagccccagagatgaacttcctgcccagcgccgccaacaacgagttcatctacctggtcggcctggaggaggtggtgcagaacctactggagacacaagcaggcaggatgtcggccgccactgtgctgtcccgggagccctacatgtgtgcacagtgcaagacggacttcacgtgccgctggcgggaggagaagagcggcgccatcatgtgtgagaactgcatgacaaccaaccagaagaaggcgctcaaggtggagcacaccagccggctgaaggccgcctttgtgaaggcgctgcagcaggaacaggagattgagcagcggctcctgcagcagggcacggcccctgcacaggccaaggccgagcccaccgctgccccacaccccgtgctgaagcaggtcataaaaccccggcgtaagttggcgttccgctcaggagaggcccgcgactggagtaacggggctgtgctacaggcctccagccagctgtcccggggttcggccacgacgccccgaggtgtcctgcacacgttcagtccgtcacccaaactgcagaactcagcctcggccacagccctggtcagcaggaccggcagacattctgagagaaccgtgagcgccggcaagggcagcgccacctccaactggaagaagacgcccctcagcacaggcgggacccttgcgtttgtcagcccaagcctggcggtgcacaagagctcctcggccgtggaccgccagcgagagtacctcctggacatgatcccaccccgctccatcccccagtcagccacgtggaaa

SEQ ID NO: 5653 - DNA, 1899 bp, Homo sapiens
  source 1..1899: mol_type = genomic DNA
atgaccgaagaagcatgccgaacacggagtcagaaacgagcgcttgaacgggacccaacagaggacgatgtggagagcaagaaaataaaaatggagagaggattgttggcttcagatttaaacactgacggagacatgagggtgacacctgagccgggagcaggtccaacccaaggattgctgagggcaacagaggccacggccatggccatgggcagaggcgaagggctggtgggcgatgggcccgtggacatgcgcacctcacacagtgacatgaagtccgagaggagacccccctcacctgacgtgattgtgctctccgacaacgagcagccctcgagcccgagagtgaatgggctgaccacggtggccttgaaggagactagcaccgaggccctcatgaaaagcagtcctgaagaacgagaaaggatgatcaagcagctgaaggaagaattgaggttagaagaagcaaaactcgtgttgttgaaaaagttgcggcagagtcaaatacaaaaggaagccaccgcccagaagcccacaggttctgttgggagcaccgtgaccacccctcccccgcttgttcggggcactcagaacattcctgctggcaagccatcactccagacctcttcagctcggatgcccggcagtgtcatacccccgcccctggtccgaggtgggcagcaggcgtcctcgaagctggggccacaggcgagctcacaggtcgtcatgcccccactcgtcaggggggctcagcaaatccacagcattaggcaacattccagcacagggccaccgcccctcctcctggccccccgggcgtcggtgcccagtgtgcagattcagggacagaggatcatccagcagggcctcatccgcgtcgccaatgttcccaacaccagcctgctcgtcaacatcccacagcccaccccagcatcactgaaggggacaacagccacctccgctcaggccaactccacccccactagtgtggcctctgtggtcacctctgccgagtctccagcaagccgacaggcggccgccaagctggcgctgcgcaaacagctggagaagacgctactcgagatccccccacccaagcccccagccccagagatgaacttcctgcccagcgccgccaacaacgagttcatctacctggtcggcctggaggaggtggtgcagaacctactggagacacaaggcaggatgtcggccgccactgtgctgtcccgggagccctacatgtgtgcacagtgcaagacggacttcacgtgccgctggcgggaggagaagagcggcgccatcatgtgtgagaactgcatgacaaccaaccagaagaaggcgctcaaggtggagcacaccagccggctgaaggccgcctttgtgaaggcgctgcagcaggaacaggagattgagcagcggctcctgcagcagggcacggcccctgcacaggccaaggccgagcccaccgctgccccacaccccgtgctgaagcaggtcataaaaccccggcgtaagttggcgttccgctcaggagaggcccgcgactggagtaacggggctgtgctacaggcctccagccagctgtcccggggttcggccacgacgccccgaggtgtcctgcacacgttcagtccgtcacccaaactgcagaactcagcctcggccacagccctggtcagcaggaccggcagacattctgagagaaccgtgagcgccggcaagggcagcgccacctccaactggaagaagacgcccctcagcacaggcgggacccttgcgtttgtcagcccaagcctggcggtgcacaagagctcctcggccgtggaccgccagcgagagtacctcctggacatgatcccaccccgctccatcccccagtcagccacgtggaaa

SEQ ID NO: 5654 - DNA, 3876 bp, Homo sapiens
  source 1..3876: mol_type = genomic DNA
atggacgcatcatatgatggtactgaggtaactgtcgtgatggaggaaattgaggaagcctattgttacacctctcctgggccacccaagaagaagaaaaagtataaaatacatggagaaaagacaaagaaacccaggtctgcttaccttctgtactattacgacatctacctgaaagtgcagcaggagctcccccacctccctcagtctgagatcaataagaagattagtgagagttggaggcttctcagcgtggccgagaggagttactacttggagaaagccaaactagagaaggaaggtttggatcctaactctaagctctctgcactgactgctgtggttccggacatcccaggtttccgcaagatcctcccacgctcagattatatcatcatccccaagagcagcctgcaggaggaccggagctgccctcagctagagctatgtgtggctcagaaccagatgtccccgaaaggacctcctcttgtgtccaacactgccccggagacagtgcccagccatgcaggcatggcagagcagtgcctggctgtggaggccctggctgaggaggtgggagcccttacccagtcaggtgctgtacaggagattgccacctcagagatcctcagccaggatgtgctcctagaggacgcttccctagaagtaggggagagccaccaaccttaccagacaagcctggtaattgaagagaccttggtgaatggctcaccagacctccccactggaagcctggctgtgccccacccccaggttggggagagtgtatcagtggtaacagtcatgagggattccagtgagagtagctcctctgcaccagccacacagttcatcatgttgcctctgcctgcctactcggttgtggagaaccccacctccatcaaactgaccactacatatacccgccggggccatgggacatgcaccagcccagggtgctcctttacatatgtcaccaggcacaagccacctaagtgccctacctgtggtaacttcctaggagggaagtggatcccaaaggaaaagccagccaaagtaaaagtggaattggcttctggcgtctcttccaaaggctctgtggtgaaaagaaatcagcaacctgtcaccactgagcaaaattcctctaaggaaaatgcctccaaactgactctggagaattcggaagctgtaagccagctcctgaacgtagctcctcccagagaagtaggtgaggagagtgagtgggaggaagtgatcatctccgatgcccatgttttggttaaggaagctcccgggaattgtggtacagcagtcactaagacgccagtcgtcaaaagtggtgtgcagcctgaggtcactctggggacaactgacaatgacagtcctggagcagacgtaccaacaccatccgaggggacaagtacctccagtccactccctgctcctaaaaaacctacaggagctgacctgcttacccctgggtccagagctccagagcttaaaggcagagcacggggcaagccctcattactggctgcagcaagacccatgagagcaattttgccagccccagttaacgtggggcgaggcagcagcatgggactgcccagggccaggcaggccttttccctgagtgataagactccctctgtgaggacttgtggtctgaagccaagcacactgaagcagctgggccagcccattcaacagccatctggccctggtgaggtgaagctaccaagtggcccatccaacaggacttctcaggtgaaagttgtggaggtcaagcccgatatgtttcctccatataagtacagctgcactgtcacattggatttgggcctggctacatcaagaggccggggaaagtgcaagaatccctcttgtagctatgtctacaccaacaggcacaaacctcgaatttgtcccagctgtggtgttaaccttgccaaagaccggactgagaaaaccaccaaggctatcgaggtgagctcaccactcccagatgtactgaatgccacagagcccctgagcacagcccagagggagatccagcgccagtccacactgcagctgctgcgcaaagtcctgcagattcctgagaatgagtcagagctggctgaggtcttcgccttgattcatgaactcaacagctctcgacttatcttgtccaacgtgagtgaggagacagtcaccatcgagcaaacctcttggtcgaattattatgagtctccgtccacgcagtgccttctctgtagcagcccattattcaaagggggacaaaactccctggctgggccccaggagtgctggctgctgacagccagccgtctgcagacagtgactgcccaggtgaagatgtgtctgaacccccattgtctggccctgcacagcttcatagacatctacacaggtctctttaatgtggggaacaagctgctggtaagcctggacttgctttttgcaatcagaaatcagatcaagctcggagaggaccccagagtgtccatcaatgttgttctgaagtcggtgcaggagcagacagagaagactctgacctcggaggagctgagccagctgcaggagctgctgtgcaatggctattgggcctttgagtgcctcactgtccgagactacaatgacatgatctgtggcatctgtggtgtggcccccaaagtggaaatggctcagaggagtgaagagaatgtgctagcactgaagagcgtggagttcacctggcctgaattcctgggctctaatgaggtaaatgtggaggacttttgggccacgatggagacagaggtgattgagcaggtggcatttcctgccagcatccctatcaccaaatttgatgcgtctgttattgcccccttcttcccaccactcatgagaggagctgtggtcgtcaacactgagaaagacaaaaacctggatgtgcagccagtacctggcagtggcagtgccttggtgaggctgctccaggagggcacctgcaagcttgatgagattggctcctacagtgaagagaagctgcagcacctgctaaggcagtgtggaatcccctttggggcagaagactccaaggaccagctctgcttctccttgttggccctctacgaatctgtacagaatggagctagagctatacggcccccacgtcacttcacaggtggtaaaatctacaaggtgtgcccccatcaggtggtctgcggctccaagtatcttgtgcgaggtgagagtgcccgtgaccatgtggacctgcttgcctcttcccgccactggccgcctgtctatgtggtagatatggccacgtcagtggccctgtgtgctgacctctgctacccagagctgactaaccagatgtgggggaggaaccagggctgtttctctagccccacagagccacctgtgagtgtgtcctgcccagagctcttggaccagcattatactgtggacatgacagaaactgagcactctatccagcacccagtcaccaagactgccacgcggcgcatcgtccatgcaggcctacagcccaatcctggtgaccccagtgctgggcaccactccttggccctgtgccctgaattggcaccttacgcaaccatcctggcctccatcgtggacagcaaaccaaacggtgtccgccagcggcccattgccttcgacaatgccactcactattacctctacaaccgcctcatggacttcctcaccagccgcgaaattgtcaatcgtcagatccatgacattgtacagagctgccagcctggtgaggtggtcattcgtgacaccctctaccgccttggggttgctcagatcaagacagagacagaggaggagggtgaggaagaggaggtggccgcagtggcagaa

SEQ ID NO: 5655 - DNA, 1803 bp, Homo sapiens
  source 1..1803: mol_type = genomic DNA
atggcttatgatgactccgtgaagaaagaagattgttttgatggtgatcatacctttgaggacataggacttgcagctggccgaagccaacgagagaaaaaacgttcttacaaagattttttaagggaagaggaagaaattgctgctcaggtcaggaattcttccaagaagaagttgaaggatagtgaactttacttcttggggacggacacacacaagaagaagaggaagcactcctctgatgattactactatggagatatttcgtctttggaatcgtcacagaagaaaaagaaaaagtccagcccacagtctactgatacagctatggacctgttgaaagctatcacttccccactggcagcaggctccaagccctccaaaaagactggggagaaatcctctggctcttcaagccattcggagagtaaaaaggagcaccacaggaagaaagtcagtggaagcagtggggaactacccctagaggatggtggctcccacaaatcgaaaaaaatgaaacctctctatgtgaacacagagacactgacccttcgggagcctgatggtttaaaaatgaaacttattctgtcaccaaaggagaagggaagcagctctgttgatgaggagtcttttcaatatccctcccaacaagcgactgtgaaaaaatcctcaaagaaatcagctcgggatgagcagggtgctttactcctaggacatgagttacagagctttctgaaaacagcccggaaaaagcacaagtcatcctcagacgcacattcatctcctggccctgaaggctgtgggtctgacgcctcccagttcgcagagtcccacagtgctaaccttgatctttcagggcttgaacctattctggtagaatcagactcatcctctggtggggaactagaggctggggagttagtgatagatgattcttaccgagaaatcaagaagaaaaagaagtcaaagaagagcaaaaagaagaaagacaaggagaagcataaagagaagcgacactccaagtccaagagaagtttaggactttctgccgtgccagtgggagaggtcacagtgacatctggccctcctcccagcatcccatacgctggagcagcagcacctcccctgccacttcctggcctccacacagatgggcatagtgaaaaaaaaaagaaaaaagaagagaaggacaaagagagagagagaggagaaaagccaaaaaagaagaacatgtcggcctaccaggtgttctgtaaagagtatcgcgtgaccattgtggctgaccatccaggtatagattttggggaacttagtaaaaaactggctgaggtgtggaagcaattaccagaaaaagacaaactgatttggaagcaaaaagctcagtatctgcagcacaaacagaacaaagcagaagccacaactgtgaaaaggaaagcatccagctcagaaggttccatgaaagtcaaagcctcttctgtaggagtactgtcaccccagaagaagtccccacccaccaccatgctgttaccagcctcaccagccaaagcccctgagacagagcccattgatgttgctgctcatcttcagctgttgggagagtccctaagcctcattggacaccgtctgcaggaaactgagggtatggtggctgtgtctggcagtttgtcagtgcttctggattccattatctgtgcccttggccccttggcatgtctcaccacacaactacctgaattgaatggctgtcccaaacaggtcttgtcaaacacattagacaacattgcttacatcatgccgggactg

SEQ ID NO: 5656 - DNA, 813 bp, Homo sapiens
  source 1..813: mol_type = genomic DNA
atggagaccaactgccgcaaactggtgtcggcgtgtgtgcaattagagaaagataaaagccagcaggggaagaatgaggacgtgggcgccgaggacccgtctaagaagaagcggcaaaggcggcagcggactcactttaccagccagcagctccaggagctggaggccactttccagaggaaccgctacccggacatgtccacacgcgaagaaatcgctgtgtggaccaaccttacggaagcccgagtccgggtttggttcaagaatcgtcgggccaaatggagaaagagggagcgcaaccagcaggccgagctatgcaagaatggcttcgggccgcagttcaatgggctcatgcagccctacgacgacatgtacccaggctattcctacaacaactgggccgccaagggccttacatccgcctccctatccaccaagagcttccccttcttcaactctatgaacgtcaaccccctgtcatcacagagcatgttttccccacccaactctatctcgtccatgagcatgtcgtccagcatggtgccctcagcagtgacaggcgtcccgggctccagtctcaacagcctgaataacttgaacaacctgagtagcccgtcgctgaattccgcggtgccgacgcctgcctgtccttacgcgccgccgactcctccgtatgtttatagggacacgtgtaactcgagcctggccagcctgagactgaaagcaaagcagcactccagcttcggctacgccagcgtgcagaacccggcctccaacctgagtgcttgccagtatgcagtggaccggcccgtg

SEQ ID NO: 5657 - DNA, 951 bp, Homo sapiens
  source 1..951: mol_type = genomic DNA
atggagaccaactgccgcaaactggtgtcggcgtgtgtgcaattaggcgtgcagccggcggccgttgaatgtctcttctccaaagactccgaaatcaaaaaggtcgagttcacggactctcctgagagccgaaaagaggcagccagcagcaagttcttcccgcggcagcatcctggcgccaatgagaaagataaaagccagcaggggaagaatgaggacgtgggcgccgaggacccgtctaagaagaagcggcaaaggcggcagcggactcactttaccagccagcagctccaggagctggaggccactttccagaggaaccgctacccggacatgtccacacgcgaagaaatcgctgtgtggaccaaccttacggaagcccgagtccgggtttggttcaagaatcgtcgggccaaatggagaaagagggagcgcaaccagcaggccgagctatgcaagaatggcttcgggccgcagttcaatgggctcatgcagccctacgacgacatgtacccaggctattcctacaacaactgggccgccaagggccttacatccgcctccctatccaccaagagcttccccttcttcaactctatgaacgtcaaccccctgtcatcacagagcatgttttccccacccaactctatctcgtccatgagcatgtcgtccagcatggtgccctcagcagtgacaggcgtcccgggctccagtctcaacagcctgaataacttgaacaacctgagtagcccgtcgctgaattccgcggtgccgacgcctgcctgtccttacgcgccgccgactcctccgtatgtttatagggacacgtgtaactcgagcctggccagcctgagactgaaagcaaagcagcactccagcttcggctacgccagcgtgcagaacccggcctccaacctgagtgcttgccagtatgcagtggaccggcccgtg

SEQ ID NO: 5658 - DNA, 906 bp, Homo sapiens
  source 1..906: mol_type = genomic DNA
atggagttcggcctgctcagcgaggcagaggcccggagccctgccctgtcgctgtcagacgctggcactccgcacccccagctcccagagcacggctgcaagggccaggagcacagcgactcagaaaaggcctcggcttcgctgcccggcggctccccagaggacggttcgctgaaaaagaagcagcggcggcagcgcacgcacttcaccagccagcagctacaggagctagaggcgaccttccagaggaaccgctaccccgacatgagcacgcgcgaggagatcgccgtgtggaccaacctcaccgaggcccgcgtgcgggtgtggttcaagaaccggcgcgccaaatggcggaagcgcgagcgcagccagcaggccgagctatgcaaaggcagcttcgcggcgccgctcggggggctggtgccgccctacgaggaggtgtaccccggctactcgtacggcaactggccgcccaaggctcttgccccgccgctcgccgccaagacctttccattcgccttcaactcggtcaacgtggggcctctggcttcgcagcccgtcttctcgccacccagctccatcgccgcctccatggtgccctccgccgcggctgccccgggcaccgtgccagggcctggggccctgcagggcctgggcgggggcccccccgggctggctccggccgccgtgtcctccggggccgtgtcctgcccttatgcctcggccgccgccgccgccgcggctgccgcctcttccccctacgtctatcgggacccgtgtaactcgagcctggccagcctgcggctcaaagccaaacagcacgcctccttcagctaccccgctgtgcacgggccgcccccggcagccaaccttagtccgtgccagtacgccgtggaaaggcccgta

SEQ ID NO: 5659 - DNA, 2028 bp, Homo sapiens
  source 1..2028: mol_type = genomic DNA
atgtctcggcggacgcgctgcgaggatctggatgagctgcactaccaggacacagattcagatgtgccggagcagagggatagcaagtgcaaggtcaaatggacccatgaggagaaccgcactgaccagcaatgccagtacaggtggctgagagttttgaatccagaccttgtcaaggggccatggaccaaagaggaagaccaaaaagtcatcgagctggttaagaagtatggcacaaagcagtggacactgattgccaagcacctgaagggccggctggggaagcagtgccgtgaacgctggcacaaccacctcaaccctgaggtgaagaagtcttgctggaccgaggaggaggaccgcatcatctgcgaggcccacaaggtgctgggcaaccgctgggccgagatcgccaagatgttgccagggaggacagacaatgctgtgaagaatcactggaactctaccatcaaaaggaaggtggacacaggaggcttcttgagcgagtccaaagactgcaagcccccagtgtacttgctgctggagctcgaggacaaggacggcctccagagtgcccagcccacggaaggccagggaagtcttctgaccaactggccctccgtccctcctaccataaaggaggaggaaaacagtgaggaggaacttgcagcagccaccacatcgaaggaacaggagcccatcggtacagatctggacgcagtgcgaacaccagagcccttggaggaattcccgaagcgtgaggaccaggaaggctccccaccagaaacgagcctgccttacaagtgggtggtggaggcagctaacctcctcatccctgctgtgggttctagcctctctgaagccctggacttgatcgagtcggaccctgatgcttggtgtgacctgagtaaatttgacctccctgaggaaccatctgcagaggacagtatcaacaacagcctagtgcagctgcaagcgtcacatcagcagcaagtcctgccaccccgccagccttccgccctggtgcccagtgtgaccgagtaccgcctggatggccacaccatctcagacctgagccggagcagccggggcgagctgatccccatctcccccagcactgaagtcgggggctctggcattggcacaccgccctctgtgctcaagcggcagaggaagaggcgtgtggctctgtcccctgtcactgagaatagcaccagtctgtccttcctggattcctgtaacagcctcacgcccaagagcacacctgttaagaccctgcccttctcgccctcccagtttctgaacttctggaacaaacaggacacattggagctggagagcccctcgctgacatccaccccagtgtgcagccagaaggtggtggtcaccacaccactgcaccgggacaagacacccctgcaccagaaacatgctgcgtttgtaaccccagatcagaagtactccatggacaacactccccacacgccaaccccgttcaagaacgccctggagaagtacggacccctgaagcccctgccacagaccccgcacctggaggaggacttgaaggaggtgctgcgttctgaggctggcatcgaactcatcatcgaggacgacatcaggcccgagaagcagaagaggaagcctgggctgcggcggagccccatcaagaaagtccggaagtctctggctcttgacattgtggatgaggatgtgaagctgatgatgtccacactgcccaagtctctatccttgccgacaactgccccttcaaactcttccagcctcaccctgtcaggtatcaaagaagacaacagcttgctcaaccagggcttcttgcaggccaagcccgagaaggcagcagtggcccagaagccccgaagccacttcacgacacctgcccctatgtccagtgcctggaagacggtggcctgcggggggaccagggaccagcttttcatgcaggagaaagcccggcagctcctgggccgcctgaagcccagccacacatctcggaccctcatcttgtcc

SEQ ID NO: 5660 - DNA, 2100 bp, Homo sapiens
  source 1..2100: mol_type = genomic DNA
atgtctcggcggacgcgctgcgaggatctggatgagctgcactaccaggacacagattcagatgtgccggagcagagggatagcaagtgcaaggtcaaatggacccatgaggaggacgagcagctgagggccctggtgaggcagtttggacagcaggactggaagttcctggccagccacttccctaaccgcactgaccagcaatgccagtacaggtggctgagagttttgaatccagaccttgtcaaggggccatggaccaaagaggaagaccaaaaagtcatcgagctggttaagaagtatggcacaaagcagtggacactgattgccaagcacctgaagggccggctggggaagcagtgccgtgaacgctggcacaaccacctcaaccctgaggtgaagaagtcttgctggaccgaggaggaggaccgcatcatctgcgaggcccacaaggtgctgggcaaccgctgggccgagatcgccaagatgttgccagggaggacagacaatgctgtgaagaatcactggaactctaccatcaaaaggaaggtggacacaggaggcttcttgagcgagtccaaagactgcaagcccccagtgtacttgctgctggagctcgaggacaaggacggcctccagagtgcccagcccacggaaggccagggaagtcttctgaccaactggccctccgtccctcctaccataaaggaggaggaaaacagtgaggaggaacttgcagcagccaccacatcgaaggaacaggagcccatcggtacagatctggacgcagtgcgaacaccagagcccttggaggaattcccgaagcgtgaggaccaggaaggctccccaccagaaacgagcctgccttacaagtgggtggtggaggcagctaacctcctcatccctgctgtgggttctagcctctctgaagccctggacttgatcgagtcggaccctgatgcttggtgtgacctgagtaaatttgacctccctgaggaaccatctgcagaggacagtatcaacaacagcctagtgcagctgcaagcgtcacatcagcagcaagtcctgccaccccgccagccttccgccctggtgcccagtgtgaccgagtaccgcctggatggccacaccatctcagacctgagccggagcagccggggcgagctgatccccatctcccccagcactgaagtcgggggctctggcattggcacaccgccctctgtgctcaagcggcagaggaagaggcgtgtggctctgtcccctgtcactgagaatagcaccagtctgtccttcctggattcctgtaacagcctcacgcccaagagcacacctgttaagaccctgcccttctcgccctcccagtttctgaacttctggaacaaacaggacacattggagctggagagcccctcgctgacatccaccccagtgtgcagccagaaggtggtggtcaccacaccactgcaccgggacaagacacccctgcaccagaaacatgctgcgtttgtaaccccagatcagaagtactccatggacaacactccccacacgccaaccccgttcaagaacgccctggagaagtacggacccctgaagcccctgccacagaccccgcacctggaggaggacttgaaggaggtgctgcgttctgaggctggcatcgaactcatcatcgaggacgacatcaggcccgagaagcagaagaggaagcctgggctgcggcggagccccatcaagaaagtccggaagtctctggctcttgacattgtggatgaggatgtgaagctgatgatgtccacactgcccaagtctctatccttgccgacaactgccccttcaaactcttccagcctcaccctgtcaggtatcaaagaagacaacagcttgctcaaccagggcttcttgcaggccaagcccgagaaggcagcagtggcccagaagccccgaagccacttcacgacacctgcccctatgtccagtgcctggaagacggtggcctgcggggggaccagggaccagcttttcatgcaggagaaagcccggcagctcctgggccgcctgaagcccagccacacatctcggaccctcatcttgtcc

SEQ ID NO: 5661 - DNA, 702 bp, Homo sapiens
  source 1..702: mol_type = genomic DNA
atgtaccgctccaccaagggcgcctccaaggcgcgccgggaccagatcaacgccgagatccggaacctcaaggagctgctgccgctggccgaagcggacaaggtccggctgtcctacctgcacatcatgagcctcgcctgcatctacactcgcaagggcgtcttcttcgctggtggcactcctctggcgggccccacggggcttctctcagctcaagagcttgaggacatcgtagcggcactacccggctttctgcttgtgttcacagccgaggggaaattgctctacctgtctgagagtgtgagcgagcatctgggccactccatggtggacctggttgcccagggtgacagcatctacgacatcattgacccagctgaccacctcactgtgcgccagcaactcaccctgccctctgccctggacactgatcgcctcttccgctgccgcttcaacacctccaagtccctcaggcgccagagtgcaggcaacaaactcgtgcttattcgaggccgattccatgctcacccacctggagcctactgggcaggaaatcccgtgttcacagctttctgtgcccctctggagccgagaccccgcccaggtcctggccctggccctggccctgcctcgctcttcctggccatgttccagagccgccatgctaaagacctggctctactggacatctccgagagtggc

SEQ ID NO: 5662 - DNA, 2406 bp, Homo sapiens
  source 1..2406: mol_type = genomic DNA
atgtaccgctccaccaagggcgcctccaaggcgcgccgggaccagatcaacgccgagatccggaacctcaaggagctgctgccgctggccgaagcggacaaggtccggctgtcctacctgcacatcatgagcctcgcctgcatctacactcgcaagggcgtcttcttcgctggtggcactcctctggcgggccccacggggcttctctcagctcaagagcttgaggacatcgtagcggcactacccggctttctgcttgtgttcacagccgaggggaaattgctctacctgtctgagagtgtgagcgagcatctgggccactccatggtggacctggttgcccagggtgacagcatctacgacatcattgacccagctgaccacctcactgtgcgccagcaactcaccctgccctctgccctggacactgatcgcctcttccgctgccgcttcaacacctccaagtccctcaggcgccagagtgcaggcaacaaactcgtgcttattcgaggccgattccatgctcacccacctggagcctactgggcaggaaatcccgtgttcacagctttctgtgcccctctggagccgagaccccgcccaggtcctggccctggccctggccctgcctcgctcttcctggccatgttccagagccgccatgctaaagacctggctctactggacatctccgagagtgtcctaatctacctgggctttgagcgcagtgaactgctttgtaaatcatggtatggactgctgcaccccgaggacctggcccacgcttctgctcaacactaccgcctgttggctgagagtggagatattcaggcagagatggtggtgaggctacaggccaagactggaggctgggcatggatttactgcctgttatactcagaaggtccagagggacccattactgccaataactacccaatcagtgacatggaagcctggagcctccgccagcagttgaactctgaagacacccaggcagcttatgtcctgggcactccgaccatgctgccctcattccctgaaaacattctttcccaggaagagtgctccagcactaacccactcttcaccgcagcactgggggctcccagaagcaccagcttccccagtgctcctgaactgagtgttgtctctgcatcagaagagcttccccgaccctccaaagaactggacttcagttacctgacattcccttctgggcctgagccttctctccaagcagaactaagcaaggatcttgtgtgcactccaccttacacgccccatcagccaggaggctgtgccttcctcttcagcctccatgagcccttccagacccatttgcccaccccatccagcactcttcaagaacagctgactccaagcactgcgaccttctctgatcagttgacgcccagcagtgcaaccttcccagatccactaactagcccactgcaaggccagttgactgaaacctcggtcagaagctatgaagaccagttgactccctgcacctccaccttcccagaccagctgcttcccagcacagccaccttcccagagcctctgggcagccctgcccatgaacagctgactcctcccagcacagcattccaagcacacctggacagccccagccaaaccttcccagagcaactgagccccaaccctaccaagacttactttgcccaggagggatgcagttttctctatgagaagttgcccccaagtcctagcagccctggtaatggggactgcacgctcttggccctagcccagctccggggccccctctctgtggatgtccccctggtgcccgaaggcctgctcacacctgaggcctctccagtcaagcagagtttcttccactactctgaaaaggagcagaatgagatagaccgtctcatccagcagattagccaattggctcagggcatggacagacccttctcagctgaggctggcactggcggactagagccacttggaggactggagcccctggactccaacctgtccctgtcaggggcaggcccccctgtgctcagcctggacctgaaaccctggaaatgccaggagctggacttcctggctgaccctgataacatgttcctggaagagacgcccgtggaagacatcttcatggatctctctaccccagatcccagtgaggaatggggctcaggggatcctgaggcagagggcccaggaggggccccatcgccttgcaacaacctgtccccagaagaccacagcttcctggaggacctggccacatatgaaaccgcctttgagacaggtgtctcagcattcccctatgatgggtttactgatgagttgcatcaactccagagccaagttcaagacagcttccatgaagatggaagtggaggggaaccaacgttt

SEQ ID NO: 5663 - DNA, 2760 bp, Homo sapiens
  source 1..2760: mol_type = genomic DNA
atggcgcccaccaagcccagctttcagcaggatccttccaggcgagaacgtttacaagcattgagaaaggagaaatcccgagatgctgctcgctcccgccggggaaaagaaaactttgagttctatgaattggccaagttgttgcctcttcctgcagccattaccagccagctcgacaaggcatccatcattcgacttacaattagctatctgaaaatgagggactttgctaaccagggggaccctccgtggaacttgcgaatggaaggccctccacctaacacatcagtaaaagggatacaaatgtggaaatctgaactctgcatgagaaagacaccatgtgaagttataggtgcacagcgaaggagaagccccagtgcactagccattgaagtatttgaagcacatttgggaagccacattttgcagtccctggatggctttgtatttgcactaaatcaggaaggaaaatttttgtacatttccgaaacagtctccatctacctaggcctctcacaagtggagctgacaggcagcagtgtctttgactatgtccaccccggagatcacgtggagatggctgagcagctgggcatgaagctcccccctgggcggggtctcctgtcacagggcactgctgaggacggagccagctcagcatcttcctcctctcagtcggagacccccgagccagtggagtcaaccagccccagtctgctaaccactgacaacactcttgagcgttcctttttcatccgaatgaaatctactctgaccaaacgcggtgtgcacatcaaatcatcaggatataaggtgattcacataacaggccggctacgcctgagagtgtcgctgtcccacgggaggaccgtccccagccaaatcatgggtctcgtggttgttgcgcatgccttgcctccccctacgatcaatgaagtcagaattgactgccatatgttcgtcactcgagtaaatatggacctcaatatcatttactgtgaaaataggattagtgattatatggatctgacccctgtagatatcgtagggaagagatgctaccacttcatccatgctgaagacgtggagggcatcaggcacagtcacttggacttgctgaataagggtcagtgtgtgacaaagtactatcgctggatgcagaagaacggaggatatatttggatacagtccagtgccaccatagctattaatgccaagaatgcaaatgaaaagaatatcatctgggtgaattaccttcttagcaatcctgagtacaaggacacacccatggacatcgcacagctcccccatctgccggagaaaacttccgaatcctcggagacatccgactctgagtcagactctaaagacacctcaggtattacagaggacaacgagaactccaagtccgacgagaaggggaaccagtccgagaacagcgaagacccggagcccgaccggaagaagtcgggcaacgcgtgtgacaacgacatgaactgcaacgacgacggccacagctccagtaacccggacagccgcgacagcgacgacagcttcgagcactcggactttgagaaccccaaggcgggcgaggacggcttcggtgctctgggcgcgatgcagatcaaggtggagcgctacgtggagagcgagtcggacctgcggctgcagaactgcgagtcactcacgtccgacagcgccaaggactcggacagcgcaggcgaggcgggcgcgcaggcctccagcaagcaccagaagcgcaagaaaaggcggaaacggcaaaagggcggcagcgccagccgccggcgcctgtccagcgcgtcgagcccaggcggcctggacgcgggcctggtggagcccccgcggctgctgtcctcccccaacagtgcctcggtgctcaagatcaagacggagatctcagaacccatcaatttcgacaatgacagcagcatctggaactacccgcccaaccgggagatctccaggaacgagtccccctacagcatgaccaagccccccagctctgagcacttcccgtccccgcagggcggcggcggtgggggtggcggtggcggggggctgcacgtggccattcccgactcggtcctcaccccgcccggcgccgacggcgcggccgcccgcaagactcagttcggcgcctcggccaccgcggccctggcccccgtcgcctccgacccgctgtcacccccgctctcggcgtccccgcgggacaagcaccccgggaacggcggcgggggcgggggcgggggcggcggcgcggggggcggcggccccagcgcgtccaactccttgctgtacactggggacctggaggcgctgcagaggttgcaggcgggcaacgtcgtgctcccgctggtgcacagggtgaccgggaccctggccgccaccagcacggccgcgcagagggtctacaccacgggcaccatccgctacgcgcccgccgaggtgaccctggccatgcagagcaacctgctgcccaacgcgcacgctgttaacttcgtggacgttaacagccccggctttggcctcgaccccaagacgcccatggagatgctctaccaccacgtgcaccggctcaacatgtcaggaccgttcggcggcgcagtgagcgcagctagcctgacgcagatgcccgccggcaacgtgttcaccacggccgagggactcttctccacgctgcccttccccgtctacagcaacggcatccacgcggcacagactctggagcgcaaggaggac

SEQ ID NO: 5664 - DNA, 2703 bp, Homo sapiens
  source 1..2703: mol_type = genomic DNA
atggcgcccaccaagcccagctttcagcaggatccttccaggcgagaacgtttacaagcattgagaaaggagaaatcccgagatgctgctcgctcccgccggggaaaagaaaactttgagttctatgaattggccaagttgttgcctcttcctgcagccattaccagccagctcgacaaggcatccatcattcgacttacaattagctatctgaaaatgagggactttgctaaccagggggaccctccgtggaacttgcgaatggaaggccctccacctaacacatcagtaaaaggtgcacagcgaaggagaagccccagtgcactagccattgaagtatttgaagcacatttgggaagccacattttgcagtccctggatggctttgtatttgcactaaatcaggaaggaaaatttttgtacatttccgaaacagtctccatctacctaggcctctcacaagtggagctgacaggcagcagtgtctttgactatgtccaccccggagatcacgtggagatggctgagcagctgggcatgaagctcccccctgggcggggtctcctgtcacagggcactgctgaggacggagccagctcagcatcttcctcctctcagtcggagacccccgagccagtggagtcaaccagccccagtctgctaaccactgacaacactcttgagcgttcctttttcatccgaatgaaatctactctgaccaaacgcggtgtgcacatcaaatcatcaggatataaggtgattcacataacaggccggctacgcctgagagtgtcgctgtcccacgggaggaccgtccccagccaaatcatgggtctcgtggttgttgcgcatgccttgcctccccctacgatcaatgaagtcagaattgactgccatatgttcgtcactcgagtaaatatggacctcaatatcatttactgtgaaaataggattagtgattatatggatctgacccctgtagatatcgtagggaagagatgctaccacttcatccatgctgaagacgtggagggcatcaggcacagtcacttggacttgctgaataagggtcagtgtgtgacaaagtactatcgctggatgcagaagaacggaggatatatttggatacagtccagtgccaccatagctattaatgccaagaatgcaaatgaaaagaatatcatctgggtgaattaccttcttagcaatcctgagtacaaggacacacccatggacatcgcacagctcccccatctgccggagaaaacttccgaatcctcggagacatccgactctgagtcagactctaaagacacctcaggtattacagaggacaacgagaactccaagtccgacgagaaggggaaccagtccgagaacagcgaagacccggagcccgaccggaagaagtcgggcaacgcgtgtgacaacgacatgaactgcaacgacgacggccacagctccagtaacccggacagccgcgacagcgacgacagcttcgagcactcggactttgagaaccccaaggcgggcgaggacggcttcggtgctctgggcgcgatgcagatcaaggtggagcgctacgtggagagcgagtcggacctgcggctgcagaactgcgagtcactcacgtccgacagcgccaaggactcggacagcgcaggcgaggcgggcgcgcaggcctccagcaagcaccagaagcgcaagaaaaggcggaaacggcaaaagggcggcagcgccagccgccggcgcctgtccagcgcgtcgagcccaggcggcctggacgcgggcctggtggagcccccgcggctgctgtcctcccccaacagtgcctcggtgctcaagatcaagacggagatctcagaacccatcaatttcgacaatgacagcagcatctggaactacccgcccaaccgggagatctccaggaacgagtccccctacagcatgaccaagccccccagctctgagcacttcccgtccccgcagggcggcggcggtgggggtggcggtggcggggggctgcacgtggccattcccgactcggtcctcaccccgcccggcgccgacggcgcggccgcccgcaagactcagttcggcgcctcggccaccgcggccctggcccccgtcgcctccgacccgctgtcacccccgctctcggcgtccccgcgggacaagcaccccgggaacggcggcgggggcgggggcgggggcggcggcgcggggggcggcggccccagcgcgtccaactccttgctgtacactggggacctggaggcgctgcagaggttgcaggcgggcaacgtcgtgctcccgctggtgcacagggtgaccgggaccctggccgccaccagcacggccgcgcagagggtctacaccacgggcaccatccgctacgcgcccgccgaggtgaccctggccatgcagagcaacctgctgcccaacgcgcacgctgttaacttcgtggacgttaacagccccggctttggcctcgaccccaagacgcccatggagatgctctaccaccacgtgcaccggctcaacatgtcaggaccgttcggcggcgcagtgagcgcagctagcctgacgcagatgcccgccggcaacgtgttcaccacggccgagggactcttctccacgctgcccttccccgtctacagcaacggcatccacgcggcacagactctggagcgcaaggaggac

SEQ ID NO: 5665 - DNA, 2709 bp, Homo sapiens
  source 1..2709: mol_type = genomic DNA
atggcgcccaccaagcccagctttcagcaggatccttccaggcgagaacgtttacaagcattgagaaaggagaaatcccgagatgctgctcgctcccgccggggaaaagaaaactttgagttctatgaattggccaagttgttgcctcttcctgcagccattaccagccagctcgacaaggcatccatcattcgacttacaattagctatctgaaaatgagggactttgctaaccagggggaccctccgtggaacttgcgaatggaaggccctccacctaacacatcagtaaaagttataggtgcacagcgaaggagaagccccagtgcactagccattgaagtatttgaagcacatttgggaagccacattttgcagtccctggatggctttgtatttgcactaaatcaggaaggaaaatttttgtacatttccgaaacagtctccatctacctaggcctctcacaagtggagctgacaggcagcagtgtctttgactatgtccaccccggagatcacgtggagatggctgagcagctgggcatgaagctcccccctgggcggggtctcctgtcacagggcactgctgaggacggagccagctcagcatcttcctcctctcagtcggagacccccgagccagtggagtcaaccagccccagtctgctaaccactgacaacactcttgagcgttcctttttcatccgaatgaaatctactctgaccaaacgcggtgtgcacatcaaatcatcaggatataaggtgattcacataacaggccggctacgcctgagagtgtcgctgtcccacgggaggaccgtccccagccaaatcatgggtctcgtggttgttgcgcatgccttgcctccccctacgatcaatgaagtcagaattgactgccatatgttcgtcactcgagtaaatatggacctcaatatcatttactgtgaaaataggattagtgattatatggatctgacccctgtagatatcgtagggaagagatgctaccacttcatccatgctgaagacgtggagggcatcaggcacagtcacttggacttgctgaataagggtcagtgtgtgacaaagtactatcgctggatgcagaagaacggaggatatatttggatacagtccagtgccaccatagctattaatgccaagaatgcaaatgaaaagaatatcatctgggtgaattaccttcttagcaatcctgagtacaaggacacacccatggacatcgcacagctcccccatctgccggagaaaacttccgaatcctcggagacatccgactctgagtcagactctaaagacacctcaggtattacagaggacaacgagaactccaagtccgacgagaaggggaaccagtccgagaacagcgaagacccggagcccgaccggaagaagtcgggcaacgcgtgtgacaacgacatgaactgcaacgacgacggccacagctccagtaacccggacagccgcgacagcgacgacagcttcgagcactcggactttgagaaccccaaggcgggcgaggacggcttcggtgctctgggcgcgatgcagatcaaggtggagcgctacgtggagagcgagtcggacctgcggctgcagaactgcgagtcactcacgtccgacagcgccaaggactcggacagcgcaggcgaggcgggcgcgcaggcctccagcaagcaccagaagcgcaagaaaaggcggaaacggcaaaagggcggcagcgccagccgccggcgcctgtccagcgcgtcgagcccaggcggcctggacgcgggcctggtggagcccccgcggctgctgtcctcccccaacagtgcctcggtgctcaagatcaagacggagatctcagaacccatcaatttcgacaatgacagcagcatctggaactacccgcccaaccgggagatctccaggaacgagtccccctacagcatgaccaagccccccagctctgagcacttcccgtccccgcagggcggcggcggtgggggtggcggtggcggggggctgcacgtggccattcccgactcggtcctcaccccgcccggcgccgacggcgcggccgcccgcaagactcagttcggcgcctcggccaccgcggccctggcccccgtcgcctccgacccgctgtcacccccgctctcggcgtccccgcgggacaagcaccccgggaacggcggcgggggcgggggcgggggcggcggcgcggggggcggcggccccagcgcgtccaactccttgctgtacactggggacctggaggcgctgcagaggttgcaggcgggcaacgtcgtgctcccgctggtgcacagggtgaccgggaccctggccgccaccagcacggccgcgcagagggtctacaccacgggcaccatccgctacgcgcccgccgaggtgaccctggccatgcagagcaacctgctgcccaacgcgcacgctgttaacttcgtggacgttaacagccccggctttggcctcgaccccaagacgcccatggagatgctctaccaccacgtgcaccggctcaacatgtcaggaccgttcggcggcgcagtgagcgcagctagcctgacgcagatgcccgccggcaacgtgttcaccacggccgagggactcttctccacgctgcccttccccgtctacagcaacggcatccacgcggcacagactctggagcgcaaggaggac

SEQ ID NO: 5666 - DNA, 2799 bp, Homo sapiens
  source 1..2799: mol_type = genomic DNA
atggcgcccaccaagcccagctttcagcaggatccttccaggcgagaacgaataactgcccagcatcctctgcccaaccaatcagaatgtaggaaaatctacagatatgacggaatctactgtgaatctacctaccagaatttacaagcattgagaaaggagaaatcccgagatgctgctcgctcccgccggggaaaagaaaactttgagttctatgaattggccaagttgttgcctcttcctgcagccattaccagccagctcgacaaggcatccatcattcgacttacaattagctatctgaaaatgagggactttgctaaccagggggaccctccgtggaacttgcgaatggaaggccctccacctaacacatcagtaaaagttataggtgcacagcgaaggagaagccccagtgcactagccattgaagtatttgaagcacatttgggaagccacattttgcagtccctggatggctttgtatttgcactaaatcaggaaggaaaatttttgtacatttccgaaacagtctccatctacctaggcctctcacaagtggagctgacaggcagcagtgtctttgactatgtccaccccggagatcacgtggagatggctgagcagctgggcatgaagctcccccctgggcggggtctcctgtcacagggcactgctgaggacggagccagctcagcatcttcctcctctcagtcggagacccccgagccagtggagtcaaccagccccagtctgctaaccactgacaacactcttgagcgttcctttttcatccgaatgaaatctactctgaccaaacgcggtgtgcacatcaaatcatcaggatataaggtgattcacataacaggccggctacgcctgagagtgtcgctgtcccacgggaggaccgtccccagccaaatcatgggtctcgtggttgttgcgcatgccttgcctccccctacgatcaatgaagtcagaattgactgccatatgttcgtcactcgagtaaatatggacctcaatatcatttactgtgaaaataggattagtgattatatggatctgacccctgtagatatcgtagggaagagatgctaccacttcatccatgctgaagacgtggagggcatcaggcacagtcacttggacttgctgaataagggtcagtgtgtgacaaagtactatcgctggatgcagaagaacggaggatatatttggatacagtccagtgccaccatagctattaatgccaagaatgcaaatgaaaagaatatcatctgggtgaattaccttcttagcaatcctgagtacaaggacacacccatggacatcgcacagctcccccatctgccggagaaaacttccgaatcctcggagacatccgactctgagtcagactctaaagacacctcaggtattacagaggacaacgagaactccaagtccgacgagaaggggaaccagtccgagaacagcgaagacccggagcccgaccggaagaagtcgggcaacgcgtgtgacaacgacatgaactgcaacgacgacggccacagctccagtaacccggacagccgcgacagcgacgacagcttcgagcactcggactttgagaaccccaaggcgggcgaggacggcttcggtgctctgggcgcgatgcagatcaaggtggagcgctacgtggagagcgagtcggacctgcggctgcagaactgcgagtcactcacgtccgacagcgccaaggactcggacagcgcaggcgaggcgggcgcgcaggcctccagcaagcaccagaagcgcaagaaaaggcggaaacggcaaaagggcggcagcgccagccgccggcgcctgtccagcgcgtcgagcccaggcggcctggacgcgggcctggtggagcccccgcggctgctgtcctcccccaacagtgcctcggtgctcaagatcaagacggagatctcagaacccatcaatttcgacaatgacagcagcatctggaactacccgcccaaccgggagatctccaggaacgagtccccctacagcatgaccaagccccccagctctgagcacttcccgtccccgcagggcggcggcggtgggggtggcggtggcggggggctgcacgtggccattcccgactcggtcctcaccccgcccggcgccgacggcgcggccgcccgcaagactcagttcggcgcctcggccaccgcggccctggcccccgtcgcctccgacccgctgtcacccccgctctcggcgtccccgcgggacaagcaccccgggaacggcggcgggggcgggggcgggggcggcggcgcggggggcggcggccccagcgcgtccaactccttgctgtacactggggacctggaggcgctgcagaggttgcaggcgggcaacgtcgtgctcccgctggtgcacagggtgaccgggaccctggccgccaccagcacggccgcgcagagggtctacaccacgggcaccatccgctacgcgcccgccgaggtgaccctggccatgcagagcaacctgctgcccaacgcgcacgctgttaacttcgtggacgttaacagccccggctttggcctcgaccccaagacgcccatggagatgctctaccaccacgtgcaccggctcaacatgtcaggaccgttcggcggcgcagtgagcgcagctagcctgacgcagatgcccgccggcaacgtgttcaccacggccgagggactcttctccacgctgcccttccccgtctacagcaacggcatccacgcggcacagactctggagcgcaaggaggac

SEQ ID NO: 5667 - DNA, 2472 bp, Homo sapiens
  source 1..2472: mol_type = genomic DNA
atggatgaagatgagaaagacagagccaagagagcttctcgaaacaagtctgagaagaagcgtcgggaccagttcaatgttctcatcaaagagctcagttccatgctccctggcaacacgcggaaaatggacaaaaccaccgtgttggaaaaggtcatcggatttttgcagaaacacaatgaagtctcagcgcaaacggaaatctgtgacattcagcaagactggaagccttcattcctcagtaatgaagaattcacccagctgatgttggaggcattagatggcttcattatcgcagtgacaacagacggcagcatcatctatgtctctgacagtatcacgcctctccttgggcatttaccgtcggatgtcatggatcagaatttgttaaatttcctcccagaacaagaacattcagaagtttataaaatcctttcttcccatatgcttgtgacggattccccctccccagaatacttaaaatctgacagcgatttagagttttattgccatcttctcagaggcagcttgaacccaaaggaatttccaacttatgaatacataaaatttgtaggaaattttcgctcttacaacaatgtgcctagcccctcctgtaatggttttgacaacaccctttcaagaccttgccgggtgccactaggaaaggaggtttgcttcattgccaccgttcgtctggcaacaccacaattcttaaaggaaatgtgcatagttgacgaacctttagaggaattcacttcaaggcatagcttggaatggaaatttttatttctggatcacagagcacctccaatcataggatacctgccttttgaagtgctgggaacctcaggctatgactactaccacattgatgacctggagctcctggccaggtgtcaccagcacctgatgcagtttggcaaagggaagtcgtgttgctaccggtttctgaccaaaggtcagcagtggatctggctgcagactcactactacatcacctaccatcagtggaactccaagcccgagttcatcgtgtgcacacactcggtggtcagttacgcagatgtccgggtggaaaggaggcaggagctggctctggaagacccgccatccgaggccctccactcctcagcactaaaggacaagggctcaagcctggaacctcggcagcactttaacacactcgacgtgggtgcctcgggccttaataccagtcattcgccatcggcgtcctcaagaagttcccacaaatcctcgcacacagccatgtcagaacccacctccactcccaccaagctgatggcagaggccagcaccccggctttgccaagatcagccaccctgccccaagagttacctgtccccgggctcagccaggcagccaccatgccggcccctctgccttccccatcgtcctgcgacctcacacagcagctcctgcctcagaccgttctgcagagcacgcccgctcccatggcacagttttcggcacagttcagcatgttccagaccatcaaagaccagctagagcagcggacgcggatcctgcaggccaatatccggtggcaacaggaagagctccacaagatccaggagcagctctgcctggtccaggactccaacgtccagatgttcctgcagcagccagctgtatccctgagcttcagcagcacccagcgacctgaggctcagcagcagctacagcaaaggtcagctgcagtgactcagccccagctcggggcgggcccccaacttccagggcagatctcctctgcccaggtcacaagccagcacctgctcagagaatcaagtgtgatatcaacccagggtccaaagccaatgagaagctcacagctaatgcagagcagcggccgctctggaagcagcctagtgtccccgttcagcagcgccacagctgcgctcccgccaagtctgaatctgaccacacctgcttccacctcccaggatgccagccagtgccagcccagcccagacttcagccatgatcggcagctcaggctgttgctgagccagcccatccagcccatgatgcccgggtcctgtgacgcaaggcagccctcggaagtcagcaggacgggacggcaagtcaagtacgcccagagccagaccgtgtttcaaaatccagacgcacaccccgccaacagcagcagcgccccgatgcccgtcctgctgatggggcaggcggtgctccaccccagcttccctgcctcccaaccatcgcccctgcagcctgcacaggcccggcagcagccaccgcagcactacctgcaggtacaggcaccaacctctttgcacagtgagcagcaggactcgctacttctctccacctactcacaacagccagggaccctgggctacccccaaccacccccagcacagccccagcccctacgtcctccccgaagggtcagcagtctgtctgagtcgtcaggcctccagcagccgccccga

SEQ ID NO: 5668 - DNA, 702 bp, Homo sapiens
  source 1..702: mol_type = genomic DNA
atgacgggcagcagcgtcttcgactacattcaccctggggaccactcagaggtgctggagcaactggggctgcggacgccgacgcccggccccccaaccccgccctccgtctcctcttcctcctcctcttcctcttcgcttgcagatacccccgagatcgaggccagcctcaccaaggtgcccccctcctccctggtccaggagcgctccttctttgtccgcatgaaatccacgctcaccaagagggggctgcacgtcaaggcctcagggtacaaggtcatccacgtgactgggcgccttcgggcccacgccctgggccttgtggccctcgggcacacgttgcccccggcccccctggctgagctgccactccatggacacatgatcgtcttccgtctcagcctgggtctcaccatccttgcttgtgagagcagagtcagcgaccacatggacctggggccctcagagctggtgggccgcagctgctaccagtttgtccacggacaggacgccacgaggatccgccagagccacgtggactcgtgccgggggcttcgtgtggctgcagtctgtggccacagtggctgggagcgggaagagccccggggagcaccatgtgctttgggtcagccacgtgctcagccaagccgagggtggccaaactcctttggatgccttccagcttccagccagcgtggcctg

SEQ ID NO: 5669 - DNA, 3156 bp, Homo sapiens
  source 1..3156: mol_type = genomic DNA
atgtcgtccgcggccgagcctccgccacccccgcctcccgagagcgcgccttccaagcccgcagcctcgatcgccagcggcgggagcaacagcagcaacaaaggcggccccgaaggcgtcgcggcgcaggcggttgcgtctgcggccagcgctggtcccgcagacgccgagatggaggaaatatttgatgatgcgtcacctggaaagcaaaaggaaatccaagaaccagatcctacctatgaagaaaaaatgcaaactgaccgggcaaatagattcgagtatttattaaagcagacagaactttttgcacatttcattcaacctgctgctcagaagactccaacttcacctttgaagatgaaaccagggcgcccacgaataaaaaaagatgagaagcagaacttactatccgttggcgattaccgacaccgtagaacagagcaagaggaggatgaagagctattaacagaaagctccaaagcaaccaatgtttgcactcgatttgaagactctccatcgtatgtaaaatggggtaaactgagagattatcaggtccgaggattaaactggctcatttctttgtatgagaatggcatcaatggtatccttgcagatgaaatgggcctaggaaagactcttcaaacaatttctcttcttgggtacatgaaacattatagaaacattcctgggcctcatatggttttggttcctaagtctacattacacaactggatgagtgaattcaagagatgggtaccaacacttagatctgtttgtttgataggagataaagaacaaagagctgcttttgtcagagacgttttattaccgggagaatgggatgtatgtgtaacatcttatgaaatgcttattaaagagaagtctgtgttcaaaaaatttaattggagatacttagtaatagatgaagctcacaggatcaaaaatgaaaaatctaagttgtcagaaatagtgagggaattcaagactacaaatagactattattaactggaacacctcttcagaacaacttgcatgagctgtggtcacttcttaactttctgttgccagatgtgtttaattcagcagatgactttgattcctggtttgatacaaacaactgccttggggatcaaaaactagttgagaggcttcatatggttttgcgtccattcctccttcgtcgaattaaggctgatgttgaaaagagtttgcctccaaagaaggaagtaaaaatctatgtgggcctcagcaaaatgcaaagggaatggtatactcggatattaatgaaggatatagatatactcaactcagcaggcaagatggacaaaatgaggttattgaacatcctaatgcagttgagaaaatgttgtaatcatccatatctctttgatggagcagaacctggtccaccttatacaacagatatgcatctagtaaccaacagtggcaaaatggtggttttagacaagctgctccctaagttaaaagaacaaggttcacgagtactaatcttcagtcaaatgacaagggtattggacattttggaagattattgcatgtggagaaattatgagtactgcaggttggatggtcagacaccccatgatgagagacaagactccatcaatgcatacaatgaaccaaacagcacaaagtttgttttcatgttaagcacgcgtgctggtggtcttggcatcaatcttgcgactgctgatgtagtaattttgtatgattctgattggaatccccaagtagatcttcaggctatggaccgagcacatagaattgggcagactaagacagtcagagtgttccgctttataactgataacactgtagaagaaagaatagtagaacgtgctgagatgaaactcagactggattcaatagtcattcaacaagggaggcttgtggatcagaatctgaacaaaattgggaaagatgaaatgcttcaaatgattagacatggagcaacacatgtgtttgcttcaaaggaaagtgagatcactgatgaagatatcgatggtattttggaaagaggtgcaaagaagactgcagagatgaatgaaaagctctccaagatgggcgaaagttcacttagaaactttacaatggatacagagtcaagtgtttataacttcgaaggagaagactatagagaaaaacaaaagattgcattcacagagtggattgaaccacctaaacgagaaagaaaagccaactatgccgttgatgcatatttcagggaagctcttcgtgttagtgaacctaaagcacccaaggctcctcgacctccaaaacaacccaatgttcaggatttccagttctttcctccacgtttatttgaattactggaaaaagaaattctgttttacagaaaaactattgggtacaaggtacctcgaaatcctgagctgcctaatgcagcacaggcacaaaaagaagaacagcttaaaattgatgaagctgaatcccttaatgatgaagagttagaggaaaaagagaagcttctaacacagggatttaccaattggaataagagagattttaaccagtttatcaaagctaatgagaagtggggtcgtgatgatattgaaaatatagcaagagaagtagaaggcaaaactccagaagaagtcattgaatattcagctgtgttttgggaaaggtgcaacgagctccaggacatagagaagattatggctcagattgaaaggggagaggcgagaattcaaagaagaataagcatcaagaaagcacttgacacaaagattggacggtacaaagcaccttttcatcagctgagaatatcatatggtactaacaaaggaaaaaactatactgaagaagaagatcgttttctgatttgtatgcttcacaaacttggatttgacaaagaaaatgtttatgatgaattgcgacagtgtattcgcaactctcctcagttcagatttgactggtttcttaagtccagaactgcaatggagctccagaggagatgtaataccttaattactttgattgaaagagaaaacatggaactagaagaaaaggagaaggcagagaaaaagaaacgaggaccaaagccttcaacacagaaacgtaaaatggatggcgcacctgatggtcgaggaagaaaaaagaagctgaaacta

SEQ ID NO: 5670 - DNA, 723 bp, Homo sapiens
  source 1..723: mol_type = genomic DNA
atggaggccgctgcggacggcccggctgagacccaaagcccggtggaaaaagacagcccggcgaagacccaaagcccagcccaagacacctcaatcatgtcgagaaataacgcagatacaggcagagttcttgccttaccagagcacaagaagaagcgcaagggaaacttgccagccgagtccgttaagatcctccgcgactggatgtataagcatcggtttaaggcctacccttcagaagaagagaagcaaatgctgtcagagaagaccaatttgtctttgttgcagatttctaactggtttatcaatgctcgcagacgcattctcccggatatgcttcaacagcgtagaaacgaccccatcattggccacaaaacgggcaaagatgcccatgccacccacctgcagagcaccgaggcgtctgtgccggccaagtcagggcccagtggtccagacaatgtacaaagcctgcccctgtggcccttgccaaagggccagatgtcaagagagaagcaaccagatccggagtcggcccctagccagaagctcaccggaatagcccagccgaagaaaaaggtcaaggtttctgtcacatccccgtcttctccagaacttgtgtctccagaggagcacgccgacttcagcagcttcctgctgctagtcgatgcagcagtacaaagggctgccgagctggagctagagaagaagcaagagcctaatcca

SEQ ID NO: 5671 - DNA, 2475 bp, Homo sapiens
  source 1..2475: mol_type = genomic DNA
atgttggatatttgcttggaaaaacgtgtgggtacgaccttggctgcccccaagtgtaactccagcactgtgaggtttcagggattggcagaggggaccaaggggaccatgaaaatggacatggaggatgcggatatgactctgtggacagaggctgagtttgaagagaagtgtacatacattgtgaacgaccacccctgggattctggtgctgatggcggtacttcggttcaggcggaggcatccttaccaaggaatctgcttttcaagtatgccaccaacagtgaagaggttattggagtgatgagtaaagaatacataccaaagggcacacgttttggacccctaataggtgaaatctacaccaatgacacagttcctaagaacgccaacaggaaatatttttggaggatctattccagaggggagcttcaccacttcattgacggctttaatgaagagaaaagcaactggatgcgctatgtgaatccagcacactctccccgggagcaaaacctggctgcgtgtcagaacgggatgaacatctacttctacaccattaagcccatccctgccaaccaggaacttcttgtgtggtattgtcgggactttgcagaaaggcttcactacccttatcccggagagctgacaatgatgaatctcacacaaacacagagcagtctaaagcaaccgagcactgagaaaaatgaactctgcccaaagaatgtcccaaagagagagtacagcgtgaaagaaatcctaaaattggactccaacccctccaaaggaaaggacctctaccgttctaacatttcacccctcacatcagaaaaggacctcgatgactttagaagacgtgggagccccgaaatgcccttctaccctcgggtcgtttaccccatccgggcccctctgccagaagactttttgaaagcttccctggcctacgggatcgagagacccacgtacatcactcgctcccccattccatcctccaccactccaagcccctctgcaagaagcagccccgaccaaagcctcaagagctccagccctcacagcagccctgggaatacggtgtcccctgtgggccccggctctcaagagcaccgggactcctacgcttacttgaacgcgtcctacggcacggaaggtttgggctcctaccctggctacgcacccctgccccacctcccgccagctttcatcccctcgtacaacgctcactaccccaagttcctcttgcccccctacggcatgaattgtaatggcctgagcgctgtgagcagcatgaatggcatcaacaactttggcctcttcccgaggctgtgccctgtctacagcaatctcctcggtgggggcagcctgccccaccccatgctcaaccccacttctctcccgagctcgctgccctcagatggagcccggaggttgctccagccggagcatcccagggaggtgcttgtcccggcgccccacagtgccttctcctttaccggggccgccgccagcatgaaggacaaggcctgtagccccacaagcgggtctcccacggcgggaacagccgccacggcagaacatgtggtgcagcccaaagctacctcagcagcgatggcagcccccagcagcgacgaagccatgaatctcattaaaaacaaaagaaacatgaccggctacaagacccttccctacccgctgaagaagcagaacggcaagatcaagtacgaatgcaacgtttgcgccaagactttcggccagctctccaatctgaaggtccacctgagagtgcacagtggagaacggcctttcaaatgtcagacttgcaacaagggctttactcagctcgcccacctgcagaaacactacctggtacacacgggagaaaagccacatgaatgccaggtctgccacaagagatttagcagcaccagcaatctcaagacccacctgcgactccattctggagagaaaccataccaatgcaaggtgtgccctgccaagttcacccagtttgtgcacctgaaactgcacaagcgtctgcacacccgggagcggccccacaagtgctcccagtgccacaagaactacatccatctctgtagcctcaaggttcacctgaaagggaactgcgctgcggccccggcgcctgggctgcccttggaagatctgacccgaatcaatgaagaaatcgagaagtttgacatcagtgacaatgctgaccggctcgaggacgtggaggatgacatcagtgtgatctctgtagtggagaaggaaattctggccgtggtcagaaaagagaaagaagaaactggcctgaaagtgtctttgcaaagaaacatggggaatggactcctctcctcagggtgcagcctttatgagtcatcagatctacccctcatgaagttgcctcccagcaacccactacctctggtacctgtaaaggtcaaacaagaaacagttgaaccaatggatcct

SEQ ID NO: 5672 - DNA, 2367 bp, Homo sapiens
  source 1..2367: mol_type = genomic DNA
atgaaaatggacatggaggatgcggatatgactctgtggacagaggctgagtttgaagagaagtgtacatacattgtgaacgaccacccctgggattctggtgctgatggcggtacttcggttcaggcggaggcatccttaccaaggaatctgcttttcaagtatgccaccaacagtgaagaggttattggagtgatgagtaaagaatacataccaaagggcacacgttttggacccctaataggtgaaatctacaccaatgacacagttcctaagaacgccaacaggaaatatttttggaggatctattccagaggggagcttcaccacttcattgacggctttaatgaagagaaaagcaactggatgcgctatgtgaatccagcacactctccccgggagcaaaacctggctgcgtgtcagaacgggatgaacatctacttctacaccattaagcccatccctgccaaccaggaacttcttgtgtggtattgtcgggactttgcagaaaggcttcactacccttatcccggagagctgacaatgatgaatctcacacaaacacagagcagtctaaagcaaccgagcactgagaaaaatgaactctgcccaaagaatgtcccaaagagagagtacagcgtgaaagaaatcctaaaattggactccaacccctccaaaggaaaggacctctaccgttctaacatttcacccctcacatcagaaaaggacctcgatgactttagaagacgtgggagccccgaaatgcccttctaccctcgggtcgtttaccccatccgggcccctctgccagaagactttttgaaagcttccctggcctacgggatcgagagacccacgtacatcactcgctcccccattccatcctccaccactccaagcccctctgcaagaagcagccccgaccaaagcctcaagagctccagccctcacagcagccctgggaatacggtgtcccctgtgggccccggctctcaagagcaccgggactcctacgcttacttgaacgcgtcctacggcacggaaggtttgggctcctaccctggctacgcacccctgccccacctcccgccagctttcatcccctcgtacaacgctcactaccccaagttcctcttgcccccctacggcatgaattgtaatggcctgagcgctgtgagcagcatgaatggcatcaacaactttggcctcttcccgaggctgtgccctgtctacagcaatctcctcggtgggggcagcctgccccaccccatgctcaaccccacttctctcccgagctcgctgccctcagatggagcccggaggttgctccagccggagcatcccagggaggtgcttgtcccggcgccccacagtgccttctcctttaccggggccgccgccagcatgaaggacaaggcctgtagccccacaagcgggtctcccacggcgggaacagccgccacggcagaacatgtggtgcagcccaaagctacctcagcagcgatggcagcccccagcagcgacgaagccatgaatctcattaaaaacaaaagaaacatgaccggctacaagacccttccctacccgctgaagaagcagaacggcaagatcaagtacgaatgcaacgtttgcgccaagactttcggccagctctccaatctgaaggtccacctgagagtgcacagtggagaacggcctttcaaatgtcagacttgcaacaagggctttactcagctcgcccacctgcagaaacactacctggtacacacgggagaaaagccacatgaatgccaggtctgccacaagagatttagcagcaccagcaatctcaagacccacctgcgactccattctggagagaaaccataccaatgcaaggtgtgccctgccaagttcacccagtttgtgcacctgaaactgcacaagcgtctgcacacccgggagcggccccacaagtgctcccagtgccacaagaactacatccatctctgtagcctcaaggttcacctgaaagggaactgcgctgcggccccggcgcctgggctgcccttggaagatctgacccgaatcaatgaagaaatcgagaagtttgacatcagtgacaatgctgaccggctcgaggacgtggaggatgacatcagtgtgatctctgtagtggagaaggaaattctggccgtggtcagaaaagagaaagaagaaactggcctgaaagtgtctttgcaaagaaacatggggaatggactcctctcctcagggtgcagcctttatgagtcatcagatctacccctcatgaagttgcctcccagcaacccactacctctggtacctgtaaaggtcaaacaagaaacagttgaaccaatggatcct

SEQ ID NO: 5673 - DNA, 798 bp, Homo sapiens
  source 1..798: mol_type = genomic DNA
atgggcagcaaaaccttgccggcgccggtgcctatccacccttccctgcagctcaccaactactccttccttcaggcagtgaacggcctgcccacagtgccttcggaccatctgcccaacctgtatggtttcagcgcgttgcacgctgtgcacctgcatcagtggacgctgggctacccggccatgcacttgccgcgctcttctttctccaaagtgccgggcacggtgtccagcttggtggatgcgcgcttccagctgcccgcctttccctggttccctcatgtcattcaacccaagcccgagatcaccgctggaggcagcgttccagcgctcaagaccaagccgcgctttgattttgccaacctggccttggcagcaacgcaagaagatccggccaagctcggtcgcggggagggcccaggctcccctgcaggtgggctgggtgccctcctcgacgtgaccaagctgtctccagaaaagaagcccacaaggggacgtctgccttccaagaccaagaaggaattcgtctgcaagttctgtggccgccacttcaccaagtcctacaacctacttatccatgagcggacgcacaccgacgagcggccctacacctgtgacatctgccacaaagccttccggaggcaagaccacctgcgagaccacagatatattcactccaaagagaagcccttcaagtgtcaagagtgtgggaaaggattctgccagtccaggactctcgctgtccacaagacgctacactcacaggtgaaggagctcaaaacctccaagatcaaatgc

SEQ ID NO: 5674 - DNA, 1299 bp, Homo sapiens
  source 1..1299: mol_type = genomic DNA
atggggctgagggcagaggaaggaaaaagaaaacctccgaggtcagtgcggggcgaggtgagcccctcccagggccctctggcccaggaggatgaagcgcgccggcttcgctcttgcacgccggcttgccatccgggtaagcgcgggaaaggcggccacagggcgcggcggcagcgcagcgcgtgggatctcacgacccatccgttaacccaccgttcccaggagctccgaggcgcagcggcgacagagggctttctctacgtgctgttgtctcactgggtttttgtcggagccccacgccctccggcctctgattcctggaagaaagggttggtcccctcagcacccccagcatcccggaaaatggggagcaaggctctgccagcgcccatcccgctccacccgtcgctgcagctcaccaattactccttcctgcaggccgtgaacaccttcccggccacggtggaccacctgcagggcctgtacggtctcagcgcggtacagaccatgcacatgaaccactggacgctggggtatcccaatgtgcacgagatcacccgctccaccatcacggagatggcggcggcgcagggcctcgtggacgcgcgcttccccttcccggccctgccttttaccacccacctattccaccccaagcagggggccattgcccacgtcctcccagccctgcacaaggaccggccccgttttgactttgccaatttggcggtggctgccacgcaagaggatccgcctaagatgggagacctgagcaagctgagcccaggactgggtagccccatctcgggcctcagtaaattgactccggacagaaagccctctcgaggaaggttgccctccaaaacgaaaaaagagtttatctgcaagttttgcggcagacactttaccaaatcctacaatttgctcatccatgagaggacccacacggacgagaggccgtacacgtgtgacatctgccacaaggccttccggaggcaagatcacctgcgggatcacagatacatccattccaaagaaaaacccttcaaatgtcaggagtgtgggaaaggattttgtcagtctagaactctagcagttcacaaaactttacacatgcaggaatctccacacaaatgtcccacatgtggaagaacctttaatcagagaagtaatctgaaaactcaccttctcacccatacagacatcaagccctacagctgcgagcagtgcggcaaagtgttcaggcgaaactgtgatctgcggcggcacagcctgactcacaccccgcggcaggacttc

SEQ ID NO: 5675 - DNA, 936 bp, Homo sapiens
  source 1..936: mol_type = genomic DNA
atggggagcaaggctctgccagcgcccatcccgctccacccgtcgctgcagctcaccaattactccttcctgcaggccgtgaacaccttcccggccacggtggaccacctgcagggcctgtacggtctcagcgcggtacagaccatgcacatgaaccactggacgctggggtatcccaatgtgcacgagatcacccgctccaccatcacggagatggcggcggcgcagggcctcgtggacgcgcgcttccccttcccggccctgccttttaccacccacctattccaccccaagcagggggccattgcccacgtcctcccagccctgcacaaggaccggccccgttttgactttgccaatttggcggtggctgccacgcaagaggatccgcctaagatgggagacctgagcaagctgagcccaggactgggtagccccatctcgggcctcagtaaattgactccggacagaaagccctctcgaggaaggttgccctccaaaacgaaaaaagagtttatctgcaagttttgcggcagacactttaccaaatcctacaatttgctcatccatgagaggacccacacggacgagaggccgtacacgtgtgacatctgccacaaggccttccggaggcaagatcacctgcgggatcacagatacatccattccaaagaaaaacccttcaaatgtcaggagtgtgggaaaggattttgtcagtctagaactctagcagttcacaaaactttacacatgcaggaatctccacacaaatgtcccacatgtggaagaacctttaatcagagaagtaatctgaaaactcaccttctcacccatacagacatcaagccctacagctgcgagcagtgcggcaaagtgttcaggcgaaactgtgatctgcggcggcacagcctgactcacaccccgcggcaggacttc

SEQ ID NO: 5676 - DNA, 5781 bp, Homo sapiens
  source 1..5781: mol_type = genomic DNA
atgcctggggagcagatggaccctactggaagtcagttggattcagatttctctcagcaagatactccttgcctgataattgaagattctcagcctgaaagccaggttctagaggatgattctggttctcacttcagtatgctatctcgacaccttcctaatctccagacgcacaaagaaaatcctgtgttggatgttgtgtccaatcctgaacaaacagctggagaagaacgaggagacggtaatagtgggttcaatgaacatttgaaagaaaacaaggttgcagaccctgtggattcttctaacttggacacatgtggttccatcagtcaggtcattgagcagttacctcagccaaacaggacaagcagtgttctgggaatgtcagtggaatctgctcctgctgtggaggaagagaagggagaagagttggaacagaaggagaaagagaaggaagaagatacttcaggcaatactacacattcccttggtgctgaagatactgcctcatcacagttgggttttggggttctggaactctcccagagccaggatgttgaggaaaatactgtgccatatgaagtggacaaagagcagctacaatcagtaaccaccaactctggttataccaggctgtctgatgtggatgctaatactgcaattaagcatgaagaacagtccaacgaagatatccccatagcagaacagtccagcaaggacatccctgtgacagcacagcccagtaaggatgtacatgttgtaaaagagcaaaatccaccacctgcaaggtcagaggacatgccttttagccccaaagcatctgttgctgctatggaagcaaaagaacagttgtctgcacaagaacttatggaaagtggactgcagattcagaagtcaccagagcctgaggttttgtcaactcaggaagacttgtttgaccagagcaataaaacagtatcttctgatggttgctctactccttcaagggaggaaggtgggtgttctttggcttccactcctgccaccactctgcatctcctgcagctctctggtcagaggtcccttgttcaggacagtctttccacgaattcttcagatcttgttgctccttctcctgatgctttccgatctactccttttatcgttcctagcagtcccacagagcaagaagggagacaagataagccaatggacacgtcagtgttatctgaagaaggaggagagccttttcagaagaaacttcaaagtggtgaaccagtggagttagaaaacccccctctcctgcctgagtccactgtatcaccacaagcctcaacaccaatatctcagagcacaccagtcttccctcctgggtcacttcctatcccatcccagcctcagttttctcatgacatttttattccttccccaagtctggaagaacaatcaaatgatgggaagaaagatggagatatgcatagttcatctttgacagttgagtgttctaaaacttcagagattgaaccaaagaattcccctgaggatcttgggctatctttgacaggggattcttgcaagttgatgctttctacaagtgaatatagtcagtccccaaagatggagagcttgagttctcacagaattgatgaagatggagaaaacacacagattgaggatacggaacccatgtctccagttctcaattctaaatttgttcctgctgaaaatgatagtatcctgatgaatccagcacaggatggtgaagtacaactgagtcagaatgatgacaaaacaaagggagatgatacagacaccagggatgacattagtattttagccactggttgcaagggcagagaagaaacggtagcagaagatgtttgtattgatctcacttgtgattcggggagtcaggcagttccgtcaccagctactcgatctgaggcactttctagtgtgttagatcaggaggaagctatggaaattaaagaacaccatccagaggaggggtcttcagggtctgaggtggaagaaatccctgagacaccttgtgaaagtcaaggagaggaactcaaagaagaaaatatggagagtgttccgttgcacctttctctgactgaaactcagtcccaagggttgtgtcttcaaaaggaaatgccaaaaaaagaatgctcagaagctatggaagttgaaaccagtgtgattagtattgattcccctcaaaagttggcaatacttgaccaagaattggaacataaggaacaggaagcttgggaagaagctacttcagaggactccagtgttgtcattgtagatgtgaaagagccatctcccagagttgatgtttcttgtgaacctttggagggagtggagaagtgctcagattcccagtcatgggaggatattgctccagaaatagaaccatgtgctgagaatagattagacaccaaggaagaaaagagtgtagaatatgaaggagatctgaaatcagggactgcagaaacagaacctgtagagcaagattcttcacagccttccttacctttagtgagagcagatgatcctttaagacttgaccaggagttgcagcagccccaaactcaggagaaaacaagtaattcattaacagaagactcaaaaatggctaatgcaaagcagctaagctcagatgcagaggcccagaagctggggaagccctctgcccatgcctcacaaagcttctgtgaaagttctagtgaaaccccatttcatttcactttgcctaaagaaggtgatatcatcccaccattgactggtgcaaccccacctcttattgggcacctaaaattggagcccaagagacacagtactcctattggtattagcaactatccagaaagcaccatagcaaccagtgatgtcatgtctgaaagcatggtggagacccatgatcccatacttgggagtggaaaaggggattctggggctgccccagacgtggatgataaattatgtctaagaatgaaactggttagtcctgagactgaggcgagtgaagagtctttgcagttcaacctggaaaagcctgcaactggtgaaagaaaaaatggatctactgctgttgctgagtctgttgccagtccccagaagaccatgtctgtgttgagctgtatctgtgaagccaggcaagagaatgaggctcgaagtgaggatccccccaccacacccatcagggggaacttgctccactttccaagttctcaaggagaagaggagaaagaaaaattggagggtgaccatacaatcaggcagagtcaacagcctatgaagcccattagtcctgtcaaggaccctgtttctcctgcttcccagaagatggtcatacaagggccatccagtcctcaaggagaggcaatggtgacagatgtgctagaagaccagaaagaaggacggagtactaataaggaaaatcctagtaaggccttgattgaaaggcccagccaaaataacataggaatccaaaccatggagtgttccttgagggtcccagaaactgtttcagcagcaacccagactataaagaatgtgtgtgagcaggggaccagtacagtggaccagaactttggaaagcaagatgccacagttcagactgagagggggagtggtgagaaaccagtcagtgctcctggggatgatacagagtcgctccatagccagggagaagaagagtttgatatgcctcagcctccacatggccatgtcttacatcgtcacatgagaacaatccgggaagtacgcacacttgtcactcgtgtcattacagatgtgtattatgtggatggaacagaagtagaaagaaaagtaactgaggagactgaagagccaattgtagagtgtcaggagtgtgaaactgaagtttccccttcacagactgggggctcctcaggtgacctgggggatatcagctccttctcctccaaggcatccagcttacaccgcacatcaagtgggacaagtctctcagctatgcacagcagtggaagctcagggaaaggagccggaccactcagagggaaaaccagcgggacagaacccgcagattttgccttacccagctcccgaggaggcccaggaaaactgagagaaacagctgtgcctggccccttgggcatagaggacatttcacctaacttgtcaccagatgataaatccttcagccgtgtcgtgccccgagtgccagactccaccagacgaacagatgtgggtgctggtgctttgcgtcgtagtgactctccagaaattcctttccaggctgctgctggcccttctgatggcttagatgcctcctctccaggaaatagctttgtagggctccgtgttgtagccaagtggtcatccaatggctacttttactctgggaaaatcacacgagatgtcggagctgggaagtataaattgctctttgatgatgggtacgaatgtgatgtgttgggcaaagacattctgttatgtgaccccatcccgctggacactgaagtgacggccctctcggaggatgagtatttcagtgcaggagtggtgaaaggacataggaaggagtctggggaactgtactacagcattgaaaaagaaggccaaagaaagtggtataagcgaatggctgtcatcctgtccttggagcaaggaaacagactgagagagcagtatgggcttggcccctatgaagcagtaacacctcttacaaaggcagcagatatcagcttagacaatttggtggaagggaagcggaaacggcgcagtaacgtcagctccccagccacccctactgcctccagtagcagcagcacaacccctacccgaaagatcacagaaagtcctcgtgcctccatgggagttctctcaggcaaaagaaaacttatcacttctgaagaggaacggtcccctgccaagcgaggtcgcaagtctgccacagtaaaacctggtgcagtaggggcaggagagtttgtgagcccctgtgagagtggagacaacaccggtgaaccctctgccctggaagagcagagagggcctttgcctctcaacaagaccttgtttctgggctacgcatttctccttaccatggccacaaccagtgacaagttggccagccgctccaaactgccagatggtcctacaggaagcagtgaagaagaggaggaatttttggaaattcctcctttcaacaagcagtatacagaatcccagcttcgagcaggagctggctatatccttgaagatttcaatgaagcccagtgtaacacagcttaccagtgtcttctaattgcggatcagcattgtcgaacccggaagtacttcctgtgccttgccagtgggattccttgtgtgtctcatgtctgggtccatgatagttgccatgccaaccagctccagaactaccgtaattatctgttgccagctgggtacagccttgaggagcaaagaattctggactggcaaccccgtgaaaatcctttccagaatctgaaggtactcttggtatcagaccaacagcagaacttcctggagctctggtctgagatcctcatgactggtggtgcagcctctgtgaagcagcaccattcaagtgcccataacaaagatattgctttaggggtatttgatgtggtggtgacggacccctcatgcccagcctcggtgctgaagtgtgctgaagcattgcagctgcctgtggtgtcacaagagtgggtgatccagtgcctcattgttggggagagaattggattcaagcagcatccaaaatataaacacgattatgtttctcac

SEQ ID NO: 5677 - DNA, 5925 bp, Homo sapiens
  source 1..5925: mol_type = genomic DNA
atgcctggggagcagatggaccctactggaagtcagttggattcagatttctctcagcaagatactccttgcctgataattgaagattctcagcctgaaagccaggttctagaggatgattctggttctcacttcagtatgctatctcgacaccttcctaatctccagacgcacaaagaaaatcctgtgttggatgttgtgtccaatcctgaacaaacagctggagaagaacgaggagacggtaatagtgggttcaatgaacatttgaaagaaaacaaggttgcagaccctgtggattcttctaacttggacacatgtggttccatcagtcaggtcattgagcagttacctcagccaaacaggacaagcagtgttctgggaatgtcagtggaatctgctcctgctgtggaggaagagaagggagaagagttggaacagaaggagaaagagaaggaagaagatacttcaggcaatactacacattcccttggtgctgaagatactgcctcatcacagttgggttttggggttctggaactctcccagagccaggatgttgaggaaaatactgtgccatatgaagtggacaaagagcagctacaatcagtaaccaccaactctggttataccaggctgtctgatgtggatgctaatactgcaattaagcatgaagaacagtccaacgaagatatccccatagcagaacagtccagcaaggacatccctgtgacagcacagcccagtaaggatgtacatgttgtaaaagagcaaaatccaccacctgcaaggtcagaggacatgccttttagccccaaagcatctgttgctgctatggaagcaaaagaacagttgtctgcacaagaacttatggaaagtggactgcagattcagaagtcaccagagcctgaggttttgtcaactcaggaagacttgtttgaccagagcaataaaacagtatcttctgatggttgctctactccttcaagggaggaaggtgggtgttctttggcttccactcctgccaccactctgcatctcctgcagctctctggtcagaggtcccttgttcaggacagtctttccacgaattcttcagatcttgttgctccttctcctgatgctttccgatctactccttttatcgttcctagcagtcccacagagcaagaagggagacaagataagccaatggacacgtcagtgttatctgaagaaggaggagagccttttcagaagaaacttcaaagtggtgaaccagtggagttagaaaacccccctctcctgcctgagtccactgtatcaccacaagcctcaacaccaatatctcagagcacaccagtcttccctcctgggtcacttcctatcccatcccagcctcagttttctcatgacatttttattccttccccaagtctggaagaacaatcaaatgatgggaagaaagatggagatatgcatagttcatctttgacagttgagtgttctaaaacttcagagattgaaccaaagaattcccctgaggatcttgggctatctttgacaggggattcttgcaagttgatgctttctacaagtgaatatagtcagtccccaaagatggagagcttgagttctcacagaattgatgaagatggagaaaacacacagattgaggatacggaacccatgtctccagttctcaattctaaatttgttcctgctgaaaatgatagtatcctgatgaatccagcacaggatggtgaagtacaactgagtcagaatgatgacaaaacaaagggagatgatacagacaccagggatgacattagtattttagccactggttgcaagggcagagaagaaacggtagcagaagatgtttgtattgatctcacttgtgattcggggagtcaggcagttccgtcaccagctactcgatctgaggcactttctagtgtgttagatcaggaggaagctatggaaattaaagaacaccatccagaggaggggtcttcagggtctgaggtggaagaaatccctgagacaccttgtgaaagtcaaggagaggaactcaaagaagaaaatatggagagtgttccgttgcacctttctctgactgaaactcagtcccaagggttgtgtcttcaaaaggaaatgccaaaaaaagaatgctcagaagctatggaagttgaaaccagtgtgattagtattgattcccctcaaaagttggcaatacttgaccaagaattggaacataaggaacaggaagcttgggaagaagctacttcagaggactccagtgttgtcattgtagatgtgaaagagccatctcccagagttgatgtttcttgtgaacctttggagggagtggagaagtgctcagattcccagtcatgggaggatattgctccagaaatagaaccatgtgctgagaatagattagacaccaaggaagaaaagagtgtagaatatgaaggagatctgaaatcagggactgcagaaacagaacctgtagagcaagattcttcacagccttccttacctttagtgagagcagatgatcctttaagacttgaccaggagttgcagcagccccaaactcaggagaaaacaagtaattcattaacagaagactcaaaaatggctaatgcaaagcagctaagctcagatgcagaggcccagaagctggggaagccctctgcccatgcctcacaaagcttctgtgaaagttctagtgaaaccccatttcatttcactttgcctaaagaaggtgatatcatcccaccattgactggtgcaaccccacctcttattgggcacctaaaattggagcccaagagacacagtactcctattggtattagcaactatccagaaagcaccatagcaaccagtgatgtcatgtctgaaagcatggtggagacccatgatcccatacttgggagtggaaaaggggattctggggctgccccagacgtggatgataaattatgtctaagaatgaaactggttagtcctgagactgaggcgagtgaagagtctttgcagttcaacctggaaaagcctgcaactggtgaaagaaaaaatggatctactgctgttgctgagtctgttgccagtccccagaagaccatgtctgtgttgagctgtatctgtgaagccaggcaagagaatgaggctcgaagtgaggatccccccaccacacccatcagggggaacttgctccactttccaagttctcaaggagaagaggagaaagaaaaattggagggtgaccatacaatcaggcagagtcaacagcctatgaagcccattagtcctgtcaaggaccctgtttctcctgcttcccagaagatggtcatacaagggccatccagtcctcaaggagaggcaatggtgacagatgtgctagaagaccagaaagaaggacggagtactaataaggaaaatcctagtaaggccttgattgaaaggcccagccaaaataacataggaatccaaaccatggagtgttccttgagggtcccagaaactgtttcagcagcaacccagactataaagaatgtgtgtgagcaggggaccagtacagtggaccagaactttggaaagcaagatgccacagttcagactgagagggggagtggtgagaaaccagtcagtgctcctggggatgatacagagtcgctccatagccagggagaagaagagtttgatatgcctcagcctccacatggccatgtcttacatcgtcacatgagaacaatccgggaagtacgcacacttgtcactcgtgtcattacagatgtgtattatgtggatggaacagaagtagaaagaaaagtaactgaggagactgaagagccaattgtagagtgtcaggagtgtgaaactgaagtttccccttcacagactgggggctcctcaggtgacctgggggatatcagctccttctcctccaaggcatccagcttacaccgcacatcaagtgggacaagtctctcagctatgcacagcagtggaagctcagggaaaggagccggaccactcagagggaaaaccagcgggacagaacccgcagattttgccttacccagctcccgaggaggcccaggaaaactgagtcctagaaaaggggtcagtcagacagggacgccagtgtgtgaggaggatggtgatgcaggccttggcatcagacagggagggaaggctccagtcacgcctcgtgggcgtgggcgaaggggccgcccaccttctcggaccactggaaccagagaaacagctgtgcctggccccttgggcatagaggacatttcacctaacttgtcaccagatgataaatccttcagccgtgtcgtgccccgagtgccagactccaccagacgaacagatgtgggtgctggtgctttgcgtcgtagtgactctccagaaattcctttccaggctgctgctggcccttctgatggcttagatgcctcctctccaggaaatagctttgtagggctccgtgttgtagccaagtggtcatccaatggctacttttactctgggaaaatcacacgagatgtcggagctgggaagtataaattgctctttgatgatgggtacgaatgtgatgtgttgggcaaagacattctgttatgtgaccccatcccgctggacactgaagtgacggccctctcggaggatgagtatttcagtgcaggagtggtgaaaggacataggaaggagtctggggaactgtactacagcattgaaaaagaaggccaaagaaagtggtataagcgaatggctgtcatcctgtccttggagcaaggaaacagactgagagagcagtatgggcttggcccctatgaagcagtaacacctcttacaaaggcagcagatatcagcttagacaatttggtggaagggaagcggaaacggcgcagtaacgtcagctccccagccacccctactgcctccagtagcagcagcacaacccctacccgaaagatcacagaaagtcctcgtgcctccatgggagttctctcaggcaaaagaaaacttatcacttctgaagaggaacggtcccctgccaagcgaggtcgcaagtctgccacagtaaaacctgtaggggcaggagagtttgtgagcccctgtgagagtggagacaacaccggtgaaccctctgccctggaagagcagagagggcctttgcctctcaacaagaccttgtttctgggctacgcatttctccttaccatggccacaaccagtgacaagttggccagccgctccaaactgccagatggtcctacaggaagcagtgaagaagaggaggaatttttggaaattcctcctttcaacaagcagtatacagaatcccagcttcgagcaggagctggctatatccttgaagatttcaatgaagcccagtgtaacacagcttaccagtgtcttctaattgcggatcagcattgtcgaacccggaagtacttcctgtgccttgccagtgggattccttgtgtgtctcatgtctgggtccatgatagttgccatgccaaccagctccagaactaccgtaattatctgttgccagctgggtacagccttgaggagcaaagaattctggactggcaaccccgtgaaaatcctttccagaatctgaaggtactcttggtatcagaccaacagcagaacttcctggagctctggtctgagatcctcatgactggtggtgcagcctctgtgaagcagcaccattcaagtgcccataacaaagatattgctttaggggtatttgatgtggtggtgacggacccctcatgcccagcctcggtgctgaagtgtgctgaagcattgcagctgcctgtggtgtcacaagagtgggtgatccagtgcctcattgttggggagagaattggattcaagcagcatccaaaatataaacacgattatgtttctcac

SEQ ID NO: 5678 - DNA, 5916 bp, Homo sapiens
  source 1..5916: mol_type = genomic DNA
atggaccctactggaagtcagttggattcagatttctctcagcaagatactccttgcctgataattgaagattctcagcctgaaagccaggttctagaggatgattctggttctcacttcagtatgctatctcgacaccttcctaatctccagacgcacaaagaaaatcctgtgttggatgttgtgtccaatcctgaacaaacagctggagaagaacgaggagacggtaatagtgggttcaatgaacatttgaaagaaaacaaggttgcagaccctgtggattcttctaacttggacacatgtggttccatcagtcaggtcattgagcagttacctcagccaaacaggacaagcagtgttctgggaatgtcagtggaatctgctcctgctgtggaggaagagaagggagaagagttggaacagaaggagaaagagaaggaagaagatacttcaggcaatactacacattcccttggtgctgaagatactgcctcatcacagttgggttttggggttctggaactctcccagagccaggatgttgaggaaaatactgtgccatatgaagtggacaaagagcagctacaatcagtaaccaccaactctggttataccaggctgtctgatgtggatgctaatactgcaattaagcatgaagaacagtccaacgaagatatccccatagcagaacagtccagcaaggacatccctgtgacagcacagcccagtaaggatgtacatgttgtaaaagagcaaaatccaccacctgcaaggtcagaggacatgccttttagccccaaagcatctgttgctgctatggaagcaaaagaacagttgtctgcacaagaacttatggaaagtggactgcagattcagaagtcaccagagcctgaggttttgtcaactcaggaagacttgtttgaccagagcaataaaacagtatcttctgatggttgctctactccttcaagggaggaaggtgggtgttctttggcttccactcctgccaccactctgcatctcctgcagctctctggtcagaggtcccttgttcaggacagtctttccacgaattcttcagatcttgttgctccttctcctgatgctttccgatctactccttttatcgttcctagcagtcccacagagcaagaagggagacaagataagccaatggacacgtcagtgttatctgaagaaggaggagagccttttcagaagaaacttcaaagtggtgaaccagtggagttagaaaacccccctctcctgcctgagtccactgtatcaccacaagcctcaacaccaatatctcagagcacaccagtcttccctcctgggtcacttcctatcccatcccagcctcagttttctcatgacatttttattccttccccaagtctggaagaacaatcaaatgatgggaagaaagatggagatatgcatagttcatctttgacagttgagtgttctaaaacttcagagattgaaccaaagaattcccctgaggatcttgggctatctttgacaggggattcttgcaagttgatgctttctacaagtgaatatagtcagtccccaaagatggagagcttgagttctcacagaattgatgaagatggagaaaacacacagattgaggatacggaacccatgtctccagttctcaattctaaatttgttcctgctgaaaatgatagtatcctgatgaatccagcacaggatggtgaagtacaactgagtcagaatgatgacaaaacaaagggagatgatacagacaccagggatgacattagtattttagccactggttgcaagggcagagaagaaacggtagcagaagatgtttgtattgatctcacttgtgattcggggagtcaggcagttccgtcaccagctactcgatctgaggcactttctagtgtgttagatcaggaggaagctatggaaattaaagaacaccatccagaggaggggtcttcagggtctgaggtggaagaaatccctgagacaccttgtgaaagtcaaggagaggaactcaaagaagaaaatatggagagtgttccgttgcacctttctctgactgaaactcagtcccaagggttgtgtcttcaaaaggaaatgccaaaaaaagaatgctcagaagctatggaagttgaaaccagtgtgattagtattgattcccctcaaaagttggcaatacttgaccaagaattggaacataaggaacaggaagcttgggaagaagctacttcagaggactccagtgttgtcattgtagatgtgaaagagccatctcccagagttgatgtttcttgtgaacctttggagggagtggagaagtgctcagattcccagtcatgggaggatattgctccagaaatagaaccatgtgctgagaatagattagacaccaaggaagaaaagagtgtagaatatgaaggagatctgaaatcagggactgcagaaacagaacctgtagagcaagattcttcacagccttccttacctttagtgagagcagatgatcctttaagacttgaccaggagttgcagcagccccaaactcaggagaaaacaagtaattcattaacagaagactcaaaaatggctaatgcaaagcagctaagctcagatgcagaggcccagaagctggggaagccctctgcccatgcctcacaaagcttctgtgaaagttctagtgaaaccccatttcatttcactttgcctaaagaaggtgatatcatcccaccattgactggtgcaaccccacctcttattgggcacctaaaattggagcccaagagacacagtactcctattggtattagcaactatccagaaagcaccatagcaaccagtgatgtcatgtctgaaagcatggtggagacccatgatcccatacttgggagtggaaaaggggattctggggctgccccagacgtggatgataaattatgtctaagaatgaaactggttagtcctgagactgaggcgagtgaagagtctttgcagttcaacctggaaaagcctgcaactggtgaaagaaaaaatggatctactgctgttgctgagtctgttgccagtccccagaagaccatgtctgtgttgagctgtatctgtgaagccaggcaagagaatgaggctcgaagtgaggatccccccaccacacccatcagggggaacttgctccactttccaagttctcaaggagaagaggagaaagaaaaattggagggtgaccatacaatcaggcagagtcaacagcctatgaagcccattagtcctgtcaaggaccctgtttctcctgcttcccagaagatggtcatacaagggccatccagtcctcaaggagaggcaatggtgacagatgtgctagaagaccagaaagaaggacggagtactaataaggaaaatcctagtaaggccttgattgaaaggcccagccaaaataacataggaatccaaaccatggagtgttccttgagggtcccagaaactgtttcagcagcaacccagactataaagaatgtgtgtgagcaggggaccagtacagtggaccagaactttggaaagcaagatgccacagttcagactgagagggggagtggtgagaaaccagtcagtgctcctggggatgatacagagtcgctccatagccagggagaagaagagtttgatatgcctcagcctccacatggccatgtcttacatcgtcacatgagaacaatccgggaagtacgcacacttgtcactcgtgtcattacagatgtgtattatgtggatggaacagaagtagaaagaaaagtaactgaggagactgaagagccaattgtagagtgtcaggagtgtgaaactgaagtttccccttcacagactgggggctcctcaggtgacctgggggatatcagctccttctcctccaaggcatccagcttacaccgcacatcaagtgggacaagtctctcagctatgcacagcagtggaagctcagggaaaggagccggaccactcagagggaaaaccagcgggacagaacccgcagattttgccttacccagctcccgaggaggcccaggaaaactgagtcctagaaaaggggtcagtcagacagggacgccagtgtgtgaggaggatggtgatgcaggccttggcatcagacagggagggaaggctccagtcacgcctcgtgggcgtgggcgaaggggccgcccaccttctcggaccactggaaccagagaaacagctgtgcctggccccttgggcatagaggacatttcacctaacttgtcaccagatgataaatccttcagccgtgtcgtgccccgagtgccagactccaccagacgaacagatgtgggtgctggtgctttgcgtcgtagtgactctccagaaattcctttccaggctgctgctggcccttctgatggcttagatgcctcctctccaggaaatagctttgtagggctccgtgttgtagccaagtggtcatccaatggctacttttactctgggaaaatcacacgagatgtcggagctgggaagtataaattgctctttgatgatgggtacgaatgtgatgtgttgggcaaagacattctgttatgtgaccccatcccgctggacactgaagtgacggccctctcggaggatgagtatttcagtgcaggagtggtgaaaggacataggaaggagtctggggaactgtactacagcattgaaaaagaaggccaaagaaagtggtataagcgaatggctgtcatcctgtccttggagcaaggaaacagactgagagagcagtatgggcttggcccctatgaagcagtaacacctcttacaaaggcagcagatatcagcttagacaatttggtggaagggaagcggaaacggcgcagtaacgtcagctccccagccacccctactgcctccagtagcagcagcacaacccctacccgaaagatcacagaaagtcctcgtgcctccatgggagttctctcaggcaaaagaaaacttatcacttctgaagaggaacggtcccctgccaagcgaggtcgcaagtctgccacagtaaaacctggtgcagtaggggcaggagagtttgtgagcccctgtgagagtggagacaacaccggtgaaccctctgccctggaagagcagagagggcctttgcctctcaacaagaccttgtttctgggctacgcatttctccttaccatggccacaaccagtgacaagttggccagccgctccaaactgccagatggtcctacaggaagcagtgaagaagaggaggaatttttggaaattcctcctttcaacaagcagtatacagaatcccagcttcgagcaggagctggctatatccttgaagatttcaatgaagcccagtgtaacacagcttaccagtgtcttctaattgcggatcagcattgtcgaacccggaagtacttcctgtgccttgccagtgggattccttgtgtgtctcatgtctgggtccatgatagttgccatgccaaccagctccagaactaccgtaattatctgttgccagctgggtacagccttgaggagcaaagaattctggactggcaaccccgtgaaaatcctttccagaatctgaaggtactcttggtatcagaccaacagcagaacttcctggagctctggtctgagatcctcatgactggtggtgcagcctctgtgaagcagcaccattcaagtgcccataacaaagatattgctttaggggtatttgatgtggtggtgacggacccctcatgcccagcctcggtgctgaagtgtgctgaagcattgcagctgcctgtggtgtcacaagagtgggtgatccagtgcctcattgttggggagagaattggattcaagcagcatccaaaatataaacacgattatgtttctcac

SEQ ID NO: 5679 - DNA, 5931 bp, Homo sapiens
  source 1..5931: mol_type = genomic DNA
atgcctggggagcagatggaccctactggaagtcagttggattcagatttctctcagcaagatactccttgcctgataattgaagattctcagcctgaaagccaggttctagaggatgattctggttctcacttcagtatgctatctcgacaccttcctaatctccagacgcacaaagaaaatcctgtgttggatgttgtgtccaatcctgaacaaacagctggagaagaacgaggagacggtaatagtgggttcaatgaacatttgaaagaaaacaaggttgcagaccctgtggattcttctaacttggacacatgtggttccatcagtcaggtcattgagcagttacctcagccaaacaggacaagcagtgttctgggaatgtcagtggaatctgctcctgctgtggaggaagagaagggagaagagttggaacagaaggagaaagagaaggaagaagatacttcaggcaatactacacattcccttggtgctgaagatactgcctcatcacagttgggttttggggttctggaactctcccagagccaggatgttgaggaaaatactgtgccatatgaagtggacaaagagcagctacaatcagtaaccaccaactctggttataccaggctgtctgatgtggatgctaatactgcaattaagcatgaagaacagtccaacgaagatatccccatagcagaacagtccagcaaggacatccctgtgacagcacagcccagtaaggatgtacatgttgtaaaagagcaaaatccaccacctgcaaggtcagaggacatgccttttagccccaaagcatctgttgctgctatggaagcaaaagaacagttgtctgcacaagaacttatggaaagtggactgcagattcagaagtcaccagagcctgaggttttgtcaactcaggaagacttgtttgaccagagcaataaaacagtatcttctgatggttgctctactccttcaagggaggaaggtgggtgttctttggcttccactcctgccaccactctgcatctcctgcagctctctggtcagaggtcccttgttcaggacagtctttccacgaattcttcagatcttgttgctccttctcctgatgctttccgatctactccttttatcgttcctagcagtcccacagagcaagaagggagacaagataagccaatggacacgtcagtgttatctgaagaaggaggagagccttttcagaagaaacttcaaagtggtgaaccagtggagttagaaaacccccctctcctgcctgagtccactgtatcaccacaagcctcaacaccaatatctcagagcacaccagtcttccctcctgggtcacttcctatcccatcccagcctcagttttctcatgacatttttattccttccccaagtctggaagaacaatcaaatgatgggaagaaagatggagatatgcatagttcatctttgacagttgagtgttctaaaacttcagagattgaaccaaagaattcccctgaggatcttgggctatctttgacaggggattcttgcaagttgatgctttctacaagtgaatatagtcagtccccaaagatggagagcttgagttctcacagaattgatgaagatggagaaaacacacagattgaggatacggaacccatgtctccagttctcaattctaaatttgttcctgctgaaaatgatagtatcctgatgaatccagcacaggatggtgaagtacaactgagtcagaatgatgacaaaacaaagggagatgatacagacaccagggatgacattagtattttagccactggttgcaagggcagagaagaaacggtagcagaagatgtttgtattgatctcacttgtgattcggggagtcaggcagttccgtcaccagctactcgatctgaggcactttctagtgtgttagatcaggaggaagctatggaaattaaagaacaccatccagaggaggggtcttcagggtctgaggtggaagaaatccctgagacaccttgtgaaagtcaaggagaggaactcaaagaagaaaatatggagagtgttccgttgcacctttctctgactgaaactcagtcccaagggttgtgtcttcaaaaggaaatgccaaaaaaagaatgctcagaagctatggaagttgaaaccagtgtgattagtattgattcccctcaaaagttggcaatacttgaccaagaattggaacataaggaacaggaagcttgggaagaagctacttcagaggactccagtgttgtcattgtagatgtgaaagagccatctcccagagttgatgtttcttgtgaacctttggagggagtggagaagtgctcagattcccagtcatgggaggatattgctccagaaatagaaccatgtgctgagaatagattagacaccaaggaagaaaagagtgtagaatatgaaggagatctgaaatcagggactgcagaaacagaacctgtagagcaagattcttcacagccttccttacctttagtgagagcagatgatcctttaagacttgaccaggagttgcagcagccccaaactcaggagaaaacaagtaattcattaacagaagactcaaaaatggctaatgcaaagcagctaagctcagatgcagaggcccagaagctggggaagccctctgcccatgcctcacaaagcttctgtgaaagttctagtgaaaccccatttcatttcactttgcctaaagaaggtgatatcatcccaccattgactggtgcaaccccacctcttattgggcacctaaaattggagcccaagagacacagtactcctattggtattagcaactatccagaaagcaccatagcaaccagtgatgtcatgtctgaaagcatggtggagacccatgatcccatacttgggagtggaaaaggggattctggggctgccccagacgtggatgataaattatgtctaagaatgaaactggttagtcctgagactgaggcgagtgaagagtctttgcagttcaacctggaaaagcctgcaactggtgaaagaaaaaatggatctactgctgttgctgagtctgttgccagtccccagaagaccatgtctgtgttgagctgtatctgtgaagccaggcaagagaatgaggctcgaagtgaggatccccccaccacacccatcagggggaacttgctccactttccaagttctcaaggagaagaggagaaagaaaaattggagggtgaccatacaatcaggcagagtcaacagcctatgaagcccattagtcctgtcaaggaccctgtttctcctgcttcccagaagatggtcatacaagggccatccagtcctcaaggagaggcaatggtgacagatgtgctagaagaccagaaagaaggacggagtactaataaggaaaatcctagtaaggccttgattgaaaggcccagccaaaataacataggaatccaaaccatggagtgttccttgagggtcccagaaactgtttcagcagcaacccagactataaagaatgtgtgtgagcaggggaccagtacagtggaccagaactttggaaagcaagatgccacagttcagactgagagggggagtggtgagaaaccagtcagtgctcctggggatgatacagagtcgctccatagccagggagaagaagagtttgatatgcctcagcctccacatggccatgtcttacatcgtcacatgagaacaatccgggaagtacgcacacttgtcactcgtgtcattacagatgtgtattatgtggatggaacagaagtagaaagaaaagtaactgaggagactgaagagccaattgtagagtgtcaggagtgtgaaactgaagtttccccttcacagactgggggctcctcaggtgacctgggggatatcagctccttctcctccaaggcatccagcttacaccgcacatcaagtgggacaagtctctcagctatgcacagcagtggaagctcagggaaaggagccggaccactcagagggaaaaccagcgggacagaacccgcagattttgccttacccagctcccgaggaggcccaggaaaactgagtcctagaaaaggggtcagtcagacagggacgccagtgtgtgaggaggatggtgatgcaggccttggcatcagacagggagggaaggctccagtcacgcctcgtgggcgtgggcgaaggggccgcccaccttctcggaccactggaaccagagaaacagctgtgcctggccccttgggcatagaggacatttcacctaacttgtcaccagatgataaatccttcagccgtgtcgtgccccgagtgccagactccaccagacgaacagatgtgggtgctggtgctttgcgtcgtagtgactctccagaaattcctttccaggctgctgctggcccttctgatggcttagatgcctcctctccaggaaatagctttgtagggctccgtgttgtagccaagtggtcatccaatggctacttttactctgggaaaatcacacgagatgtcggagctgggaagtataaattgctctttgatgatgggtacgaatgtgatgtgttgggcaaagacattctgttatgtgaccccatcccgctggacactgaagtgacggccctctcggaggatgagtatttcagtgcaggagtggtgaaaggacataggaaggagtctggggaactgtactacagcattgaaaaagaaggccaaagaaagtggtataagcgaatggctgtcatcctgtccttggagcaaggaaacagactgagagagcagtatgggcttggcccctatgaagcagtaacacctcttacaaaggcagcagatatcagcttagacaatttggtggaagggaagcggaaacggcgcagtaacgtcagctccccagccacccctactgcctccagtagcagcagcacaacccctacccgaaagatcacagaaagtcctcgtgcctccatgggagttctctcaggcaaaagaaaacttatcacttctgaagaggaacggtcccctgccaagcgaggtcgcaagtctgccacagtaaaacctggtgcagtaggggcaggagagtttgtgagcccctgtgagagtggagacaacaccggtgaaccctctgccctggaagagcagagagggcctttgcctctcaacaagaccttgtttctgggctacgcatttctccttaccatggccacaaccagtgacaagttggccagccgctccaaactgccagatggtcctacaggaagcagtgaagaagaggaggaatttttggaaattcctcctttcaacaagcagtatacagaatcccagcttcgagcaggagctggctatatccttgaagatttcaatgaagcccagtgtaacacagcttaccagtgtcttctaattgcggatcagcattgtcgaacccggaagtacttcctgtgccttgccagtgggattccttgtgtgtctcatgtctgggtccatgatagttgccatgccaaccagctccagaactaccgtaattatctgttgccagctgggtacagccttgaggagcaaagaattctggactggcaaccccgtgaaaatcctttccagaatctgaaggtactcttggtatcagaccaacagcagaacttcctggagctctggtctgagatcctcatgactggtggtgcagcctctgtgaagcagcaccattcaagtgcccataacaaagatattgctttaggggtatttgatgtggtggtgacggacccctcatgcccagcctcggtgctgaagtgtgctgaagcattgcagctgcctgtggtgtcacaagagtgggtgatccagtgcctcattgttggggagagaattggattcaagcagcatccaaaatataaacacgattatgtttctcac

SEQ ID NO: 5680 - DNA, 3402 bp, Homo sapiens
  source 1..3402: mol_type = genomic DNA
atgcggttcgggtccaagatgatgccgatgtttcttaccgtgtatctcagtaacaatgagcagcacttcacagaagttccagttactccagaaacaatatgcagagacgtggtggatctgtgcaaagaacccggcgagagtgattgccatttggctgaagtgtggtgtggctctgaacgtccagttgcggataatgagcgaatgtttgatgttcttcaacgatttggaagtcagaggaacgaagttcgcttcttccttcgtcatgaacgcccccctggcagggacattgtgagtggaccaagatctcaggatccaagtttaaaaagaaatggtgtaaaagttcctggtgaatatcgaagaaaggagaacggtgttaatagtcctaggatggatctgactcttgctgaacttcaggaaatggcatctcgccagcagcaacagattgaagcccagcaacaattgctggcaactaaggaacagcgcttaaagtttttgaaacaacaagatcagcgacaacagcaacaagttgctgagcaggagaaacttaaaaggctaaaagaaatagctgagaatcaggaagctaagctaaaaaaagtgagagcacttaaaggccacgtggaacagaagagactaagcaatgggaaacttgtggaggaaattgaacagatgaataatttgttccagcaaaaacagagggagctcgtcctggctgtgtcaaaagtagaagaactgaccaggcagctagagatgctcaagaacggcaggatcgacagccaccatgacaatcagtctgcagtggctgagcttgatcgcctctataaggagctgcagctaagaaacaaattgaatcaagagcagaatgccaagctacaacaacagagggagtgtttgaataagcgtaattcagaagtggcagtcatggataagcgtgttaatgagctgagggaccggctgtggaagaagaaggcagctctacagcaaaaagaaaatctaccagtttcatctgatggaaatcttccccagcaagccgcgtcagccccaagccgtgtggctgcagtaggtccctatatccagtcgtctactatgcctcggatgccctcaaggcctgaattgctggtgaagccagccctgccggatggttccttggtcattcaggcttcagaggggccgatgaaaatacagacactgcccaacatgagatctggggctgcttcacaaactaaaggctctaaaatccatccagttggccctgattggagtccttcaaatgcagatcttttcccaagccaaggctctgcttctgtacctcaaagcactgggaatgctctggatcaagttgatgatggagaggttccgctgagggagaaagagaagaaagtgcgtccgttctcaatgtttgatgcagtagaccagtccaatgccccaccttcctttggtactctgaggaagaaccagagcagtgaagatatcttgcgggatgctcaggttgcaaataaaaatgtggctaaagtaccacctcctgttcctacaaaaccaaaacagattaatttgccttattttggacaaactaatcagccaccttcagacattaagccagacggaagttctcagcagttgtcaacagttgttccgtccatgggaactaaaccaaaaccagcagggcagcagccgagagtgctgctatctcccagcataccttcggttggccaagaccagaccctttctccaggttctaagcaagaaagtccacctgctgctgccgtccggccctttactccccagccttccaaagacaccttacttccacccttcagaaaaccccagaccgtggcagcaagttcaatatattccatgtatacgcaacagcaggcgccaggaaaaaacttccagcaggctgtgcagagcgcgttgaccaagactcataccagagggccacacttttcaagtgtatatggtaagcctgtaattgctgctgcccagaatcaacagcagcacccagagaacatttattccaatagccagggcaagcctggcagtccagaacctgaaacagagcctgtttcttcagttcaggagaaccatgaaaacgaaagaattcctcggccactcagcccaactaaattactgcctttcttatctaatccttaccgaaaccagagtgatgctgacctagaagccttacgaaagaaactgtctaacgcaccaaggcctctaaagaaacgtagttctattacagagccagagggtcctaatgggccaaatattcagaagcttttatatcagaggaccaccatagcggccatggagaccatctctgtcccatcatacccatccaagtcagcttctgtgactgccagctcagaaagcccagtagaaatccagaatccatatttacatgtggagcccgaaaaggaggtggtctctctggttcctgaatcattgtccccagaggatgtggggaatgccagtacagagaacagtgacatgccagctccttctccaggccttgattatgagcctgagggagtcccagacaacagcccaaatctccagaataacccagaagaaccaaatccagaggctccacatgtgcttgatgtgtacctggaggagtaccctccatacccacccccaccatacccatctggggagcctgaagggcccggagaagactcggtgagcatgcgcccgcctgaaatcaccgggcaggtctctctgcctcctggtaaaaggacaaacttgcgtaaaactggctcagagcgtatcgctcatggaatgagggtgaaattcaacccccttgctttactgctagattcgtctttggagggagaatttgaccttgtacagagaattatttatgaggttgatgacccaagcctccccaatgatgaaggcatcacggctcttcacaatgctgtgtgtgcaggccacacagaaatcgttaagttcctggtacagtttggtgtaaatgtaaatgctgctgatagtgatggatggactccattacattgtgctgcctcatgtaacaacgtccaagtgtgtaagtttttggtggagtcaggagccgctgtgtttgccatgacctacagtgacatgcagactgctgcagataagtgcgaggaaatggaggaaggctacactcagtgctcccaatttctttatggagttcaggagaagatgggcataatgaataaaggagtcatttatgcgctttgggattatgaacctcagaatgatgatgagctgcccatgaaagaaggagactgcatgacaatcatccacagggaagacgaagatgaaatcgaatggtggtgggcgcgccttaatgataaggagggatatgttccacgtaacttgctgggactgtacccaagaattaaaccaagacaaaggagcttggcc

SEQ ID NO: 5681 - DNA, 3270 bp, Homo sapiens
  source 1..3270: mol_type = genomic DNA
atgaacatggagggtctggtgatgttccaagatttaagcatcgactttagccaagaagagtgggagtgtttagatgccgcacaaaaagatttatatcgcgatgttatgatggagaactatagctctttagtgtctttaggtttaagcatcccgaagccggatgttatttctttattagagcaaggtaaggagccgtggatggttagtcgcgacgttttaggtggctggtgccgcgatagcgaattccgctgcaaaaccaaggatagttgtttaccgaaagagatctacgaagtgaccagcagtcagtgggtgcgcatggaaaaatgccacagtctggtgggcagcagcgttcgcgatgattgggagtgcaaaggccagttccagcaccaagacattaatcaagaacgttatttagagaaagccattatgacatatgagaccaccccgaccttctgtttacagacctctttaaccttgcatcatcgcatccatccgggtgagaaactgtataaaagtacagagtgtatggcatttaaatatggtagcgagttaacccagcagcaagaaacccatactggtgaaaagctgtataagtgcaaggaatgcggcaaagcctttcaccatttcagctatttagtgaagcaccaacgcattcacaccggtgagaagccgtgcgcttgtaaggaatacggcaaagcttttatcagcggcagtcatttaattcagcaccagaaaatgtacaccgacgaacgccctcatgaatgccaagaaagcgtgaaagcatttcgtccgagcgcccatttaatccaacactggcgcatccatactggcgataagccgtacgaatgtaaggaatgcggcaagtctttcactagcggcagcaccttaaaccagcatcaacaaattcacaccggtgagaaaccctaccattgtaagcagtgtggcaaatctttcacagttggtagcacattaattcgtcaccaacagatccacaccggcgaaaagccttatgactgcaaagaatgcggcaagagttttgccagcggttctgctttaatccgccaccagcgcattcatactggtgagaagccttatgactgtaaagaatgtggcaagtccttcacctttcacagcgctttaatccgccatcaacgcatccataccggcgaaaagccctatgactgcaaggagtgtggcaaatcttttacctttcgtagcggtttaattggccaccaagctatccatactggcgaaaagccttacgactgtaaagagtgtggtaaaagctttaccgccggctctaccttgatccagcaccagcgtatccacaccggtgagaagccttacgattgtaaagagtgtggtaagtccttcgcctctggtagcgcattactgcaacaccaacgcattcacactggtgagaaaccgtattgctgtaaggaatgtggcaagtcttttaccttccgtagcacccgtaaccgtcatcagcgcattcacaccggcgaaaaaccctacaattgtaaggagtgtggcaaaagctttgcaagcggcagcgcactgttgcagcatcagcgtattcacaccggcgagaaaccgtatcactgcaaagaatgtggcaagtcttttacttttcgcagtggtttaatcggccatcaagctgttcataccggcgagaagccttatgattgcaaggaatgcggtaagtcttttactagtcgcagtgctttaattcaacaccagcgtattcacaccggcgagaagccttaccactgtaaagagtgtggcaagagcttcacagtgggcagtactttactgcagcaccaacaaatccataccggcgaaaaaccctatgactgcaaagaatgtggcaaagcttttcgcttacgcttacgtttaactcagcatcagcaaattcataccggcgaaaaaccttaccaatgccaagaatgcggcaaggccttcgttagcgttagtggtttaacacaacatcaccgtatccataccggcgagaagccgtacgagtgtccggattgtggcaaagctttccgccagcgtacatatctgaatcaacaccgtcgtattcacactggtgagaaaccctatgagtgcaaagaatgtggtaaaagttttacattctgtagtggcttaattcaacatcaacagaatcataccgacgaaaagccctacgacggcaaggaatgcggcaagtcttttaccagccatagcactttgatccaacatcaacagatccatactggtgaaaagccctacgattgtaaagagtgcggcaaatcttttacaagtcacagtacactgattcaacatcaacaaatccacaccggtgaaaaactgtatgattgcaaggaatgcggcaaatcttttaccagccacagcaccttaattcagcatcagcctctgcatactggcgagaagccctaccattgtaaggagtgtggtaagtccttcactttacgcagtgctttaattcaacaccgtccggttcacactggtgagaaacgctacagctgtaaagaatgtggcaaatcctttaccagccgcagcacactgattgaacatcaacgtattcatactggtgagaaaccttatcattgtaaagagtgcggtaaatctttcgccttccgcagcgccatcattcagcaccgccgcatccataccggcgagaagccttacgactgcaaggaatgcggtaaggctttccgccgtcgtagcaagctgacacagcatcaacgtatccacactggcgaaaagccctatcgttgtcacgaatgcggtaaagcattcgtgcgctttagcggcttaaccaagcatcatagcattcacactggtgagaagccctacgagtgcaaaacttgtggtaaaagtttccgtcagcgcacccatctgacactgcaccaacgcatccacaccggtgatcgcccgtatgagtgtaaggagtgcggcaaatctttcacttgtggcagcgaactgattcgtcaccagcgtacacacactggtgaaaaaccctacgactgcaaggaatgcggtaaggcatttcgttgcccgagtcagctgagtcagcataaacgtattcatactggtgaaaagacctatcaatgtccggagtgtggtaaagccttcttttatgcaagcggtctgagccgccaccagagtgttcacaccggcgaaaagccttacgagtgtaaaacttgtggtaaggccttcaagcagctgacccagctgacacgccaccaacgcattcatgacttaacc

SEQ ID NO: 5682 - DNA, 3174 bp, Homo sapiens
  source 1..3174: mol_type = genomic DNA
atgaacatggagggtttagttatgtttcaagatttaagcatcgatttcagccaagaagaatgggagtgtttagatgccgcccagaaggatctgtatcgcgacgtgatgatggagaattacagctctttagtttctttagacagtgagttccgctgtaaaaccaaagacagttgtttaccgaaagaaatctatgaggttaccagcagccaatgggtgcgtatggagaaatgccatagtctggtgggcagcagtgttcgtgatgattgggagtgcaaaggccagttccaacatcaagatattaatcaagagcgctacttagagaaggccatcatgacctacgagaccaccccgacattttgcttacagacaagtttaaccttacatcatcgcatccatccgggtgagaagctgtataaaagtaccgagtgtatggccttcaagtacggtagcgagctgacccagcagcaagaaacccatactggtgaaaagctgtacaagtgcaaggagtgcggcaaagcctttcatcatttcagctatttagttaaacatcagcgtatccacaccggcgagaaaccgtgcgcttgtaaagagtatggcaaggcctttatcagcggtagccatttaatccagcaccagaagatgtacaccgatgaacgtccgcatgaatgccaagaaagtgtcaaggccttccgcccgagcgcccacttaattcaacactggcgtattcataccggtgataaaccctatgagtgtaaagagtgcggcaagagtttcaccagcggcagcaccttaaatcagcaccagcaaatccacactggcgaaaagccgtaccattgcaagcaatgtggtaagtctttcaccgtgggttctactttaattcgtcatcaacagatccacaccggcgagaaaccttacgattgtaaagaatgtggtaagagcttcgcaagtggtagcgccttaatccgtcatcaacgtatccataccggcgaaaaaccttatgactgtaaggaatgtggcaagagctttacctttcatagcgcactgattcgtcaccaacgcatccacaccggtgagaagccttatgactgtaaggagtgtggtaagagcttcacctttcgcagcggcttaatcggtcatcaagctattcacaccggtgaaaagccctacgattgcaaggagtgtggtaagagttttacagctggtagcactttaattcaacaccaacgcatccatactggcgaaaagccttatgactgcaaagaatgcggcaagagctttgccagcggtagcgctttattacaacaccaacgcattcacactggcgaaaagccttattgttgcaaggaatgtggtaaatcttttacattccgtagcacccgcaatcgccaccaacgtatccacactggtgagaagccgtacaattgtaaggagtgcggcaagagcttcgccagtggtagcgcattactgcaacaccagcgcattcataccggcgaaaaaccttatcactgcaaggagtgtggtaaatcctttacctttcgtagcggtttaatcggccaccaagctgttcatactggtgaaaagccttacgactgcaaagaatgtggtaagtcttttaccagccgctctgctttaatccagcaccaacgcattcataccggcgaaaaaccctaccattgcaaagaatgtggcaaatccttcaccgttggtagtactttactgcagcatcagcagattcataccggtgagaaaccctatgattgcaaagagtgcggcaaggcttttcgcttacgtttacgtttaacccaacatcagcaaattcacactggtgagaaaccgtaccaatgtcaagaatgtggtaaagcatttgtgagcgttagtggtttaacacagcaccatcgtatccacactggtgagaagccctacgagtgccccgattgcggtaaggctttccgccagcgcacctatttaaatcaacatcgtcgtatccacactggtgagaagccttacgagtgcaaagaatgtggcaagtcttttaccttctgcagtggcttaatccaacaccaacagaaccacaccgacgagaagccctatgatggtaaagaatgtggcaagagcttcacaagccacagcactttaattcaacatcaacaaatccacactggtgagaagccctacgactgcaaggagtgcggcaaatccttcaccagccatagtacactgattcaacaccaacaaatccatactggcgagaaactgtatgattgcaaagaatgtggtaagtctttcaccagtcattctactttgattcagcaccagcctttacatactggtgagaaaccttaccattgcaaagagtgcggcaagtcctttaccttacgcagcgctctgatccaacaccgcccggtgcacactggtgaaaaacgctattcttgtaaagaatgtggcaaatcttttacttctcgcagtactctgattgagcaccagcgcatccacactggtgagaaaccgtatcattgtaaggagtgtggtaagagtttcgccttccgcagtgcaattatccagcaccgccgtatccacactggcgagaaaccctacgattgtaaagaatgcggtaaagcattccgtcgccgtagcaaactgactcagcatcaacgcatccacactggtgagaaaccttaccgttgccatgagtgcggcaaagcttttgtgcgcttcagcggtctgacaaaacaccatagcatccataccggcgagaaaccctatgaatgcaagacttgtggtaaaagttttcgccagcgtacacacttaactttacatcaacgtattcacactggcgatcgtccttacgagtgtaaggaatgcggcaagtccttcacttgcggtagtgagctgatccgccatcagcgcacacacaccggcgaaaagccttacgattgcaaagagtgtggtaaagcttttcgttgcccgagccagctgagtcaacacaagcgcatccataccggtgaaaaaacataccagtgtccggaatgcggcaaggccttcttctacgccagtggtctgagtcgccaccaaagcgtccacaccggtgaaaagccgtatgagtgtaaaacatgtggcaaagccttcaagcaactgacccaactgacacgccaccaacgtatccatgatctgaca

SEQ ID NO: 5683 - DNA, 1779 bp, Homo sapiens
  source 1..1779: mol_type = genomic DNA
atgaaactacaggccgtgatggagacgctgttgcagcggcagcagcgggcgcgccaggagctggaggcccggcagcagctgccccccgatccccctgctgcaccccccggccgggcccgggctgcccccgacgaggacagagagcccgagagtgcccggatgcagcgggctcagatggccgcactggcagccatgcgggctgcagctgcgggcctgggacacccagccagccccggcggctctgaggatgggcccccaggctcggaggaggaggacgcggcccgggaggggacaccgggctcacccgggcgaggcagagaagggccaggagaggagcactttgaggacatggcctccgacgaggacatgaagcccaaatgggaggaggaggagatggaggaagacctcggggaggatgaggaggaggaggaggaggattacgaggatgaggaggaggaggaggacgaggaggggctgggccccccaggccctgccagcttgggcaccacggcactgttcccccgaaaggcccagccaccccaggccttccgcggcgatggcgttcccagggtgctggggggccaggagcggccggggcctggccctgcccaccccggaggggccgcccacgtagccccgcagctgcagccgcctgaccacggcgactggacttacgaggagcagtttaagcagctctacgaactcgacggggaccccaagaggaaggaattcctggatgacttgttcagcttcatgcagaagcgagggacacctgtgaaccgcatccccatcatggccaaacaggtccttgacctgttcatgctgtacgtgctggtgacggagaagggcggcctcgtggaggtcatcaacaagaagctgtggcgtgagatcaccaagggcctcaacctgcccacgtccatcaccagtgcagccttcaccctgcggacccaatacatgaagtacctgtacccctacgagtgtgagaagcggggcctcagtaaccccaatgagctccaggcagccatagacagcaaccgacgggagggccggcgccagagctttggtggctccctctttgcctactcgccaggcggggcacacggcatgctctcctcacccaagctacccgtgtcctccctgggcctggccgcaagcaccaatggcagctccatcacccccgcccctaagatcaagaaagaggaggactcagccatccccatcacagtccctggccgcctgcctgtgtccctggcgggccaccctgtggtggcagcccaggcagcagctgtgcaagcagcagccgcccaagcagctgtggccgcacaggcagctgccctggaacagctgcgggagaagctggagtctgcagagcctccggagaagaagatggccctggtggccgatgagcagcaacggctgatgcaacgtgcactccagcagaacttcctggccatggcggcccagctgcccatgagcattcggatcaacagccaagcctccgaaagccgccaggactctgctgtgaacctgacgggcaccaacggcagcaacagcatcagcatgtcggtggagatcaacggcatcatgtacacaggagttctgtttgctcagccgccggcccccacgccaacctctgctcccaacaaaggaggcggcggcggcggcggcagcagcagcaacgcaggcggccggggaggaaacaccggaaccagcggcggccaggctgggccagcggggctgtccacaccctccacatctacctcaaataactcgttgcct

SEQ ID NO: 5684 - DNA, 1236 bp, Homo sapiens
  source 1..1236: mol_type = genomic DNA
atggaggccctgcagaagcagcaggcagctcggctggcccagggggtggggccattggcccctgcatgcccgctgctgccaccgcagcctcccctgcctgaccaccggaccctacaggcccctgagggggccttggggaatgttggggctgaggaagaggaagatgctgaagaagatgaggagaagcgggaggaagccggggcagaggaggaggcagctgaggagagccgtccaggggcccagggccccagctcgccttctagccagccccctggactccatccccacgagtggacctacgaggaacaattcaagcagctgtatgagctcgatgcagaccccaagaggaaggaatttctggatgacctgtttagcttcatgcaaaagagggggacgccagtgaaccgcgtgcccatcatggcgaagcaggtgctcgacctgtacgctctgtttcgcctggtgaccgccaagggcggcctggtggaagtcatcaaccgcaaagtgtggcgggaagtcacgcgcggcctcagcctacccaccaccatcacctcggccgccttcactctacgcacccagtacatgaagtacctgtacccgtacgagtgcgagactcgagcgctcagctccccaggggagctccaggccgccatagacagcaatcggcgcgagggccgtcgccaggcttacaccgctactccgctcttcggcttggcagggccgccccctcggggcgctcaggacccagccttgggtcccggccccgcccctccggcgacccagtccagccctggcccagcccagggttccacctccggcctgccagcgcatgcatgcgctcagctgagtccaagccctattaagaaagaggagagtggaattccaaacccttgtctggcactgcctgtgggcctggcactgggacctacacgggagaaattggcaccagaggagcccccagagaagagagctgtgctgatggggcctatggacccacctcgaccttgcatgccccccagtttcctgccccgtggcaaggttcccctgagggaagagcggctggatgggcctcttaatctggcaggcagtggcatcagcagtatcaacatggccctagagatcaacggggtggtctacactggtgtcctctttgcccgccgccagcctgtgccagcttcccagggtccaaccaaccctgcacccccaccctccacagggcccccttccagcatcttgccc

SEQ ID NO: 5685 - DNA, 1683 bp, Homo sapiens
  source 1..1683: mol_type = genomic DNA
atggagccacttcagcagcagcagcagcagcagcagcaacaacagaagcagccacacctggctcctctgcagatggatgccagagagaagcagggccagcagatgagagaagcccagttcttgtatgcccaaaagctggtcacacagccgactctcctttccgccacagctgggagaccttctggcagcactcccttaggtcccttagccagagttccacccaccgcagcagtggcccaagtgtttgaacggggcaacatgaactcagagcctgaggaagaggacggaggtttggaagatgaggatggggatgatgaagttgcagaggtggctgagaaagaaacccaggctgcttcaaaatattttcatgtgcagaaagtagctcgccaagatcccagagtggcacccatgtccaatctacttccagcaccagggctcccaccacatggacaacaagctaaagaagaccataccaaagatgcttccaaggcctcaccttctgtctccacagcaggacagccgaactggaatctggatgagcagctcaagcagaatggtggtttggcctggagtgatgatgcagatggaggccggggaagagagatctctcgagattttgccaagctgtatgaactggacggtgatcctgaaaggaaagagttcctggatgacctcttcgtctttatgcagaagagggggacccccatcaaccgaatccccatcatggccaaacagatcctggacctgtacatgctgtataagctggtgaccgagaagggaggcctggtggagatcatcaacaagaagatctggagggagatcaccaaaggcctaaacctgcccacatccatcaccagcgccgccttcaccctcaggacgcagtacatgaagtatctgtatgcctatgagtgtgagaagaaagccttgagttccccagccgagctccaggcagcaattgatggcaaccgcagggagggccggcggcccagctacagctcctccctctttggctactcacctgctgcggctactgctgctgccgctgccggggcccctgcccttctctccccacccaagatccgctttcccatccttgggcttggctccagcagtggtaccaataccagtagccctcggatatccccagcaaccactctcaggaaaggtgatggagccccagtgacaacagtgcctgtgccaaatcgtctggctgtgcccgtgaccttggcaagccagcaggctggtactcggaccgccgcactggagcagctgcgggagcggctggagtcaggggagcctgctgagaagaaggcatcgaggctgtctgaggaggagcagcgcctggtgcagcaggccttccagcgcaactttttcagcatggcacggcagctccccatgaagatcaggatcaacggcagggcagaagacagagcagaggcctcggctgcagcactgaacctgaccacgagtagcattgggagcattaacatgtctgtggacatcgatggcaccacctatgcaggtgtgctgtttgcccagaagcctgtggtccacctcatcacggggtctgctccccagagcctcggcagcagcgccagcagcagcagcagctctcactgttcaccaagtcctacctcatcccggggcacccccagcgcagagccctccaccagctggtccctc

SEQ ID NO: 5686 - DNA, 1680 bp, Homo sapiens
  source 1..1680: mol_type = genomic DNA
atggagccacttcagcagcagcagcagcagcagcagcaacaacagaagcagccacacctggctcctctgcagatggatgccagagagaagcagggccagcagatgagagaagcccagttcttgtatgcccaaaagctggtcacacagccgactctcctttccgccacagctgggagaccttctggcagcactcccttaggtcccttagccagagttccacccaccgcagcagtggcccaagtgtttgaacggggcaacatgaactcagagcctgaggaagaggacggaggtttggaagatgaggatggggatgatgaagttgcagaggtggctgagaaagaaacccaggctgcttcaaaatattttcatgtgcagaaagtagctcgccaagatcccagagtggcacccatgtccaatctacttccagcaccagggctcccaccacatggacaacaagctaaagaagaccataccaaagatgcttccaaggcctcaccttctgtctccacagcaggacagccgaactggaatctggatgagcagctcaagcagaatggtggtttggcctggagtgatgatgcagatggaggccggggaagagagatctctcgagattttgccaagctgtatgaactggacggtgatcctgaaaggaaagagttcctggatgacctcttcgtctttatgcagaagagggggacccccatcaaccgaatccccatcatggccaaacagatcctggacctgtacatgctgtataagctggtgaccgagaagggaggcctggtggagatcatcaacaagaagatctggagggagatcaccaaaggcctaaacctgcccacatccatcaccagcgccgccttcaccctcaggacgcagtacatgaagtatctgtatgcctatgagtgtgagaagaaagccttgagttccccagccgagctccaggcagcaattgatggcaaccgcagggagggccggcggcccagctacagctcctccctctttggctactcacctgctgcggctactgctgctgccgctgccggggcccctgcccttctctccccacccaagatccgctttcccatccttgggcttggctccagcagtggtaccaataccagtagccctcggatatccccagcaaccactctcaggaaaggtgatggagccccagtgacaacagtgcctgtgccaaatcgtctggctgtgcccgtgaccttggcaagccagcaggctggtactcggaccgccgcactggagcagctgcgggagcggctggagtcaggggagcctgctgagaagaaggcatcgaggctgtctgaggaggagcagcgcctggtgcagcaggccttccagcgcaactttttcagcatggcacggcagctccccatgaagatcaggatcaacggcagggaagacagagcagaggcctcggctgcagcactgaacctgaccacgagtagcattgggagcattaacatgtctgtggacatcgatggcaccacctatgcaggtgtgctgtttgcccagaagcctgtggtccacctcatcacggggtctgctccccagagcctcggcagcagcgccagcagcagcagcagctctcactgttcaccaagtcctacctcatcccggggcacccccagcgcagagccctccaccagctggtccctc

SEQ ID NO: 5687 - DNA, 2067 bp, Homo sapiens
  source 1..2067: mol_type = genomic DNA
atggaggatactggcatccagcgaggcatctgggatggagatgccaaggctgtccaacaatgtctgacagatatttttaccagcgtttacaccacctgcgacatccctgagaatgctatatttggtccctgtgtcctgagccatacttccctatatgacagcatagctttcatagctctcaagtctactgacaagagaacagtaccgtatatctttcgggtagacacctcagcagcaaatggttcctcagaaggtctcatgtggctgcggttggtccaatcggccagagataaggaagagcagaaccttgaagcctacataaaaaacggacagctgttctaccgctctctccgcaggattgccaaagacgaggagttactagtttggtacgggaaagaactgactgagttactcttgctctgcccctctagatcccacaacaaaatgaatgggtcgtccccttacacatgcctggaatgcagccaacgtttccagtttgagttcccctatgtggcgcatctgcgtttccgctgccccaagagacttcacagcgctgatataagtccccaagacgaacaaggcggcggcgtgggcaccaaggaccacgggggcggcggcggcggtggcaaagaccagcagcagcagcagcaggaagccccgctgggcccgggcccgaaattctgcaaagccggcccgctgcatcactatccgagtccgagcccggaaagcagcaatccaagcgcggcggcgggtggtagcagcgccaaaccaagcaccgatttccataatctggcgcgcgaactggaaaatagtcgcggtggcagcagctgcagcccggcccagagtctgagtagtggcagcggtagcggtggcggtggtggtcatcaagaagcggaactgagcccagatggcattgccaccggtggcggcaaaggcaaacgcaaattcccggaggaagccgcggaaggtggtggtggtgccggtctggttggcggtcgtggccgctttgttgaacgcccactgccggccagcaaagaagatctggtgtgcaccccgcagcagtatcgtgcgagcggcagctacttcggtctggaagaaaatggtcgtctgttcgccccgccaagcccagaaaccggcgaagccaaacgcagtgccttcgtggaagttaaaaaagcggcccgcgccgcgagtctgcaagaagaaggtaccgccgatggtgcgggtgttgccagcgaagatcaagatgccggcggtggtggcggtagtagtacgccagcggccgccagtccagttggcgcggaaaaactgctggccccacgtccgggcggcccactgccaagtcgtctggaaggtggtagcccagcccgcggtagcgcctttacttcggtgccgcagctgggcagcgcgggcagcacctctggcggtggtggtaccggtgctggtgctgctggtggtgctggtggtggtcaaggtgctgcttctgatgaacgtaagtctgctttttctcaaccggctcgttccttttctcaactctctccactcgttctcggtcaaaaactcggtgctctggaaccgtgtcatccggctgatggtgttggtccgactcgtctgtacccggctgctgctgatccgctggctgttaaactgcaaggtgctgctgatctcaatggtggctgtggttctctcccatctggtggtggtggtctcccgaaacaatctccgtttctctatgctactgctttttggccgaaatcttctgcagctgcagctgctgctgcagctgctgctgctgctggtccgctgcaactccaactcccgtctgctctgaccctcctcccaccgtcttttacttctctctgcctcccggctcaaaattggtgtgctaaatgtaacgcttcttttcgtatgacttctgatctcgtttatcacatgcgttctcatcataagaaagaatacgctatggaaccgctggttaaacgtcgtcgtgaagaaaagctgaaatgtccgatttgtaacgaatcttttcgtgaacgtcatcatctgtctcgtcatatgacttctcacaac

SEQ ID NO: 5688 - DNA, 2682 bp, Homo sapiens
  source 1..2682: mol_type = genomic DNA
atgagccctgaaaagtcccaagaggagagcccagaagaagacacagagagaacagagcggaagcccatggtcaaagatgccttcaaagacatttccatatacttcaccaaggaagaatgggcagagatgggagactgggagaaaactcgctataggaatgtgaaaaggaactataatgcactgattactataggtctcagagccactcgaccagctttcatgtgtcaccgaaggcaggccatcaaactccaggtggatgacacagaagattctgatgaagaatggacccctaggcagcaagtcaaacctccttggatggccttaagagtggaacagcgtaaacaccagaagggaatgcccaaggcgtcattcagtaatgaatctagtttgaaagaattgtcaagaacagcaaatttactgaatgcaagtggctcagagcaggctcagaaaccagtgtccccttctggagaagcaagtacctctggacagcactcaagactaaaactggaactcaggaagaaggagactgaaagaaagatgtatagcctgcgagaaagaaagggtcatgcatacaaagaggtcagcgagccgcaggatgatgattacctctattgtgagatgtgtcagaacttcttcattgacagctgtgctgcccatgggccccctacatttgtaaaggacagtgcagtggacaaggggcaccccaaccgttcagccctcagtctgcccccagggctgagaattgggccatcaggcatccctcaggctgggcttggagtatggaatgaggcatctgatctgccgctgggtctgcactttggcccttatgagggccgaattacagaagacgaagaggcagccaacaatggatactcctggctgatcaccaaggggagaaactgctatgagtatgtggatggaaaagataaatcctgggccaactggatgaggtatgtgaactgtgcccgggatgatgaagagcagaacctggtggccttccagtaccacaggcagatcttctatagaacctgccgagtcattaggccaggctgtgaactgctggtctggtatggggatgaatacggccaggaactgggcatcaagtggggcagcaagtggaagaaagagctcatggcagggagagaaccaaagccagagatccatccatgtccctcatgctgtctggccttttcaagtcagaaatttctcagtcaacatgtagaacgcaatcactcctctcagaacttcccaggaccatctgcaagaaaactcctccaaccagagaatccctgcccaggggatcagaatcaggagcagcaatatccagatccacacagccgtaatgacaaaaccaaaggtcaagagatcaaagaaaggtccaaactcttgaataaaaggacatggcagagggagatttcaagggccttttctagcccacccaaaggacaaatggggagctgtagagtgggaaaaagaataatggaagaagagtccagaacaggccagaaagtgaatccagggaacacaggcaaattatttgtgggggtaggaatctcaagaattgcaaaagtcaagtatggagagtgtggacaaggtttcagtgttaaatcagatgttattacacaccaaaggacacatacaggggagaagctctacgtctgcagggagtgtgggcggggctttagctggaagtcacacctcctcattcaccagaggatacacacaggggagaagccctatgtctgcagggagtgtgggcggggctttagctggcagtcagtcctcctcactcaccagaggacacacacaggggagaagccctatgtctgcagggagtgtgggcggggctttagccggcagtcagtcctcctcactcaccagaggagacacacaggggagaagccctatgtctgcagggagtgtgggcggggctttagccggcagtcagtcctcctcactcaccagaggagacacacaggggagaagccctatgtctgcagggagtgtgggcggggctttagctggcagtcagtcctcctcactcaccagaggacacacacaggggagaagccctatgtctgcagggagtgtgggcggggctttagctggcagtcagtcctcctcactcaccagaggacacacacaggggagaagccctatgtctgcagggagtgtgggcggggctttagcaataagtcacacctcctcagacaccagaggacacacacaggggagaagccctatgtctgcagggagtgtgggcggggctttcgcgataagtcacacctcctcagacaccagaggacacacacaggggagaagccctatgtctgcagggagtgtgggcggggctttagagataagtcaaacctcctcagtcaccagaggacacacacaggggagaagccctatgtctgcagggagtgtgggcggggctttagcaataagtcacacctcctcagacaccagaggacacacacaggggagaagccctatgtctgcagggagtgtgggcggggctttcgcaataagtcacacctcctcagacaccagaggacacacacaggggagaagccctacgtctgcagggagtgtgggcggggctttagcgataggtcaagcctctgctatcaccagaggacacacacaggggagaagccctacgtctgcagggaggatgag

SEQ ID NO: 5689 - DNA, 966 bp, Homo sapiens
  source 1..966: mol_type = genomic DNA
atggcggaccgagacagcggcagcgagcagggtggtgcggcgctgggttcgggcggctccctggggcaccccggctcgggctcaggctccggcgggggcggtggtggcggcgggggcggcggcggcagtggcggcggcggcggcggggccccaggggggctgcagcacgagacgcaggagctggcctccaagcgggtggacatccagaacaagcgcttctacctggacgtgaagcagaacgccaagggccgcttcctgaagatcgccgaggtgggcgcgggcggcaacaagagccgccttactctctccatgtcagtggccgtggagttccgcgactacctgggcgacttcatcgagcactacgcgcagctgggccccagccagccgccggacctggcccaggcgcaggacgagccgcgccgggcgctcaaaagcgagttcctggtgcgcgagaaccgcaagtactacatggatctcaaggagaaccagcgcggccgcttcctgcgcatccgccagacggtcaaccgggggcctggcctgggctccacgcagggccagaccattgcgctgcccgcgcaggggctcatcgagttccgtgacgctctggccaagctcatcgacgactacggagtggaggaggagccggccgagctgcccgagggcacctccttgactgtggacaacaagcgcttcttcttcgatgtgggctccaacaagtacggcgtgtttatgcgagtgagcgaggtgaagcccacctatcgcaactccatcaccgtgccctacaaggtgtgggccaagttcggacacaccttctgcaagtactcggaggagatgaagaagattcaagagaagcagagggagaagcgggctgcctgtgagcagcttcaccagcagcaacagcagcagcaggaggagaccgccgctgccaccctgctactgcagggtgaggaagaaggggaagaagat

SEQ ID NO: 5690 - DNA, 2109 bp, Homo sapiens
  source 1..2109: mol_type = genomic DNA
atggcggagctgatgctgctcagcgagattgctgacccgacgcgtttcttcaccgacaacctgcttagcccggaggactggggtctgcagaacagcaccttgtattctggcctagatgaagtggccgaggagcagacgcagctcttccgttgcccggagcaggatgtcccgtttgacggcagctccctggacgtggggatggatgtcagcccctctgagcccccatgggaactcctgccgatcttcccagatcttcaggtgaagtctgagccatcttccccctgctcttcctcctccctcagctccgagtcatcgcgtctctccacagagccatccagcgaggctcttggggtaggggaggtgctccatgtgaagacagagtccttggcacccccactgtgtctcctgggagatgacccaacatcctcatttgaaaccgtccagatcaacgttatccccacctctgatgattcctcagatgtccagaccaagatagaacctgtctctccatgttcttccgtcaactctgaggcctccctgctctcagccgactcctccagccaggcttttataggagaggaggtcctggaagtgaagacagagtccctgtccccttcaggatgcctcctgtgggatgtcccagccccctcacttggagctgtccagatcagcatgggcccatcccttgatggctcctcaggcaaagccctgcccacccggaagccgccactgcagcccaaacctgtagtgctaaccactgtcccaatgccatccagagctgtgcctcccagcaccacagtccttctgcagtccctcgtccagccacccccagtgtccccagttgtcctcatccagggtgctattcgagtccagcctgaagggccggctccctctctaccacggcctgagaggaagagcatcgttcccgctcctatgcctggaaactcctgcccgcctgaagtggatgcaaagctgctgaagcggcagcagcgaatgatcaagaaccgggagtcagcctgccagtcccggagaaagaagaaagagtatctgcagggactggaggctcggctgcaagcagtactggctgacaaccagcagctccgccgagagaatgctgccctccggcggcggctggaggccctgctggctgaaaacagcgagctcaagttagggtctggaaacaggaaggtggtctgcatcatggtcttccttctcttcattgccttcaactttggacctgtcagcatcagtgagcctccttcagctcccatctctcctcggatgaacaagggggagcctcaaccccggagacacttgctggggttctcagagcaagagccagttcagggagttgaacctctccaggggtcctcccagggccctaaggagccccagcccagccccacagaccagcccagtttcagcaacctgacagccttccctgggggcgccaaggagctactactaagagacctagaccagctcttcctctcctctgattgccggcacttcaaccgcactgagtccctgaggcttgctgacgagttgagtggctgggtccagcgccaccagagaggccggaggaagatccctcagagggcccaggagagacagaagtctcagccacggaagaagtcacctccagttaaggcagtccccatccaaccccctggacccccagaaagggattctgtgggccagctgcaactatatcgccacccagaccgttcgcagccagcattcttggatgcaattgaccgacgggaagacacattttatgttgtctctttccgaagggaccacctgctgctcccagccatcagccacaacaagacctcccggcccaagatgtccctggtgatgcctgccatggcccccaatgagaccctgtcaggccgtggggccccgggggactatgaggagatgatgcagatcgagtgtgaggtcatggacaccagggtgattcacatcaagacctccacagtgcccccctcgctccgaaaacagccatccccaaccccaggcaatgccacaggtggccccttgccagtctctgcagccagccaggcccaccaggcctcccaccagcccctctacctcaatcatccc

SEQ ID NO: 5691 - DNA, 2100 bp, Homo sapiens
  source 1..2100: mol_type = genomic DNA
atggcggagctgatgctgctcagcgagattgctgacccgacgcgtttcttcaccgacaacctgcttagcccggaggactgggacagcaccttgtattctggcctagatgaagtggccgaggagcagacgcagctcttccgttgcccggagcaggatgtcccgtttgacggcagctccctggacgtggggatggatgtcagcccctctgagcccccatgggaactcctgccgatcttcccagatcttcaggtgaagtctgagccatcttccccctgctcttcctcctccctcagctccgagtcatcgcgtctctccacagagccatccagcgaggctcttggggtaggggaggtgctccatgtgaagacagagtccttggcacccccactgtgtctcctgggagatgacccaacatcctcatttgaaaccgtccagatcaacgttatccccacctctgatgattcctcagatgtccagaccaagatagaacctgtctctccatgttcttccgtcaactctgaggcctccctgctctcagccgactcctccagccaggcttttataggagaggaggtcctggaagtgaagacagagtccctgtccccttcaggatgcctcctgtgggatgtcccagccccctcacttggagctgtccagatcagcatgggcccatcccttgatggctcctcaggcaaagccctgcccacccggaagccgccactgcagcccaaacctgtagtgctaaccactgtcccaatgccatccagagctgtgcctcccagcaccacagtccttctgcagtccctcgtccagccacccccagtgtccccagttgtcctcatccagggtgctattcgagtccagcctgaagggccggctccctctctaccacggcctgagaggaagagcatcgttcccgctcctatgcctggaaactcctgcccgcctgaagtggatgcaaagctgctgaagcggcagcagcgaatgatcaagaaccgggagtcagcctgccagtcccggagaaagaagaaagagtatctgcagggactggaggctcggctgcaagcagtactggctgacaaccagcagctccgccgagagaatgctgccctccggcggcggctggaggccctgctggctgaaaacagcgagctcaagttagggtctggaaacaggaaggtggtctgcatcatggtcttccttctcttcattgccttcaactttggacctgtcagcatcagtgagcctccttcagctcccatctctcctcggatgaacaagggggagcctcaaccccggagacacttgctggggttctcagagcaagagccagttcagggagttgaacctctccaggggtcctcccagggccctaaggagccccagcccagccccacagaccagcccagtttcagcaacctgacagccttccctgggggcgccaaggagctactactaagagacctagaccagctcttcctctcctctgattgccggcacttcaaccgcactgagtccctgaggcttgctgacgagttgagtggctgggtccagcgccaccagagaggccggaggaagatccctcagagggcccaggagagacagaagtctcagccacggaagaagtcacctccagttaaggcagtccccatccaaccccctggacccccagaaagggattctgtgggccagctgcaactatatcgccacccagaccgttcgcagccagcattcttggatgcaattgaccgacgggaagacacattttatgttgtctctttccgaagggaccacctgctgctcccagccatcagccacaacaagacctcccggcccaagatgtccctggtgatgcctgccatggcccccaatgagaccctgtcaggccgtggggccccgggggactatgaggagatgatgcagatcgagtgtgaggtcatggacaccagggtgattcacatcaagacctccacagtgcccccctcgctccgaaaacagccatccccaaccccaggcaatgccacaggtggccccttgccagtctctgcagccagccaggcccaccaggcctcccaccagcccctctacctcaatcatccc

SEQ ID NO: 5692 - DNA, 1950 bp, Homo sapiens
  source 1..1950: mol_type = genomic DNA
atggcctcgccggctgacagctgtatccagttcacccgccatgccagtgatgttcttctcaaccttaatcgtctccggagtcgagacatcttgactgatgttgtcattgttgtgagccgtgagcagtttagagcccataaaacggtcctcatggcctgcagtggcctgttctatagcatctttacagaccagttgaaatgcaaccttagtgtgatcaatctagatcctgagatcaaccctgagggattctgcatcctcctggacttcatgtacacatctcggctcaatttgcgggagggcaacatcatggctgtgatggccacggctatgtacctgcagatggagcatgttgtggacacttgccggaagtttattaaggccagtgaagcagagatggtttctgccatcaagcctcctcgtgaagagttcctcaacagccggatgctgatgccccaagacatcatggcctatcggggtcgtgaggtggtggagaacaacctgccactgaggagcgcccctgggtgtgagagcagagcctttgcccccagcctgtacagtggcctgtccacaccgccagcctcttattccatgtacagccacctccctgtcagcagcctcctcttctccgatgaggagtttcgggatgtccggatgcctgtggccaaccccttccccaaggagcgggcactcccatgtgatagtgccaggccagtccctggtgagtacagccggccgactttggaggtgtcccccaatgtgtgccacagcaatatctattcacccaaggaaacaatcccagaagaggcacgaagtgatatgcactacagtgtggctgagggcctcaaacctgctgccccctcagcccgaaatgccccctacttcccttgtgacaaggccagcaaagaagaagagagaccctcctcggaagatgagattgccctgcatttcgagccccccaatgcacccctgaaccggaagggtctggttagtccacagagcccccagaaatctgactgccagcccaactcgcccacagagtcctgcagcagtaagaatgcctgcatcctccaggcttctggctcccctccagccaagagccccactgaccccaaagcctgcaactggaagaaatacaagttcatcgtgctcaacagcctcaaccagaatgccaaaccagaggggcctgagcaggctgagctgggccgcctttccccacgagcctacacggccccacctgcctgccagccacccatggagcctgagaaccttgacctccagtccccaaccaagctgagtgccagcggggaggactccaccatcccacaagccagccggctcaataacatcgttaacaggtccatgacgggctctccccgcagcagcagcgagagccactcaccactctacatgcaccccccgaagtgcacgtcctgcggctctcagtccccacagcatgcagagatgtgcctccacaccgctggccccacgttccctgaggagatgggagagacccagtctgagtactcagattctagctgtggtgagaaaccctatcgttgcaacatctgtggggcccagttcaaccggccagccaacctgaaaacccacactcgaattcactctggagagaagccctacaaatgcgaaacctgcggagccagatttgtacaggtggcccacctccgtgcccatgtgcttatccacactggtgagaagccctatccctgtgaaatctgtggcacccgtttccggcaccttcagactctgaagagccacctgcgaatccacacaggagagaaaccttaccattgtgagaagtgtaacctgcatttccgtcacaaaagccagctgcgacttcacttgcgccagaagcatggcgccatcaccaacaccaaggtgcaataccgcgtgtcagccactgacctgcctccggagctccccaaagcctgc

SEQ ID NO: 5693 - DNA, 2118 bp, Homo sapiens
  source 1..2118: mol_type = genomic DNA
atggcctcgccggctgacagctgtatccagttcacccgccatgccagtgatgttcttctcaaccttaatcgtctccggagtcgagacatcttgactgatgttgtcattgttgtgagccgtgagcagtttagagcccataaaacggtcctcatggcctgcagtggcctgttctatagcatctttacagaccagttgaaatgcaaccttagtgtgatcaatctagatcctgagatcaaccctgagggattctgcatcctcctggacttcatgtacacatctcggctcaatttgcgggagggcaacatcatggctgtgatggccacggctatgtacctgcagatggagcatgttgtggacacttgccggaagtttattaaggccagtgaagcagagatggtttctgccatcaagcctcctcgtgaagagttcctcaacagccggatgctgatgccccaagacatcatggcctatcggggtcgtgaggtggtggagaacaacctgccactgaggagcgcccctgggtgtgagagcagagcctttgcccccagcctgtacagtggcctgtccacaccgccagcctcttattccatgtacagccacctccctgtcagcagcctcctcttctccgatgaggagtttcgggatgtccggatgcctgtggccaaccccttccccaaggagcgggcactcccatgtgatagtgccaggccagtccctggtgagtacagccggccgactttggaggtgtcccccaatgtgtgccacagcaatatctattcacccaaggaaacaatcccagaagaggcacgaagtgatatgcactacagtgtggctgagggcctcaaacctgctgccccctcagcccgaaatgccccctacttcccttgtgacaaggccagcaaagaagaagagagaccctcctcggaagatgagattgccctgcatttcgagccccccaatgcacccctgaaccggaagggtctggttagtccacagagcccccagaaatctgactgccagcccaactcgcccacagagtcctgcagcagtaagaatgcctgcatcctccaggcttctggctcccctccagccaagagccccactgaccccaaagcctgcaactggaagaaatacaagttcatcgtgctcaacagcctcaaccagaatgccaaaccagaggggcctgagcaggctgagctgggccgcctttccccacgagcctacacggccccacctgcctgccagccacccatggagcctgagaaccttgacctccagtccccaaccaagctgagtgccagcggggaggactccaccatcccacaagccagccggctcaataacatcgttaacaggtccatgacgggctctccccgcagcagcagcgagagccactcaccactctacatgcaccccccgaagtgcacgtcctgcggctctcagtccccacagcatgcagagatgtgcctccacaccgctggccccacgttccctgaggagatgggagagacccagtctgagtactcagattctagctgtgagaacggggccttcttctgcaatgagtgtgactgccgcttctctgaggaggcctcactcaagaggcacacgctgcagacccacagtgacaaaccctacaagtgtgaccgctgccaggcctccttccgctacaagggcaacctcgccagccacaagaccgtccataccggtgagaaaccctatcgttgcaacatctgtggggcccagttcaaccggccagccaacctgaaaacccacactcgaattcactctggagagaagccctacaaatgcgaaacctgcggagccagatttgtacaggtggcccacctccgtgcccatgtgcttatccacactggtgagaagccctatccctgtgaaatctgtggcacccgtttccggcaccttcagactctgaagagccacctgcgaatccacacaggagagaaaccttaccattgtgagaagtgtaacctgcatttccgtcacaaaagccagctgcgacttcacttgcgccagaagcatggcgccatcaccaacaccaaggtgcaataccgcgtgtcagccactgacctgcctccggagctccccaaagcctgc

SEQ ID NO: 5694 - DNA, 1362 bp, Homo sapiens
  source 1..1362: mol_type = genomic DNA
atgccccgatgccccgcgggggccatggacgaggggcccgtggacctgcgcacccggcccaaggccgccggactcccgggcgccgcgctgccgctccgcaagcgcccgctgcgcgcgccctccccggagcccgccgctccccgcggcgctgcgggccttgtcgtccccctggaccctctgcgcggcggctgcgacctgccggcggtccccgggcccccccacggcctggcccggccggaggcgctttactaccccggagccttactgcctttgtaccccactcgggccatgggctccccgtttcctctggtgaacctgcctacacccctataccccatgatgtgccccatggaacaccccctttctgctgacatcgccatggccacccgtgcagatgaggacggagacacgcctctccatattgctgtggtgcagggtaacctgccagctgtgcaccggctggtcaacctcttccagcaggggggccgggagctcgacatctacaacaacctacggcagacaccgctccacctggctgtgatcaccacattaccgtctgtggtccggctcctggtgacagctggtgccagccccatggcgctggaccgccatggccagacggccgctcacctggcgtgcgagcaccgcagcccgacctgcctgcgagccctgctggacagcgcagctccgggcacgttggacctggaggcccgcaattatgacgggctcaccgccctgcacgtggcagtgaacaccgagtgccaagaaaccgtgcagctcttgctagagcgcggtgccgacatcgacgcagtggacattaagagcggccgctccccgctcatccacgccgtggaaaacaacagccttagcatggtgcagctgctgctgcagcacggcgccaacgtgaacgcgcaaatgtactccggcagctccgccctgcactcagcgtccggccgcgggctcctcccgctggtgcgcacgctggtccgcagcggcgctgacagcagcctcaagaactgccacaacgacacgccgctcatggtggcgcgcagccgcagggtcatcgacatcctgagggggaaggccacccggcctgcttccacctcccagccagacccctcccctgaccggagcgccaacacctcccccgagagcagcagccgcctcagctccaatggtcttctctccgcatcaccatcctcctcaccctcccagtctccccccagggacccccctggattccccatggctcctcccaatttcttccttccttccccatctccacccgccttcctgccctttgctggggtcctccgaggccctggccggccggtgcccccctccccagctccaggaggcagc

SEQ ID NO: 5695 - DNA, 795 bp, Homo sapiens
  source 1..795: mol_type = genomic DNA
atgtatgtgggctatgtgctggacaaggattcgcccgtgtaccccggcccagccaggccagccagcctcggcctgggcccgcaagcctacggccccccggccccgcccccggcgcccccgcagtaccccgacttctccagctactctcacgtggagccggcccccgcgcccccgacggcctggggggcgcccttccctgcgcccaaggacgactgggccgccgcctacggcccgggccccgcggcccctgccgccagcccagcttcgctggcattcgggccccctccagactttagcccggtgccggcgccccctgggcccggcccgggcctcctggcgcagcccctcgggggcccgggcacaccgtcctcgcccggagcgcagaggccgacgccctacgagtggatgcggcgcagcgtggcggccggaggcggcggtggcagcggtaagactcggaccaaggacaagtaccgcgtggtctacaccgaccaccaacgcctggagctggagaaggagtttcattacagccgttacatcacaatccggcggaaatcagagctggctgccaatctggggctcactgaacggcaggtgaagatctggttccaaaaccggcgggcaaaggagcgcaaagtgaacaagaagaaacagcagcagcaacagcccccacagccgccgatggcccacgacatcacggccaccccagccgggccatccctggggggcctgtgtcccagcaacaccagcctcctggccacctcctctccaatgcctgtgaaagaggagtttctgcca

SEQ ID NO: 5696 - DNA, 717 bp, Homo sapiens
  source 1..717: mol_type = genomic DNA
atggccacctctggacgcctgagcttcaccgtgcgcagccttctagatttacccgagcaggacgcgcaacacctgccgaggcgggagccagaaccacgcgccccccagcccgacccctgcgccgcctggctggattcggagcgcggccactacccttcctcggacgagagcagcctggagaccagcccgccagactcgtcgcagcggccgtccgctaggcccgcgtctccgggctcggacgccgagaaaaggaagaagcggcgggtgctattctccaaggcgcagacgctggagttggagcggcgcttccggcagcagcggtacctgtctgcgcccgagcgcgagcagctggcgagcctgcttcgcctcacgcccacgcaggtcaagatctggttccagaatcatcgctacaagctgaagcgcgctcgcgctccaggggcggcggagtcgcctgacctggcagcatccgccgagctgcacgccgcgcccggcctgctgcgtcgcgtggtggtgccggtgcttgttcgcgacgggcagccgtgcggcggcggcggcggtggcgaggtgggaaccgccgcggcccaggagaagtgcggcgcccctccagccgccgcctgccctctgccgggctaccctgccttcggtcccggctcggcgcttggcctcttccccgcctaccagcacttagcatcccccgccctggtctcctggaactgg

SEQ ID NO: 5697 - DNA, 945 bp, Homo sapiens
  source 1..945: mol_type = genomic DNA
atgaggaacagaatggccccagagaatccccagccagaccctttcatcaataggaattattccaacatgaaggtgataccaccacaggatccagctagtcccagtttcactctgttatccaagctggagtgcagtggcacggtctcggcttactgcagcctcaacctcccaggttcaactgatcctcccacctcagcctcccgagtagctgcgactacagcaatacggagaaggcataaagaacgtacttctttcacccaccaacagtatgaggagctagaagctctgtttagccagaccatgttcccagatagaaatcttcaggagaaactagctttgagactcgacctaccggagtcaacagtaaaggtttggttcaggaaccggcgattcaaattgaagaagcagcagcagcagcaatcagcaaagcaacgaaaccagatccttccatccaagaagaatgtgcccacctcccccagaacatcccccagtccttatgctttttctcctgtgatttcagatttctacagctcccttccatctcagcccttagacccttccaattgggcatggaactctaccttcactgagagttctaccagtgacttccaaatgcaagatactcagtgggagaggctggtggcctcggttcctgctttgtactctgatgcctatgacatattccaaatcatagaactgtacaatcttcctgatgagaatgagatatccagctcttctttccactgtctgtatcagtatctctcacccacaaagtaccaggtaggaggacagggttcctctctcagcatctttgctggtccagctgtaggcctatctcctgcacaaacctggcccaatatgacaagccaagcctttgaagcctacagtctaacagatagcctggaattccagaaaacctccaatatggtagacttgggatttctc

SEQ ID NO: 5698 - DNA, 819 bp, Homo sapiens
  source 1..819: mol_type = genomic DNA
atgtcgctgaccaacacaaagacggggttttcggtcaaggacatcttagacctgccggacaccaacgatgaggagggctctgtggccgaaggtccggaggaagagaacgaggggcccgagccagccaagagggccgggccgctggggcagggcgccctggacgcggtgcagagcctgcccctgaagaaccccttctacgacagcagcgacaacccgtacacgcgctggctggccagcaccgagggccttcagtactccctgcacggtctggctgccggggcgccccctcaggactcaagctccaagtccccggagccctcggccgacgagtcaccggacaatgacaaggagaccccgggcggcgggggggacgccggcaagaagcgaaagcggcgagtgcttttctccaaggcgcagacctacgagctggagcggcgctttcggcagcagcggtacctgtcggcgcccgagcgcgaacacctggccagcctcatccgcctcacgcccacgcaggtcaagatctggttccagaaccaccgctacaagatgaagcgcgcccgggccgagaaaggtatggaggtgacgcccctgccctcgccgcgccgggtggccgtgcccgtcttggtcagggacggcaaaccatgtcacgcgctcaaagcccaggacctggcagccgccaccttccaggcgggcattcccttttctgcctacagcgcgcagtcgctgcagcacatgcagtacaacgcccagtacagctcggccagcaccccccagtacccgacagcacaccccctggtccaggcccagcagtggacttgg

SEQ ID NO: 5699 - DNA, 1092 bp, Homo sapiens
  source 1..1092: mol_type = genomic DNA
atgatgttaccaagcccggtcacctccacccctttctcagtcaaagacattttgaatctggagcagcagcaccagcacttccatggtgcgcacttgcaggcggacttggagcaccacttccactctgcgccctgcatgctggccgccgctgaggggacgcaattttctgacggaggggaggaggacgaggaagacgagggcgagaaattgtcctatttgaactcactagccgcagcagacggccacggggattcagggctgtgtccccagggctatgtccacacggtcctgcgagactcgtgcagcgagcccaaggaacatgaagaggagcccgaggtcgtgagggaccggagccaaaaaagctgccagctgaagaagtctctagagacggccggagactgcaaggcggcggaggagagcgagaggccgaagccacgcagccgccggaagccccgggtcctcttctcgcaagcccaggtcttcgagctggaacgcaggttcaagcagcagcggtacctgtcggcacccgagcgcgagcacctcgccagcagcctgaagctcacatccactcaggtgaaaatctggttccagaatcgcaggtacaagtgcaagagacagcggcaggacaagtctctggagcttggcgcacacgcgcccccgccgccgccgcgccgcgtggctgtcccggtgctggtgcgggacggcaagccgtgcgtcacgcccagcgcgcaggcctacggcgcgccctacagcgtgggcgccagcgcctactcctacaacagcttccccgcctacggctatgggaactcggccgcggccgccgccgccgccgccgccgccgccgcagcagcggcggcctacagcagcagctatggctgtgcgtacccggcgggcggcggcggcggcggcggcgggacctccgcggcgaccactgccatgcagcccgcctgcagcgcggccggaggcggcccctttgtgaacgtgagcaacctaggaggcttcggcagcggcggcagcgcacagccgttgcaccagggtactgcagccggggccgcgtgcgctcagggcaccttgcagggcatccgggcctgg

SEQ ID NO: 5700 - DNA, 1203 bp, Homo sapiens
  source 1..1203: mol_type = genomic DNA
atgtggtccggaggcagtgggaaggcgcggggctgggaggccgcggcgggagggaggagcagccccggcaggctcagccgccgccgaatcatgtcgatgagtccaaagcacacgactccgttctcagtgtctgacatcttgagtcccctggaggaaagctacaagaaagtgggcatggagggcggcggcctcggggctccgctggcggcgtacaggcagggccaggcggcaccgccaacagcggccatgcagcagcacgccgtggggcaccacggcgccgtcaccgccgcctaccacatgacggcggcgggggtgccccagctctcgcactccgccgtggggggctactgcaacggcaacctgggcaacatgagcgagctgccgccgtaccaggacaccatgaggaacagcgcctctggccccggatggtacggcgccaacccagacccgcgcttccccgccatctcccgcttcatgggcccggcgagcggcatgaacatgagcggcatgggcggcctgggctcgctgggggacgtgagcaagaacatggccccgctgccaagcgcgccgcgcaggaagcgccgggtgctcttctcgcaggcgcaggtgtacgagctggagcgacgcttcaagcaacagaagtacctgtcggcgccggagcgcgagcacctggccagcatgatccacctgacgcccacgcaggtcaagatctggttccagaaccaccgctacaaaatgaagcgccaggccaaggacaaggcggcgcagcagcaactgcagcaggacagcggcggcggcgggggcggcgggggcaccgggtgcccgcagcagcaacaggctcagcagcagtcgccgcgacgcgtggcggtgccggtcctggtgaaagacggcaaaccgtgccaggcgggtgcccccgcgccgggcgccgccagcctacaaggccacgcgcagcagcaggcgcagcaccaggcgcaggccgcgcaggcggcggcagcggccatctccgtgggcagcggtggcgccggccttggcgcacacccgggccaccagccaggcagcgcaggccagtctccggacctggcgcaccacgccgccagccccgcggcgctgcagggccaggtatccagcctgtcccacctgaactcctcgggctcggactacggcaccatgtcctgctccaccttgctatacggtcggacctgg

SEQ ID NO: 5701 - DNA, 1113 bp, Homo sapiens
  source 1..1113: mol_type = genomic DNA
atgtcgatgagtccaaagcacacgactccgttctcagtgtctgacatcttgagtcccctggaggaaagctacaagaaagtgggcatggagggcggcggcctcggggctccgctggcggcgtacaggcagggccaggcggcaccgccaacagcggccatgcagcagcacgccgtggggcaccacggcgccgtcaccgccgcctaccacatgacggcggcgggggtgccccagctctcgcactccgccgtggggggctactgcaacggcaacctgggcaacatgagcgagctgccgccgtaccaggacaccatgaggaacagcgcctctggccccggatggtacggcgccaacccagacccgcgcttccccgccatctcccgcttcatgggcccggcgagcggcatgaacatgagcggcatgggcggcctgggctcgctgggggacgtgagcaagaacatggccccgctgccaagcgcgccgcgcaggaagcgccgggtgctcttctcgcaggcgcaggtgtacgagctggagcgacgcttcaagcaacagaagtacctgtcggcgccggagcgcgagcacctggccagcatgatccacctgacgcccacgcaggtcaagatctggttccagaaccaccgctacaaaatgaagcgccaggccaaggacaaggcggcgcagcagcaactgcagcaggacagcggcggcggcgggggcggcgggggcaccgggtgcccgcagcagcaacaggctcagcagcagtcgccgcgacgcgtggcggtgccggtcctggtgaaagacggcaaaccgtgccaggcgggtgcccccgcgccgggcgccgccagcctacaaggccacgcgcagcagcaggcgcagcaccaggcgcaggccgcgcaggcggcggcagcggccatctccgtgggcagcggtggcgccggccttggcgcacacccgggccaccagccaggcagcgcaggccagtctccggacctggcgcaccacgccgccagccccgcggcgctgcagggccaggtatccagcctgtcccacctgaactcctcgggctcggactacggcaccatgtcctgctccaccttgctatacggtcggacctgg

SEQ ID NO: 5702 - DNA, 903 bp, Homo sapiens
  source 1..903: mol_type = genomic DNA
atgctgctgagccccgtcacctccacccccttctcggtcaaggacatcctgcgactggagcgcgagcggagctgccccgcggcttcgccacatccgcgggtgcggaagagcccggaaaactttcagtacctgagaatggacgcagagccgcgagggtcagaggttcacaacgctggtggcggcggcggtgacagaaagctggatggttcggagcctcctgggggtccctgtgaggcagtcttggagatggacgcggaacggatgggggagccacagcccggcctgaacgcggcctcgcccctcggcggcgggaccagggtgccagagcgcggcgttggcaacagcggcgacagcgtgcggggtggccgctcggagcagcccaaggcgcggcaacgacggaagccgcgcgtgctcttttcgcaggcgcaggtgctggccctggagcggcgcttcaagcagcagcggtacctgtcagcgcccgagcgcgagcacctggccagcgcgctgcagctcacgtccacgcaggtcaagatctggttccagaaccgacgctacaaatgcaagagacagcgccaggacaagtcgctggaactggctggccaccctctaacgccgcgccgagtagctgtgcccgtcctggtgcgcgatggcaagccctgcctgggccccgggcccggcgcacctgccttccccagcccctacagtgcagcagtgtcgccctactcttgctacggaggctacagcggagcaccctacggcgcaggctacggcacctgctacgcgggcgcgccctcgggtcctgcgccacacacaccactggccagcgcgggcttcggacacggtggccagaatgccaccccgcagggccatctggcagccacgctgcagggtgtcagggcctgg

SEQ ID NO: 5703 - DNA, 1062 bp, Homo sapiens
  source 1..1062: mol_type = genomic DNA
atgtcgttgagcccaaagcacacgacgcccttctccgtgtccgacatcctgagccccatcgaggagacctacaagaagttcagcggcgccatggacggcgcgccacccggcctgggggcgcccctgggggccgcggccgcctaccgcgcgccgccacctgggccctcctcgcaggcggcgaccgtggcgggcatgcagccttctcacgccatggcgggtcacaacgcggcggccgcggcggcggcggcagcagctgcggcggcggcggccgccacctaccacatgccgcccggcgtctcgcagttcccgcacggcgccatgggcagctactgcaacggcggcctgggcaacatgggcgagctgcccgcctacacggacggcatgcggggcggcgcggccaccggctggtacggcgccaacccggacccacgctactcgtcaatctccaggttcatggggccgtcggcgggcgtgaatgtggccggcatggggtcgctgaccggcatcgcggacgccgccaagtcgctgggcccgctgcacgcggcggcggcggcagccgctccgcgaaggaagcgccgcgtgctcttctcgcaggcgcaggtctacgagctggagcggcgcttcaagcagcagaagtacctgtcggcgcccgagcgcgagcacctggccagcatgatccacctgacgcccacgcaggtcaagatctggttccagaaccaccggtacaagatgaaacggcaggccaaggacaaggcggcgcagcagctgcagcaggagggcggcctgggcccgccgccgcctccgccgccgtccccgcgccgcgtggcggtgcctgtgctggtcaaggacggcaagccgtgccagaacggcgccagcacgcccacccccggccaggccggtccgcagccgccggccccgacgccagcacctgagctggaggagctgtcgcccagcccacccgcgctgcacggcccggggggcggcctggcggccctggacgcggccgccggggagtacagcggcggcgtcctgggcgccaacctgctctatggcaggacgtgg

SEQ ID NO: 5704 - DNA, 453 bp, Homo sapiens
  source 1..453: mol_type = genomic DNA
atgttccccagccctgctctcacgcccacgcccttctcagtcaaagacatcctaaacctggaacagcagcagcgcagcctggctgccgccggagagctctctgcccgcctggaggcgaccctggcgccctcctcctgcatgctggccgccttcaagccagaggcctacgctgggcccgaggcggctgcgccgggcctcccagagctgcgcgcagagctgggccgcgcgccttcaccggccaagtgtgcgtctgcctttcccgccgcccccgccttctatccacgtgcctacagcgaccccgacccagccaaggaccctagagccgaaaagaaagggtgtgaactgccccgagggcagagacctcccgttttgttctccagcgccttgagccagcctgactttctacaaatgctgagtgagacgtgtcggtggctcccagtgcacttggcagag

SEQ ID NO: 5705 - DNA, 336 bp, Homo sapiens
  source 1..336: mol_type = genomic DNA
atgttccccagccctgctctcacgcccacgcccttctcagtcaaagacatcctaaacctggaacagcagcagcgcagcctggctgccgccggagagctctctgcccgcctggaggcgaccctggcgccctcctcctgcatgctggccgccttcaagccagaggcctacgctgggcccgaggcggctgcgccgggcctcccagagctgcgcgcagagctgggccgcgcgccttcaccggccaagtgtgcgtctgcctttcccgccgcccccgccttctatccacgtgcctacagcgaccccgacccagccaaggaccctagagccgaaaagaaagcc

SEQ ID NO: 5706 - DNA, 3642 bp, Homo sapiens
  source 1..3642: mol_type = genomic DNA
atggaggccaccggggtgctgccgttcgtgcgtggcgtggacctcagcggcaacgacttcaagggcggctacttccctgagaatgtcaaggccatgaccagcctgcggtggctgaagctgaaccgcactggcctctgctacctgcccgaggagctggccgccctgcagaagctggaacacttgtctgtgagccacaacaacctgaccacgcttcatggggagctgtccagcctgccatcgctgcgcgccatcgtggcccgagccaacagtctgaagaattccggagtccccgatgacatcttcaagctagatgatctctcagtcctggacttgagccacaaccagctgacagagtgcccgcgggagctggagaacgccaagaacatgctggtgctgaacctcagccacaacaggcagctcccagcgatgacggccctgcagaccctgcacctgcggagcacccagcgcacccagagcaacctgcccaccagcctggagggtctgagcaacctcgcagacgtggatctgtcctgcaatgacctgacacgggtgcccgagtgtctgtacaccctccccagcctgcgccgcctcaacctcagcagcaaccagatcacggagctgtccctgtgcatagaccagtgggtgcacgtggaaactctgaacctgtcccgaaatcagctcacctcactgccctcagccatttgcaagctgagcaagctgaagaagctgtacctgaattccaacaagctggactttgacgggctgccctcaggcattggcaagctcaccaacctggaagagttcatggctgccaacaacaacctggagctggtccctgaaagtctctgcaggtgcccaaagctgaggaaacttgtcctgaacaagaaccacctggtgaccctcccagaagccatccatttcctgacggagatcgaggtcctggatgtgcgggagaaccccaacctggtcatgccgcccaagcccgcagaccgtgccgctgagtggtacaacatcgacttctcgctgcagaaccagctgcggctagcgggtgcctctcctgctaccgtggctgcagctgcagctgggagtgggcccaaggaccctatggctcgcaagatgcgactgcggaggcgcaaggattcagcccaggatgaccaggccaagcaggtgctgaagggcatgtcagatgttgcccaggagaagaacaaaaagcaggaggagagcgcagatgcccgggcccccagcgggaaggtgcggcgttgggaccagggcctggagaagccccgccttgactactccgagttcttcacggaggacgtgggccagctgcccggactgaccatctggcagatagagaacttcgtgcctgtgctggtggaggaagccttccacggcaagttctacgaggctgactgctacattgtgctcaagacctttctggatgacagcggctccctcaactgggagatctactactggattggcggggaggccacactcgacaagaaagcttgctctgccatccacgctgtcaacttgcgcaactacctgggtgctgagtgccgcactgtccgggaggagatgggcgatgagagcgaggagttcctgcaggtgtttgacaacgacatctcctacattgagggtggaacagccagtggcttctacactgtggaagacacacactatgtcaccaggatgtatcgtgtgtatgggaaaaagaacatcaagttggagcctgtgcccctcaaggggacctctctggacccaaggtttgttttcctgctggaccgagggctagacatctacgtatggcggggggcccaggccacactgagcagcaccaccaaggccaggctctttgcagagaaaattaacaagaatgagcggaaagggaaggctgagatcacactgctggtgcagggccaggagctcccagagttctgggaggcactgggtggggagccctctgagatcaagaagcacgtgcctgaagacttctggccgccgcagcccaagctgtacaaggtgggcctgggcttgggctacctggagctgccacagatcaactacaagctctccgtggaacataagcagcgtcccaaggtggagctgatgccaagaatgcggctgctgcagagtctgctggacacgcgctgcgtgtacattctggactgttggtccgacgtgttcatctggctcggccgcaagtccccgcgcctggtgcgcgctgccgccctcaagctgggtcaggagctgtgcgggatgctgcaccggccacgccatgccacggtcagccgcagcctcgagggcaccgaggcgcaggtgttcaaggccaagttcaagaattgggacgatgtgttgacggtggactacacacgcaatgcggaggccgtgctgcagagcccgggtctctccgggaaggtgaaacgcgacgccgagaagaaagaccagatgaaggctgacctcactgcgcttttcctgccgcggcagccgcccatgtcgctggccgaggcggagcagctgatggaggagtggaacgaagacctagacggcatggagggtttcgtgctggagggcaagaagtttgcgcggctgccggaagaggagtttggccacttctacacgcaggactgctacgtcttcctctgcaggtactgggtgcctgtggagtacgaggaggaggaaaagaaggaagacaaggaggagaaggccgagggcaaagaaggcgaggaagcaaccgctgaggcagaggagaagcagccagaggaggacttccagtgcatcgtgtacttctggcagggccgtgaagcctccaatatgggctggctcaccttcaccttcagcctgcaaaagaagttcgagagcctcttccctgggaagctggaggtggtacgcatgacgcagcagcaggagaaccccaagttcctgtcccatttcaagaggaagttcatcatccaccggggcaagaggaaggcggtccagggcgcccaacagcccagcctctaccagatccgcaccaacggcagcgccctctgcacccggtgcatccagatcaacaccgactccagcctcctcaactccgagttctgcttcatcctcaaggttccctttgagagtgaggacaaccagggcatcgtgtatgcctgggtgggccgggcatcagaccctgacgaagccaagttggcagaagacatcctgaacaccatgtttgacacctcctacagcaagcaggttatcaacgaaggtgaggagcctgagaacttcttctgggtgggcattggggcacagaagccctatgatgacgatgccgagtacatgaaacacacacgtctcttccggtgctccaacgagaagggctactttgcagtgactgagaaatgctccgacttttgccaagatgacctggcagatgatgacatcatgttgctagacaatggccaagaggtctacatgtgggtggggacccagactagccaggtggagatcaagctgagcctgaaggcctgccaggtatatatccagcacatgcggtccaaggaacatgagcggccgcgccggctgcgcctggtccgcaagggcaatgagcagcacgcctttacccgctgcttccacgcctggagcgccttctgcaaggccctggcc

SEQ ID NO: 5707 - DNA, 3774 bp, Homo sapiens
  source 1..3774: mol_type = genomic DNA
atggacctccgaggcctccgcccagtgcctggcggctacttccctgagaatgtcaaggccatgaccagcctgcggtggctgaagctgaaccgcactggcctctgctacctgcccgaggagctggccgccctgcagaagctggaacacttgtctgtgagccacaacaacctgaccacgcttcatggggagctgtccagcctgccatcgctgcgcgccatcgtggcccgagccaacagtctgaagaattccggagtccccgatgacatcttcaagctagatgatctctcagtcctggacttgagccacaaccagctgacagagtgcccgcgggagctggagaacgccaagaacatgctggtgctgaacctcagccacaacagcatcgacaccatccccaaccagctcttcatcaacctcactgacctactatacctggacctcagcgagaaccgcctggagagcctgcccccgcagatgcgccgcctggtgcacctgcagacgctcgtgctcaatggaaaccccctgctgcatgcacagctccggcagctcccagcgatgacggccctgcagaccctgcacctgcggagcacccagcgcacccagagcaacctgcccaccagcctggagggtctgagcaacctcgcagacgtggatctgtcctgcaatgacctgacacgggtgcccgagtgtctgtacaccctccccagcctgcgccgcctcaacctcagcagcaaccagatcacggagctgtccctgtgcatagaccagtgggtgcacgtggaaactctgaacctgtcccgaaatcagctcacctcactgccctcagccatttgcaagctgagcaagctgaagaagctgtacctgaattccaacaagctggactttgacgggctgccctcaggcattggcaagctcaccaacctggaagagttcatggctgccaacaacaacctggagctggtccctgaaagtctctgcaggtgcccaaagctgaggaaacttgtcctgaacaagaaccacctggtgaccctcccagaagccatccatttcctgacggagatcgaggtcctggatgtgcgggagaaccccaacctggtcatgccgcccaagcccgcagaccgtgccgctgagtggtacaacatcgacttctcgctgcagaaccagctgcggctagcgggtgcctctcctgctaccgtggctgcagctgcagctgcagggagtgggcccaaggaccctatggctcgcaagatgcgactgcggaggcgcaaggattcagcccaggatgaccaggccaagcaggtgctgaagggcatgtcagatgttgcccaggagaagaacaaaaagcaggaggagagcgcagatgcccgggcccccagcgggaaggtgcggcgttgggaccagggcctggagaagccccgccttgactactccgagttcttcacggaggacgtgggccagctgcccggactgaccatctggcagatagagaacttcgtgcctgtgctggtggaggaagccttccacggcaagttctacgaggctgactgctacattgtgctcaagacctttctggatgacagcggctccctcaactgggagatctactactggattggcggggaggccacactcgacaagaaagcttgctctgccatccacgctgtcaacttgcgcaactacctgggtgctgagtgccgcactgtccgggaggagatgggcgatgagagcgaggagttcctgcaggtgtttgacaacgacatctcctacattgagggtggaacagccagtggcttctacactgtggaagacacacactatgtcaccaggatgtatcgtgtgtatgggaaaaagaacatcaagttggagcctgtgcccctcaaggggacctctctggacccaaggtttgttttcctgctggaccgagggctagacatctacgtatggcggggggcccaggccacactgagcagcaccaccaaggccaggctctttgcagagaaaattaacaagaatgagcggaaagggaaggctgagatcacactgctggtgcagggccaggagctcccagagttctgggaggcactgggtggggagccctctgagatcaagaagcacgtgcctgaagacttctggccgccgcagcccaagctgtacaaggtgggcctgggcttgggctacctggagctgccacagatcaactacaagctctccgtggaacataagcagcgtcccaaggtggagctgatgccaagaatgcggctgctgcagagtctgctggacacgcgctgcgtgtacattctggactgttggtccgacgtgttcatctggctcggccgcaagtccccgcgcctggtgcgcgctgccgccctcaagctgggtcaggagctgtgcgggatgctgcaccggccacgccatgccacggtcagccgcagcctcgagggcaccgaggcgcaggtgttcaaggccaagttcaagaattgggacgatgtgttgacggtggactacacacgcaatgcggaggccgtgctgcagagcccgggtctctccgggaaggtgaaacgcgacgccgagaagaaagaccagatgaaggctgacctcactgcgcttttcctgccgcggcagccgcccatgtcgctggccgaggcggagcagctgatggaggagtggaacgaagacctagacggcatggagggtttcgtgctggagggcaagaagtttgcgcggctgccggaagaggagtttggccacttctacacgcaggactgctacgtcttcctctgcaggtactgggtgcctgtggagtacgaggaggaggaaaagaaggaagacaaggaggagaaggccgagggcaaagaaggcgaggaagcaaccgctgaggcagaggagaagcagccagaggaggacttccagtgcatcgtgtacttctggcagggccgtgaagcctccaatatgggctggctcaccttcaccttcagcctgcaaaagaagttcgagagcctcttccctgggaagctggaggtggtacgcatgacgcagcagcaggagaaccccaagttcctgtcccatttcaagaggaagttcatcatccaccggggcaagaggaaggcggtccagggcgcccaacagcccagcctctaccagatccgcaccaacggcagcgccctctgcacccggtgcatccagatcaacaccgactccagcctcctcaactccgagttctgcttcatcctcaaggttccctttgagagtgaggacaaccagggcatcgtgtatgcctgggtgggccgggcatcagaccctgacgaagccaagttggcagaagacatcctgaacaccatgtttgacacctcctacagcaagcaggttatcaacgaaggtgaggagcctgagaacttcttctgggtgggcattggggcacagaagccctatgatgacgatgccgagtacatgaaacacacacgtctcttccggtgctccaacgagaagggctactttgcagtgactgagaaatgctccgacttttgccaagatgacctggcagatgatgacatcatgttgctagacaatggccaagaggtctacatgtgggtggggacccagactagccaggtggagatcaagctgagcctgaaggcctgccaggtatatatccagcacatgcggtccaaggaacatgagcggccgcgccggctgcgcctggtccgcaagggcaatgagcagcacgcctttacccgctgcttccacgcctggagcgccttctgcaaggccctggcc

SEQ ID NO: 5708 - DNA, 3807 bp, Homo sapiens
  source 1..3807: mol_type = genomic DNA
atggaggccaccggggtgctgccgttcgtgcgtggcgtggacctcagcggcaacgacttcaagggcggctacttccctgagaatgtcaaggccatgaccagcctgcggtggctgaagctgaaccgcactggcctctgctacctgcccgaggagctggccgccctgcagaagctggaacacttgtctgtgagccacaacaacctgaccacgcttcatggggagctgtccagcctgccatcgctgcgcgccatcgtggcccgagccaacagtctgaagaattccggagtccccgatgacatcttcaagctagatgatctctcagtcctggacttgagccacaaccagctgacagagtgcccgcgggagctggagaacgccaagaacatgctggtgctgaacctcagccacaacagcatcgacaccatccccaaccagctcttcatcaacctcactgacctactatacctggacctcagcgagaaccgcctggagagcctgcccccgcagatgcgccgcctggtgcacctgcagacgctcgtgctcaatggaaaccccctgctgcatgcacagctccggcagctcccagcgatgacggccctgcagaccctgcacctgcggagcacccagcgcacccagagcaacctgcccaccagcctggagggtctgagcaacctcgcagacgtggatctgtcctgcaatgacctgacacgggtgcccgagtgtctgtacaccctccccagcctgcgccgcctcaacctcagcagcaaccagatcacggagctgtccctgtgcatagaccagtgggtgcacgtggaaactctgaacctgtcccgaaatcagctcacctcactgccctcagccatttgcaagctgagcaagctgaagaagctgtacctgaattccaacaagctggactttgacgggctgccctcaggcattggcaagctcaccaacctggaagagttcatggctgccaacaacaacctggagctggtccctgaaagtctctgcaggtgcccaaagctgaggaaacttgtcctgaacaagaaccacctggtgaccctcccagaagccatccatttcctgacggagatcgaggtcctggatgtgcgggagaaccccaacctggtcatgccgcccaagcccgcagaccgtgccgctgagtggtacaacatcgacttctcgctgcagaaccagctgcggctagcgggtgcctctcctgctaccgtggctgcagctgcagctgcagggagtgggcccaaggaccctatggctcgcaagatgcgactgcggaggcgcaaggattcagcccaggatgaccaggccaagcaggtgctgaagggcatgtcagatgttgcccaggagaagaacaaaaagcaggaggagagcgcagatgcccgggcccccagcgggaaggtgcggcgttgggaccagggcctggagaagccccgccttgactactccgagttcttcacggaggacgtgggccagctgcccggactgaccatctggcagatagagaacttcgtgcctgtgctggtggaggaagccttccacggcaagttctacgaggctgactgctacattgtgctcaagacctttctggatgacagcggctccctcaactgggagatctactactggattggcggggaggccacactcgacaagaaagcttgctctgccatccacgctgtcaacttgcgcaactacctgggtgctgagtgccgcactgtccgggaggagatgggcgatgagagcgaggagttcctgcaggtgtttgacaacgacatctcctacattgagggtggaacagccagtggcttctacactgtggaagacacacactatgtcaccaggatgtatcgtgtgtatgggaaaaagaacatcaagttggagcctgtgcccctcaaggggacctctctggacccaaggtttgttttcctgctggaccgagggctagacatctacgtatggcggggggcccaggccacactgagcagcaccaccaaggccaggctctttgcagagaaaattaacaagaatgagcggaaagggaaggctgagatcacactgctggtgcagggccaggagctcccagagttctgggaggcactgggtggggagccctctgagatcaagaagcacgtgcctgaagacttctggccgccgcagcccaagctgtacaaggtgggcctgggcttgggctacctggagctgccacagatcaactacaagctctccgtggaacataagcagcgtcccaaggtggagctgatgccaagaatgcggctgctgcagagtctgctggacacgcgctgcgtgtacattctggactgttggtccgacgtgttcatctggctcggccgcaagtccccgcgcctggtgcgcgctgccgccctcaagctgggtcaggagctgtgcgggatgctgcaccggccacgccatgccacggtcagccgcagcctcgagggcaccgaggcgcaggtgttcaaggccaagttcaagaattgggacgatgtgttgacggtggactacacacgcaatgcggaggccgtgctgcagagcccgggtctctccgggaaggtgaaacgcgacgccgagaagaaagaccagatgaaggctgacctcactgcgcttttcctgccgcggcagccgcccatgtcgctggccgaggcggagcagctgatggaggagtggaacgaagacctagacggcatggagggtttcgtgctggagggcaagaagtttgcgcggctgccggaagaggagtttggccacttctacacgcaggactgctacgtcttcctctgcaggtactgggtgcctgtggagtacgaggaggaggaaaagaaggaagacaaggaggagaaggccgagggcaaagaaggcgaggaagcaaccgctgaggcagaggagaagcagccagaggaggacttccagtgcatcgtgtacttctggcagggccgtgaagcctccaatatgggctggctcaccttcaccttcagcctgcaaaagaagttcgagagcctcttccctgggaagctggaggtggtacgcatgacgcagcagcaggagaaccccaagttcctgtcccatttcaagaggaagttcatcatccaccggggcaagaggaaggcggtccagggcgcccaacagcccagcctctaccagatccgcaccaacggcagcgccctctgcacccggtgcatccagatcaacaccgactccagcctcctcaactccgagttctgcttcatcctcaaggttccctttgagagtgaggacaaccagggcatcgtgtatgcctgggtgggccgggcatcagaccctgacgaagccaagttggcagaagacatcctgaacaccatgtttgacacctcctacagcaagcaggttatcaacgaaggtgaggagcctgagaacttcttctgggtgggcattggggcacagaagccctatgatgacgatgccgagtacatgaaacacacacgtctcttccggtgctccaacgagaagggctactttgcagtgactgagaaatgctccgacttttgccaagatgacctggcagatgatgacatcatgttgctagacaatggccaagaggtctacatgtgggtggggacccagactagccaggtggagatcaagctgagcctgaaggcctgccaggtatatatccagcacatgcggtccaaggaacatgagcggccgcgccggctgcgcctggtccgcaagggcaatgagcagcacgcctttacccgctgcttccacgcctggagcgccttctgcaaggccctggcc

SEQ ID NO: 5709 - DNA, 1362 bp, Homo sapiens
  source 1..1362: mol_type = genomic DNA
ctggatttttttcgggtagtggaaaaccagcagcctcccgcgacgatgcccctcaacgttagcttcaccaacaggaactatgacctcgactacgactcggtgcagccgtatttctactgcgacgaggaggagaacttctaccagcagcagcagcagagcgagctgcagcccccggcgcccagcgaggatatctggaagaaattcgagctgctgcccaccccgcccctgtcccctagccgccgctccgggctctgctcgccctcctacgttgcggtcacacccttctcccttcggggagacaacgacggcggtggcgggagcttctccacggccgaccagctggagatggtgaccgagctgctgggaggagacatggtgaaccagagtttcatctgcgacccggacgacgagaccttcatcaaaaacatcatcatccaggactgtatgtggagcggcttctcggccgccgccaagctcgtctcagagaagctggcctcctaccaggctgcgcgcaaagacagcggcagcccgaaccccgcccgcggccacagcgtctgctccacctccagcttgtacctgcaggatctgagcgccgccgcctcagagtgcatcgacccctcggtggtcttcccctaccctctcaacgacagcagctcgcccaagtcctgcgcctcgcaagactccagcgccttctctccgtcctcggattctctgctctcctcgacggagtcctccccgcagggcagccccgagcccctggtgctccatgaggagacaccgcccaccaccagcagcgactctgaggaggaacaagaagatgaggaagaaatcgatgttgtttctgtggaaaagaggcaggctcctggcaaaaggtcagagtctggatcaccttctgctggaggccacagcaaacctcctcacagcccactggtcctcaagaggtgccacgtctccacacatcagcacaactacgcagcgcctccctccactcggaaggactatcctgctgccaagagggtcaagttggacagtgtcagagtcctgagacagatcagcaacaaccgaaaatgcaccagccccaggtcctcggacaccgaggagaatgtcaagaggcgaacacacaacgtcttggagcgccagaggaggaacgagctaaaacggagcttttttgccctgcgtgaccagatcccggagttggaaaacaatgaaaaggcccccaaggtagttatccttaaaaaagccacagcatacatcctgtccgtccaagcagaggagcaaaagctcatttctgaagaggacttgttgcggaaacgacgagaacagttgaaacacaaacttgaacagctacggaactcttgtgcg

SEQ ID NO: 5710 - DNA, 1815 bp, Homo sapiens
  source 1..1815: mol_type = genomic DNA
atggcccgaagaccccggcacagcatatatagcagtgacgaggatgatgaggactttgagatgtgtgaccatgactatgatgggctgcttcccaagtctggaaagcgtcacttggggaaaacaaggtggacccgggaagaggatgaaaaactgaagaagctggtggaacagaatggaacagatgactggaaagttattgccaattatctcccgaatcgaacagatgtgcagtgccagcaccgatggcagaaagtactaaaccctgagctcatcaagggtccttggaccaaagaagaagatcagagagtgatagagcttgtacagaaatacggtccgaaacgttggtctgttattgccaagcacttaaaggggagaattggaaaacaatgtagggagaggtggcataaccacttgaatccagaagttaagaaaacctcctggacagaagaggaagacagaattatttaccaggcacacaagagactggggaacagatgggcagaaatcgcaaagctactgcctggacgaactgataatgctatcaagaaccactggaattctacaatgcgtcggaaggtcgaacaggaaggttatctgcaggagtcttcaaaagccagccagccagcagtggccacaagcttccagaagaacagtcatttgatgggttttgctcaggctccgcctacagctcaactccctgccactggccagcccactgttaacaacgactattcctattaccacatttctgaagcacaaaatgtctccagtcatgttccataccctgtagcgttacatgtaaatatagtcaatgtccctcagccagctgccgcagccattcagacacagaaccacacatgcagctaccccgggtggcacagcaccaccattgccgaccacaccagacctcatggagacagtgcacctgtttcctgtttgggagaacaccactccactccatctctgccagcggatcctggctccctacctgaagaaagcgcctcgccagcaaggtgcatgatcgtccaccagggcaccattctggataatgttaagaacctcttagaatttgcagaaacactccaatttatagattctttcttaaacacttccagtaaccatgaaaactcagacttggaaatgccttctttaacttccacccccctcattggtcacaaattgactgttacaacaccatttcatagagaccagactgtgaaaactcaaaaggaaaatactgtttttagaaccccagctatcaaaaggtcaatcttagaaagctctccaagaactcctacaccattcaaacatgcacttgcagctcaagaaattaaatacggtcccctgaagatgctacctcagacaccctctcatctagtagaagatctgcaggatgtgatcaaacaggaatctgatgaatctggaattgttgctgagtttcaagaaaatggaccacccttactgaagaaaatcaaacaagaggtggaatctccaactgataaatcaggaaacttcttctgctcacaccactgggaaggggacagtctgaatacccaactgttcacgcagacctcgcctgtggcagatgcaccgaatattcttacaagctccgttttaatggcaccagcatcagaagatgaagacaatgttctcaaagcatttacagtacctaaaaacaggtccctggcgagccccttgcagccttgtagcagtacctgggaacctgcatcctgtggaaagatggaggagcagatgacatcttccagtcaagctcgtaaatacgtgaatgcattctcagcccggacgctggtcatg

SEQ ID NO: 5711 - DNA, 1809 bp, Homo sapiens
  source 1..1809: mol_type = genomic DNA
atggcccgaagaccccggcacagcatatatagcagtgacgaggatgatgaggactttgagatgtgtgaccatgactatgatgggctgcttcccaagtctggaaagcgtcacttggggaaaacaaggtggacccgggaagaggatgaaaaactgaagaagctggtggaacagaatggaacagatgactggaaagttattgccaattatctcccgaatcgaacagatgtgcagtgccagcaccgatggcagaaagtactaaaccctgagctcatcaagggtccttggaccaaagaagaagatcagagagtgatagagcttgtacagaaatacggtccgaaacgttggtctgttattgccaagcacttaaaggggagaattggaaaacaatgtagggagaggtggcataaccacttgaatccagaagttaagaaaacctcctggacagaagaggaagacagaattatttaccaggcacacaagagactggggaacagatgggcagaaatcgcaaagctactgcctggacgaactgataatgctatcaagaaccactggaattctacaatgcgtcggaaggtcgaacaggaaggttatctgcaggagtcttcaaaagccagccagccagcagtggccacaagcttccagaagaacagtcatttgatgggttttgctcaggctccgcctacagctcaactccctgccactggccagcccactgttaacaacgactattcctattaccacatttctgaagcacaaaatgtctccagtcatgttccataccctgtagcgttacatgtaaatatagtcaatgtccctcagccagctgccgcagccattcagagacactataatgatgaagaccctgagaaggaaaagcgaataaaggaattagaattgctcctaatgtcaaccgagaatgagctaaaaggacagcaggtgctaccaacacagaaccacacatgcagctaccccgggtggcacagcaccaccattgccgaccacaccagacctcatggagacagtgcacctgtttcctgtttgggagaacaccactccactccatctctgccagcggatcctggctccctacctgaagaaagcgcctcgccagcaaggtgcatgatcgtccaccagggcaccattctggataatgttaagaacctcttagaatttgcagaaacactccaatttatagattctttcttaaacacttccagtaaccatgaaaactcagacttggaaatgccttctttaacttccacccccctcattggtcacaaattgactgttacaacaccatttcatagagaccagactgtgaaaactcaaaaggaaaatactgtttttagaaccccagctatcaaaaggtcaatcttagaaagctctccaagaactcctacaccattcaaacatgcacttgcagctcaagaaattaaatacggtcccctgaagatgctacctcagacaccctctcatctagtagaagatctgcaggatgtgatcaaacaggaatctgatgaatctggaattgttgctgagtttcaagaaaatggaccacccttactgaagaaaatcaaacaagagaatattcttacaagctccgttttaatggcaccagcatcagaagatgaagacaatgttctcaaagcatttacagtacctaaaaacaggtccctggcgagccccttgcagccttgtagcagtacctgggaacctgcatcctgtggaaagatggaggagcagatgacatcttccagtcaagctcgtaaatacgtgaatgcattctcagcccggacgctggtcatg

SEQ ID NO: 5712 - DNA, 1920 bp, Homo sapiens
  source 1..1920: mol_type = genomic DNA
atggcccgaagaccccggcacagcatatatagcagtgacgaggatgatgaggactttgagatgtgtgaccatgactatgatgggctgcttcccaagtctggaaagcgtcacttggggaaaacaaggtggacccgggaagaggatgaaaaactgaagaagctggtggaacagaatggaacagatgactggaaagttattgccaattatctcccgaatcgaacagatgtgcagtgccagcaccgatggcagaaagtactaaaccctgagctcatcaagggtccttggaccaaagaagaagatcagagagtgatagagcttgtacagaaatacggtccgaaacgttggtctgttattgccaagcacttaaaggggagaattggaaaacaatgtagggagaggtggcataaccacttgaatccagaagttaagaaaacctcctggacagaagaggaagacagaattatttaccaggcacacaagagactggggaacagatgggcagaaatcgcaaagctactgcctggacgaactgataatgctatcaagaaccactggaattctacaatgcgtcggaaggtcgaacaggaaggttatctgcaggagtcttcaaaagccagccagccagcagtggccacaagcttccagaagaacagtcatttgatgggttttgctcaggctccgcctacagctcaactccctgccactggccagcccactgttaacaacgactattcctattaccacatttctgaagcacaaaatgtctccagtcatgttccataccctgtagcgttacatgtaaatatagtcaatgtccctcagccagctgccgcagccattcagagacactataatgatgaagaccctgagaaggaaaagcgaataaaggaattagaattgctcctaatgtcaaccgagaatgagctaaaaggacagcaggtgctaccaacacagaaccacacatgcagctaccccgggtggcacagcaccaccattgccgaccacaccagacctcatggagacagtgcacctgtttcctgtttgggagaacaccactccactccatctctgccagcggatcctggctccctacctgaagaaagcgcctcgccagcaaggtgcatgatcgtccaccagggcaccattctggataatgttaagaacctcttagaatttgcagaaacactccaatttatagattctttcttaaacacttccagtaaccatgaaaactcagacttggaaatgccttctttaacttccacccccctcattggtcacaaattgactgttacaacaccatttcatagagaccagactgtgaaaactcaaaaggaaaatactgtttttagaaccccagctatcaaaaggtcaatcttagaaagctctccaagaactcctacaccattcaaacatgcacttgcagctcaagaaattaaatacggtcccctgaagatgctacctcagacaccctctcatctagtagaagatctgcaggatgtgatcaaacaggaatctgatgaatctggaattgttgctgagtttcaagaaaatggaccacccttactgaagaaaatcaaacaagaggtggaatctccaactgataaatcaggaaacttcttctgctcacaccactgggaaggggacagtctgaatacccaactgttcacgcagacctcgcctgtggcagatgcaccgaatattcttacaagctccgttttaatggcaccagcatcagaagatgaagacaatgttctcaaagcatttacagtacctaaaaacaggtccctggcgagccccttgcagccttgtagcagtacctgggaacctgcatcctgtggaaagatggaggagcagatgacatcttccagtcaagctcgtaaatacgtgaatgcattctcagcccggacgctggtcatg

SEQ ID NO: 5713 - DNA, 2274 bp, Homo sapiens
  source 1..2274: mol_type = genomic DNA
atggcccgaagaccccggcacagcatatatagcagtgacgaggatgatgaggactttgagatgtgtgaccatgactatgatgggctgcttcccaagtctggaaagcgtcacttggggaaaacaaggtggacccgggaagaggatgaaaaactgaagaagctggtggaacagaatggaacagatgactggaaagttattgccaattatctcccgaatcgaacagatgtgcagtgccagcaccgatggcagaaagtactaaaccctgagctcatcaagggtccttggaccaaagaagaagatcagagagtgatagagcttgtacagaaatacggtccgaaacgttggtctgttattgccaagcacttaaaggggagaattggaaaacaatgtagggagaggtggcataaccacttgaatccagaagttaagaaaacctcctggacagaagaggaagacagaattatttaccaggcacacaagagactggggaacagatgggcagaaatcgcaaagctactgcctggacgaactgataatgctatcaagaaccactggaattctacaatgcgtcggaaggtcgaacaggaaggttatctgcaggagtcttcaaaagccagccagccagcagtggccacaagcttccagaagaacagtcatttgatgggttttgctcaggctccgcctacagctcaactccctgccactggccagcccactgttaacaacgactattcctattaccacatttctgaagcacaaaatgtctccagtcatgttccataccctgtagcgttacatgtaaatatagtcaatgtccctcagccagctgccgcagccattcagagacactataatgatgaagaccctgagaaggaaaagcgaataaaggaattagaattgctcctaatgtcaaccgagaatgagctaaaaggacagcagacacagaaccacacatgcagctaccccgggtggcacagcaccaccattgccgaccacaccagacctcatggagacagtgcacctgtttcctgtttgggagaacaccactccactccatctctgccagcggatcctggctccctacctgaagaaagcgcctcgccagcaaggtgcatgatcgtccaccagggcaccattctggataatgttaagaacctcttagaatttgcagaaacactccaatttatagattctgattcttcatcatggtgtgatctcagcagttttgaattctttgaagaagcagatttttcacctagccaacatcacacaggcaaagccctacagcttcagcaaagagagggcaatgggactaaacctgcaggagaacctagcccaagggtgaacaaacgtatgttgagtgagagttcacttgacccacccaaggtcttacctcctgcaaggcacagcacaattccactggtcatccttcgaaaaaaacggggccaggccagccccttagccactggagactgtagctccttcatatttgctgacgtcagcagttcaactcccaagcgttcccctgtcaaaagcctacccttctctccctcgcagttcttaaacacttccagtaaccatgaaaactcagacttggaaatgccttctttaacttccacccccctcattggtcacaaattgactgttacaacaccatttcatagagaccagactgtgaaaactcaaaaggaaaatactgtttttagaaccccagctatcaaaaggtcaatcttagaaagctctccaagaactcctacaccattcaaacatgcacttgcagctcaagaaattaaatacggtcccctgaagatgctacctcagacaccctctcatctagtagaagatctgcaggatgtgatcaaacaggaatctgatgaatctggaattgttgctgagtttcaagaaaatggaccacccttactgaagaaaatcaaacaagaggtggaatctccaactgataaatcaggaaacttcttctgctcacaccactgggaaggggacagtctgaatacccaactgttcacgcagacctcgcctgtggcagatgcaccgaatattcttacaagctccgttttaatggcaccagcatcagaagatgaagacaatgttctcaaagcatttacagtacctaaaaacaggtccctggcgagccccttgcagccttgtagcagtacctgggaacctgcatcctgtggaaagatggaggagcagatgacatcttccagtcaagctcgtaaatacgtgaatgcattctcagcccggacgctggtcatg

SEQ ID NO: 5714 - DNA, 2235 bp, Homo sapiens
  source 1..2235: mol_type = genomic DNA
atggcccgaagaccccggcacagcatatatagcagtgacgaggatgatgaggactttgagatgtgtgaccatgactatgatgggctgcttcccaagtctggaaagcgtcacttggggaaaacaaggtggacccgggaagaggatgaaaaactgaagaagctggtggaacagaatggaacagatgactggaaagttattgccaattatctcccgaatcgaacagatgtgcagtgccagcaccgatggcagaaagtactaaaccctgagctcatcaagggtccttggaccaaagaagaagatcagagagtgatagagcttgtacagaaatacggtccgaaacgttggtctgttattgccaagcacttaaaggggagaattggaaaacaatgtagggagaggtggcataaccacttgaatccagaagttaagaaaacctcctggacagaagaggaagacagaattatttaccaggcacacaagagactggggaacagatgggcagaaatcgcaaagctactgcctggacgaactgataatgctatcaagaaccactggaattctacaatgcgtcggaaggtcgaacaggaaggttatctgcaggagtcttcaaaagccagccagccagcagtggccacaagcttccagaagaacagtcatttgatgggttttgctcaggctccgcctacagctcaactccctgccactggccagcccactgttaacaacgactattcctattaccacatttctgaagcacaaaatgtctccagtcatgttccataccctgtagcgttacatgtaaatatagtcaatgtccctcagccagctgccgcagccattcagagacactataatgatgaagaccctgagaaggaaaagcgaataaaggaattagaattgctcctaatgtcaaccgagaatgagctaaaaggacagcaggtgctaccaacacagaaccacacatgcagctaccccgggtggcacagcaccaccattgccgaccacaccagacctcatggagacagtgcacctgtttcctgtttgggagaacaccactccactccatctctgccagcggatcctggctccctacctgaagaaagcgcctcgccagcaaggtgcatgatcgtccaccagggcaccattctggataatgattcttcatcatggtgtgatctcagcagttttgaattctttgaagaagcagatttttcacctagccaacatcacacaggcaaagccctacagcttcagcaaagagagggcaatgggactaaacctgcaggagaacctagcccaagggtgaacaaacgtatgttgagtgagagttcacttgacccacccaaggtcttacctcctgcaaggcacagcacaattccactggtcatccttcgaaaaaaacggggccaggccagccccttagccactggagactgtagctccttcatatttgctgacgtcagcagttcaactcccaagcgttcccctgtcaaaagcctacccttctctccctcgcagttcttaaacacttccagtaaccatgaaaactcagacttggaaatgccttctttaacttccacccccctcattggtcacaaattgactgttacaacaccatttcatagagaccagactgtgaaaactcaaaaggaaaatactgtttttagaaccccagctatcaaaaggtcaatcttagaaagctctccaagaactcctacaccattcaaacatgcacttgcagctcaagaaattaaatacggtcccctgaagatgctacctcagacaccctctcatctagtagaagatctgcaggatgtgatcaaacaggaatctgatgaatctggaattgttgctgagtttcaagaaaatggaccacccttactgaagaaaatcaaacaagaggtggaatctccaactgataaatcaggaaacttcttctgctcacaccactgggaaggggacagtctgaatacccaactgttcacgcagacctcgcctgtggcagatgcaccgaatattcttacaagctccgttttaatggcaccagcatcagaagatgaagacaatgttctcaaagcatttacagtacctaaaaacaggtccctggcgagccccttgcagccttgtagcagtacctgggaacctgcatcctgtggaaagatggaggagcagatgacatcttccagtcaagctcgtaaatacgtgaatgcattctcagcccggacgctggtcatg

SEQ ID NO: 5715 - DNA, 2283 bp, Homo sapiens
  source 1..2283: mol_type = genomic DNA
atggcccgaagaccccggcacagcatatatagcagtgacgaggatgatgaggactttgagatgtgtgaccatgactatgatgggctgcttcccaagtctggaaagcgtcacttggggaaaacaaggtggacccgggaagaggatgaaaaactgaagaagctggtggaacagaatggaacagatgactggaaagttattgccaattatctcccgaatcgaacagatgtgcagtgccagcaccgatggcagaaagtactaaaccctgagctcatcaagggtccttggaccaaagaagaagatcagagagtgatagagcttgtacagaaatacggtccgaaacgttggtctgttattgccaagcacttaaaggggagaattggaaaacaatgtagggagaggtggcataaccacttgaatccagaagttaagaaaacctcctggacagaagaggaagacagaattatttaccaggcacacaagagactggggaacagatgggcagaaatcgcaaagctactgcctggacgaactgataatgctatcaagaaccactggaattctacaatgcgtcggaaggtcgaacaggaaggttatctgcaggagtcttcaaaagccagccagccagcagtggccacaagcttccagaagaacagtcatttgatgggttttgctcaggctccgcctacagctcaactccctgccactggccagcccactgttaacaacgactattcctattaccacatttctgaagcacaaaatgtctccagtcatgttccataccctgtagcgttacatgtaaatatagtcaatgtccctcagccagctgccgcagccattcagagacactataatgatgaagaccctgagaaggaaaagcgaataaaggaattagaattgctcctaatgtcaaccgagaatgagctaaaaggacagcaggtgctaccaacacagaaccacacatgcagctaccccgggtggcacagcaccaccattgccgaccacaccagacctcatggagacagtgcacctgtttcctgtttgggagaacaccactccactccatctctgccagcggatcctggctccctacctgaagaaagcgcctcgccagcaaggtgcatgatcgtccaccagggcaccattctggataatgttaagaacctcttagaatttgcagaaacactccaatttatagattctgattcttcatcatggtgtgatctcagcagttttgaattctttgaagaagcagatttttcacctagccaacatcacacaggcaaagccctacagcttcagcaaagagagggcaatgggactaaacctgcaggagaacctagcccaagggtgaacaaacgtatgttgagtgagagttcacttgacccacccaaggtcttacctcctgcaaggcacagcacaattccactggtcatccttcgaaaaaaacggggccaggccagccccttagccactggagactgtagctccttcatatttgctgacgtcagcagttcaactcccaagcgttcccctgtcaaaagcctacccttctctccctcgcagttcttaaacacttccagtaaccatgaaaactcagacttggaaatgccttctttaacttccacccccctcattggtcacaaattgactgttacaacaccatttcatagagaccagactgtgaaaactcaaaaggaaaatactgtttttagaaccccagctatcaaaaggtcaatcttagaaagctctccaagaactcctacaccattcaaacatgcacttgcagctcaagaaattaaatacggtcccctgaagatgctacctcagacaccctctcatctagtagaagatctgcaggatgtgatcaaacaggaatctgatgaatctggaattgttgctgagtttcaagaaaatggaccacccttactgaagaaaatcaaacaagaggtggaatctccaactgataaatcaggaaacttcttctgctcacaccactgggaaggggacagtctgaatacccaactgttcacgcagacctcgcctgtggcagatgcaccgaatattcttacaagctccgttttaatggcaccagcatcagaagatgaagacaatgttctcaaagcatttacagtacctaaaaacaggtccctggcgagccccttgcagccttgtagcagtacctgggaacctgcatcctgtggaaagatggaggagcagatgacatcttccagtcaagctcgtaaatacgtgaatgcattctcagcccggacgctggtcatg

SEQ ID NO: 5716 - DNA, 1665 bp, Homo sapiens
  source 1..1665: mol_type = genomic DNA
atggcccgaagaccccggcacagcatatatagcagtgacgaggatgatgaggactttgagatgtgtgaccatgactatgatgggctgcttcccaagtctggaaagcgtcacttggggaaaacaaggtggacccgggaagaggatgaaaaactgaagaagctggtggaacagaatggaacagatgactggaaagttattgccaattatctcccgaatcgaacagatgtgcagtgccagcaccgatggcagaaagtactaaaccctgagctcatcaagggtccttggaccaaagaagaagatcagagagtgatagagcttgtacagaaatacggtccgaaacgttggtctgttattgccaagcacttaaaggggagaattggaaaacaatgtagggagaggtggcataaccacttgaatccagaagttaagaaaacctcctggacagaagaggaagacagaattatttaccaggcacacaagagactggggaacagatgggcagaaatcgcaaagctactgcctggacgaactgataatgctatcaagaaccactggaattctacaatgcgtcggaaggtcgaacaggaaggttatctgcaggagtcttcaaaagccagccagccagcagtggccacaagcttccagaagaacagtcatttgatgggttttgctcaggctccgcctacagctcaactccctgccactggccagcccactgttaacaacgactattcctattaccacatttctgaagcacaaaatgtctccagtcatgttccataccctgtagcgttacatgtaaatatagtcaatgtccctcagccagctgccgcagccattcagagacactataatgatgaagaccctgagaaggaaaagcgaataaaggaattagaattgctcctaatgtcaaccgagaatgagctaaaaggacagcaggtgctaccattcttaaacacttccagtaaccatgaaaactcagacttggaaatgccttctttaacttccacccccctcattggtcacaaattgactgttacaacaccatttcatagagaccagactgtgaaaactcaaaaggaaaatactgtttttagaaccccagctatcaaaaggtcaatcttagaaagctctccaagaactcctacaccattcaaacatgcacttgcagctcaagaaattaaatacggtcccctgaagatgctacctcagacaccctctcatctagtagaagatctgcaggatgtgatcaaacaggaatctgatgaatctggaattgttgctgagtttcaagaaaatggaccacccttactgaagaaaatcaaacaagaggtggaatctccaactgataaatcaggaaacttcttctgctcacaccactgggaaggggacagtctgaatacccaactgttcacgcagacctcgcctgtggcagatgcaccgaatattcttacaagctccgttttaatggcaccagcatcagaagatgaagacaatgttctcaaagcatttacagtacctaaaaacaggtccctggcgagccccttgcagccttgtagcagtacctgggaacctgcatcctgtggaaagatggaggagcagatgacatcttccagtcaagctcgtaaatacgtgaatgcattctcagcccggacgctggtcatg

SEQ ID NO: 5717 - DNA, 1911 bp, Homo sapiens
  source 1..1911: mol_type = genomic DNA
atggcccgaagaccccggcacagcatatatagcagtgacgaggatgatgaggactttgagatgtgtgaccatgactatgatgggctgcttcccaagtctggaaagcgtcacttggggaaaacaaggtggacccgggaagaggatgaaaaactgaagaagctggtggaacagaatggaacagatgactggaaagttattgccaattatctcccgaatcgaacagatgtgcagtgccagcaccgatggcagaaagtactaaaccctgagctcatcaagggtccttggaccaaagaagaagatcagagagtgatagagcttgtacagaaatacggtccgaaacgttggtctgttattgccaagcacttaaaggggagaattggaaaacaatgtagggagaggtggcataaccacttgaatccagaagttaagaaaacctcctggacagaagaggaagacagaattatttaccaggcacacaagagactggggaacagatgggcagaaatcgcaaagctactgcctggacgaactgataatgctatcaagaaccactggaattctacaatgcgtcggaaggtcgaacaggaaggttatctgcaggagtcttcaaaagccagccagccagcagtggccacaagcttccagaagaacagtcatttgatgggttttgctcaggctccgcctacagctcaactccctgccactggccagcccactgttaacaacgactattcctattaccacatttctgaagcacaaaatgtctccagtcatgttccataccctgtagcgttacatgtaaatatagtcaatgtccctcagccagctgccgcagccattcagagacactataatgatgaagaccctgagaaggaaaagcgaataaaggaattagaattgctcctaatgtcaaccgagaatgagctaaaaggacagcagacacagaaccacacatgcagctaccccgggtggcacagcaccaccattgccgaccacaccagacctcatggagacagtgcacctgtttcctgtttgggagaacaccactccactccatctctgccagcggatcctggctccctacctgaagaaagcgcctcgccagcaaggtgcatgatcgtccaccagggcaccattctggataatgttaagaacctcttagaatttgcagaaacactccaatttatagattctttcttaaacacttccagtaaccatgaaaactcagacttggaaatgccttctttaacttccacccccctcattggtcacaaattgactgttacaacaccatttcatagagaccagactgtgaaaactcaaaaggaaaatactgtttttagaaccccagctatcaaaaggtcaatcttagaaagctctccaagaactcctacaccattcaaacatgcacttgcagctcaagaaattaaatacggtcccctgaagatgctacctcagacaccctctcatctagtagaagatctgcaggatgtgatcaaacaggaatctgatgaatctggaattgttgctgagtttcaagaaaatggaccacccttactgaagaaaatcaaacaagaggtggaatctccaactgataaatcaggaaacttcttctgctcacaccactgggaaggggacagtctgaatacccaactgttcacgcagacctcgcctgtggcagatgcaccgaatattcttacaagctccgttttaatggcaccagcatcagaagatgaagacaatgttctcaaagcatttacagtacctaaaaacaggtccctggcgagccccttgcagccttgtagcagtacctgggaacctgcatcctgtggaaagatggaggagcagatgacatcttccagtcaagctcgtaaatacgtgaatgcattctcagcccggacgctggtcatg

SEQ ID NO: 5718 - DNA, 777 bp, Homo sapiens
  source 1..777: mol_type = genomic DNA
atggatccaggttcactgctggcctataatacaacctcccacaccgaccaatcctcacgattgagtgtcaaagaagacccttcttatgactcagtcagaagaggagcttggggcaataacatgaattctggcctcaacaaaagtcctccccttggaggggcacaaacgatcagtaagaatacagagcaacggccccagccagatccgtatcagatcctgggcccgaccagcagtcgcctagccaaccctggaagcgggcagatccagctgtggcaattcctcctggagctgctctccgacagcgccaacgccagctgtatcacctgggaggggaccaacggggagttcaaaatgacggaccccgatgaggtggccaggcgctggggcgagcggaaaagcaagcccaacatgaattacgacaagctgagccgggccctccgttattactatgataaaaacattatgaccaaagtgcacggcaaaagatatgcttacaaatttgacttccacggcattgcccaggctctgcagccacatccgaccgagtcgtccatgtacaagtacccttctgacatctcctacatgccttcctaccatgcccaccagcagaaggtgaactttgtccctccccatccatcctccatgcctgtcacttcctccagcttctttggagccgcatcacaatactggacctcccccacggggggaatctaccccaaccccaacgtcccccgccatcctaacacccacgtgccttcacacttaggcagctactac

SEQ ID NO: 5719 - DNA, 1257 bp, Homo sapiens
  source 1..1257: mol_type = genomic DNA
atgactgcctcggggagtcctgactacgggcagccccacaagatcaaccccctcccaccacagcaggagtggatcaatcagccagtgagggtcaacgtcaagcgggagtatgaccacatgaatggatccagggagtctccggtggactgcagcgttagcaaatgcagcaagctggtgggcggaggcgagtccaaccccatgaactacaacagctatatggacgagaagaatggcccccctcctcccaacatgaccaccaacgagaggagagtcatcgtccccgcagaccccacactgtggacacaggagcatgtgaggcaatggctggagtgggccataaaggagtacagcttgatggagatcgacacatcctttttccagaacatggatggcaaggaactgtgtaaaatgaacaaggaggacttcctccgcgccaccaccctctacaacacggaagtgctgttgtcacacctcagttacctcagggaaagttcactgctggcctataatacaacctcccacaccgaccaatcctcacgattgagtgtcaaagaagacccttcttatgactcagtcagaagaggagcttggggcaataacatgaattctggcctcaacaaaagtcctccccttggaggggcacaaacgatcagtaagaatacagagcaacggccccagccagatccgtatcagatcctgggcccgaccagcagtcgcctagccaaccctggaagcgggcagatccagctgtggcaattcctcctggagctgctctccgacagcgccaacgccagctgtatcacctgggaggggaccaacggggagttcaaaatgacggaccccgatgaggtggccaggcgctggggcgagcggaaaagcaagcccaacatgaattacgacaagctgagccgggccctccgttattactatgataaaaacattatgaccaaagtgcacggcaaaagatatgcttacaaatttgacttccacggcattgcccaggctctgcagccacatccgaccgagtcgtccatgtacaagtacccttctgacatctcctacatgccttcctaccatgcccaccagcagaaggtgaactttgtccctccccatccatcctccatgcctgtcacttcctccagcttctttggagccgcatcacaatactggacctcccccacggggggaatctaccccaaccccaacgtcccccgccatcctaacacccacgtgccttcacacttaggcagctactac

SEQ ID NO: 5720 - DNA, 1158 bp, Homo sapiens
  source 1..1158: mol_type = genomic DNA
atggagggaggactggcaggcgagcgggcgagggagtctccggtggactgcagcgttagcaaatgcagcaagctggtgggcggaggcgagtccaaccccatgaactacaacagctatatggacgagaagaatggcccccctcctcccaacatgaccaccaacgagaggagagtcatcgtccccgcagaccccacactgtggacacaggagcatgtgaggcaatggctggagtgggccataaaggagtacagcttgatggagatcgacacatcctttttccagaacatggatggcaaggaactgtgtaaaatgaacaaggaggacttcctccgcgccaccaccctctacaacacggaagtgctgttgtcacacctcagttacctcagggaaagttcactgctggcctataatacaacctcccacaccgaccaatcctcacgattgagtgtcaaagaagacccttcttatgactcagtcagaagaggagcttggggcaataacatgaattctggcctcaacaaaagtcctccccttggaggggcacaaacgatcagtaagaatacagagcaacggccccagccagatccgtatcagatcctgggcccgaccagcagtcgcctagccaaccctggaagcgggcagatccagctgtggcaattcctcctggagctgctctccgacagcgccaacgccagctgtatcacctgggaggggaccaacggggagttcaaaatgacggaccccgatgaggtggccaggcgctggggcgagcggaaaagcaagcccaacatgaattacgacaagctgagccgggccctccgttattactatgataaaaacattatgaccaaagtgcacggcaaaagatatgcttacaaatttgacttccacggcattgcccaggctctgcagccacatccgaccgagtcgtccatgtacaagtacccttctgacatctcctacatgccttcctaccatgcccaccagcagaaggtgaactttgtccctccccatccatcctccatgcctgtcacttcctccagcttctttggagccgcatcacaatactggacctcccccacggggggaatctaccccaaccccaacgtcccccgccatcctaacacccacgtgccttcacacttaggcagctactac

SEQ ID NO: 5721 - DNA, 1356 bp, Homo sapiens
  source 1..1356: mol_type = genomic DNA
atggacgggactattaaggaggctctgtcggtggtgagcgacgaccagtccctctttgactcagcgtacggagcggcagcccatctccccaaggccgacatgactgcctcggggagtcctgactacgggcagccccacaagatcaaccccctcccaccacagcaggagtggatcaatcagccagtgagggtcaacgtcaagcgggagtatgaccacatgaatggatccagggagtctccggtggactgcagcgttagcaaatgcagcaagctggtgggcggaggcgagtccaaccccatgaactacaacagctatatggacgagaagaatggcccccctcctcccaacatgaccaccaacgagaggagagtcatcgtccccgcagaccccacactgtggacacaggagcatgtgaggcaatggctggagtgggccataaaggagtacagcttgatggagatcgacacatcctttttccagaacatggatggcaaggaactgtgtaaaatgaacaaggaggacttcctccgcgccaccaccctctacaacacggaagtgctgttgtcacacctcagttacctcagggaaagttcactgctggcctataatacaacctcccacaccgaccaatcctcacgattgagtgtcaaagaagacccttcttatgactcagtcagaagaggagcttggggcaataacatgaattctggcctcaacaaaagtcctccccttggaggggcacaaacgatcagtaagaatacagagcaacggccccagccagatccgtatcagatcctgggcccgaccagcagtcgcctagccaaccctggaagcgggcagatccagctgtggcaattcctcctggagctgctctccgacagcgccaacgccagctgtatcacctgggaggggaccaacggggagttcaaaatgacggaccccgatgaggtggccaggcgctggggcgagcggaaaagcaagcccaacatgaattacgacaagctgagccgggccctccgttattactatgataaaaacattatgaccaaagtgcacggcaaaagatatgcttacaaatttgacttccacggcattgcccaggctctgcagccacatccgaccgagtcgtccatgtacaagtacccttctgacatctcctacatgccttcctaccatgcccaccagcagaaggtgaactttgtccctccccatccatcctccatgcctgtcacttcctccagcttctttggagccgcatcacaatactggacctcccccacggggggaatctaccccaaccccaacgtcccccgccatcctaacacccacgtgccttcacacttaggcagctactac

SEQ ID NO: 5722 - DNA, 2979 bp, Homo sapiens
  source 1..2979: mol_type = genomic DNA
atggcctcggcagctgtggagagcttcgtgaccaagcaactggacctgctggagcttgagagagacgcggaggtggaggagcgcaggtcctggcaggagaacatctctctgaaagagctccagagccgaggcgtgtgtttgctgaagctgcaggtatccagccagcgcactgggctgtacggacggctgctggtcacctttgagcccaggcgatacgggtccgcggcagctcttcccagtaacagctttacttctggtgatatcgtgggcctgtacgatgctgctaatgagggcagtcagctggccactgggatcttgacccgggtcacccagaagtcggtcacggtggcctttgatgagtcccacgatttccagttgagcttggaccgagagaattcctacagactgttaaaacttgccaatgatgtcacttacaggcgactgaaaaaagccctgattgctctaaagaagtatcattctggcccagcctcctcactcatagaagtgctctttggcagatctgctcccagtcctgccagtgaaatacacccgctgacattcttcaacacctgcctggacacctcccagaaagaagcggttttatttgcgctgtctcagaaagaacttgccatcatccatggacctcctggcactgggaaaaccacgactgtggttgagatcattcttcaagctgtgaaacaaggcttaaaggttctgtgctgcgccccctccaacatcgccgtggacaatctggtggagcgcctggctctgtgtaagcagcggattctgcgcctgggacaccctgcccgcctcctggagtccattcagcagcactccctggatgcggttttagcgcggagcgacagtgcccagattgttgcagatatcaggaaggacatcgaccaggtctttgtgaaaaacaaaaagacccaggataagagagagaaaagtaattttcgaaatgaaattaagctgttaagaaaagaactgaaggagagggaagaagcagctatgctcgagagcctcacttcggcaaacgtggtccttgcaacaaacacaggtgcgtctgccgatggccccctgaagttgctgcccgagagctacttcgacgtggtggtcattgacgagtgtgcccaggccctcgaggcgagctgctggatccccctgctgaaggccagaaagtgcatcctggcgggcgatcacaagcagctgccccccaccacagtctctcacaaggctgcgctggcaggactgtcactcagcctgatggaacgcctggctgaggagtacggcgcgagggtggtgcggacactgacggtgcagtaccgcatgcaccaggctatcatgcgctgggcctcagacaccatgtaccttgggcagctcacagcccactcttccgtggcaaggcacctcctgagggacctcccaggtgtggctgccacagaagagacgggtgtgcccctgctcttggtggacaccgccggctgcgggctgtttgagctggaggaggaggacgaacagtcgaaagggaaccctggcgaagtccgcctcgtcagtttgcacatccaggctctggtggacgctggtgttccagcccgtgacattgctgtggtctcgccatacaacctccaggtggacctgctcagacagagccttgtgcacaggcaccctgagcttgaaatcaagtctgtcgatggcttccaaggccgagagaaggaggccgtgatactgtccttcgtcagatccaacaggaaaggtgaagttggttttcttgctgaggaccggaggatcaacgtggctgtcacccgtgcccgacgccacgtggcggtcatctgtgactcccgtactgtcaacaaccatgcatttttgaagaccctggtggagtatttcacacagcatggggaagtacgcacggcctttgagtatcttgacgatattgtcccagaaaactattcccatgagaactcccagggttccagccacgctgccaccaagccccagggacctgctacgtccaccaggaccggaagccagcggcaggagggaggccaggaggctgcagcacctgccagacagggccggaagaagccggctgggaagtctctggcctctgaagctccatctcagcccagcctcaacggaggcagcccagagggagtggagagccaagatggcgtggaccacttccgggccatgatagtggagttcatggccagcaagaagatgcagttggagtttcctccttccctcaattcccacgacaggctgcgggtccaccaaatagccgaggagcacgggctgaggcacgacagttccggggaagggaagaggaggttcatcactgtgagcaagagggccccgcgaccccgagcagccctgggacccccagcagggaccggtggcccagcccctctccagccagtgccccctacccctgcgcagacagagcagcctcccagggagcagcgtggcccagaccagcctgatctgaggacgctgcacctggagagactgcagagggtcaggagcgcgcaggggcagcccgccagcaaggagcagcaggcctcagggcagcagaaacttccagaaaagaaaaagaaaaaagccaaaggacatccggccacagatctgcccacggaggaggactttgaggccctggtttctgccgccgttaaggctgataacacctgcggctttgccaagtgcacagccggcgtcacaaccctgggccagttctgccagctctgcagccgccgctactgcctcagccaccacctgcccgagatccatggctgcggtgagagggctcgcgcccatgcccggcagagaatcagccgggaaggggtcctctatgccggcagcgggaccaagaacggatccctggacccagccaagagggcccagctgcagaggaggctggataagaagctgagtgagctcagcaaccagaggaccagccggaggaaggagagggggacg

SEQ ID NO: 5723 - DNA, 4407 bp, Homo sapiens
  source 1..4407: mol_type = genomic DNA
atggatgtagatgctgaaagagagaagataacacaggagatcaaggagctggaaaggattttggatcccggctcctcgggctcccacgtggagatctcagaatcaagtctcgagtcagattctgaagcagattcactgccttctgaggacttggatcctgccgatcccccgatctcggaagaagaaaggtggggcgaagccagcaatgacgaggacgatcccaaggataaaaccctccctgaagacccagaaacctgcctgcagctgaacatggtctaccaggaggtcatccaggagaagctggctgaggccaacctgctgctggcccagaaccgggagcagcaggaggaactcatgagggatctggctgggtccaaaggcaccaaggtgaaagatggcaaaagcctgcccccaagcacatacatggggcacttcatgaagccgtatttcaaggacaaggtcacgggcgtggggccacctgccaacgaggacacacgagagaaggctgcccaggggatcaaggctttcgaggagctccttgtgaccaaatggaaaaactgggaaaaggccttgctccgaaagtcagtggtgagtgaccgcctgcagcgattgcttcagcccaagttactgaagctcgagtacttgcaccagaagcagagcaaagtctccagtgagctggagaggcaagccctggagaagcagggcagggaagccgagaaggagatccaggacatcaaccagcttccagaagaggccttgctgggaaacaggctggacagccacgactgggagaagatttccaatattaactttgaaggcagccgcagtgcagaggagatccggaagttctggcagaactcggagcaccccagcatcaacaagcaggagtggagcagggaggaggaggagcggctgcaggcgatcgcggctgcacacggccacctggagtggcagaagattgcagaggagctggggaccagccgcagcgccttccagtgcctgcagaaattccagcagcacaacaaagctctgaaacgcaaggagtggacagaggaggaggaccgcatgctcacgcagctggtgcaggagatgcgcgtcggcagccacatcccctaccgcagaattgtctactatatggaagggagagactccatgcagctgatctaccgatggaccaagagcttggatcctggtctgaagaagggttactgggccccggaggaagatgctaagttgcttcaagctgttgccaaatacggggagcaggattggtttaaaatccgggaagaggtgccaggtaggagcgatgcccagtgccgagatcggtatctcaggagattacatttcagcttgaaaaagggtcggtggaatttaaaagaagaggaacagttaattgaattaatagaaaaatatggtgtcggtcactgggcaaaaatagcttctgagctgccccatcggtctggctcccagtgtctgagcaagtggaagatcatgatggggaagaagcagggtctccggaggcggcggcggagggcccgtcacagcgtccggtggagctctaccagcagcagcggcagcagcagtggcagcagtggagggagcagcagcagcagcagcagcagcagcgaggaggacgagccagagcaggcgcaggccggggagggtgacagagcgctgctgtccccacagtacatggtcccggacatggacctgtgggttcctgccaggcagagcaccagccagccatggagaggaggggcaggggcctggctgggaggccccgctgcctccctcagccctcccaaggggtccagtgccagccagggcggcagcaaggaagcttccaccacagccgcggctcctggagaggagacgagtccggtgcaggtccctgccagggcccacggccctgtcccgaggtctgcccaggcctcccactcagcagacactcgcccggcgggcgcagagaagcaggccctggagggtgggaggcgtctgctgacagtgcctgtggagaccgtgctgagggtgctcagggccaacacggctgctcggagctgcacacagaaagagcagctgaggcagccacccctgcccacctcatccccaggggtcagctctggtgacagcgtggcccgatcccatgtgcagtggctacggcacagagccacccagagtgggcagcggcgctggagacacgctctgcaccggaggctcctgaaccgcaggctgctgctggctgtgaccccttgggtaggggacgttgtcgtgccctgcacacaggcttcccagagacccgccgtagtgcagactcaagcggatggcctcagggagcagctgcagcaggcccgcctggccagcacccctgtgtttaccctgtttacccagctgttccacatcgatactgccggctgcttggaggtcgtccgagagaggaaggccctgccacccaggctgccccaggctggtgctcgggacccaccagttcatcttctgcaggcatcctcaagtgcccagagcaccccaggccacctcttcccaaacgtgccggctcaagaagcctcaaagagtgccagccacaaagggagccgaagactggcgtccagccgggtggagcgcaccctaccccaggcgtccctgctggcttcaaccggcccccggcccaagcccaagactgtgtcggagctgcttcaggagaagcggcttcaggaggcccgtgccagggaggccacccggggcccggtggtgctcccgtcccagctgctggtctcctcgtctgtgatcctccagccccctctaccacacaccccacacggccgcccagccccgggtcccaccgtcttaaatgtaccgctctctgggcctggggcccccgcggcagccaaacctggcacttctggctcctggcaggaggctgggacttcagccaaggacaagagactctccaccatgcaagccctgcccctcgctcctgtcttctcagaggccgagggcacagcccctgctgcttcccaagcccctgccctgggccccggccagatctctgtgagctgccccgagagtggtctcggacagtctcaggcccccgctgcatcccggaagcagggcctgcctgaggcgccaccctttctccccgcagcccccagccccaccccactgcccgtccagcccctcagcctgacgcacataggagggccacatgtggcgaccagtgtccccctgcctgtcacctgggtgctcacagcccaggggcttctccctgttcctgtaccagctgtggtgagccttcccaggccagcagggacccctggccccgcagggctgctggccactctgctgcctcccctgactgagactcgggcggcccagggccccagggccccagcgttgagcagctcttggcagcccccagccaatatgaacagggaaccggagccttcctgcaggacagacaccccagctcctcccacacacgccctctcccaaagtcctgcagaagcggatggcagtgtggcctttgtccctggagaggcccaggtggccagggagatacctgagcccaggacgtcctcccacgctgaccctcctgaagcagaacccccttggtccgggaggctgccagccttcggtggtgtcatcccagcaactgagccaagggggacgccggggtccccctcagggacacaggagcccagggggcctctgggcctggagaagctgcccctgcgccagcctgggcctgagaagggggccctggacctggagaagccgcccctaccccagcctgggcctgagaagggggccctggacctgggcctgctgtcccaggagggcgaggcggccacacagcagtggctggggggccagcggggggtgcgtgtgcctcttctgggcagcagactgccctatcagcccccagccctgtgcagcctgcgagctctgtccggtctcctactccacaagaaggccctggagcacaaggccacctccctggtggtggggggcgaggctgagcggccggccggagcactgcaagcctcactggggctggtgcgggggcagctccaggacaacccggcctacctcctgttgcgggcgcggttcctggcagccttcaccctccctgcgctcctggccaccctggccccccaaggcgtccgcaccaccctctcagtaccttcgagggtgggctctgagagtgaggatgaagacctcctgagtgagctggaacttgcagacagggacgggcagccgggctgcacgacagccacatgccccattcagggagccccagactctggtaaatgctctgcttcctcctgcctggatacttctaatgaccctgacgacctggacgtgctcagaacccggcatgccaggcacacccggaagcggaggcggctggtg

SEQ ID NO: 5724 - DNA, 2079 bp, Homo sapiens
  source 1..2079: mol_type = genomic DNA
atggactcagtggcatttgaggatgtggctataaacttcacctgtgaggagtgggctttgctgggtccatcacagaagagtctctacagagatgtgatgcaggaaaccatcagaaacctggactgtataggaatgatatggcaaaatcatgatatagaagaagatcagtacaaagatctcagaagaaatctaagatgtcatatggtagagagagcctgtgaaattaaagataatagtcaatgtggaggaccctttacccagactcaagacagtattgtgaacgagaaaatacctggagtagatccatgggaaagcagtgagtgtacagacgtcctcatgggtcgttcatctcttaattgctacgttagagttgacagtgaacacaaaccatgtgagtatcaagaatatggagagaagccatatacacatacacaatgtgggacagctttcagttatcagccctgctttcaaatacatgaaagacctcagcatggaaagaaactctatgattgtaaggaatgtgcaagcttcagttctcttgaaaaccttcaaagacacatggcagcacaccatggagatggacctcgtatatgtaagttgtgtggaaacgcctttatttggcctagtttatttcatatgcttagaagaactcacactgaagagaaaccatatgaatatgagcagtgttctacagcgtttcctgcttatagttccactctaagacatgaaagaacacacagtggagagaaaccctatcaatgtaaacaatgtgggaaagccttcagttgttcctgttacactcaactatatgaaaggactcacactggagaacaatcctatgaatgtaagcaatgtgggaaagcattttatcatcttggaagctttcaaagacacatgatagtgcacactggagatgggcctcataaatgtaagatatgtggaaaaggctttctttctcccagttcagttcgaagacataaaagaactcacactggagagaaaccgtatgaatgtaagtattgtgggaaagcattctctgattgcacaggttttcgaagacacatgataacgcacactggagatggacctcataaatgcaaggtatgtgggaaagcctttgattctcccagtttatgtcgaaggcatgaaacaactcatactggggagaaaccctataaatgtgaatgtgggaaagcctttagtgatttctattactttcgaaatcatgaaactactcacactggagagaagccatataaatgtaaacaatgtggaaaagccttcatttgttgcacttaccttcaaatacatgaaagaattcacactggggagagaccctataaatgtaaacaatgcggaaaagccttcaggtcttccaattacattcgagtacatgaaaagactcacactggagaaaagccctatgaatgtaagcagtgtggaaaagcactttctcatctgaaaagctttcagagacacatgataatgcacactggagatggacctcataaatgtaagatatgtgggaaaagctttgattctcccagttcatttcgaagacatgaaagaattcacactggggagagaccctataagtgtaaactatgtgggaaaggcttcaggtcttccagttacattcaactacatgaaaggactcacactggagagaaaccctatggttgtcagcaatgtgggaaagcattatctgatctctcaagctttcgaagacacatgataacacatactggaaatggacctcataaatgtaagatatgtgggaaaggctttgattatcccagttcagtgcaaagacatgaaagaactcacactggagagaaaccctatgaatgcaaggaatgtggtaaagccttcagtcattcaagttacttacgaatacacgaaagagttcatactggagagaagccgtataaatgtaaggaatgtgggaaaccattccattgtcccagtgcctttcataaacatgaaaggacccacagtatggagaaaccctataagtgtaaagaatgtggggaagcatttcattgtatcagttcctttcataaacatgaaatgactcac

SEQ ID NO: 5725 - DNA, 4593 bp, Homo sapiens
  source 1..4593: mol_type = genomic DNA
atgccctcggacttcatctcattgctcagcgcggacctagacctggaatcgcccaagtccctctactcgcgagaatctgtctatgatcttctcccaaaggagttacagttacctccatctagagaaacatctgtagcatcaatgagtcagacaagcggtggtgaggcaggctcgcctcctccagctgttgttgctgctgatgcttcttcagctccctcctcttcctccatgggcggtgcttgcagctcctttaccacctcttccagccctaccatttattctacctcagtcaccgacagcaaggctatgcaagtggagagctgctcctcagccgtgggggtaagtaacagaggggtaagtgaaaagcagttaaccagtaacacagttcagcagcatccatcaacaccgaagaggcacacagtcttgtacatctcaccaccacctgaggacttgctggataacagtcggatgtcctgccaggatgaggggtgtggattggaatctgagcagagctgcagtatgtggatggaggattccccctccaacttcagtaacatgagcaccagttcctacaatgataacactgaggtacctcgtaaatcacgaaaacgaaatccaaagcagaggccgggggtcaaacgacgagattgtgaagaatctaatatggatatatttgatgccgacagtgccaaagcacctcactatgtgctttctcagcttaccacggacaacaaaggcaactcaaaagcgggaaatggaacattggaaaaccaaaaaggaactggagtaaagaagagccctatgttgtgtggacaatatcctgttaaaagtgagggaaaggagctgaagatagttgtacaacctgagacacagcaccgagctcggtacctgactgagggcagccgtggctcagtgaaagatagaacacagcaaggctttcctacagtaaagctggaaggccataatgaacctgtagtgttgcaagtgtttgtgggcaacgactctggacgagtgaaaccacatggattttatcaggcctgcagagtaactggacgaaatacaactccttgcaaagaagtggacattgaaggcactactgttatagaagtcggccttgatcctagcaacaacatgacactggcggtggactgcgtagggatattgaaattgaggaatgctgatgtcgaagccagaataggaattgctggttccaagaagaaaagcactcgtgccagattggtttttcgagttaatatcatgaggaaagatggctccactttgacactgcaaacaccctcttctccaattttgtgtactcagccagcaggagtgccagaaatcttaaagaaaagcttgcatagctgttcagtgaaaggagaagaagaagtgtttttaatcggcaagaactttctgaaaggaactaaagttattttccaagaaaatgtttctgatgaaaactcttggaagtcagaagctgaaattgatatggaactatttcatcagaatcatcttattgtgaaggttcctccctatcatgaccaacatataactttgcctgtgtcagtgggaatatatgtagtgacaaatgctggaagatctcatgatgttcaaccattcacttacactccagacccagcagcagctggtgctttgaatgtaaatgtgaagaaggaaatatctagtccagcaagaccttgctcttttgaagaggccatgaaagcaatgaaaactactggatgtaatttagataaggtaaatattatccctaatgccctgatgactccactcataccaagcagtatgattaagagtgaagatgttactccaatggaagtaacagcagaaaaaagatcttccactatttttaagactacaaagtctgttggatcaactcagcaaacattagaaaacatctcaaacatagcaggaaatggctctttttcatcaccatcatcttcccacctaccttctgaaaatgaaaaacagcagcagattcagcccaaggcatacaacccagagaccctgacaactattcaaacccaggacatctcacagcctggtacttttccagcagtttctgcttctagtcagctgcccaacagcgatgcactattgcagcaggctacacagtttcagacaagagaaactcagtctagagagatattacagtcagatggtacagtggttaatttgtcacaactgactgaggcatcacaacaacagcagcagtcaccactacaagaacaagcacagactttacagcagcagatttcatcaaatatttttccatcaccaaatagtgtgagtcagcttcagaatactattcagcagctgcaagcagggagtttcacaggcagtactgctagtggcagcagtggaagtgttgacttggtccaacaagttttagaggcacagcagcagttatcttcagttttattttctgctccagatggtaatgagaatgttcaagagcagcttagtgcagatatttttcaacaagtcagtcaaattcagagtggtgtaagccctggaatgttttcctcaacagagccaacagtccataccagaccagataatttattacctggaagagctgaaagtgttcatccacagtctgaaaacacgttatctaatcaacagcagcagcagcagcagcaacagcaagtgatggaatcttcagccgcaatggtgatggagatgcaacagagtatctgccaggcagctgcccagattcagtcagagttattcccttcaactgcttcagcaaatggaaaccttcagcaatcgccagtttaccagcagacttctcacatgatgagtgcattgtctaccaatgaggatatgcaaatgcagtgtgaattgttttcttctcctcctgcagtttctggaaatgaaacttctacaactaccacacagcaggttgcaacccctggcactaccatgtttcagacatcaagttcaggagatggagaagaaactggaacacaagcaaaacagattcagaacagtgtctttcagaccatggtccaaatgcaacatagtggggacaatcaacctcaagttaaccttttttcatccacaaaaagtatgatgagtgttcagaatagtggtacccaacaacaaggtaatggtttattccagcaagggaatgagatgatgtcacttcaatctggaaattttttgcagcagtcttctcattcacaggcccaactttttcatcctcaaaatcctattgccgatgctcagaacctttcccaggaaactcaaggttctctctttcatagtccaaatcctattgtccacagtcagacttctacaacctcctctgaacaaatgcagcctccaatgtttcactctcaaagtaccattgctgtgttacagggctcttcagttcctcaagaccagcagtcaaccaacatatttctttcccagagtcccatgaataatcttcagactaacacagtagcccaagaagcattttttgcagcaccgaactcaatttctccacttcagtcaacatcaaacagtgaacaacaagctgctttccaacagcaagctccaatatcacacatccagactcctatgctttcccaagaacaggcacaacccccgcagcagggtttatttcagcctcaggtggccctgggctcccttccacctaatccaatgcctcaaagccaacaaggaaccatgttccagtcacagcactcaatagttgccatgcagagtaactctccatcccaggaacagcagcagcagcagcaacagcagcagcaacagcagcagcaacaacaacagagcattttattcagtaatcagaataccatggctacaatggcgtctccaaagcaaccaccaccaaacatgatattcaacccaaatcaaaatccaatggctaatcaggagcaacagaaccagtcaatttttcaccaacaaagtaacatggccccaatgaatcaagagcaacagcccatgcaatttcagagtcagtccacagtttcctcacttcagaacccaggtcctacccagtcggaatcatcacagacccccttgttccatagctctcctcagattcagttggtacaagggtcacctagttctcaagagcagcaagtaactctcttcttatctccagcatccatgtctgccttgcagaccagtataaatcaacaagatatgcaacagtctcctctttattcccctcagaacaacatgcctggaattcaaggagccacatcttcgcctcaaccacaggctactttatttcacaacacagcaggaggcacaatgaaccaactgcagaattctcctggctcatctcagcagacatcaggaatgttcttatttggcattcaaaataactgtagtcagcttttaacctctggaccagctacattgcctgatcagttgatggccataagtcagccaggccaaccacaaaacgagggccagccacctgtgacaacacttctttctcagcaaatgccagagaattctccactggcatcctctataaacaccaaccagaacatcgaaaagattgatttgcttgtttcattgcaaaaccaagggaacaacttgactggctccttt

SEQ ID NO: 5726 - DNA, 4647 bp, Homo sapiens
  source 1..4647: mol_type = genomic DNA
atgccctcggacttcatctcattgctcagcgcggacctagacctggaatcgcccaagtccctctactcgcgagattctctgaagttacacccatcacagaattttcatagagctggactattggaagaatctgtctatgatcttctcccaaaggagttacagttacctccatctagagaaacatctgtagcatcaatgagtcagacaagcggtggtgaggcaggctcgcctcctccagctgttgttgctgctgatgcttcttcagctccctcctcttcctccatgggcggtgcttgcagctcctttaccacctcttccagccctaccatttattctacctcagtcaccgacagcaaggctatgcaagtggagagctgctcctcagccgtgggggtaagtaacagaggggtaagtgaaaagcagttaaccagtaacacagttcagcagcatccatcaacaccgaagaggcacacagtcttgtacatctcaccaccacctgaggacttgctggataacagtcggatgtcctgccaggatgaggggtgtggattggaatctgagcagagctgcagtatgtggatggaggattccccctccaacttcagtaacatgagcaccagttcctacaatgataacactgaggtacctcgtaaatcacgaaaacgaaatccaaagcagaggccgggggtcaaacgacgagattgtgaagaatctaatatggatatatttgatgccgacagtgccaaagcacctcactatgtgctttctcagcttaccacggacaacaaaggcaactcaaaagcgggaaatggaacattggaaaaccaaaaaggaactggagtaaagaagagccctatgttgtgtggacaatatcctgttaaaagtgagggaaaggagctgaagatagttgtacaacctgagacacagcaccgagctcggtacctgactgagggcagccgtggctcagtgaaagatagaacacagcaaggctttcctacagtaaagctggaaggccataatgaacctgtagtgttgcaagtgtttgtgggcaacgactctggacgagtgaaaccacatggattttatcaggcctgcagagtaactggacgaaatacaactccttgcaaagaagtggacattgaaggcactactgttatagaagtcggccttgatcctagcaacaacatgacactggcggtggactgcgtagggatattgaaattgaggaatgctgatgtcgaagccagaataggaattgctggttccaagaagaaaagcactcgtgccagattggtttttcgagttaatatcatgaggaaagatggctccactttgacactgcaaacaccctcttctccaattttgtgtactcagccagcaggagtgccagaaatcttaaagaaaagcttgcatagctgttcagtgaaaggagaagaagaagtgtttttaatcggcaagaactttctgaaaggaactaaagttattttccaagaaaatgtttctgatgaaaactcttggaagtcagaagctgaaattgatatggaactatttcatcagaatcatcttattgtgaaggttcctccctatcatgaccaacatataactttgcctgtgtcagtgggaatatatgtagtgacaaatgctggaagatctcatgatgttcaaccattcacttacactccagacccagcagcagctggtgctttgaatgtaaatgtgaagaaggaaatatctagtccagcaagaccttgctcttttgaagaggccatgaaagcaatgaaaactactggatgtaatttagataaggtaaatattatccctaatgccctgatgactccactcataccaagcagtatgattaagagtgaagatgttactccaatggaagtaacagcagaaaaaagatcttccactatttttaagactacaaagtctgttggatcaactcagcaaacattagaaaacatctcaaacatagcaggaaatggctctttttcatcaccatcatcttcccacctaccttctgaaaatgaaaaacagcagcagattcagcccaaggcatacaacccagagaccctgacaactattcaaacccaggacatctcacagcctggtacttttccagcagtttctgcttctagtcagctgcccaacagcgatgcactattgcagcaggctacacagtttcagacaagagaaactcagtctagagagatattacagtcagatggtacagtggttaatttgtcacaactgactgaggcatcacaacaacagcagcagtcaccactacaagaacaagcacagactttacagcagcagatttcatcaaatatttttccatcaccaaatagtgtgagtcagcttcagaatactattcagcagctgcaagcagggagtttcacaggcagtactgctagtggcagcagtggaagtgttgacttggtccaacaagttttagaggcacagcagcagttatcttcagttttattttctgctccagatggtaatgagaatgttcaagagcagcttagtgcagatatttttcaacaagtcagtcaaattcagagtggtgtaagccctggaatgttttcctcaacagagccaacagtccataccagaccagataatttattacctggaagagctgaaagtgttcatccacagtctgaaaacacgttatctaatcaacagcagcagcagcagcagcaacagcaagtgatggaatcttcagccgcaatggtgatggagatgcaacagagtatctgccaggcagctgcccagattcagtcagagttattcccttcaactgcttcagcaaatggaaaccttcagcaatcgccagtttaccagcagacttctcacatgatgagtgcattgtctaccaatgaggatatgcaaatgcagtgtgaattgttttcttctcctcctgcagtttctggaaatgaaacttctacaactaccacacagcaggttgcaacccctggcactaccatgtttcagacatcaagttcaggagatggagaagaaactggaacacaagcaaaacagattcagaacagtgtctttcagaccatggtccaaatgcaacatagtggggacaatcaacctcaagttaaccttttttcatccacaaaaagtatgatgagtgttcagaatagtggtacccaacaacaaggtaatggtttattccagcaagggaatgagatgatgtcacttcaatctggaaattttttgcagcagtcttctcattcacaggcccaactttttcatcctcaaaatcctattgccgatgctcagaacctttcccaggaaactcaaggttctctctttcatagtccaaatcctattgtccacagtcagacttctacaacctcctctgaacaaatgcagcctccaatgtttcactctcaaagtaccattgctgtgttacagggctcttcagttcctcaagaccagcagtcaaccaacatatttctttcccagagtcccatgaataatcttcagactaacacagtagcccaagaagcattttttgcagcaccgaactcaatttctccacttcagtcaacatcaaacagtgaacaacaagctgctttccaacagcaagctccaatatcacacatccagactcctatgctttcccaagaacaggcacaacccccgcagcagggtttatttcagcctcaggtggccctgggctcccttccacctaatccaatgcctcaaagccaacaaggaaccatgttccagtcacagcactcaatagttgccatgcagagtaactctccatcccaggaacagcagcagcagcagcaacagcagcagcaacagcagcagcaacaacaacagagcattttattcagtaatcagaataccatggctacaatggcgtctccaaagcaaccaccaccaaacatgatattcaacccaaatcaaaatccaatggctaatcaggagcaacagaaccagtcaatttttcaccaacaaagtaacatggccccaatgaatcaagagcaacagcccatgcaatttcagagtcagtccacagtttcctcacttcagaacccaggtcctacccagtcggaatcatcacagacccccttgttccatagctctcctcagattcagttggtacaagggtcacctagttctcaagagcagcaagtaactctcttcttatctccagcatccatgtctgccttgcagaccagtataaatcaacaagatatgcaacagtctcctctttattcccctcagaacaacatgcctggaattcaaggagccacatcttcgcctcaaccacaggctactttatttcacaacacagcaggaggcacaatgaaccaactgcagaattctcctggctcatctcagcagacatcaggaatgttcttatttggcattcaaaataactgtagtcagcttttaacctctggaccagctacattgcctgatcagttgatggccataagtcagccaggccaaccacaaaacgagggccagccacctgtgacaacacttctttctcagcaaatgccagagaattctccactggcatcctctataaacaccaaccagaacatcgaaaagattgatttgcttgtttcattgcaaaaccaagggaacaacttgactggctccttt

SEQ ID NO: 5727 - DNA, 4644 bp, Homo sapiens
  source 1..4644: mol_type = genomic DNA
atgccctcggacttcatctcattgctcagcgcggacctagacctggaatcgcccaagtccctctactcgcgagattctctgaagttacacccatcacagaattttcatagagctggactattggaagaatctgtctatgatcttctcccaaaggagttacagttacctccatctagagaaacatctgtagcatcaatgagtcagacaagcggtggtgaggcaggctcgcctcctccagctgttgttgctgctgatgcttcttcagctccctcctcttcctccatgggcggtgcttgcagctcctttaccacctcttccagccctaccatttattctacctcagtcaccgacagcaaggctatgcaagtggagagctgctcctcagccgtgggggtaagtaacagaggggtaagtgaaaagcagttaaccagtaacacagttcagcagcatccatcaacaccgaagaggcacacagtcttgtacatctcaccaccacctgaggacttgctggataacagtcggatgtcctgccaggatgaggggtgtggattggaatctgagcagagctgcagtatgtggatggaggattccccctccaacttcagtaacatgagcaccagttcctacaatgataacactgaggtacctcgtaaatcacgaaaacgaaatccaaagcagaggccgggggtcaaacgacgagattgtgaagaatctaatatggatatatttgatgccgacagtgccaaagcacctcactatgtgctttctcagcttaccacggacaacaaaggcaactcaaaagcgggaaatggaacattggaaaaccaaaaaggaactggagtaaagaagagccctatgttgtgtggacaatatcctgttaaaagtgagggaaaggagctgaagatagttgtacaacctgagacacagcaccgagctcggtacctgactgagggcagccgtggctcagtgaaagatagaacacagcaaggctttcctacagtaaagctggaaggccataatgaacctgtagtgttgcaagtgtttgtgggcaacgactctggacgagtgaaaccacatggattttatcaggcctgcagagtaactggacgaaatacaactccttgcaaagaagtggacattgaaggcactactgttatagaagtcggccttgatcctagcaacaacatgacactggcggtggactgcgtagggatattgaaattgaggaatgctgatgtcgaagccagaataggaattgctggttccaagaagaaaagcactcgtgccagattggtttttcgagttaatatcatgaggaaagatggctccactttgacactgcaaacaccctcttctccaattttgtgtactcagccagcaggagtgccagaaatcttaaagaaaagcttgcatagctgttcagtgaaaggagaagaagaagtgtttttaatcggcaagaactttctgaaaggaactaaagttattttccaagaaaatgtttctgatgaaaactcttggaagtcagaagctgaaattgatatggaactatttcatcagaatcatcttattgtgaaggttcctccctatcatgaccaacatataactttgcctgtgtcagtgggaatatatgtagtgacaaatgctggaagatctcatgatgttcaaccattcacttacactccagacccagcagctggtgctttgaatgtaaatgtgaagaaggaaatatctagtccagcaagaccttgctcttttgaagaggccatgaaagcaatgaaaactactggatgtaatttagataaggtaaatattatccctaatgccctgatgactccactcataccaagcagtatgattaagagtgaagatgttactccaatggaagtaacagcagaaaaaagatcttccactatttttaagactacaaagtctgttggatcaactcagcaaacattagaaaacatctcaaacatagcaggaaatggctctttttcatcaccatcatcttcccacctaccttctgaaaatgaaaaacagcagcagattcagcccaaggcatacaacccagagaccctgacaactattcaaacccaggacatctcacagcctggtacttttccagcagtttctgcttctagtcagctgcccaacagcgatgcactattgcagcaggctacacagtttcagacaagagaaactcagtctagagagatattacagtcagatggtacagtggttaatttgtcacaactgactgaggcatcacaacaacagcagcagtcaccactacaagaacaagcacagactttacagcagcagatttcatcaaatatttttccatcaccaaatagtgtgagtcagcttcagaatactattcagcagctgcaagcagggagtttcacaggcagtactgctagtggcagcagtggaagtgttgacttggtccaacaagttttagaggcacagcagcagttatcttcagttttattttctgctccagatggtaatgagaatgttcaagagcagcttagtgcagatatttttcaacaagtcagtcaaattcagagtggtgtaagccctggaatgttttcctcaacagagccaacagtccataccagaccagataatttattacctggaagagctgaaagtgttcatccacagtctgaaaacacgttatctaatcaacagcagcagcagcagcagcaacagcaagtgatggaatcttcagccgcaatggtgatggagatgcaacagagtatctgccaggcagctgcccagattcagtcagagttattcccttcaactgcttcagcaaatggaaaccttcagcaatcgccagtttaccagcagacttctcacatgatgagtgcattgtctaccaatgaggatatgcaaatgcagtgtgaattgttttcttctcctcctgcagtttctggaaatgaaacttctacaactaccacacagcaggttgcaacccctggcactaccatgtttcagacatcaagttcaggagatggagaagaaactggaacacaagcaaaacagattcagaacagtgtctttcagaccatggtccaaatgcaacatagtggggacaatcaacctcaagttaaccttttttcatccacaaaaagtatgatgagtgttcagaatagtggtacccaacaacaaggtaatggtttattccagcaagggaatgagatgatgtcacttcaatctggaaattttttgcagcagtcttctcattcacaggcccaactttttcatcctcaaaatcctattgccgatgctcagaacctttcccaggaaactcaaggttctctctttcatagtccaaatcctattgtccacagtcagacttctacaacctcctctgaacaaatgcagcctccaatgtttcactctcaaagtaccattgctgtgttacagggctcttcagttcctcaagaccagcagtcaaccaacatatttctttcccagagtcccatgaataatcttcagactaacacagtagcccaagaagcattttttgcagcaccgaactcaatttctccacttcagtcaacatcaaacagtgaacaacaagctgctttccaacagcaagctccaatatcacacatccagactcctatgctttcccaagaacaggcacaacccccgcagcagggtttatttcagcctcaggtggccctgggctcccttccacctaatccaatgcctcaaagccaacaaggaaccatgttccagtcacagcactcaatagttgccatgcagagtaactctccatcccaggaacagcagcagcagcagcaacagcagcagcaacagcagcagcaacaacaacagagcattttattcagtaatcagaataccatggctacaatggcgtctccaaagcaaccaccaccaaacatgatattcaacccaaatcaaaatccaatggctaatcaggagcaacagaaccagtcaatttttcaccaacaaagtaacatggccccaatgaatcaagagcaacagcccatgcaatttcagagtcagtccacagtttcctcacttcagaacccaggtcctacccagtcggaatcatcacagacccccttgttccatagctctcctcagattcagttggtacaagggtcacctagttctcaagagcagcaagtaactctcttcttatctccagcatccatgtctgccttgcagaccagtataaatcaacaagatatgcaacagtctcctctttattcccctcagaacaacatgcctggaattcaaggagccacatcttcgcctcaaccacaggctactttatttcacaacacagcaggaggcacaatgaaccaactgcagaattctcctggctcatctcagcagacatcaggaatgttcttatttggcattcaaaataactgtagtcagcttttaacctctggaccagctacattgcctgatcagttgatggccataagtcagccaggccaaccacaaaacgagggccagccacctgtgacaacacttctttctcagcaaatgccagagaattctccactggcatcctctataaacaccaaccagaacatcgaaaagattgatttgcttgtttcattgcaaaaccaagggaacaacttgactggctccttt

SEQ ID NO: 5728 - DNA, 4365 bp, Homo sapiens
  source 1..4365: mol_type = genomic DNA
atgggcggtgcttgcagctcctttaccacctcttccagccctaccatttattctacctcagtcaccgacagcaaggctatgcaagtggagagctgctcctcagccgtgggggtaagtaacagaggggtaagtgaaaagcagttaaccagtaacacagttcagcagcatccatcaacaccgaagaggcacacagtcttgtacatctcaccaccacctgaggacttgctggataacagtcggatgtcctgccaggatgaggggtgtggattggaatctgagcagagctgcagtatgtggatggaggattccccctccaacttcagtaacatgagcaccagttcctacaatgataacactgaggtacctcgtaaatcacgaaaacgaaatccaaagcagaggccgggggtcaaacgacgagattgtgaagaatctaatatggatatatttgatgccgacagtgccaaagcacctcactatgtgctttctcagcttaccacggacaacaaaggcaactcaaaagcgggaaatggaacattggaaaaccaaaaaggaactggagtaaagaagagccctatgttgtgtggacaatatcctgttaaaagtgagggaaaggagctgaagatagttgtacaacctgagacacagcaccgagctcggtacctgactgagggcagccgtggctcagtgaaagatagaacacagcaaggctttcctacagtaaagctggaaggccataatgaacctgtagtgttgcaagtgtttgtgggcaacgactctggacgagtgaaaccacatggattttatcaggcctgcagagtaactggacgaaatacaactccttgcaaagaagtggacattgaaggcactactgttatagaagtcggccttgatcctagcaacaacatgacactggcggtggactgcgtagggatattgaaattgaggaatgctgatgtcgaagccagaataggaattgctggttccaagaagaaaagcactcgtgccagattggtttttcgagttaatatcatgaggaaagatggctccactttgacactgcaaacaccctcttctccaattttgtgtactcagccagcaggagtgccagaaatcttaaagaaaagcttgcatagctgttcagtgaaaggagaagaagaagtgtttttaatcggcaagaactttctgaaaggaactaaagttattttccaagaaaatgtttctgatgaaaactcttggaagtcagaagctgaaattgatatggaactatttcatcagaatcatcttattgtgaaggttcctccctatcatgaccaacatataactttgcctgtgtcagtgggaatatatgtagtgacaaatgctggaagatctcatgatgttcaaccattcacttacactccagacccagcagcagctggtgctttgaatgtaaatgtgaagaaggaaatatctagtccagcaagaccttgctcttttgaagaggccatgaaagcaatgaaaactactggatgtaatttagataaggtaaatattatccctaatgccctgatgactccactcataccaagcagtatgattaagagtgaagatgttactccaatggaagtaacagcagaaaaaagatcttccactatttttaagactacaaagtctgttggatcaactcagcaaacattagaaaacatctcaaacatagcaggaaatggctctttttcatcaccatcatcttcccacctaccttctgaaaatgaaaaacagcagcagattcagcccaaggcatacaacccagagaccctgacaactattcaaacccaggacatctcacagcctggtacttttccagcagtttctgcttctagtcagctgcccaacagcgatgcactattgcagcaggctacacagtttcagacaagagaaactcagtctagagagatattacagtcagatggtacagtggttaatttgtcacaactgactgaggcatcacaacaacagcagcagtcaccactacaagaacaagcacagactttacagcagcagatttcatcaaatatttttccatcaccaaatagtgtgagtcagcttcagaatactattcagcagctgcaagcagggagtttcacaggcagtactgctagtggcagcagtggaagtgttgacttggtccaacaagttttagaggcacagcagcagttatcttcagttttattttctgctccagatggtaatgagaatgttcaagagcagcttagtgcagatatttttcaacaagtcagtcaaattcagagtggtgtaagccctggaatgttttcctcaacagagccaacagtccataccagaccagataatttattacctggaagagctgaaagtgttcatccacagtctgaaaacacgttatctaatcaacagcagcagcagcagcagcaacagcaagtgatggaatcttcagccgcaatggtgatggagatgcaacagagtatctgccaggcagctgcccagattcagtcagagttattcccttcaactgcttcagcaaatggaaaccttcagcaatcgccagtttaccagcagacttctcacatgatgagtgcattgtctaccaatgaggatatgcaaatgcagtgtgaattgttttcttctcctcctgcagtttctggaaatgaaacttctacaactaccacacagcaggttgcaacccctggcactaccatgtttcagacatcaagttcaggagatggagaagaaactggaacacaagcaaaacagattcagaacagtgtctttcagaccatggtccaaatgcaacatagtggggacaatcaacctcaagttaaccttttttcatccacaaaaagtatgatgagtgttcagaatagtggtacccaacaacaaggtaatggtttattccagcaagggaatgagatgatgtcacttcaatctggaaattttttgcagcagtcttctcattcacaggcccaactttttcatcctcaaaatcctattgccgatgctcagaacctttcccaggaaactcaaggttctctctttcatagtccaaatcctattgtccacagtcagacttctacaacctcctctgaacaaatgcagcctccaatgtttcactctcaaagtaccattgctgtgttacagggctcttcagttcctcaagaccagcagtcaaccaacatatttctttcccagagtcccatgaataatcttcagactaacacagtagcccaagaagcattttttgcagcaccgaactcaatttctccacttcagtcaacatcaaacagtgaacaacaagctgctttccaacagcaagctccaatatcacacatccagactcctatgctttcccaagaacaggcacaacccccgcagcagggtttatttcagcctcaggtggccctgggctcccttccacctaatccaatgcctcaaagccaacaaggaaccatgttccagtcacagcactcaatagttgccatgcagagtaactctccatcccaggaacagcagcagcagcagcaacagcagcagcaacagcagcagcaacaacaacagagcattttattcagtaatcagaataccatggctacaatggcgtctccaaagcaaccaccaccaaacatgatattcaacccaaatcaaaatccaatggctaatcaggagcaacagaaccagtcaatttttcaccaacaaagtaacatggccccaatgaatcaagagcaacagcccatgcaatttcagagtcagtccacagtttcctcacttcagaacccaggtcctacccagtcggaatcatcacagacccccttgttccatagctctcctcagattcagttggtacaagggtcacctagttctcaagagcagcaagtaactctcttcttatctccagcatccatgtctgccttgcagaccagtataaatcaacaagatatgcaacagtctcctctttattcccctcagaacaacatgcctggaattcaaggagccacatcttcgcctcaaccacaggctactttatttcacaacacagcaggaggcacaatgaaccaactgcagaattctcctggctcatctcagcagacatcaggaatgttcttatttggcattcaaaataactgtagtcagcttttaacctctggaccagctacattgcctgatcagttgatggccataagtcagccaggccaaccacaaaacgagggccagccacctgtgacaacacttctttctcagcaaatgccagagaattctccactggcatcctctataaacaccaaccagaacatcgaaaagattgatttgcttgtttcattgcaaaaccaagggaacaacttgactggctccttt

SEQ ID NO: 5729 - DNA, 1881 bp, Homo sapiens
  source 1..1881: mol_type = genomic DNA
atgattgtatttgggggagaagacagaagtgatctcttccttcctgactctcagactaatgaagagagaaaacaatatgattcagtagcctttgaggatgtggcggtgaacttcacccaggaagagtgggctttgctgggtccatcacagaagagtctgtacagagatgtgatgtgggaaaccattaggaacctggactgtataggaatgaaatgggaagacacaaacattgaagatcagcacagaaatcccaggaggagcctaagatgtcatatcatagagagatttagtgaaagtcgccagccagatagtactgtgaatgaaaaacctcctggagtagatccatgtaaaagcagtgtgtgtggagaaatcatgggttgttcattccttaattgctatatcacatttgatgctggacacaaaccagatgagtgtcaggaatatggagagaagccacatacacataaacaatgtgggacagccttcaattatcaccactcctttcaaacacaggaaagacctcacactggaaagaaacgctatgattgtaaggaatgtgggaaaaccttcagttcttcgggaaaccttcgaagacacataatagtacaacgtggaggtggaccttatatatgtaagttgtgtgggaaagcctttttttggcctagtttatttcgtatgcatgaaagaactcacactggagagaaaccgtatgaatgtaagcagtgttgtaaagccttccctatttacagttcctatctaagacatgaaagaacacacactggggagaaaccatatgaatgcaagcactgttccaaagccttccctgattacagttcctatgtaagacatgaaagaactcacactggagaaaaaccctataaatgtaaacgatgtggaagagccttcagtgtttccagttcccttcgaatacatgaaagaactcacactggagagaaaccctatgaatgcaagcaatgcgggaaagcatttcatcatctgggaagctttcaaagacacatgataaggcacactggagatggacctcataaatgtaagatatgtgggaaaggctttgattgtcctagttcactgcaaagtcatgaaagaactcacactggagagaaaccctatgaatgcaagcagtgtgggaaagcgttatctcatcactcaagctttcgaagtcatatgataatgcacactggagatggacctcacaaatgcaaggtatgtgggaaagccttcatttatcccagtgtatttcaaggacatgaaaggactcatactggtgagaaaccctatgaatgtaaagaatgtggtaaagccttccgtatttctagttcccttcgaagacatgaaacaactcacactggagagaaaccctataaatgtaaatgtgggaaagcctttattgatttctattcctttcaaaatcatgaaacaactcacactggagagaagccatatgagtgtaaggaatgtgggaaagcattcagttgtttcacatacctttctcaacatagaaggactcacatggctgaaaaaccttatgaatgtaaaacatgtaagaaagccttcagtcattttggtaacttaaaagtccatgaaaggattcacactggagagaagccatatgaatgtaaggaatgcaggaaagcattctcttggctcacttgccttctgcgacatgaaagaattcacactggaaagaaatcttatgaatgtcaacaatgtggtaaagccttcactcgttctcgtttccttcgaggacatgaaaaaactcacactggagagaagatgcatgaatgtaaggaatgtgggaaggcactgagttctctcagttccttgcatagacataaaaggactcactggagagatactcta

SEQ ID NO: 5730 - DNA, 4413 bp, Homo sapiens
  source 1..4413: mol_type = genomic DNA
atggtttccaaaagaagactgtcaaaatctgaggataaagagagcctgacagaagatgcctccaaaaccaggaagcaaccactttccaaaaagacaaagaaatctcatattgctaatgaagttgaagaaaatgacagcatctttgtaaagcttcttaagatatcaggaattattcttaaaacgggagagagtcagaatcaactagctgtggatcaaatagctttccaaaagaagctctttcagaccctgaggagacacccttcctatcccaaaataatagaagaatttgttagtggcctggagtcttacattgaggatgaagacagtttcaggaactgccttttgtcttgtgagcgtctgcaggatgaggaagccagtatgggtgcatcttattctaagagtctcatcaaactgcttctggggattgacatactgcagcctgccattatcaaaaccttatttgagaagttgccagaatatttttttgaaaacaagaacagtgatgaaatcaacatacctcgactcattgtcagtcaactaaaatggcttgacagagttgtggatggcaaggacctcaccaccaagatcatgcagctgatcagtattgctccagagaacctgcagcatgacatcatcaccagcctacctgagatcctaggggattcccagcacgctgatgtggggaaagaactcagtgacctactgatagagaatacttcactcactgtcccaatcctggatgtcctttcaagcctccgacttgacccaaacttcctattgaaggttcgccagttggtgatggataagttgtcgtctattagattggaggatttacctgtgataataaagttcattcttcattccgtaacagccatggatacacttgaggtaatttctgagcttcgggagaagttggatctgcagcattgtgttttgccatcacggttacaggcttcccaagtaaagttgaaaagtaaaggacgagcaagttcctcaggaaatcaagaaagcagcggtcagagctgtattattctcctctttgatgtaataaagtcagctattagatatgagaaaaccatttcagaagcctggattaaggcaattgaaaacactgcctcagtatctgaacacaaggtgtttgacctggtgatgcttttcatcatctatagcaccaatactcagacaaagaagtacattgacagggtgctaagaaataagattcgatcaggctgcattcaagaacagctgctccagagtacattctctgttcattacttagttcttaaggatatgtgttcatccattctgtcgctggctcagagtttgcttcactctctagaccagagtataatttcatttggcagtctcctatacaaatatgcatttaagttttttgacacgtactgccagcaggaagtggttggtgccttagtgacccatatctgcagtgggaatgaagctgaagttgatactgccttagatgtccttctagagttggtagtgttaaacccatctgctatgatgatgaatgctgtctttgtaaagggcattttagattatctggataacatatcccctcagcaaatacgaaaactcttctatgttctcagcacactggcatttagcaaacagaatgaagccagcagccacatccaggatgacatgcacttggtgataagaaagcagctctctagcaccgtattcaagtacaagctcattgggattattggtgctgtgaccatggctggcatcatggcggcagacagaagtgaatcacctagtttgacccaagagagagccaacctgagcgatgagcagtgcacacaggtgacctccttgttgcagttggttcattcctgcagtgagcagtctcctcaggcctctgcactttactatgatgaatttgccaacctgatccaacatgaaaagctggatccaaaagccctggaatgggttgggcataccatctgtaatgatttccaggatgccttcgtagtggactcctgtgttgttccggaaggtgactttccatttcctgtgaaagcactgtacggactggaagaatacgacactcaggatgggattgccataaacctcctgccgctgctgttttctcaggactttgcaaaagatgggggtccggtgacctcacaggaatcaggccaaaaattggtgtctccgctgtgcctggctccgtatttccggttactgagactttgtgtggagagacagcataacggaaacttggaggagattgatggtctactagattgtcctatattcctaactgacctggagcctggagagaagttggagtccatgtctgctaaagagcgttcattcatgtgttctctcatatttcttactctcaactggttccgagagattgtaaatgccttctgccaggaaacatcacctgagatgaaggggaaggtgctcactcggttaaagcacattgtagaattgcaaataatcctggaaaagtacttggcagtcaccccagactatgtccctcctcttggaaactttgatgtggaaactttagatataacacctcatactgttactgctatttcagcaaaaatcagaaagaaaggaaaaatagaaaggaaacaaaaaacagatggcagcaagacatcctcctctgacacactttcagaagagaaaaattcagaatgtgaccctacgccatctcatagaggccagctaaacaaggagttcacagggaaggaagaaaagacatcattgttactacataattcccatgcttttttccgagagctggacattgaggtcttctctattctacattgtggacttgtgacgaagttcatcttagatactgaaatgcacactgaagctacagaagttgtgcaacttgggccccctgagctgcttttcttgctggaagatctctcccagaagctggagagtatgctgacacctcctattgccaggagagtcccctttctcaagaacaaaggaagccggaatattggattctcacatctccaacagagatctgcccaagaaattgttcattgtgtttttcaactgctgaccccaatgtgtaaccacctggagaacattcacaactattttcagtgtttagctgctgagaatcacggtgtagttgatggaccaggagtgaaagttcaggagtaccacataatgtcttcctgctatcagaggctgctgcagatttttcatgggctttttgcttggagtggattttctcaacctgaaaatcagaatttactgtattcagccctccatgtccttagtagccgactgaaacagggagaacacagccagcctttggaggaactactcagccagagcgtccattacttgcagaatttccatcaaagcattcccagtttccagtgtgctctttatctcatcagacttttgatggttattttggagaaatcaacagcttctgctcagaacaaagaaaaaattgcttcccttgccagacaattcctctgtcgggtgtggccaagtggggataaagagaagagcaacatctctaatgaccagctccatgctctgctctgtatctacctggagcacacagagagcattctgaaggccatagaggagattgctggtgttggtgtcccagaactgatcaactctcctaaagatgcatcttcctccacattccctacactgaccaggcatacttttgttgttttcttccgtgtgatgatggctgaactagagaagacggtgaaaaaaattgagcctggcacagcagcagactcgcagcagattcatgaagagaaactcctctactggaacatggctgttcgagacttcagtatcctcatcaacttgataaaggtatttgatagtcatcctgttctgcatgtatgtttgaagtatgggcgtctctttgtggaagcatttctgaagcaatgtatgccgctcctagacttcagttttagaaaacaccgggaagatgttctgagcttactggaaaccttccagttggacacaaggctgcttcatcacctgtgtgggcattccaagattcaccaggacacgagactcacccaacatgtgcctctgctcaaaaagaccctggaacttttagtttgcagagtcaaagctatgctcactctcaacaattgtagagaggctttctggctgggcaatctaaaaaaccgggacttgcagggtgaagagattaagtcccaaaattcccaggagagcacagcagatgagagtgaggatgacatgtcatcccaggcctccaagagcaaagccactgaggtatctctacaaaacccaccagagtctggcactgatggttgcattttgttaattgttctaagttggtggagcagaactttgcctacttatgtttattgtcaaatgcttctatgcccatttccattccctcca

SEQ ID NO: 5731 - DNA, 4353 bp, Homo sapiens
  source 1..4353: mol_type = genomic DNA
atggtttccaaaagaagactgtcaaaatctgaggataaagagagcctgacagaagatgcctccaaaaccaggaagcaaccactttccaaaaagacaaagaaatctcatattgctaatgaagttgaagaaaatgacagcatctttgtaaagcttcttaagatatcaggaattattcttaaaacgggagagagtcagaatcaactagctgtggatcaaatagctttccaaaagaagctctttcagaccctgaggagacacccttcctatcccaaaataatagaagaatttgttagtggcctggagtcttacattgaggatgaagacagtttcaggaactgccttttgtcttgtgagcgtctgcaggatgaggaagccagtatgggtgcatcttattctaagagtctcatcaaactgcttctggggattgacatactgcagcctgccattatcaaaaccttatttgagaagttgccagaatatttttttgaaaacaagaacagtgatgaaatcaacatacctcgactcattgtcagtcaactaaaatggcttgacagagttgtggatggcaaggacctcaccaccaagatcatgcagctgatcagtattgctccagagaacctgcagcatgacatcatcaccagcctacctgagatcctaggggattcccagcacgctgatgtggggaaagaactcagtgacctactgatagagaatacttcactcactgtcccaatcctggatgtcctttcaagcctccgacttgacccaaacttcctattgaaggttcgccagttggtgatggataagttgtcgtctattagattggaggatttacctgtgataataaagttcattcttcattccgtaacagccatggatacacttgaggtaatttctgagcttcgggagaagttggatctgcagcattgtgttttgccatcacggttacaggcttcccaagtaaagttgaaaagtaaaggacgagcaagttcctcaggaaatcaagaaagcagcggtcagagctgtattattctcctctttgatgtaataaagtcagctattagatatgagaaaaccatttcagaagcctggattaaggcaattgaaaacactgcctcagtatctgaacacaaggtgtttgacctggtgatgcttttcatcatctatagcaccaatactcagacaaagaagtacattgacagggtgctaagaaataagattcgatcaggctgcattcaagaacagctgctccagagtacattctctgttcattacttagttcttaaggatatgtgttcatccattctgtcgctggctcagagtttgcttcactctctagaccagagtataatttcatttggcagtctcctatacaaatatgcatttaagttttttgacacgtactgccagcaggaagtggttggtgccttagtgacccatatctgcagtgggaatgaagctgaagttgatactgccttagatgtccttctagagttggtagtgttaaacccatctgctatgatgatgaatgctgtctttgtaaagggcattttagattatctggataacatatcccctcagcaaatacgaaaactcttctatgttctcagcacactggcatttagcaaacagaatgaagccagcagccacatccaggatgacatgcacttggtgataagaaagcagctctctagcaccgtattcaagtacaagctcattgggattattggtgctgtgaccatggctggcatcatggcggcagacagaagtgaatcacctagtttgacccaagagagagccaacctgagcgatgagcagtgcacacaggtgacctccttgttgcagttggttcattcctgcagtgagcagtctcctcaggcctctgcactttactatgatgaatttgccaacctgatccaacatgaaaagctggatccaaaagccctggaatgggttgggcataccatctgtaatgatttccaggatgccttcgtagtggactcctgtgttgttccggaaggtgactttccatttcctgtgaaagcactgtacggactggaagaatacgacactcaggatgggattgccataaacctcctgccgctgctgttttctcaggactttgcaaaagatgggggtccggtgacctcacaggaatcaggccaaaaattggtgtctccgctgtgcctggctccgtatttccggttactgagactttgtgtggagagacagcataacggaaacttggaggagattgatggtctactagattgtcctatattcctaactgacctggagcctggagagaagttggagtccatgtctgctaaagagcgttcattcatgtgttctctcatatttcttactctcaactggttccgagagattgtaaatgccttctgccaggaaacatcacctgagatgaaggggaaggtgctcactcggttaaagcacattgtagaattgcaaataatcctggaaaagtacttggcagtcaccccagactatgtccctcctcttggaaactttgatgtggaaactttagatataacacctcatactgttactgctatttcagcaaaaatcagaaagaaaggaaaaatagaaaggaaacaaaaaacagatggcagcaagacatcctcctctgacacactttcagaagagaaaaattcagaatgtgaccctacgccatctcatagaggccagctaaacaaggagttcacagggaaggaagaaaagacatcattgttactacataattcccatgcttttttccgagagctggacattgaggtcttctctattctacattgtggacttgtgacgaagttcatcttagatactgaaatgcacactgaagctacagaagttgtgcaacttgggccccctgagctgcttttcttgctggaagatctctcccagaagctggagagtatgctgacacctcctattgccaggagagtcccctttctcaagaacaaaggaagccggaatattggattctcacatctccaacagagatctgcccaagaaattgttcattgtgtttttcaactgctgaccccaatgtgtaaccacctggagaacattcacaactattttcagtgtttagctgctgagaatcacggtgtagttgatggaccaggagtgaaagttcaggagtaccacataatgtcttcctgctatcagaggctgctgcagatttttcatgggctttttgcttggagtggattttctcaacctgaaaatcagaatttactgtattcagccctccatgtccttagtagccgactgaaacagggagaacacagccagcctttggaggaactactcagccagagcgtccattacttgcagaatttccatcaaagcattcccagtttccagtgtgctctttatctcatcagacttttgatggttattttggagaaatcaacagcttctgctcagaacaaagaaaaaattgcttcccttgccagacaattcctctgtcgggtgtggccaagtggggataaagagaagagcaacatctctaatgaccagctccatgctctgctctgtatctacctggagcacacagagagcattctgaaggccatagaggagattgctggtgttggtgtcccagaactgatcaactctcctaaagatgcatcttcctccacattccctacactgaccaggcatacttttgttgttttcttccgtgtgatgatggctgaactagagaagacggtgaaaaaaattgagcctggcacagcagcagactcgcagcagattcatgaagagaaactcctctactggaacatggctgttcgagacttcagtatcctcatcaacttgataaaggtatttgatagtcatcctgttctgcatgtatgtttgaagtatgggcgtctctttgtggaagcatttctgaagcaatgtatgccgctcctagacttcagttttagaaaacaccgggaagatgttctgagcttactggaaaccttccagttggacacaaggctgcttcatcacctgtgtgggcattccaagattcaccaggacacgagactcacccaacatgtgcctctgctcaaaaagaccctggaacttttagtttgcagagtcaaagctatgctcactctcaacaattgtagagaggctttctggctgggcaatctaaaaaaccgggacttgcagggtgaagagattaagtcccaaaattcccaggagagcacagcagatgagagtgaggatgacatgtcatcccaggcctccaagagcaaagccactgaggatggtgaagaagacgaagtaagtgctggagaaaaggagcaagatagtgatgagagttatgatgactctgat

SEQ ID NO: 5732 - DNA, 1542 bp, Homo sapiens
  source 1..1542: mol_type = genomic DNA
atggatttggccaaccatggacttattctactgcaacagttaaacgctcagcgagagtttggtttcctgtgtgactgcacggttgcaatcggcgatgtatacttcaaggcacacaaatcagttcttgcttcattctccaattactttaagatgttgtttgtccatcagaccagtgagtgtgtccgcttgaaaccaactgacatacagcccgacatcttcagctatctcttacacttgatgtacactgggaagatggcgcctcagctcatcgacccggttcgattagaacagggcatcaagtttctgcacgcctacccgctcattcaggaagccagcctcgccagccagggagccttttctcaccctgaccaagttttcccactggcttcttcattgtatggcattcagattgcagatcatcagttgagacaagccaccaagattgcttcagcacctgaaaaactcgggcgagatccacggccacagacctccaggataagccaggagcaggtccctgaggcctcacagctctcccagctgacttcaaatctggcccaggtgaatcggacaaatatgactccctcagaccccctgcagacctcgctgtctccagaacttgtttccactcctgttcctccccctcctcccggggaggagaccaatctggaagcatcttcctccgatgagcagcctgcgtccctcacaatagcccacgtcaagccaagcatcatgaagaggaatgggagctttccaaagtactatgcctgccacctgtgtggacggcgcttcactctccggagcagcttacgtgaacacctccagatccacacaggagtacctttcacatctagccaacagggagaaagtcgcgtccccctgactctctgtagcaatgcagctgacctcgggaaagatgccatggaagtgcctgaagccgggatgataagtgacagtgagctgcagcacatctctgattctcccatcatcgatgggcagcagcagtcggaaaccccacccccctcagacattgctgacattgacaacctggagcaggccgaccaggagagggaggtgaagaggcggaagtacgagtgcacaatatgtggacgcaaatttatccagaaaagccactggagggaacacatgtacatacacaccgggaagcctttcaagtgcagcacttgtgacaaaagcttttgcagggccaaccaggctgcccgccacgtgtgcctcaaccagagcatcgacacttacaccatggtggacaaacagactctggaactctgcacatttgaggaagggagtcagatggacaacatgctggtgcaaacaaacaaaccctacaaatgcaacttgtgtgacaaaacattctccactcccaatgaggttgttaaacattcatgccaaaaccagaactcggatgtttttgccctagacgaagggcgatccattctcctgggcagtggggactcggaagtaacggagcctgaccacccagtgttagcttccatcaaaaaggaacaagaaaccgtcttactagac

SEQ ID NO: 5733 - DNA, 1599 bp, Homo sapiens
  source 1..1599: mol_type = genomic DNA
atggcccatggttcagtgacattcagggatgtggccatagacttctcacaggaagaatgggaattcctggatcctgctcagagggacttatatagggatgtaatgtgggagaactacagcaacttcatttcactaggaccttccatttctaaaccagatgtgattaccttattggatgaagaaaggaaggaacctgggatggttgtgagggaagggacaagaagatactgccctgatttggagtccagatacaggaccaatactttatctccagaaaaggacatttatgaaatatattcatttcagtgggatataatggaaagaattaaaagctatagccttcagggttccatttttaggaatgattgggaatgcaaaagcaagattgagggggaaaaggaacaacaagagggatattttgggcaagtgaaaattacctctgaaaaaatgaccacttacaaaaggcacaattttcttactgagtatcagatcgttcataatggagaaaaggtgtatgagtgtaaggagtgtaggaagacctttattcgtcgctcaacacttagtcaacacctgagaattcatactggtgagaaaccttataagtgtaaggaatgtgggcaggcctttagacagcgtgcacatcttattcgacatcacaaacttcacaccggtgagaaaccctatgaatgtaaggagtgtgggaaggcctttacagtgctccaagaacttactcaacatcagagacttcatacgggtgaaaaaccctatgaatgtaaggaatgtggaaaggcctttagagtacatcagcaactggctcgacatcagagaattcacactggtgagaaaccctatgaatgtaaggactgtggaaagacctttagacagtgtacacaccttacacgccatcagagacttcatactgctgaaaagctctatgaatgtaaggaatgtgggaaagccttcgtatgtggtccagaccttagagtacatcagaaaattcattttggtgagaaaccctatgaatgtaaggagtgtggaaaggcttttagaatatgccaacaacttactgttcatcagagtattcatactggtgagaaaccctacgaatgtaaggaatgtgggaagacttttagattaagacaacaactagttcgccatcagagaatacatactcgtgagaaaccctatgaatgtatggaatgttggaagacctttagtagttactcacagcttatttcacaccagagcattcatattggtgagagaccctatgaatgtgaagagtgtggaaaggcctttagactgctctcacaacttactcagcatcaaagtattcacactggtgagaaaccttatgaatgtaaggaatgtagaaaaccttttagactgctctcacaacttacccaacatcagagtattcacactggtgagaaaccttatgaatgtaaggaatgtggtaaggcttttagactttattcatttcttactcaacaccagagaattcatactggtgagaagccctacaagtgtaaggagtgtaagaaggcctttagacagcattcacaccttactcagcatcagaagattcataatggaatt

SEQ ID NO: 5734 - DNA, 1023 bp, Homo sapiens
  source 1..1023: mol_type = genomic DNA
atgtccgcctcggcccctgctgcggagggggagggaacccccacccagcccgcgtccgagaaagaacccgaaatgcccggtcccagagaggagagcgaggaggaagaggacgaggacgacgaggaggaggaggaggaggaaaaaggaaaggggcagaaactttgtgaaattgagaggatacatttttttctaagtaagaagaaaaccgatgaacttagaaatctacacaaactgctttacaacaggccaggcactgtgtcctcattaaagaagaatgtgggtcagttcagtggctttccatttgaaaaaggaagtgtccaatataaaaagaaggaagaaatgttgaaaaaatttagaaatgccatgttaaagagcatctgtgaggttcttgatttggagagatcaggtgtaaatagtgaactagtgaagaggatcttgaatttcttaatgcatccaaagccttctggcaaaccattgccgaaatctaaaaaaacttgtagcaaaggcagtaaaaaggaacggaacagttctggaatggcaaggaaggctaagcgaaccaaatgtcctgaaattctgtcagatgaatctagtagtgatgaagatgaaaagaaaaacaaggaagagtcttcagatgatgaagataaagaaagtgaagaggagccaccaaaaaagacagccaaaagagaaaaacctaaacagaaagctacttctaaaagtaaaaaatctgtgaaaagtgccaatgttaagaaagcagatagcagcaccaccaagaagaatcaaaacagttccaaaaaagaaagtgagtctgaggatagttcagatgatgaacctttaattaaaaagttgaagaaaccccctacagatgaagagttaaaggaaacaataaagaaattactggccagtgctaacttggaagaagtcacaatgaaacagatttgcaaaaaggtctatgaaaattatcctacttatgatttaactgaaagaaaagatttcataaaaacaactgtaaaagagctaatttct

SEQ ID NO: 5735 - DNA, 3141 bp, Homo sapiens
  source 1..3141: mol_type = genomic DNA
atggatgcagaggctgaagataaaacgctgcgtactcgctctaaaggaaccgaggtgccaatggattcactaatccaggagctcagtgttgcctatgattgctccatggcaaagaagagaacagctgaagatcaggctttgggggttccagtcaacaaaaggaaatccctgctaatgaagccccgacactacagcccaaaagcagactgccaagaagaccgcagtgacaggacagaggacgatggccccttggaaacacatggtcactctaccgcagaggaaatcatgataaaacctatggatgaaagtcttctttcaactgcacaagaaaactccagtaggaaggaagacagatactcttgttatcaagagctcatggtcaagtctttaatgcacttggggaaatttgaaaaaaatgtatctgttcagactgtaagtgaaaatttaaatgacagtggcatccagtctttaaaagcagagagcgatgaagcagacgagtgctttctgattcattctgatgatggaagagacaagattgatgattctcagccacccttctgctcctctgatgacaatgaaagtaactctgaaagtgcagaaaatggctgggacagtggctccaacttctcagaagaaaccaaaccacctagagtcccaaagtatgttttaacagatcataaaaaagacctattggaagttcctgaaataaaaactgaaggtgacaaatttatcccttgtgagaacaggtgtgattctgaaacagaaaggaaagacccgcagaatgctctcgcagaacccctggatggcaatgcccagccctcattccctgacgttgaggaggaagatagcgagagcctggcagtaatgacggaagagggtagtgacctggaaaaggccaaggggaatttaagtttgctggagcaggcaattgctctgcaggctgagcgaggttgtgttttccataacacctacaaagagctggataggttcctgctggagcacctagcaggggaaaggaggcaaaccaaagttatcgacatgggtggaagacaaatctttaacaataaacattcaccaaggcctgaaaagagggagaccaagtgcccgatccctggatgtgatggcacgggacacgtgacagggctctacccgcaccaccgcagcctttcggggtgcccccacaaagtgcgggttcccctggaaattcttgccatgcatgaaaatgtgctcaagtgtcccacgccgggatgcacaggaaggggtcatgtgaacagcaaccgcaacacccacaggagtctttctggttgtccaattgctgcagctgaaaaattggcaatgtcccaggataaaaatcagcttgattctccccaaactgggcagtgtcctgaccaggcccacaggacaagtttggtgaagcaaattgaattcaatttcccgtcacaagccatcacctctcccagagccacagtgtcaaaagaacaagagaagtttggaaaagtaccatttgattatgccagttttgatgcccaagttttcggtaaacgccctctcatacaaacagtgcaaggacgaaaaacaccaccatttcctgaatcaaagcattttccaaatccagtgaaatttcctaatcgactgcctagtgcaggcgcccacacccagagccctggccgtgccagctcttatagctacggtcaatgtagtgaagacacccacatagcagcagctgctgccatcctgaacctttccacccgctgcagggaagccacagacatcctctccaacaagccacagagtctgcatgccaagggagccgaaatagaagtggatgaaaatggcacattggacttaagcatgaaaaaaaatcgaatcctggacaagtctgcacccctaacttcctctaacacttctattccaactccttcctcttccccattcaaaacaagcagcattctggtcaatgcagcattctatcaggctctttgtgaccaagagggctgggacactcctatcaactatagcaaaactcacgggaagacagaggaggagaaagagaaagacccagtgagctctctagaaaatttagaggaaaaaaagtttcctggagaggcctctataccaagccctaaacccaagcttcatgcaagagatctcaaaaaggaactaatcacctgtccaacaccaggatgtgatggaagtggccacgtgacaggaaactatgcatctcatcgcagtgtttctggatgtcctttagcagataagactctaaaatccctcatggctgccaactctcaggagcttaagtgtccaaccccaggctgcgatggctcggggcacgtgactggaaactatgcttcccacagaagcttgtccggatgccctcgtgcaaggaaaggtggtgtcaaaatgacccctaccaaggaagaaaaagaagaccctgaactgaaatgtcctgtgatagggtgtgatggccaaggtcacatatcaggtaaatacacatcacaccgcacagcttctggctgtcctctggctgccaagagacagaaggagaatcctctcaatggagcctccctctcctggaaactgaacaaacaagagctaccacattgtcccttgccaggctgcaatgggctgggccatgtaaataatgtttttgtcacccaccgaagcttatctggatgtcctctcaatgcacaagttatcaaaaagggcaaggtttctgaagaactcatgaccatcaagctcaaagcaactgggggaatagagagtgatgaagaaattaggcatttggatgaagaaataaaggaactgaatgaatccaaccttaaaattgaagcagatatgatgaaacttcagacccagatcacatctatggagagcaacttaaagacgatagaggaggagaacaaactcatagaacagaacaatgaaagtctgctgaaagagctggcaggtctaagccaagctctcatttcaagccttgctgacatccagcttccacagatgggacctatcagtgagcagaattttgaagcatatgtaaatacactcacagatatgtacagcaatctggaacgggactattccccggaatgcaaagctctactggaaagtatcaaacaggcagtgaagggtatccatgtg

SEQ ID NO: 5736 - DNA, 1050 bp, Homo sapiens
  source 1..1050: mol_type = genomic DNA
atggcatctgcactattcacagcggattcccaggcaatggtgaagatcgaggacatggctgtgtccctcattctggaggaatggggatgtcagaatctggctcggaggaatctcagtagggacaacaggcaggagaattatgggagcgcatttccccagggtggtgaaaacaggaatgagaacgaggagtcaacctcaaaggctgaaacctcggaagattcagcatcacgcggggagacaacaggaagatcccagaaagagtttggagagaaacgtgaccaggagggcaaaacaggagaaagacagcagaaaaaccctgaggagaaaaccaggaaagagaaaagagattcagggccagctataggaaaggacaaaaaaaccatcacaggagagagaggtccaagggagaaggggaaaggattgggaagaagcttcagtctgagctccaacttcaccacccctgaagaagttcccacgggaacaaagtctcacagatgtgatgaatgtggtaaatgcttcacgagaagttcaagccttatccgccataaaataatccacactggagaaaagccctatgaatgtagtgagtgtgggaaagccttcagtcttaactccaaccttgtcctgcatcagaggatccacacaggagagaaacctcatgaatgtaacgagtgtggcaaggccttcagccacagttccaatctcatcctccatcagcgcatccactctggagagaaaccttatgaatgtaatgagtgcgggaaggccttcagccagagctcggacctcaccaagcatcagagaattcacacgggggagaaaccctatgaatgtagtgaatgtggaaaagctttcaaccgaaactcatacctgattttgcatcggagaattcacactcgagaaaagccctacaagtgcactaagtgtggcaaggccttcacccgcagctccaccctcactctgcatcacagaatccatgccagagagagagcctctgagtacagcccagcctcccttgatgcatttggcgcgttcctgaaaagttgtgtg

SEQ ID NO: 5737 - DNA, 1689 bp, Homo sapiens
  source 1..1689: mol_type = genomic DNA
atgatgactgctgaatcacgggaagccacgggtctgtccccacaggctgcacaggagaaggatggtatcgtaatagtgaaggtggaagaggaagatgaggaagaccacatgtgggggcaggattccaccctacaggacacgcctcctccagacccagagatattccgccaacgcttcaggcgcttctgttaccagaacacttttgggccccgagaggctctcagtcggctgaaggaactttgtcatcagtggctgcggccagaaataaacaccaaggaacagatcctggagcttctggtgctagagcagtttctttccatcctgcccaaggagctccaggtctggctgcaggaataccgccccgatagtggagaggaggccgtgacccttctagaagacttggagcttgatttatcaggacaacaggtcccaggtcaagttcatggacctgagatgctcgcaagggggatggtgcctctggatccagttcaggagtcctcgagctttgaccttcatcacgaggccacccagtcccacttcaaacattcgtctcggaaaccccgcctcttacagtcacgagctcttcctgctgcccacattcctgcaccccctcatgagggtagtcccagagaccaggcgatggcatctgcactattcacagcggattcccaggcaatggtgaagatcgaggacatggctgtgtccctcattctggaggaatggggatgtcagaatctggctcggaggaatctcagtagggacaacaggcaggagaattatgggagcgcatttccccagggtggtgaaaacaggaatgagaacgaggagtcaacctcaaaggctgaaacctcggaagattcagcatcacgcggggagacaacaggaagatcccagaaagagtttggagagaaacgtgaccaggagggcaaaacaggagaaagacagcagaaaaaccctgaggagaaaaccaggaaagagaaaagagattcagggccagctataggaaaggacaaaaaaaccatcacaggagagagaggtccaagggagaaggggaaaggattgggaagaagcttcagtctgagctccaacttcaccacccctgaagaagttcccacgggaacaaagtctcacagatgtgatgaatgtggtaaatgcttcacgagaagttcaagccttatccgccataaaataatccacactggagaaaagccctatgaatgtagtgagtgtgggaaagccttcagtcttaactccaaccttgtcctgcatcagaggatccacacaggagagaaacctcatgaatgtaacgagtgtggcaaggccttcagccacagttccaatctcatcctccatcagcgcatccactctggagagaaaccttatgaatgtaatgagtgcgggaaggccttcagccagagctcggacctcaccaagcatcagagaattcacacgggggagaaaccctatgaatgtagtgaatgtggaaaagctttcaaccgaaactcatacctgattttgcatcggagaattcacactcgagaaaagccctacaagtgcactaagtgtggcaaggccttcacccgcagctccaccctcactctgcatcacagaatccatgccagagagagagcctctgagtacagcccagcctcccttgatgcatttggcgcgttcctgaaaagttgtgtg

SEQ ID NO: 5738 - DNA, 1581 bp, Homo sapiens
  source 1..1581: mol_type = genomic DNA
atgtgggggcaggattccaccctacaggacacgcctcctccagacccagagatattccgccaacgcttcaggcgcttctgttaccagaacacttttgggccccgagaggctctcagtcggctgaaggaactttgtcatcagtggctgcggccagaaataaacaccaaggaacagatcctggagcttctggtgctagagcagtttctttccatcctgcccaaggagctccaggtctggctgcaggaataccgccccgatagtggagaggaggccgtgacccttctagaagacttggagcttgatttatcaggacaacaggtcccaggtcaagttcatggacctgagatgctcgcaagggggatggtgcctctggatccagttcaggagtcctcgagctttgaccttcatcacgaggccacccagtcccacttcaaacattcgtctcggaaaccccgcctcttacagtcacgagctcttcctgctgcccacattcctgcaccccctcatgagggtagtcccagagaccaggcgatggcatctgcactattcacagcggattcccaggcaatggtgaagatcgaggacatggctgtgtccctcattctggaggaatggggatgtcagaatctggctcggaggaatctcagtagggacaacaggcaggagaattatgggagcgcatttccccagggtggtgaaaacaggaatgagaacgaggagtcaacctcaaaggctgaaacctcggaagattcagcatcacgcggggagacaacaggaagatcccagaaagagtttggagagaaacgtgaccaggagggcaaaacaggagaaagacagcagaaaaaccctgaggagaaaaccaggaaagagaaaagagattcagggccagctataggaaaggacaaaaaaaccatcacaggagagagaggtccaagggagaaggggaaaggattgggaagaagcttcagtctgagctccaacttcaccacccctgaagaagttcccacgggaacaaagtctcacagatgtgatgaatgtggtaaatgcttcacgagaagttcaagccttatccgccataaaataatccacactggagaaaagccctatgaatgtagtgagtgtgggaaagccttcagtcttaactccaaccttgtcctgcatcagaggatccacacaggagagaaacctcatgaatgtaacgagtgtggcaaggccttcagccacagttccaatctcatcctccatcagcgcatccactctggagagaaaccttatgaatgtaatgagtgcgggaaggccttcagccagagctcggacctcaccaagcatcagagaattcacacgggggagaaaccctatgaatgtagtgaatgtggaaaagctttcaaccgaaactcatacctgattttgcatcggagaattcacactcgagaaaagccctacaagtgcactaagtgtggcaaggccttcacccgcagctccaccctcactctgcatcacagaatccatgccagagagagagcctctgagtacagcccagcctcccttgatgcatttggcgcgttcctgaaaagttgtgtg

SEQ ID NO: 5739 - DNA, 1275 bp, Homo sapiens
  source 1..1275: mol_type = genomic DNA
atggcttcctcaattatctgccaggagcactgccagatctcgggccaggcaaaaatagacatcttattagttggagatgtcactgtgggctacctggctgatactgtacagaaactatttgcaaacatagcagaagtcaccatcaccatcagtgacacgaaggaggcagcagcgcttttggatgattgcatattcaacatggttctcttgaaggtgccttcttcactaagtgccgaggagctggaagccatcaagttaattagatttggcaaaaagaaaaatacacattcactgtttgtttttataatccctgaaaattttaaaggttgtatttcagggcatggaatggatattgctttaactgaaccactgacaatggaaaaaatgagtaatgtggtaaaatactggacaacatgtccctcaaacactgttaagactgaaaacgcaactgggcctgaagaacttggattgcccctgcagaggtcctacagcgaacacctgggatattttcctactgatctatttgcctgctctgaatctttaaggaatggcaatgggcttgaattaaatgcttcgttgtcagagttcgagaaaaacaaaaagatctctcttcttcattcaagcaaggaaaaactaagaagggaaagaatcaaatattgctgtgagcagctgcgtactctcttgccgtatgtaaaagggagaaagaatgatgcggcttcagttcttgaggcaacagttgattatgtgaaatatatccgggagaaaatctctccagccgttatggcccagattacagaagcacttcagagcaacatgaggttttgtaagaaacaacaaacacccattgagctgtctctcccaggcactgtcatggcacagcgggaaaacagtgtgatgagcacttactcccctgagagagggctccaattcctgactaatacgtgctggaatgggtgctccactcctgatgcagagagctccttggatgaagctgtgagagttccatcaagctccgcctcagagaatgctattggtgatccatataaaactcacatttccagtgcagcgctgtctctgaattccttgcatactgtcagatattattctaaagtcaccccttcctacgatgcaactgctgtaacaaatcagaacatttcaattcatttaccttcagccatgcccccggtctcaaagcttctccctcggcactgcacttctgggttgggccagacgtgcactacacatcccaactgtctgcaacagttttgggcgtat

SEQ ID NO: 5740 - DNA, 675 bp, Homo sapiens
  source 1..675: mol_type = genomic DNA
atggcttcctcaattatctgccaggagcactgccagatctcgggccaggcaaaaatagacatcttattagttggagatgtcactgtgggctacctggctgatactgtacagaaactatttgcaaacatagcagaagtcaccatcaccatcagtgacacgaaggaggcagcagcgcttttggatgattgcatattcaacatggttctcttgaaggtgccttcttcactaagtgccgaggagctggaagccatcaagttaattagatttggcaaaaagaaaaatacacattcactgtttgtttttataatccctgaaaattttaaaggttgtatttcagggcatggaatggatattgctttaactgaaccactgacaatggaaaaaatgagtaatgtggtaaaatactggacaacatgtccctcaaacactgttaagactgaaaacgcaactgggcctgaagaacttggattgcccctgcagaggtcctacagcgaacacctgggatattttcctactgatctatttgcctgctctgaatctttaaggaatggcaatgggcttgaattaaatgcttcgttgtcagagttcgagaaaaacaaaaagatctctcttcttcattcaagcaaggaaaaactaagaaggctgtacaggaagcatagcagcttctgtttctgg

SEQ ID NO: 5741 - DNA, 3585 bp, Homo sapiens
  source 1..3585: mol_type = genomic DNA
atgacagtcatgtccctttccagggacctcaaggacgactttcacagtgacacggtactctccatcttaaatgagcagcgcattcggggcattttatgcgatgtcactatcattgtggaagataccaaatttaaagcccatagcaatgttctggcagcttcaagcctgtattttaaaaatatcttttggagccatacaatctgtatttccagccacgtcctggagctggacgatctcaaagctgaagtgtttactgaaatacttaattatatctacagttccacagtcgttgtcaagagacaggaaacagtcactgatctcgcagctgcaggaaaaaagctgggaatatcgttcttggaagaccttactgatcgcaacttctcaaattccccgggtccctatgtattctgtattactgaaaagggagtggttaaagaagaaaaaaatgaaaaaaggcatgaagaaccagccatcactaatgggccaaggatcacaaatgcattttccatcatcgaaacagaaaatagtaataacatgttttccccgctggacttgagggcaagtttcaaaaaggtctccgactccatgagaacagctagcctttgcctggagaggacggacgtctgccacgaggcagagcctgtccgcacacttgccgagcactcatacgctgtttcttccgtagctgaagcttacagaagtcagcctgtacgtgaacatgatggcagttcacctggtaacacagggaaagaaaattgtgaagcccttgcagcgaaaccgaaaacatgccggaagccaaagacattctccataccacaggattcggattcagccacagaaaatataccaccccctccagtatccaacttagaggttaatcaagaaagaagtccacaaccagctgctgttctcactcgttcaaaatctccaaacaatgaaggagatgtccatttttccagggaagatgaaaatcaatcttctgatgttcccgggccgccagccgcagaggttccacctctggtgtacaattgtagctgctgttccaaagcctttgacagcagcactctgctcagtgcccacatgcagcttcacaagccaacccaggagcctttagtgtgcaagtattgcaacaaacaattcaccaccctgaacaggttggatcggcatgaacagatctgcatgaggtcaagccacatgcccattcctggaggaaaccaacgctttttagaaaactatcctaccattggacaaaatggaggttcattcacaggtccagaacctttattatctgaaaataggattggtgaattttccagtaccggaagtactttgccagacacggaccacatggttaaatttgttaatgggcaaatgctctacagttgcgttgtgtgcaaacgtagttatgtgaccttatctagcctccgaagacatgcaaatgttcactcctggagaagaacatatccttgccattactgcaacaaagtatttgcattggctgagtacaggacaaggcatgaaatttggcatacgggagaaagacgatatcagtgcattttctgtcttgaaactttcatgacctactatatactcaaaaatcatcagaagtctttccatgccatcgatcatagactttccatcagtaaaaaaacagcaaatggaggcttgaagcctagtgtctatccgtataaactttataggctactgcctatgaaatgcaagagagccccttataagagctaccgaaattcttcctatgaaaatgcacgagaaaacagtcaaatgaatgagtctgcacctggtacctatgttgttcagaatccacacagctctgaattaccaacgctgaatttccaagatactgtaaacaccctgaccaacagtccagccatcccattggaaacatctgcatgtcaggacatacccacttctgccaatgtacaaaatgcagagggtaccaaatggggagaggaggcattgaaaatggatcttgacaataacttttattcaactgaggtgtcagtttcttccactgaaaatgctgtcagttctgacctccgggcaggggatgtacctgttttatctttgagtaatagcagtgagaatgccgcctctgtgatcagctacagtggctctgcaccctcggtcattgtacacagcagccagttttcatcggtgatcatgcacagcaatgccattgctgccatgaccagcagcaaccacagagccttttcagacccagctgtcagtcagtccctgaaagatgacagtaagcccgagccagataaagtgggtaggtttgcaagcagacccaaaagcattaaggagaaaaagaaaactacatcacataccaggggagaaataccggaggagtcaaactatgttgctgatcctggaggatcactgagcaaaaccacaaatattgctgaagaaaccagcaaaattgaaacctacattgcaaaacctgctctgccgggaacctccacaaatagtaatgttgcacccctttgccaaataacagtgaaaattggaaacgaagccattgtgaaaaggcacattctaggatctaaattgttttataaaagagggagaagacccaagtatcagatgcaggaggagcctttgccacaggggaatgacccagaacccagtggagacagcccactcgggctttgccaatccgagtgcatggagatgagtgaagtgttcgatgacgcaagtgaccaggattccactgacaaaccgtggcgcccttactacaactacaaacccaaaaagaaatccagacagttgaaaaaaatgaggaaagtcaactggaggaaggagcacggaaacaggagcccgagccataaatgtaaatacccagcagaactggattgcgccgtggggaaggctcctcaggataaaccctttgaggaagaagaaactaaagagatgcccaagctgcagtgtgaactctgtgatggagacaaagcagtgggggctggaaaccaaggaaggccccaccgacatcttacttctcggccatatgcctgcgagctctgcgccaagcagttccagagcccttccacactcaaaatgcacatgagatgtcacaccggggagaagccataccagtgcaagacctgcggacggtgcttttcggtgcaaggaaacttacagaaacatgaacgcatccacctgggcttgaaggagttcgtctgtcagtattgcaacaaggcattcaccttgaatgagaccctcaaaatccatgaaagaatccatactggagaaaagcgttaccactgtcagttctgctttcagagatttttgtatctctccaccaaaaggaatcacgagcagaggcatattcgggagcataatgggaagggctatgcctgcttccagtgccccaaaatttgcaaaacagctgctgcccttggaatgcaccaaaagaaacacttattcaaaagcccaagtcagcaggagaaaataggtgacgtgtgccacgaaaactcaaatcccttggagaatcaacatttcattggttcagaagacaatgaccaaaaggataacatacaaaccggtgtggaaaatgttgtcctt

SEQ ID NO: 5742 - DNA, 816 bp, Homo sapiens
  source 1..816: mol_type = genomic DNA
atgttcgtcaaatccgagaccttggagttgaaggaggaagaggacgtgttagtgctgctcggatcggcctcccccgccttggcggccctgaccccgctgtcatccagcgccgacgaagaagaggaggaggagccgggcgcgtcaggcggggcgcgtcggcagcgcggggctgaggccgggcagggggcgcggggcggcgtggctgcgggtgcggagggctgccggcccgcacggctgctgggtctggtacacgattgcaaacggcgcccttcccgggcgcgggccgtctcccgaggcgccaagacggccgagacggtgcagcgcatcaagaagacccgtagactgaaggccaacaaccgcgagcgaaaccgcatgcacaacctcaacgcggcactggacgcgctgcgcgaggtgctccccacgttccccgaggacgccaagctcaccaagatcgagaccctgcgcttcgcccacaactacatctgggcactcaccgagaccctgcgcctggcggatcactgcgggggcggcggcgggggcctgccgggggcgctcttctccgaggcagtgttgctgagcccgggaggagccagcgccgccctgagcagcagcggagacagcccctcgcccgcctccacgtggagttgcaccaacagccccgcgccgtcctcctccgtgtcctccaattccacctccccctacagctgcactttatcgcccgccagcccggccgggtcagacatggactattggcagcccccacctcccgacaagcaccgctatgcacctcacctccccatagccagggattgtatc

SEQ ID NO: 5743 - DNA, 1461 bp, Homo sapiens
  source 1..1461: mol_type = genomic DNA
atgtccctgccccccataagactgcccagcccctatggctctgatcggctggtacagctagcagccaggctccggccagcactctgtgatactctgatcaccgtagggagccaggagttccccgcccacagcctggtgctagcaggtgtcagccagcagctgggccgcaggggccagtgggctctgggagaaggcatcagcccttctacctttgcccagctcctgaactttgtgtatggggagagtgtagagctgcagcctggagagctaaggccccttcaggaggcggccagggccttgggagtgcagtccctggaagaggcatgctggagggctcgaggggacagggctaaaaagccagatccaggcctgaagaaacatcaggaggagccagagaaaccctcaaggaatcctgagagagaactgggggaccctggagagaagcagaaaccagaacaggtttctagaactggtgggagagaacaggagatgttgcacaagcactcgccaccaagaggcagacccgagatggcaggagcaacgcaggaggctcagcaggaacagaccaggtcaaaggagaaacgcctccaagcccctgttggccaaaggggagcagatgggaagcatggagtgctcacgtggttgagggaaaatccagggggctctgaggaaagtctgcgcaagctccctggcccccttcccccagcaggctccctgcaaaccagcgtcacccctaggccctcgtgggctgaggccccttggttggtggggggccagcctgccctgtggagcatcctgctgatgccgcccagatatggcattcccttctaccatagcacccccaccactggagcctggcaggaggtctggcgggaacagaggatcccactgtccctaaatgcccccaaagggctctggagccagaaccagttggcctcctccagccctaccccaggttccctcccccagggccccgcacagctcagccctggggagatggaagagtctgatcaggggcacacaggcgcacttgcaacctgtgcgggtcatgaggacaaggcaggctgcccacctcgcccgcaccctcccccggcccctcctgctcggtctcggccctatgcgtgctctgtctgtggaaagaggttttcactcaagcatcagatggagacgcactaccgagtccacacaggagagaagcccttctcctgtagcctttgtcctcagcgctcccgggacttctcggccatgaccaagcacctgcggacacacggggccgctccgtaccgctgctccctgtgcggggccggctgtcccagcctggcctccatgcaggcgcacatgcgcggtcactcgcccagccaactcccgcccggatggaccatccgctccaccttcctctactcctcctcgaggccgtctcggccctcgacctctccctgttgtccttcttcctccaccacc

SEQ ID NO: 5744 - DNA, 1512 bp, Homo sapiens
  source 1..1512: mol_type = genomic DNA
atgtcagtagaaatggacagcagcagttttattcagtttgatgtgcccgagtacagcagcaccgttctgagccagctaaacgaactccgcctgcaggggaaactatgtgacatcattgtacacattcagggtcagccattccgagcccacaaagcagtccttgctgccagctccccatatttccgggaccattcagcgttaagtaccatgagtggcttgtcaatatcagtgattaaaaatcccaatgtgtttgagcagttgctttctttttgttacactggaagaatgtccttgcagctgaaggatgttgtcagttttctgactgcagccagctttcttcagatgcagtgtgtcattgacaagtgcacgcagatcctagagagcatccattccaaaatcagcgttggagatgttgactctgttaccgtcggtgctgaagagaatcccgagagtcgaaacggagtgaaagacagcagcttctttgccaacccagtggagatctctcctccatattgctctcagggacggcagcccaccgcaagcagtgacctccggatggagacgacccccagcaaagctttgcgcagccgcttacaggaggaggggcactcagaccgcgggagcagtgggagcgtttctgaatatgagattcagatagagggagaccatgagcaaggagacctattggtgagggagagccagatcaccgaggtgaaagtgaagatggagaagtccgaccggcccagctgttccgacagctcctccctgggtgacgatgggtaccacaccgagatggttgatggggaacaagttgtggcagtgaatgtgggctcctatggttctgtgctccagcacgcatactcctattcccaagcagcctcacagccaaccaatgtatcagaagcttttggaagtttgagtaattccagcccatccaggtccatgctgagctgtttccgaggagggcgtgcccgccagaagcgggctttgtctgtccacctgcacagtgacctgcagggcctggtgcagggctctgacagtgaagccatgatgaacaaccccgggtatgagagcagtccccgggagaggagtgcgagagggcattggtacccgtacaatgagaggttgatctgtatttactgtggaaagtccttcaaccagaaaggaagccttgataggcacatgcgactccatatgggaatcaccccctttgtgtgcaagttctgtgggaagaagtacacacggaaggaccaactggagtaccacatccggggccatacagatgataaaccattccgctgtgagatctgcgggaagtgctttccattccaaggtaccctcaaccagcacttgcggaaaaaccacccaggcgttgctgaagtcaggagtcgcattgagtcccccgagagaacagatgtgtacgtggaacagaaactagaaaatgacgcatcggcctcagagatgggcctagattcccggatggaaattcacacagtgtctgatgctcccgat

SEQ ID NO: 5745 - DNA, 1500 bp, Homo sapiens
  source 1..1500: mol_type = genomic DNA
atggacagcagcagttttattcagtttgatgtgcccgagtacagcagcaccgttctgagccagctaaacgaactccgcctgcaggggaaactatgtgacatcattgtacacattcagggtcagccattccgagcccacaaagcagtccttgctgccagctccccatatttccgggaccattcagcgttaagtaccatgagtggcttgtcaatatcagtgattaaaaatcccaatgtgtttgagcagttgctttctttttgttacactggaagaatgtccttgcagctgaaggatgttgtcagttttctgactgcagccagctttcttcagatgcagtgtgtcattgacaagtgcacgcagatcctagagagcatccattccaaaatcagcgttggagatgttgactctgttaccgtcggtgctgaagagaatcccgagagtcgaaacggagtgaaagacagcagcttctttgccaacccagtggagatctctcctccatattgctctcagggacggcagcccaccgcaagcagtgacctccggatggagacgacccccagcaaagctttgcgcagccgcttacaggaggaggggcactcagaccgcgggagcagtgggagcgtttctgaatatgagattcagatagagggagaccatgagcaaggagacctattggtgagggagagccagatcaccgaggtgaaagtgaagatggagaagtccgaccggcccagctgttccgacagctcctccctgggtgacgatgggtaccacaccgagatggttgatggggaacaagttgtggcagtgaatgtgggctcctatggttctgtgctccagcacgcatactcctattcccaagcagcctcacagccaaccaatgtatcagaagcttttggaagtttgagtaattccagcccatccaggtccatgctgagctgtttccgaggagggcgtgcccgccagaagcgggctttgtctgtccacctgcacagtgacctgcagggcctggtgcagggctctgacagtgaagccatgatgaacaaccccgggtatgagagcagtccccgggagaggagtgcgagagggcattggtacccgtacaatgagaggttgatctgtatttactgtggaaagtccttcaaccagaaaggaagccttgataggcacatgcgactccatatgggaatcaccccctttgtgtgcaagttctgtgggaagaagtacacacggaaggaccaactggagtaccacatccggggccatacagatgataaaccattccgctgtgagatctgcgggaagtgctttccattccaaggtaccctcaaccagcacttgcggaaaaaccacccaggcgttgctgaagtcaggagtcgcattgagtcccccgagagaacagatgtgtacgtggaacagaaactagaaaatgacgcatcggcctcagagatgggcctagattcccggatggaaattcacacagtgtctgatgctcccgat

SEQ ID NO: 5746 - DNA, 924 bp, Homo sapiens
  source 1..924: mol_type = genomic DNA
atggagaaaggtgggaacatacaattggagattcctgacttcagcaactctgtcctgagccatctaaaccagttgcgcatgcagggccgtctctgtgatattgtggtcaatgtgcaaggacaagcttttcgggctcacaaagtggtgctggctgccagctccccctatttccgggatcacatgtccttgaatgagatgagtacagtctccatttcagtcatcaagaaccctactgtttttgaacagctcctttctttctgttacacagggcggatatgcctgcaactggcagatatcatcagctacctaacagctgccagttttctgcaaatgcagcatattatagacaaatgtacacagatcctggagggcattcatttcaaaattaatgtggctgaggttgaagcagaattaagtcaaacaaggacaaagcatcaagagagacctccagagtctcacagggttacaccaaatctcaaccgctcccttagcccacgacataataccccaaagggaaaccggcgaggtcaggttagtgctgtgctggatatcagagagctaagtcctcctgaggagtccaccagccctcagatcattgaaccaagttctgatgtagagagccgggagcccattcttcggatcaaccgagcaggacagtggtatgtggagacaggagtggcggaccgtgggggtcggagtgatgatgaagttagagttcttggagcagtacacatcaaaactgaaaatctggaggagtggcttgggcctgagaatcagccttctggagaagatgggagtagtgcagaggaagtaacagccatggtgattgataccacaggccatggttctgtaggacaggaaaattatactttagggtcttcaggagccaaggtggctcggccaacaagcagtgaagttgacagg

SEQ ID NO: 5747 - DNA, 1509 bp, Homo sapiens
  source 1..1509: mol_type = genomic DNA
atggagaaaggtgggaacatacaattggagattcctgacttcagcaactctgtcctgagccatctaaaccagttgcgcatgcagggccgtctctgtgatattgtggtcaatgtgcaaggacaagcttttcgggctcacaaagtggtgctggctgccagctccccctatttccgggatcacatgtccttgaatgagatgagtacagtctccatttcagtcatcaagaaccctactgtttttgaacagctcctttctttctgttacacagggcggatatgcctgcaactggcagatatcatcagctacctaacagctgccagttttctgcaaatgcagcatattatagacaaatgtacacagatcctggagggcattcatttcaaaattaatgtggctgaggttgaagcagaattaagtcaaacaaggacaaagcatcaagagagacctccagagtctcacagggttacaccaaatctcaaccgctcccttagcccacgacataataccccaaagggaaaccggcgaggtcaggttagtgctgtgctggatatcagagagctaagtcctcctgaggagtccaccagccctcagatcattgaaccaagttctgatgtagagagccgggagcccattcttcggatcaaccgagcaggacagtggtatgtggagacaggagtggcggaccgtgggggtcggagtgatgatgaagttagagttcttggagcagtacacatcaaaactgaaaatctggaggagtggcttgggcctgagaatcagccttctggagaagatgggagtagtgcagaggaagtaacagccatggtgattgataccacaggccatggttctgtaggacaggaaaattatactttagggtcttcaggagccaaggtggctcggccaacaagcagtgaagttgacagatttagcccctccggcagtgttgttcccttgacagagagacacagagccagaagtgagtctcctgggagaatggatgagcctaagcaacccagctcccaggtagaagagtcagcaatgatgggagtaagtggctatgtggagtatctccgagagcaggaagtatctgagcggtggttccggtacaaccctcgtctcacctgcatctattgcgccaaatctttcaaccagaagggaagcctggaccgccacatgcgcctacacatggggatcacaccattcgtctgccgcatgtgtggcaagaagtatacccggaaagatcagctggagtatcatatccgcaagcacacaggcaacaagccctttcactgtcatgtctgtggcaaaagtttccccttccaggccatcttgaatcagcactttcgcaaaaaccaccctggctgtatacccctggaggggcctcacagcatctcccctgaaacaactgtcacatctcgaggacaagctgaggaagagtcaccttcacaggaagagacagttgctcctggggaagctgtccagggctctgtgtccaccactgggccagac

SEQ ID NO: 5748 - DNA, 1869 bp, Homo sapiens
  source 1..1869: mol_type = genomic DNA
atgaaacagcccaacaggaaaaggaagcttaatatggattccaaagagcgtttggatcaggacggacgcttggagcaagctgaagaggaaaagaagcccaaggatagcacaacccctttgagtcacgtcccttcagcggctgcacagggagcatggtcttgggagtggtacttgaaagaacagaaggctgtcgcagcacctgttgagctgttttccaaggatcagtcctttccagagcatgaaaatggttttcagattggaatgagattagaaggcattgatccccgacatccatcggtattctgtgtgctttctgtagcggaggtttgtggttaccgtctaagacttcattttgatggttatttaagttgctatgatttttggaccaatgctggttcccctgacattcatccagtaggatggtgtgaaaagaccaaacatgaactgcacatccctaagggttatagaaaagataaatttgtttggatggattacttgaaggcctgcaaattgcaaaatgctccaaagaaattattcagaaacagaagtcctaatgggccaatgtctaaagaatttcaggttggaatgaagctggaggccgtggacaggaagaacccttccttggtgtgtgtggcgaccatagcagatattgttgaagatcgcttactagtgcattttgacaactgggatgatagttacgattactggtgcgatgttaatagcccttatgtccagccagttggttggtgtcaggagaatggaagaactctgatagcaccccaaggttatcccaatccagaaaatttttcctggacagaatacctggaagctactcaaaccaatgcagttcctgccaaagtttttaaaatgaggttgcctcatggttttctgccaaatatgaaacttgaagttgtggataaacggaaccccaggttaattcgtgttgctacgattgtagatgttgatgaccaaagagtaaaggttcattttgatggttgggaccataagtatgactactgggtggaggcagacagccctgatatccacccgatcggatggtgtgatgtcacagggcatccactggaagtgccacagcgaacgaatgacctgaagatccttccaggtcaagctgtctgtcctactcccgggtgccgaggaataggccatatccgtggtccacgttattcgggacatcacagtgcttttggctgcccgtattcagacatgaacttgaaaaaggaggcaacacttcacgatcgtttgagagaacaaacacaggcaaatttggaatcagactcttcacattcaaaatcaaaaagcctctgtagtttgaacttcaatggaaaacatgaaaaggtgaacagtcagcccagacttgtacagcaggcaaagtgtttgaaaatcaaaggaaaagaagatattgacttggataatctcttcagagtgcttgtgctgcatcccagaggtttggaatactcggtggagcaggcgcagcaggtgcttcaccagtcagtgtccatgtccacggtgtcagcccacccttttcgggaccttcccctcggcagggagcaacactgcaagttgcttccaggcgtggctgacatccgggccagccaagtggcacgttggactgtggatgaggtggctgagtttgtacagtctcttctgggctgtgaagagcatgccaagtgctttaagaaagagcagatcgatggcaaagccttcctgcttctgacacagacggacattgtcaaagtgatgaagatcaaactgggcccagcactgaagatttacaactctatcctgatgttcaggcattcccaggaactccctgaagaagatattgcctcaggccaagaagtcagggga

SEQ ID NO: 5749 - DNA, 1842 bp, Homo sapiens
  source 1..1842: mol_type = genomic DNA
atgaaacagcccaacaggaaaaggaagcttaatatggattccaaagagcgtttggatcaggacggacgcttggagcaagctgaagaggaaaagaagcccaaggatagcacaacccctttgagtcacgtcccttcagcggctgcacagggagcatggtcttgggagtggtacttgaaagaacagaaggctgtcgcagcacctgttgagctgttttccaaggatcagtcctttccagagcatgaaaatggttttcagattggaatgagattagaaggcattgatccccgacatccatcggtattctgtgtgctttctgtagcggaggtttgtggttaccgtctaagacttcattttgatggttatttaagttgctatgatttttggaccaatgctggttcccctgacattcatccagtaggatggtgtgaaaagaccaaacatgaactgcacatccctaagggttatagaaaagataaatttgtttggatggattacttgaaggcctgcaaattgcaaaatgctccaaagaaattattcagaaacagaagtcctaatgggccaatgtctaaagaatttcaggttggaatgaagctggaggccgtggacaggaagaacccttccttggtgtgtgtggcgaccatagcagatattgttgaagatcgcttactagtgcattttgacaactgggatgatagttacgattactggtgcgatgttaatagcccttatgtccagccagttggttggtgtcaggagaatggaagaactctgatagcaccccaaggttatcccaatccagaaaatttttcctggacagaatacctggaagctactcaaaccaatgcagttcctgccaaagtttttaaaatgaggttgcctcatggttttctgccaaatatgaaacttgaagttgtggataaacggaaccccaggttaattcgtgttgctacgattgtagatgttgatgaccaaagagtaaaggttcattttgatggttgggaccataagtatgactactgggtggaggcagacagccctgatatccacccgatcggatggtgtgatgtcacagggcatccactggaagtgccacagcgaacgaatgacctgaagatccttccaggtcaagctgtctgtcctactcccgggtgccgaggaataggccatatccgtggtccacgttattcgggacatcacagtgcttttggctgcccgtattcagacatgaacttgaaaaaggaggcaacacttcacgatcgtttgagagaacaaacacaggcaaatttggaatcagactcttcacattcaaaatcaaaaagcctctgtagtttgaacttcaatggaaaacatgaaaaggtgaacagtcagcccagacttgtacagcaggcaaagtgtttgaaaatcaaaggaaaagaagatattgacttggataatctcttcagagaatactcggtggagcaggcgcagcaggtgcttcaccagtcagtgtccatgtccacggtgtcagcccacccttttcgggaccttcccctcggcagggagcaacactgcaagttgcttccaggcgtggctgacatccgggccagccaagtggcacgttggactgtggatgaggtggctgagtttgtacagtctcttctgggctgtgaagagcatgccaagtgctttaagaaagagcagatcgatggcaaagccttcctgcttctgacacagacggacattgtcaaagtgatgaagatcaaactgggcccagcactgaagatttacaactctatcctgatgttcaggcattcccaggaactccctgaagaagatattgcctcaggccaagaagtcagggga

SEQ ID NO: 5750 - DNA, 1833 bp, Homo sapiens
  source 1..1833: mol_type = genomic DNA
atgtggttggccaaggcctgttggtccatccagagtgagatgccctgtatccaagcccaatatgggacaccagcaccgagtccgggaccccgtgaccacctggcaagcgaccccctgacccctgagttcatcaagcccaccatggacctggccagccccgaggcagcccccgctgcccccactgccctgcccagcttcagcaccttcatggacggctacacaggagagtttgacaccttcctctaccagctgccaggaacagtccagccatgctcctcagcctcctcctcggcctcctccacatcctcgtcctcagccacctcccctgcctctgcctccttcaagttcgaggacttccaggtgtacggctgctaccccggccccctgagcggcccagtggatgaggccctgtcctccagtggctctgactactatggcagcccctgctcggccccgtcgccctccacgcccagcttccagccgccccagctctctccctgggatggctccttcggccacttctcgcccagccagacttacgaaggcctgcgggcatggacagagcagctgcccaaagcctctgggcccccacagcctccagccttcttttccttcagtcctcccaccggccccagccccagcctggcccagagccccctgaagttgttcccctcacaggccacccaccagctgggggagggagagagctattccatgcctacggccttcccaggtttggcacccacttctccacaccttgagggctcggggatactggatacacccgtgacctcaaccaaggcccggagcggggccccaggtggaagtgaaggccgctgtgctgtgtgtggggacaacgcttcatgccagcattatggtgtccgcacatgtgagggctgcaagggcttcttcaagcgcacagtgcagaaaaacgccaagtacatctgcctggctaacaaggactgccctgtggacaagaggcggcgaaaccgctgccagttctgccgcttccagaagtgcctggcggtgggcatggtgaaggaagttgtccgaacagacagcctgaaggggcggcggggccggctaccttcaaaacccaagcagcccccagatgcctcccctgccaatctcctcacttccctggtccgtgcacacctggactcagggcccagcactgccaaactggactactccaagttccaggagctggtgctgccccactttgggaaggaagatgctggggatgtacagcagttctacgacctgctctccggttctctggaggtcatccgcaagtgggcggagaagatccctggctttgctgagctgtcaccggctgaccaggacctgttgctggagtcggccttcctggagctcttcatcctccgcctggcgtacaggtctaagccaggcgagggcaagctcatcttctgctcaggcctggtgctacaccggctgcagtgtgcccgtggcttcggggactggattgacagtatcctggccttctcaaggtccctgcacagcttgcttgtcgatgtccctgccttcgcctgcctctctgcccttgtcctcatcaccgaccggcatgggctgcaggagccgcggcgggtggaggagctgcagaaccgcatcgccagctgcctgaaggagcacgtggcagctgtggcgggcgagccccagccagccagctgcctgtcacgtctgttgggcaaactgcccgagctgcggaccctgtgcacccagggcctgcagcgcatcttctacctcaagctggaggacttggtgccccctccacccatcattgacaagatcttcatggacacgctgcccttc

SEQ ID NO: 5751 - DNA, 1956 bp, Homo sapiens
  source 1..1956: mol_type = genomic DNA
atgacaagtgcacagtataaaatcaagattctaattgaaggcctccaccatggacagaggccaggccctgcccctcccaggcagcctggctccttctgctgggccctgaaggcagacgggataatgtggttggccaaggcctgttggtccatccagagtgagatgccctgtatccaagcccaatatgggacaccagcaccgagtccgggaccccgtgaccacctggcaagcgaccccctgacccctgagttcatcaagcccaccatggacctggccagccccgaggcagcccccgctgcccccactgccctgcccagcttcagcaccttcatggacggctacacaggagagtttgacaccttcctctaccagctgccaggaacagtccagccatgctcctcagcctcctcctcggcctcctccacatcctcgtcctcagccacctcccctgcctctgcctccttcaagttcgaggacttccaggtgtacggctgctaccccggccccctgagcggcccagtggatgaggccctgtcctccagtggctctgactactatggcagcccctgctcggccccgtcgccctccacgcccagcttccagccgccccagctctctccctgggatggctccttcggccacttctcgcccagccagacttacgaaggcctgcgggcatggacagagcagctgcccaaagcctctgggcccccacagcctccagccttcttttccttcagtcctcccaccggccccagccccagcctggcccagagccccctgaagttgttcccctcacaggccacccaccagctgggggagggagagagctattccatgcctacggccttcccaggtttggcacccacttctccacaccttgagggctcggggatactggatacacccgtgacctcaaccaaggcccggagcggggccccaggtggaagtgaaggccgctgtgctgtgtgtggggacaacgcttcatgccagcattatggtgtccgcacatgtgagggctgcaagggcttcttcaagcgcacagtgcagaaaaacgccaagtacatctgcctggctaacaaggactgccctgtggacaagaggcggcgaaaccgctgccagttctgccgcttccagaagtgcctggcggtgggcatggtgaaggaagttgtccgaacagacagcctgaaggggcggcggggccggctaccttcaaaacccaagcagcccccagatgcctcccctgccaatctcctcacttccctggtccgtgcacacctggactcagggcccagcactgccaaactggactactccaagttccaggagctggtgctgccccactttgggaaggaagatgctggggatgtacagcagttctacgacctgctctccggttctctggaggtcatccgcaagtgggcggagaagatccctggctttgctgagctgtcaccggctgaccaggacctgttgctggagtcggccttcctggagctcttcatcctccgcctggcgtacaggtctaagccaggcgagggcaagctcatcttctgctcaggcctggtgctacaccggctgcagtgtgcccgtggcttcggggactggattgacagtatcctggccttctcaaggtccctgcacagcttgcttgtcgatgtccctgccttcgcctgcctctctgcccttgtcctcatcaccgaccggcatgggctgcaggagccgcggcgggtggaggagctgcagaaccgcatcgccagctgcctgaaggagcacgtggcagctgtggcgggcgagccccagccagccagctgcctgtcacgtctgttgggcaaactgcccgagctgcggaccctgtgcacccagggcctgcagcgcatcttctacctcaagctggaggacttggtgccccctccacccatcattgacaagatcttcatggacacgctgcccttc

SEQ ID NO: 5752 - DNA, 561 bp, Homo sapiens
  source 1..561: mol_type = genomic DNA
atgtcggtgaattacgcggcggggctgtcgccgtacgcggacaagggcaagtgcggcctcccggagatcttcgaccccccggaggagctggagcggaaggtgtgggaactggcgaggctggtctggcagtcttccagtgtggtgttccacacgggtgccggcatcagcactgcctctggcatccccgacttcagggacaaactggcagagctccacgggaacatgtttgtggaagaatgtgccaagtgtaagacgcagtacgtccgagacacagtcgtgggcaccatgggcctgaaggccacgggccggctctgcaccgtggctaaggcaagggggctgcgagcctgcaggggagagctgagggacaccatcctagactgggaggactccctgcccgaccgggacctggcactcgccgatgaggccagcagatccggcccagcgggaacctgccgctggctaccaagcgccggggaggccgcctggtcatcgtcaacctgcagcccaccaagcacgaccgccatgctgacctccgcatccatggctacgttgacgaggtca

SEQ ID NO: 5753 - DNA, 984 bp, Homo sapiens
  source 1..984: mol_type = genomic DNA
atgtcggtgaattacgcggcggggctgtcgccgtacgcggacaagggcaagtgcggcctcccggagatcttcgaccccccggaggagctggagcggaaggtgtgggaactggcgaggctggtctggcagtcttccagtgtggtgttccacacgggtgccggcatcagcactgcctctggcatccccgacttcaggggtccccacggagtctggaccatggaggagcgaggtctggcccccaagttcgacaccacctttgagagcgcgcggcccacgcagacccacatggcgctggtgcagctggagcgcgtgggcctcctccgcttcctggtcagccagaacgtggacgggctccatgtgcgctcaggcttccccagggacaaactggcagagctccacgggaacatgtttgtggaagaatgtgccaagtgtaagacgcagtacgtccgagacacagtcgtgggcaccatgggcctgaaggccacgggccggctctgcaccgtggctaaggcaagggggctgcgagcctgcaggaacgccgacctgtccatcacgctgggtacatcgctgcagatccggcccagcgggaacctgccgctggctaccaagcgccggggaggccgcctggtcatcgtcaacctgcagcccaccaagcacgaccgccatgctgacctccgcatccatggctacgttgacgaggtcatgacccggctcatgaagcacctggggctggagatccccgcctgggacggcccccgtgtgctggagagggcgctgccacccctgccccgcccgcccacccccaagctggagcccaaggaggaatctcccacccggatcaacggctctatccccgccggccccaagcaggagccctgcgcccagcacaacggctcagagcccgccagccccaaacgggagcggcccaccagccctgccccccacagaccccccaaaagggtgaaggccaaggcggtccccagc

SEQ ID NO: 5754 - DNA, 528 bp, Homo sapiens
  source 1..528: mol_type = genomic DNA
atggaggagcgaggtctggcccccaagttcgacaccacctttgagagcgcgcggcccacgcagacccacatggcgctggtgcagctggagcgcgtgggcctcctccgcttcctggtcagccagaacgtggacgggctccatgtgcgctcaggcttccccagggacaaactggcagagctccacgggaacatgtttgtggaagaatgtgccaagtgtaagacgcagtacgtccgagacacagtcgtgggcaccatgggcctgaaggccacgggccggctctgcaccgtggctaaggcaagggggctgcgagcctgcaggggagagctgagggacaccatcctagactgggaggactccctgcccgaccgggacctggcactcgccgatgaggccagcagatccggcccagcgggaacctgccgctggctaccaagcgccggggaggccgcctggtcatcgtcaacctgcagcccaccaagcacgaccgccatgctgacctccgcatccatggctacgttgacgaggtca

SEQ ID NO: 5755 - DNA, 3210 bp, Homo sapiens
  source 1..3210: mol_type = genomic DNA
atggttttggatgaccttccaaacttagaagacatctatacttccttgtgttcatcaacaatggaagactcagagatggattttgactctggactagaagatgatgacacaaaaagtgatagtattttggaggattccacaatttttgtggccttcaaaggaaatatagatgataaagacttcaaatggaaattagatgcaatattgaaaaacgtgcccaatttgttacacatggagtccagcaagctaaaagtacagaaggtggagccctggaacagcgtgcgtgtgacattcaacatcccccgggaagcagcggagcggctacggatccttgctcagagcaacaaccagcagcttcgggatttagggattctctccgttcagattgaaggggaaggtgctattaacctggctttggctcagaaccgaagccaagatgtgagaatgaatggacccatgggagctggaaattcagttaggatggaggcgggatttcctatggcaagtggtccaggaataataaggatgaacaaccctgccactgttatgatacccccgggtggaaatgtgtcatcttccatgatggcaccaggccccaatccagagctgcagcccaggactcctcgccctgcttctcagtcagatgcaatggatccactcctctctgggctccatatacagcagcaaagtcatccctcaggatctttagctcccccacatcacccaatgcagcctgtctctgtgaacagacaaatgaacccagctaattttccccagctgcagcagcagcagcaacaacaacaacagcagcagcagcagcagcagcagcaacaacagcaacagcagcaacaacagttgcaggcaagacccccacagcaacatcagcagcaacagccacagggaattcgaccccagtttactgccccaactcaggtgcctgttcctccaggctggaaccagctgccttctggagcccttcaacctcctccagcccagggttctctgggcacaatgactgcaaaccaagggtggaagaaggctcccttgcccggcccaatgcaacagcaactccaggcaagaccatccttagccacggtacagacgccttcccaccctccccctccatatccctttggcagccagcaagcctcacaagcccacacaaactttcctcagatgagcaacccaggccagttcacagctcctcagatgaagagtttgcagggagggccctctagggtcccaactcccttgcagcagccccacctcaccaacaagtctcctgcctcctcaccctcctccttccagcagggatcccctgcatcctccccaacggttaaccaaactcagcagcagatgggaccaaggccacctcaaaataacccacttccccagggatttcagcagcctgtcagctctccgggtcggaatcctatggttcaacagggaaatgtgccacctaacttcatggtgatgcagcagcaaccaccaaaccaggggccacagagtttacatccaggcctaggaggaatgcctaaacgcctcccacctggcttctcagcaggacaggccaatccgaactttatgcaaggtcaggtgccttcgaccacagcaaccacccctgggaattcaggagcccctcagctgcaagcaaatcaaaatgtccagcatgcaggtggtcaaggagctggtcctcctcaaaaccagatgcaggtgtcccacgggccgccaaatatgatgcagcccagcctcatgggaattcatggcaacatgaacaatcagcaggctggtacttctggggttcctcaagtgaacctcagcaacatgcaaggccagccccagcagggcccaccatctcagctgatgggcatgcaccagcaaatcgtgccctcccagggccagatggtccagcaacaaggaaccttgaaccctcagaaccctatgatcctttcaagggcccagcttatgccacagggccagatgatggtgaaccccccgagccaaaatcttgggccctcgccccaaaggatgaccccacccaagcagatgctttcccagcagggcccacaaatgatggcgccacataaccagatgatggggcctcaggggcaggttttgctccaacagaacccaatgatagagcagattatgaccaatcaaatgcaggggaataagcagcagtttaacactcagaaccagtccaatgtcatgccgggaccagcccagataatgaggggaccaactccaaacatgcaaggaaatatggtgcagtttacgggacagatgtcaggacagatgctgccccagcaagggcctgtgaacaacagtccatctcaggttatgggcattcagggacaggtcctgcggccaccagggcccagcccacacatggcccagcagcatggtgatcctgctactacagcaaataacgatgtcagtttatctcagatgatgcctgatgttagcattcaacaaaccaacatggtcccccctcatgtgcaggccatgcagggaaacagtgcctcgggaaaccacttctcaggccatgggatgtctttcaatgcacctttcagtggagctcccaatggaaatcagatgtcctgtggtcaaaatccaggcttcccagtcaataaggatgtcacgctaacgagcccattgttggtcaacttattgcagagtgacatatctgcaggccattttggggtaaacaataagcaaaataataccaacgcaaataaaccgaagaagaagaaaccccctcggaagaagaaaaatagtcagcaagatctaaacaccccagatactcgcccagctggtctggaagaggctgatcagccaccgttgcctggagaacaaggaattaacttggataactcaggccctaaactgccagaattttcaaaccggccaccagccccgtcgcagaatttagtctcaaaggaaacttcaaccacagcactgcaggcctctgttgccagaccagagctggaggtaaatgctgccatagtctctggacaaagcagtgagcccaaagagatagttgaaaagtccaaaatcccaggccgaagaaactcccgaactgaagagccaactgtggcctctgaaagtgtggaaaatggacatcgtaaacgatcttctcgacctgcttcagcctccagctctactaaagacataaccagtgcggtgcaatccaagcgaagaaaatccaag

SEQ ID NO: 5756 - DNA, 6189 bp, Homo sapiens
  source 1..6189: mol_type = genomic DNA
atggttttggatgaccttccaaacttagaagacatctatacttccttgtgttcatcaacaatggaagactcagagatggattttgactctggactagaagatgatgacacaaaaagtgatagtattttggaggattccacaatttttgtggccttcaaaggaaatatagatgataaagacttcaaatggaaattagatgcaatattgaaaaacgtgcccaatttgttacacatggagtccagcaagctaaaagtacagaaggtggagccctggaacagcgtgcgtgtgacattcaacatcccccgggaagcagcggagcggctacggatccttgctcagagcaacaaccagcagcttcgggatttagggattctctccgttcagattgaaggggaaggtgctattaacctggctttggctcagaaccgaagccaagatgtgagaatgaatggacccatgggagctggaaattcagttaggatggaggcgggatttcctatggcaagtggtccaggaataataaggatgaacaaccctgccactgttatgatacccccgggtggaaatgtgtcatcttccatgatggcaccaggccccaatccagagctgcagcccaggactcctcgccctgcttctcagtcagatgcaatggatccactcctctctgggctccatatacagcagcaaagtcatccctcaggatctttagctcccccacatcacccaatgcagcctgtctctgtgaacagacaaatgaacccagctaattttccccagctgcagcagcagcagcaacaacaacaacagcagcagcagcagcagcagcagcaacaacagcaacagcagcaacaacagttgcaggcaagacccccacagcaacatcagcagcaacagccacagggaattcgaccccagtttactgccccaactcaggtgcctgttcctccaggctggaaccagctgccttctggagcccttcaacctcctccagcccagggttctctgggcacaatgactgcaaaccaagggtggaagaaggctcccttgcccggcccaatgcaacagcaactccaggcaagaccatccttagccacggtacagacgccttcccaccctccccctccatatccctttggcagccagcaagcctcacaagcccacacaaactttcctcagatgagcaacccaggccagttcacagctcctcagatgaagagtttgcagggagggccctctagggtcccaactcccttgcagcagccccacctcaccaacaagtctcctgcctcctcaccctcctccttccagcagggatcccctgcatcctccccaacggttaaccaaactcagcagcagatgggaccaaggccacctcaaaataacccacttccccagggatttcagcagcctgtcagctctccgggtcggaatcctatggttcaacagggaaatgtgccacctaacttcatggtgatgcagcagcaaccaccaaaccaggggccacagagtttacatccaggcctaggaggaatgcctaaacgcctcccacctggcttctcagcaggacaggccaatccgaactttatgcaaggtcaggtgccttcgaccacagcaaccacccctgggaattcaggagcccctcagctgcaagcaaatcaaaatgtccagcatgcaggtggtcaaggagctggtcctcctcaaaaccagatgcaggtgtcccacgggccgccaaatatgatgcagcccagcctcatgggaattcatggcaacatgaacaatcagcaggctggtacttctggggttcctcaagtgaacctcagcaacatgcaaggccagccccagcagggcccaccatctcagctgatgggcatgcaccagcaaatcgtgccctcccagggccagatggtccagcaacaaggaaccttgaaccctcagaaccctatgatcctttcaagggcccagcttatgccacagggccagatgatggtgaaccccccgagccaaaatcttgggccctcgccccaaaggatgaccccacccaagcagatgctttcccagcagggcccacaaatgatggcgccacataaccagatgatggggcctcaggggcaggttttgctccaacagaacccaatgatagagcagattatgaccaatcaaatgcaggggaataagcagcagtttaacactcagaaccagtccaatgtcatgccgggaccagcccagataatgaggggaccaactccaaacatgcaaggaaatatggtgcagtttacgggacagatgtcaggacagatgctgccccagcaagggcctgtgaacaacagtccatctcaggttatgggcattcagggacaggtcctgcggccaccagggcccagcccacacatggcccagcagcatggtgatcctgctactacagcaaataacgatgtcagtttatctcagatgatgcctgatgttagcattcaacaaaccaacatggtcccccctcatgtgcaggccatgcagggaaacagtgcctcgggaaaccacttctcaggccatgggatgtctttcaatgcacctttcagtggagctcccaatggaaatcagatgtcctgtggtcaaaatccaggcttcccagtcaataaggatgtcacgctaacgagcccattgttggtcaacttattgcagagtgacatatctgcaggccattttggggtaaacaataagcaaaataataccaacgcaaataaaccgaagaagaagaaaccccctcggaagaagaaaaatagtcagcaagatctaaacaccccagatactcgcccagctggtctggaagaggctgatcagccaccgttgcctggagaacaaggaattaacttggataactcaggccctaaactgccagaattttcaaaccggccaccaggttatccttctcaaccagttgaacagaggccacttcagcagatgcctcctcaactcatgcagcatgtggcacccccaccacagccaccacagcagcagccacagccacaactgcctcagcagcagcagccaccacctcccagtcagccacagtctcagcagcagcagcagcagcagcaacaaatgatgatgatgctcatgatgcagcaggatcccaaatcagttaggcttccagtctctcaaaatgtccatcctccaaggggccccctgaaccccgactcccagagaatgcccatgcaacagagtggcagtgtgcctgtcatggtcagtctgcaaggacctgcctccgtgccaccatcacctgataaacaaagaatgccaatgcctgtgaatactcccttgggaagcaattcaaggaaaatggtctatcaggagagcccgcagaatccttccagctcgccactggcggagatggcctcactccctgaagcaagtggcagtgaagcaccatctgtcccaggaggcccaaacaacatgccttcacatgtagtacttccccagaatcagttaatgatgacagggccaaaacctggaccatcgcccctttcagcaactcaaggtgcaactccccagcaaccccctgtaaattccctgcccagctctcacggccaccacttcccaaatgtggctgcgccaacccagacatctaggcccaaaacaccaaacagagccagccccagaccctattatcctcagacacccaacaaccgccctcccagcacagaaccttcagaaatcagtctgtcaccagaaagactcaatgcctccatagcaggactcttccctccacagattaatattcctttacctcctaggccaaatttaaacaggggctttgatcaacaaggcctaaatccaacaactttgaaggccatcgggcaagcaccttcaaatcttaccatgaatccttccaattttgctaccccacaaactcacaaattagattctgtggtagtgaattctggaaagcagtctaattctggagcaacaaaacgggcaagtccaagcaacagtcgcaggtctagtcctgggtccagtaggaaaaccactccaagccctgggaggcaaaattcaaaagcccctaaacttactctggcctctcagacaaatgcagccctattgcagaatgtggagttgccgagaaatgtattggtcagtcccactcctctggccaatccccctgtacctgggagctttcctaacaacagtgggctgaatcctcagaattctactgtgtctgtggctgcagttgggggtgttgttgaggataacaaggagagcttgaatgtgcctcaggacagtgattgccagaattcccagagtaggaaggaacaggtaaacattgaactaaaagcagtccctgcccaagaagttaaaatggttgtccctgaagatcagtccaaaaaggatgggcagccttcggatcctaacaaacttcccagtgtcgaagagaacaaaaatttggtgtctcctgctatgagggaagcaccaacatcgttaagtcaacttcttgacaactctggagctcccaatgtgacaattaaaccccctgggcttacagatctggaagtaacacctccagtagtttctggggaggacctcaaaaaagcatctgtcattcccacactgcaggatctgtcttcttctaaagaaccttctaattccctaaacttacctcacagtaatgagctgtgttcatcccttgtgcatcccgaattgagtgaggtcagttctaacgttgcaccaagcatccctccagtaatgtcaagacctgttagctcttcctccatttccactcccttgcccccaaatcaaataactgtatttgtcacttccaatcccatcacaacttcagctaacacatcagcagctttgccaactcacttgcagtctgcattgatgtcaacagttgtcacaatgcccaatgcgggtagcaaggttatggtttctgagggacagtcagctgctcagtctaatgcccggcctcagttcattacacctgtctttatcaattcatcctcaataattcaggttatgaaaggatcacagccaagcacaattcctgcagccccactgacaaccaactctggcctgatgcctccctctgttgcagttgttggccctttacacatacctcagaacataaaattttcttctgctcctgtaccgcctaatgccctctccagtagtcctgctccaaacatccagacaggtcgacctttggtccttagctcacgagccacccctgttcagcttccttcccctccttgtacgtcttctccagttgtcccttctcatccccctgtgcagcaagtgaaagaattgaatccagatgaggctagccctcaggtgaacacctcagcagatcagaacactcttccctcttcacagtcaaccacaatggtttctccccttttgaccaatagtccagggtcctctggcaaccggcgaagcccagtctcgtctagtaagggcaaaggaaaagtggacaaaattggccaaattttgttgaccaaggcatgtaagaaagttacaggctctcttgagaaaggggaagaacaatatggtgcagatggagagactgaaggccaagggctagacaccacagctccggggctcatgggaacagagcagttatccacagagctggacagtaaaaccccaacgcccccagcacccactctgctaaaaatgacctctagccctgtgggcccgggcactgcctcagcaggacccagcttacctggcggtgctctccccaccagtgtacgctcgatagtaaccactctggtaccctccgagctcatctccgccgtaccgaccacaaaaagcaatcatggtggcatagcatctgagtcacttgcgggtggcctagtggaggagaaggtgggatcccatccagaacttctacccagcatagccccgtcgcagaatttagtctcaaaggaaacttcaaccacagcactgcaggcctctgttgccagaccagagctggaggtaaatgctgccatagtctctggacaaagcagtgagcccaaagagatagttgaaaagtccaaaatcccaggccgaagaaactcccgaactgaagagccaactgtggcctctgaaagtgtggaaaatggacatcgtaaacgatcttctcgacctgcttcagcctccagctctactaaagacataaccagtgcggtgcaatccaagcgaagaaaatccaag

SEQ ID NO: 5757 - DNA, 1125 bp, Homo sapiens
  source 1..1125: mol_type = genomic DNA
atggcctctgcgccctggccggagcgggttccgaggctgctcgctccgcgcttaccctcttacccgcccccacccccaacagtgggattacggtccatggagcaggaggagacctacctggagctctacctggaccagtgcgccgctcaggatggccttgccccacccaggtctcccctgttcagcccagttgtaccttatgatatgtacatactgaatgcatccaatccggatactgcatttaattcgaaccctgaagtcaaagaaacatctggtgatttctcatctgtggatcttagcttcctaccagatgaagttacccaggaaaataaagaccagcctgtcattagcaaacacgaaactgaagaaaattctgaaagccaaagtccacaaagtaggttgccatcacccagcgaacaggacgttgggctgggcttaaacagcagcagtttgtcaaattcccattcacagctgcaccctggtgatactgactcagtccagccctctcctgagaaaccaaactccgactccttgtctctggcatccataactcccatgacaccaatgacccctatttcagaatgttgtggaattgtacctcaactacagaatatagtttccactgtaaacctggcctgtaagttggatctgaagaaaatagctttgcatgcaaaaaatgcagaatataacccaaagaggtttgctgctgtcataatgaggatccgagagcccaggacaacagcccttatatttagctctgggaagatggtctgcacgggagccaaaagtgaagagcagtctcgacttgcagcaagaaaatatgctcgtgtggtgcagaagcttgggttccctgccagattcctcgattttaaaattcagaacatggttggaagctgtgatgtgagatttcccatcaggctggaaggtttggtgctaacccatcagcagttcagtagttacgagcctgaactgtttcctggtcttatttatagaatggtaaaaccacgaattgtgttgcttatctttgtatctggaaaagttgtgttgacaggtgccaaagaacgttctgagatctatgaagcatttgaaaacatctatcctattctaaaaggttttaaaaaagcc

SEQ ID NO: 5758 - DNA, 558 bp, Homo sapiens
  source 1..558: mol_type = genomic DNA
atggatgcagacagtgatgttgcattggacattctaattacaaatgtagtctgtgtttttagaacaagatgtcatttaaacttaaggaagattgctttggaaggagcaaatgtaatttataaacgtgatgttggaaaagtattaatgaagcttagaaaacctagaattacagctacaatttggtcctcaggaaaaattatttgcactggagcaacaagtgaagaagaagctaaatttggtgccagacgcttagcccgtagtctgcagaaactaggttttcaggtaatatttacagattttaaggttgttaacgttctggcagtgtgtaacatgccatttgaaatccgtttgccagaattcacaaagaacaatagacctcatgccagttacgaacctgaacttcatcctgctgtgtgctatcggataaaatctctaagagctacattacagattttttcaacaggaagtatcacagtaacagggcccaatgtaaaggctgttgctactgctgtggaacagatttacccatttgtgtttgaaagcaggaaagaaatttta

SEQ ID NO: 5759 - DNA, 336 bp, Homo sapiens
  source 1..336: mol_type = genomic DNA
atgctcattttcctgggctgttacagaagaagactggaagagcgcgcagggaccatgtcggcggagaccgcgagcggccccacagaggaccaggtggaaatcctggagtacaacttcaacaaggtcgacaagcacccggattccaccacgctgtgcctcatcgcggccgaggcaggcctttccgaggaggagacccagggtagtgatttgatctccaggagcaaaatatggcacccagaaagtagcccccaaagagaaggctacccccatgatagtctgccgtgcttggctttcgattacttttctctactgccgccccagtgtaaagaaatggtt

SEQ ID NO: 5760 - DNA, 273 bp, Homo sapiens
  source 1..273: mol_type = genomic DNA
atgctcattttcctgggctgttacagaagaagactggaagagcgcgcagggaccatgtcggcggagaccgcgagcggccccacagaggaccaggtggaaatcctggagtacaacttcaacaaggtcgacaagcacccggattccaccacgctgtgcctcatcgcggccgaggcaggcctttccgaggaggagacccagaaatggtttaagcagcgcctggcaaagtggcggcgctcagaaggcctgccctcagagtgcagatccgtcacagac

SEQ ID NO: 5761 - DNA, 219 bp, Homo sapiens
  source 1..219: mol_type = genomic DNA
atgtcggcggagaccgcgagcggccccacagaggaccaggtggaaatcctggagtacaacttcaacaaggtcgacaagcacccggattccaccacgctgtgcctcatcgcggccgaggcaggcctttccgaggaggagacccagaaatggtttaagcagcgcctggcaaagtggcggcgctcagaaggcctgccctcagagtgcagatccgtcacagac

SEQ ID NO: 5762 - DNA, 687 bp, Homo sapiens
  source 1..687: mol_type = genomic DNA
atggacgcagtggcctttgaggatgtggctgtgaacttcacccaggaggaatgggctttgctgggtccatcacagaagaatttatacagatatgtgatgcaagaaaccatcaggaacctggactgtataagaatgatatgggaagaacagaatactgaagatcagtacaaaaatcctaggagaaatctaagatgtcatatggtagagagattcagtgaaagtaaagacagtagtcagtgtggagaaacatttagcctcattcgagatagtattgtgaacaacagcatttgtcctggagaagatccatgtcaaagcgctgagtgtgaagaagtcataatgggtcatttatcccttaatagccacatcagagttgattctggacacaaaccacatgagtatcaggaatatggagagaagccacatacacataaacaacgtgggaaagccttcagttaccatcactcctttcagtcgcgtggaaggcctcacactggaaagaaacgctatgagtgtaaggaatgtggaaaaaccttcagttctcgtagaaaccttcgaagacacatggtagtgcaaggtggaaatagaccttataaatttcctatcgaagacatgagagaatgcacactggggagaaaccgtatgaatgtaagcagtgttctaaagccttgcctgattccagttcctata

SEQ ID NO: 5763 - DNA, 1707 bp, Homo sapiens
  source 1..1707: mol_type = genomic DNA
atgtcctctgctcctagaggtccaccttctgtggccccgttacctgcaggtattgggagatccacagctaagacgccaggactccctggaagcctagaaatgggaccactgacatttagggatgtggccatagaattctctctggaggagtggcaatgcctggacacttcacagcagaatttgtataggaatgtgatgttagataactacagaaacctggtcttcctgggtattgctgtctctaagccagacctgatcacttgtctggagcaaggaaaagagccctgcaatatgaagagacatgcgatggtagccaaacccccagttgtgtgttctcattttgcccaagacctttggccaaagcagggcttaaaagattcttttcaaaaagtgatactgagaagatatggaaaatatggacatgagaatttacaattaagaaaaggctgtaaaagtgcggatgagcataaggtgcacaaaagaggttataatggacttaaccaatgtttgacaactacccagagcaaaatatttcaatgtgataaatatgttaaagtccttcataaattctcaaattcaaatatacataagaaaagacaaactggaaagaaacctttcaaatgtaaagaatgtggcaaatcatgttgcatactttcacaactaactcagcataagaaaactgctactagagtgaatttctacaaatgtaagacatgtggaaaagcctttaaccagttctcaaatcttactaaacataagataattcatcctgaagtgaatccctacaaatgtgaagaatgtggcaaagcctttaaccagtccttaactcttactaaacataaaaaaattcatactgaagagaaaccttacaaatgtgaagattgtggcaaagtctttagtgtattttcagtccttactaaacataagataattcatacaggaacaaaaccctacaattgtgaagaatgtggcaaaggctttagtatattctcaacccttactaaacataagataattcatactggagagaaaccctacaaatgcaatgaatgtggtaaagcctttaactggtcctcaactcttactaaacataagagaattcatactggagagaaaccctacaaatgtgaagaatgtggcaaagcttttaaccagtcctcaacccttactagacataagatagttcatactggagagaaaccctacaaatgtgaagaatgtggtaaagcctttaaacggtccacaactcttactaaacataagagaatttatactaaagagaaaccatacaaatgtgaagaatgtggaaaagcctttagtgtattctcaacccttactaaacataagataattcatactggagcaaaaccttacaaatgtgaagaatgtggcagtgcctttagggcattctcaacccttactgaacataagagagttcatactggagagaaaccttacaaatgcaatgaatgtggtaaagcctttaactggtcctcaactcttactaaacataagagaattcatactggagagaagccctacaaatgtgaagaatgtggcaaagcttttaaccggtcctcaaaccttactcgacataagaaaattcatactggagagaaaccatacaaacctaaaagatgtgacagtgcttttgacaacaccccaaacttttctagacataaaagaaatcatatgggtgagaaatcc

SEQ ID NO: 5764 - DNA, 990 bp, Homo sapiens
  source 1..990: mol_type = genomic DNA
atgaccgatccgtcgctggggctgacagtccccatggcgccgcctctggccccgctccctccccgggacccaaacggggcgggatccgagtggagaaagcccggggccgtgagcttcgccgacgtggccgtgtacttctcccgggaggagtggggctgcctgcggcccgcgcagagggccctgtaccgggacgtgatgcgggagacctacggccacctgggcgcgctcggagtcggaggcagcaagccggcgctcatctcctgggtggaggagaaggccgaactgtgggatccggctgcccaggatccggaggtggcgaagtgtccgacagaagcggacccagattccagaaacaaggaagaggaaagacaaagggaagggacgggagccctggagaagcccgaccctgtggccgccgggtctcctgggctgaaggctccccaagccccctttgccgggttggagcagctgtccaaggcccggcgccggagtcgcccccgcttttttgcccacccccctgtcccccgagctgaccagcgtcacggctgctacgtgtgcgggaagagcttcgcctggcgctccacactggtggagcacatttacagccacaggggcgagaagcccttccactgcgcagactgcggcaagggcttcggccacgcttcctccctgagcaaacaccgggccatccatcgtggggagcggccccaccgctgtcccgagtgtggtcgggccttcatgcgccgcacggcgctgacttctcacctgcgcgttcacactggcgagaagccctaccgctgcccgcagtgtggccgctgcttcggcctgaagaccggcatggccaagcaccaatgggtccatcggcccgggggcgaggggcgtaggggccggcgccctggggggctgtctgtgaccctgactcctgtccgcggggacctggacccgcctgtgggcttccagctgtatccagagatattccaggaatgtggg

SEQ ID NO: 5765 - DNA, 570 bp, Homo sapiens
  source 1..570: mol_type = genomic DNA
atgaccgatccgtcgctggggctgacagtccccatggcgccgcctctggccccgctccctccccgggacccaaacggggcgggatccgagtggagaaagcccggggccgtgagcttcgccgacgtggccgtgtacttctcccgggaggagtggggctgcctgcggcccgcgcagagggccctgtaccgggacgtgatgcgggagacctacggccacctgggcgcgctcggtgagagccccacctgcttgcctgggccctgcgcctccacaggccctgccgcgcctctgggagctgcgtgtggagttgggggccccggggccgggcaggcggcctcctcgcagcgtggggtttgcgttcttctcccccaggagtcggaggcagcaagccggcgctcatctcctgggtggaggagaaggccgaactgtgggatccggctgcccaggatccggaggtggcgaagtgtccgacagaagcggacccagattccagaaacaaggaagaggaaagacaaagggaagggacgggagccctggagaagcccgaccctgtggccgccgggtctcctgggc

SEQ ID NO: 5766 - DNA, 1932 bp, Homo sapiens
  source 1..1932: mol_type = genomic DNA
atggccgaggcggtcgcggctccgatttctccgtggacgatggcagccacgattcaggccatggagaggaagattgaatcgcaggctgctcgcctgctttccctagaaggtcgaaccgggatggccgagaagaagctggctgattgcgagaagacagccgtggagttcgggaaccagctggagggcaagtgggccgtgctggggaccctgctgcaggagtacgggctgctgcagaggcggctggagaacgtggagaacctgctgcgcaacaggaacttctggatcctgcggctgcccccgggcagcaagggggagtcccctaaggagtggggcaagctggaggactggcagaaggagctctacaagcacgtgatgaggggcaactacgagacgctggtctccctggactacgccatctccaagcccgaggtcctctcccagattgaacaagggaaggagccctgcaactggcgccgccctggccccaagattccagatgttcctgtggaccccagtccaggctcggggcccccagttcccgccccagacctcttgatgcagatcaagcaggagggtgagctccagctccaggagcagcaggccctgggcgtggaggcgtgggcagccgggcagccagatattggggaggagccctggggcctcagccagctggattccggagcaggagacatctccacggatgccacctctggtgtccattccaacttttccaccaccatcccgcccacctcctggcaaacggatctccctccccaccatccctcttcagcatgctcggacgggaccctgaagctcaacacagcagcctccacggaagatgtaaaaattgtaataaaaacagaagtccaggaagaggaggtggtggccacacccgtacatcctactgacctagaggctcacgggaccctgtttggaccaggccaagccacacggttcttccctagtcctgcccaggaaggagcctgggaaagccagggcagctccttccccagccaggaccctgtgctggggctgcgagagcccgcccggcctgagagggacatgggtgagctcagtcctgctgtggcccaggaggagacccctcctggggactggctcttcggaggggtccggtggggctggaatttccggtgtaaaccgccagtgggcctgaacccgaggacggggcccgaggggcttccttactcctccccggacaacggagaggccatcttggaccccagccaggccccaaggccattcaacgaaccctgtaaataccctggccggaccaaaggctttggccacaagccagggctgaagaagcaccccgcggcgccccccgggggccggcccttcacctgcgccacgtgtgggaagagcttccagctgcaagtcagcctgagcgcgcaccagcgcagctgtggggcgcccgacgggtcgggcccgggcacaggcggtggcggcagcggcagtggcggcggcggtggcggcagcggtgggggcagcgcacgggatggcagcgcccttcggtgtggggagtgcggccgttgcttcacgcgccccgcgcacctcatccgccatcgcatgctgcacaccggcgagcggcccttcccctgcaccgagtgtgagaagcgcttcaccgaacgctccaagctcatcgaccactaccgaacgcacacgggcgtgcggcccttcacctgcaccgtctgcggcaaaagcttcatccgcaaggaccacctccgcaagcaccagcgcaaccatgcagcgggcgccaagaccccggcccgaggccagccactcccgacgccgcccgcacctcctgatcccttcaagagccccgcctccaaaggacctttggcctccacagaccttgtgaccgactggacttgtggcctcagcgtcctgggacccaccgatggcggggacatg

SEQ ID NO: 5767 - DNA, 1935 bp, Homo sapiens
  source 1..1935: mol_type = genomic DNA
atggccgaggcggtcgcggctccgatttctccgtggacgatggcagccacgattcaggccatggagaggaagattgaatcgcaggctgctcgcctgctttccctagaaggtcgaaccgggatggccgagaagaagctggctgattgcgagaagacagccgtggagttcgggaaccagctggagggcaagtgggccgtgctggggaccctgctgcaggagtacgggctgctgcagaggcggctggagaacgtggagaacctgctgcgcaacaggaacttctggatcctgcggctgcccccgggcagcaagggggagtcccctaaggagtggggcaagctggaggactggcagaaggagctctacaagcacgtgatgaggggcaactacgagacgctggtctccctggactacgccatctccaagcccgaggtcctctcccagattgaacaagggaaggagccctgcaactggcgccgccctggccccaagattccagatgttcctgtggaccccagtccaggctcggggcccccagttcccgccccagacctcttgatgcagatcaagcaggagggtgagctccagctccaggagcagcaggccctgggcgtggaggcgtgggcagccgggcagccagatattggggaggagccctggggcctcagccagctggattccggagcaggagacatctccacggatgccacctctggtgtccattccaacttttccaccaccatcccgcccacctcctggcaaacggatctccctccccaccatccctcttcagcatgctcggacgggaccctgaagctcaacacagcagcctccacggaagcagatgtaaaaattgtaataaaaacagaagtccaggaagaggaggtggtggccacacccgtacatcctactgacctagaggctcacgggaccctgtttggaccaggccaagccacacggttcttccctagtcctgcccaggaaggagcctgggaaagccagggcagctccttccccagccaggaccctgtgctggggctgcgagagcccgcccggcctgagagggacatgggtgagctcagtcctgctgtggcccaggaggagacccctcctggggactggctcttcggaggggtccggtggggctggaatttccggtgtaaaccgccagtgggcctgaacccgaggacggggcccgaggggcttccttactcctccccggacaacggagaggccatcttggaccccagccaggccccaaggccattcaacgaaccctgtaaataccctggccggaccaaaggctttggccacaagccagggctgaagaagcaccccgcggcgccccccgggggccggcccttcacctgcgccacgtgtgggaagagcttccagctgcaagtcagcctgagcgcgcaccagcgcagctgtggggcgcccgacgggtcgggcccgggcacaggcggtggcggcagcggcagtggcggcggcggtggcggcagcggtgggggcagcgcacgggatggcagcgcccttcggtgtggggagtgcggccgttgcttcacgcgccccgcgcacctcatccgccatcgcatgctgcacaccggcgagcggcccttcccctgcaccgagtgtgagaagcgcttcaccgaacgctccaagctcatcgaccactaccgaacgcacacgggcgtgcggcccttcacctgcaccgtctgcggcaaaagcttcatccgcaaggaccacctccgcaagcaccagcgcaaccatgcagcgggcgccaagaccccggcccgaggccagccactcccgacgccgcccgcacctcctgatcccttcaagagccccgcctccaaaggacctttggcctccacagaccttgtgaccgactggacttgtggcctcagcgtcctgggacccaccgatggcggggacatg

SEQ ID NO: 5768 - DNA, 579 bp, Homo sapiens
  source 1..579: mol_type = genomic DNA
atggctcaggcaagtctcctggcttgtgaaggcctagcaggtgtgagtttggttcccactgcagccagcaagaagatgatgctgagccagattgccagcaagcaggccgagaatggcgagcgggcaggtagccctgatgtgctgaggtgctcgagtcagggtcaccgaaaagacagtgataagtcccggagccgcaaagatgatgacagcttgtctgaggcctctcattcaaaaaagactgttaaaaaggtggtggtagtggaacaaaatggttcttttcaagtaaagattcccaaaaattttgtttgtgaacactgctttggagcctttcggagcagttaccacctaaagaggcacatccttattcacactggtgagaagccatttgaatgcgatatatgtgatatgcgtttcatccagaagtaccacctggaacgccacaagcgtgtgcacagtggtgaaaagccttaccagtgtgaacggtgtcatcagtgtttttctcggacagatcgattactcagacacaaacggatgtgccaagggtgccagtccaagacttccgacgggcagttttctcta

SEQ ID NO: 5769 - DNA, 2334 bp, Homo sapiens
  source 1..2334: mol_type = genomic DNA
atgaacctgaccgaggattgtatggtctttgaggatgtggccatatatttctcccaagaggaatgggggatccttaatgatgctcagagacacctgcacagcaatgtgatgttggagaactttgcgcttttgtcatcagtaggttgttggcatggagccaaggatgaggaggtaccttccaagcagtgtgtttctgtaagagtgttacaggtcacaattccaaagccagctttgtccaccctgaaggcccagccctgcaagatgtgtagctcaattctgaaggacattctgcacctggctgagcacgatggaacacaccctgagcaagggctgtacacatgtgcagcagagcatgacctgcaccaaaaggagcagattagagagaagctcaccagaagtgatgagtggaggccttcatttgtgaaccacagtgctcacgtgggagagaggaacttcacatgcacgcagggtggcaaggattttactgccagctcagaccttctccagcaacaggtcttaaacagtgggtggaagctgtacagggatacccaggatggggaagcctttcaaggtgaacagaatgatttcaactccagccaaggtgggaaagacttttgccaccaacatgggctgtttgagcaccaaaaaacccataatggggagaggccttatgagttcagtgaatgtggggaattgtttaggtacaactccaaccttattaaatatcagcaaaatcatgctggagaaaggccttatgagggcactgaatatggaaagacctttattagaaagtccaacctagttcagcaccagaaaattcacagtgaaggctttctttcaaaaaggtctgaccccattgaacatcaggagattctcagtagaccaacaccttatgaatgcacccagtgtgggaaggcctttcttacacaggctcatctggttggtcaccagaaaacccatactggagaacagccctatgaatgcaacaagtgtgggaagttttttatgtataactccaaactcatcagacatcagaaagttcacactggggagaggcgttacgagtgcagtgaatgtgggaaattgtttatggacagcttcacactcggtagacatcagagagttcatactggagaaaggccttttgaatgcagcatatgtggaaaattctttagtcaccgctccacactcaatatgcaccagagagttcatgctggcaaaaggctttataagtgtagcgaatgtgggaaagcctttagcctcaaacataatgttgttcagcatctgaaaattcatactggagaacggccttatgagtgcactgaatgtgagaaggcctttgttagaaagtcccacctagttcagcaccagaaaatccacactgatgcattttcaaaaaggtctgacctcattcaacacaagaggattgacattaggccaaggccttatacatgcagtgaatgtgggaaggccttccttacacaggctcatctggttggtcaccagaaaatccatactggagaacggccttatgaatgcactcaatgtgcgaaggcctttgttagaaagtcccacctagttcagcatgagaaaatccacactgatgcattttcaaaaaggtctgacctcattcaacacaagaggattgacctcaggccaaggccttatgtgtgtagtgaatgtgggaaggccttccttacacaggctcatctagatggtcaccagaaaatccagactggagaacggcgttatgaatgcaatgaatgtgggaaattctttttggacagctacaaacttgttattcatcagagaattcacactggagaaaagccttataaatgcagcaaatgtgggaaattctttagatatcgctgtacactgagtagacatcagaaagttcacactggagaaagaccttatgagtgtagtgaatgtgggaaattttttagagatagctacaaactcattattcatcagagagttcatactggagaaaagccttatgaatgcagcaactgtgggaagtttcttagataccgctctacattcattaaacatcataaagtttgcactggggagaagcctcatgagtgcagtaaatgtagggaattgtttaggactaaatcgagccttattatacatcagcagtctcacactggagaaagtccttttaagttaagggaatgtgggaaagacttcaacaaatgtaatactggtcagcgccaaaaaactcacactggagaaaggtcttatgagtgtggtgaatccagcaaagtgtttaaatacaactccagcctcattaaacatcagataattcatactggaaaaaggcct

SEQ ID NO: 5770 - DNA, 327 bp, Homo sapiens
  source 1..327: mol_type = genomic DNA
atggcgcagtctattaacatcacggagctgaatctgccgcagctagaaatgctcaagaaccagctggaccagatgtatgtccctgggaagctgcatgatgtggaacacgtgctcatcgatgtgggaactgggtactatgtagagaagacagctgaggatgccaaggacttcttcaagaggaagatagattttctaaccaagcagatggagaaaatccaaccagctcttcaggagaagcacgccatgaaacaggccgtcatggaaatgatgagtcagaagattcagcagctcacagccctgggggcagctcaggctactgctaaggcc

SEQ ID NO: 5771 - DNA, 813 bp, Homo sapiens
  source 1..813: mol_type = genomic DNA
atgactgaacctcaggtggggtgtgtagcctgtccaagggtacacaaagagccggcccaagttggaaccccctggccggctaaacccaggagtcacccaagaaaacgtgaccccactgcccttctccccaggtccctctggcctgcatgccaggagtcggtcaccgccctgtgcttcctccaagagacagtggagaggctgggtcagtcccctgcccaggacaccccggtcctggggccttgctgggacccgatggctctggggactcagggccgcctgctgctggacagggattccaaggacacacagaccaggatcagccaaaagggccgccgtctgcagcccccggggactccctcggccccaccccagagaaggccccggaaacagctgaacccctgccggggcaccgagagagtggaccctgggttcgagggggtgactctgaagtttcagataaagccggactccagcctgcagatcatccccacgtacagcctgccctgcagtagccgttctcaggaatcccctgcagatgctgttgggggccctgcagcccacccaggaggcaccgaggcccactcagcaggcagcgaggccctggagccccggcgctgtgcttcctgtcggacccagaggaccccgctctggagagacgctgaagatgggacccctctctgcaacgcctgtgggatcaggtacaagaaatacggcactcgctgctccagctgctggctggtgcccaggaaaaatgtccagcccaagaggctatgtggcagatgtggagtgtccctggaccccattcaggaaggt

SEQ ID NO: 5772 - DNA, 1299 bp, Homo sapiens
  source 1..1299: mol_type = genomic DNA
atgcagcgaatgatccaacaatttgctgctgaatatacctcaaaaaatagctctactcaggaccccagccagcccaatagcacaaagaaccaaagcctgccgaaagcatctccagtcaccacctctcccacggctgcaactactcagaaccctgtgctcagcaaacttctcatggctgaccaagactcacctctggaccttactgtcagaaagtctcagtcagaacctagcgaacaagacggtgtacttgatctgtccactaagaaaagtccatgtgctggcagcacttccctgagccactctccaggctgctccagtactcaagggaacgggcgacctgggagacccagccagtaccgcccagacggacttcggagtggtgatggggtacctccaagaagcttacaggatggaaccagggaaggttttggacactccacatcactcaaagttccactggctcgatccctgcagattagtgaagaactactgagcagaaaccaattgtccacagctgccagccttgggccatctggattacagaatcatggacaacacttaatattatccagggaagcctcttgggcaaaaccacattacgagttcaacctcagccgtatgaagttcaggggaaatggtgcactcagcaacatcagtgaccttccttttcttgcagaaaactctgcctttccaaaaatggcacttcaagcaaaacaagatggaaaaaaggatgtgagccattcatctcctgtagatttaaagataccacaagttcgaggaatggatctttcttgggagtctcgcactggtgatcagtacagctatagctctttggtaatgggttcacaaacggagagcgcgcttagtaaaaaattaagggctattcttccaaaacaaagtagaaaaagcatgttagatgctggacccgattcttggggctcagatgctgagcagtctacctctggacagccatatcccacatcggatcaagaaggagaccctggctccaagcagcctcggaagaaaagagggcgttacagacagtacaacagtgagatactggaggaagcaatctcagtggttatgagtggaaaaatgagtgtttccaaagctcagagtatttatgggattccccacagtacactggagtacaaagtaaaggagaggctgggcactttgaaaaaccctccaaagaaaaagatgaaattaatgaggtcggaggggccagatgtttctgtaaagattgaattagatccccagggagaggcagcacaaagtgcaaatgaatcaaaaaacgag

SEQ ID NO: 5773 - DNA, 801 bp, Homo sapiens
  source 1..801: mol_type = genomic DNA
atggacgatcagggttgccctcggtgtaagaccaccaaatatcggaacccctccttgaagctgatggtgaatgtgtgcggacacactctctgtgaaagttgtgtagatttactgtttgtgagaggagctggaaactgccctgagtgtggtactccactcagaaagagcaacttcagggtacaactctttgaagatcccactgttgacaaggaggttgagatcaggaaaaaagtgctaaagatatacaataaaagggaagaagattttcctagtctaagagaatacaatgatttcttggaagaagtggaagaaattgttttcaacttgaccaacaatgtggatttggacaacaccaaaaagaaaatggagatataccaaaaggaaaacaaagatgttattcagaaaaataaattaaagctgactcgagaacaggaagaactggaagaagctttagaagtggaacgacaggaaaatgaacaaagaagattatttatacaaaaagaagaacaactgcagcagattctaaaaaggaagaataagcaggcttttttagatgagctgggtcaacatatttcactggcacctattcacaagcttgaagaagctctgtatgaataccagccactgcagatagagacatatggaccacatgttcctgagcttgagatgctaggaagacttgggtatttaaaccatgtcagagctgcctcaccacaggaccttgctggaggctatacttcttctcttgcttgtcacagagcactacaggatgcattcagtgggcttttctggcagcccagt

SEQ ID NO: 5774 - DNA, 3933 bp, Homo sapiens
  source 1..3933: mol_type = genomic DNA
atgtctcgccgcaagcaagcgaaaccgagatccctcaaagaccccaactgtaaacttgaagacaagactgaagatggagaggcactagattgtaagaagaggccggaagacggggaggagttggaagacgaagctgtgcacagctgtgacagctgcctccaggtgtttgaatcgctgagcgatatcacagaacacaagattaatcaatgtcaactgacagatggagtggatgttgaagatgatccgacttgctcttggccagcttcctcaccttctagcaaggatcagacttcccctagccatggagaaggttgcgattttggagaggaagaaggtggccctgggcttccatacccgtgtcaattctgtgacaagtcgtttagccgcctcagctacctaaagcaccatgagcagagtcacagtgacaaactgcctttcaaatgcacctactgcagtaggctgttcaaacacaagcgcagccgagatcgccacataaaactccacaccggggacaagaagtaccactgcagtgaatgtgatgctgcgttttccagaagtgatcacttgaagatccacttaaagactcacacgtccaacaagccatataaatgtgccatttgtcgccgtgggtttctgtcctctagttccttacacggacacatgcaggttcatgagaggaacaaggacggctctcagtccggttccaggatggaggactggaagatgaaggacactcagaagtgcagtcagtgtgaggaaggctttgacttcccggaagacctccaaaaacacattgcagagtgccaccccgaatgctccccaaatgaggaccgagcggccctccagtgtgtctactgccacgagctcttcgtagaggagacctccctcatgaaccacatggagcaggtgcatagcggggagaagaagaactcatgcagcatttgttctgagagtttccacacagttgaggaactgtacagccacatggacagtcaccagcaaccggagtcatgcaatcacagcaacagcccttccctggtcacggtgggctatacctccgtgtccagtacgactccagattccaacctctcagtggacagctcaaccatggtggaagctgccccgccaatcccaaagagtcgagggaggaagagggccgctcaacaaacccctgacatgactggtccctcgagtaaacaagcaaaagttacctacagctgtatttactgcaacaaacaattattttcaagtcttgcagttctgcagattcacctgaaaactatgcacttagataagccagaacaggcccatatttgtcagtattgcttggaggtcctgccctcactctataacctaaatgaacatcttaagcaagtgcatgaagctcaggacccaggtctgattgtttctgccatgcctgccattgtctaccagtgtaacttctgttccgaagttgtcaacgacctcaacactcttcaggaacacatccgatgttctcatggatttgcaaaccctgcagctaaagatagtaatgcattcttttgtccccattgctatatggggtttctcactgactcttccctggaagagcatattagacaggttcattgtgacctcagtggctcccgatttgggtctccagtgcttgggactcccaaagaaccagtagtagaagtctattcttgttcctattgtacaaattcgccaatattcaacagcgttcttaaactgaacaagcatatcaaagagaatcataaaaacattcccttggccctgaattatatccacaatgggaagaaatccagggccttaagccccctatctcctgtggccatagagcagacatctcttaagatgatgcaggcagtaggaggtgcacctgcacgtcccactggagaatatatctgtaatcaatgtggtgctaagtacacatccctagacagctttcagactcacctaaaaactcatctcgacactgtgcttccaaaattgacctgtcctcagtgcaacaaggaattccccaaccaagaatccttgctgaagcatgttaccattcactttatgatcacttcaacgtattacatctgtgagagttgtgacaagcaattcacatcagtggatgaccttcagaaacacctgctggacatgcacacctttgtcttctttcgctgcaccctctgccaggaagtttttgactcaaaagtctccattcagctccacttggctgtgaagcacagtaacgaaaagaaagtctataggtgcacatcttgcaactgggacttccgcaacgaaactgacttgcagctccatgtgaaacacaaccacctggaaaaccaagggaaagtgcataagtgcattttctgcggtgagtcctttggcaccgaggtggagctgcaatgccacatcaccactcacagtaagaagtacaactgcaagttctgtagcaaagccttccatgcgatcattttgttagaaaaacacttgcgagaaaaacactgtgtattcgaaaccaagacacccaactgtggaacaaatggagcttccgagcaagtgcagaaagaggaagtggagctgcagactttgctgaccaacagccaggagtcccacaacagtcacgatgggagcgaagaagacgttgacacctctgagcctatgtacggctgcgacatttgtggggcagcctacactatggaaactttgctgcagaatcaccagctccgagaccacaacatcagacctggagaaagtgccatcgtgaaaaagaaagctgagctcattaaagggaattacaagtgcaacgtgtgctctcgaaccttcttctccgaaaatggcctccgggaacatatgcagacccacctaggccctgtcaaacactacatgtgccctatttgcggagagcggtttccctcccttttaactcttactgaacacaaagtcacgcatagtaagagtcttgatactggaaactgccggatttgcaagatgcctctccagagtgaagaggagtttttagagcattgccaaatgcaccctgacttgaggaattccctgacaggctttcgctgcgtggtgtgcatgcagacagtgacctccaccttggaactcaaaatccatgggacgttccacatgcaaaagacagggaatgggtctgcagttcagaccacagggcggggccagcacgtccaaaaactgtataagtgcgcatcttgcctcaaagaattccgttccaagcaagatctggtgaaacttgatatcaatggcctgccatatggtctgtgtgccggctgcgtgaatctcagtaagagcgccagcccaggcattaacgtccctcccggcacgaatagaccaggcttgggccagaatgagaatctgagtgccattgaggggaaaggcaaggtggggggactgaagacacgctgctctagctgcaacgttaagtttgagtctgaaagtgaactccagaaccacatccaaaccatccaccgagagctcgtgccagacagcaacagcacacagttgaaaacgccccaagtatcaccaatgcccagaatcagtccctcccagtcggatgagaagaagacctatcaatgcatcaagtgtcagatggttttctacaatgaatgggatattcaggttcatgttgcaaatcacatgattgatgaaggactgaaccatgaatgcaaactctgcagccagacctttgactctcctgccaaactccagtgccacctgatagagcacagcttcgaagggatgggaggcaccttcaagtgtccagtctgctttacagtatttgttcaagcaaacaagttgcagcagcatattttctctgcccatggacaagaagacaagatctatgactgtacacaatgtccacagaagtttttcttccaaacagagctgcagaatcatacaatgacccaacacagcagt

SEQ ID NO: 5775 - DNA, 3273 bp, Homo sapiens
  source 1..3273: mol_type = genomic DNA
atgcaggttcatgagaggaacaaggacggctctcagtccggttccaggatggaggactggaagatgaaggacactcagaagtgcagtcagtgtgaggaaggctttgacttcccggaagacctccaaaaacacattgcagagtgccaccccgaatgctccccaaatgaggaccgagcggccctccagtgtgtctactgccacgagctcttcgtagaggagacctccctcatgaaccacatggagcaggtgcatagcggggagaagaagaactcatgcagcatttgttctgagagtttccacacagttgaggaactgtacagccacatggacagtcaccagcaaccggagtcatgcaatcacagcaacagcccttccctggtcacggtgggctatacctccgtgtccagtacgactccagattccaacctctcagtggacagctcaaccatggtggaagctgccccgccaatcccaaagagtcgagggaggaagagggccgctcaacaaacccctgacatgactggtccctcgagtaaacaagcaaaagttacctacagctgtatttactgcaacaaacaattattttcaagtcttgcagttctgcagattcacctgaaaactatgcacttagataagccagaacaggcccatatttgtcagtattgcttggaggtcctgccctcactctataacctaaatgaacatcttaagcaagtgcatgaagctcaggacccaggtctgattgtttctgccatgcctgccattgtctaccagtgtaacttctgttccgaagttgtcaacgacctcaacactcttcaggaacacatccgatgttctcatggatttgcaaaccctgcagctaaagatagtaatgcattcttttgtccccattgctatatggggtttctcactgactcttccctggaagagcatattagacaggttcattgtgacctcagtggctcccgatttgggtctccagtgcttgggactcccaaagaaccagtagtagaagtctattcttgttcctattgtacaaattcgccaatattcaacagcgttcttaaactgaacaagcatatcaaagagaatcataaaaacattcccttggccctgaattatatccacaatgggaagaaatccagggccttaagccccctatctcctgtggccatagagcagacatctcttaagatgatgcaggcagtaggaggtgcacctgcacgtcccactggagaatatatctgtaatcaatgtggtgctaagtacacatccctagacagctttcagactcacctaaaaactcatctcgacactgtgcttccaaaattgacctgtcctcagtgcaacaaggaattccccaaccaagaatccttgctgaagcatgttaccattcactttatgatcacttcaacgtattacatctgtgagagttgtgacaagcaattcacatcagtggatgaccttcagaaacacctgctggacatgcacacctttgtcttctttcgctgcaccctctgccaggaagtttttgactcaaaagtctccattcagctccacttggctgtgaagcacagtaacgaaaagaaagtctataggtgcacatcttgcaactgggacttccgcaacgaaactgacttgcagctccatgtgaaacacaaccacctggaaaaccaagggaaagtgcataagtgcattttctgcggtgagtcctttggcaccgaggtggagctgcaatgccacatcaccactcacagtaagaagtacaactgcaagttctgtagcaaagccttccatgcgatcattttgttagaaaaacacttgcgagaaaaacactgtgtattcgaaaccaagacacccaactgtggaacaaatggagcttccgagcaagtgcagaaagaggaagtggagctgcagactttgctgaccaacagccaggagtcccacaacagtcacgatgggagcgaagaagacgttgacacctctgagcctatgtacggctgcgacatttgtggggcagcctacactatggaaactttgctgcagaatcaccagctccgagaccacaacatcagacctggagaaagtgccatcgtgaaaaagaaagctgagctcattaaagggaattacaagtgcaacgtgtgctctcgaaccttcttctccgaaaatggcctccgggaacatatgcagacccacctaggccctgtcaaacactacatgtgccctatttgcggagagcggtttccctcccttttaactcttactgaacacaaagtcacgcatagtaagagtcttgatactggaaactgccggatttgcaagatgcctctccagagtgaagaggagtttttagagcattgccaaatgcaccctgacttgaggaattccctgacaggctttcgctgcgtggtgtgcatgcagacagtgacctccaccttggaactcaaaatccatgggacgttccacatgcaaaagacagggaatgggtctgcagttcagaccacagggcggggccagcacgtccaaaaactgtataagtgcgcatcttgcctcaaagaattccgttccaagcaagatctggtgaaacttgatatcaatggcctgccatatggtctgtgtgccggctgcgtgaatctcagtaagagcgccagcccaggcattaacgtccctcccggcacgaatagaccaggcttgggccagaatgagaatctgagtgccattgaggggaaaggcaaggtggggggactgaagacacgctgctctagctgcaacgttaagtttgagtctgaaagtgaactccagaaccacatccaaaccatccaccgagagctcgtgccagacagcaacagcacacagttgaaaacgccccaagtatcaccaatgcccagaatcagtccctcccagtcggatgagaagaagacctatcaatgcatcaagtgtcagatggttttctacaatgaatgggatattcaggttcatgttgcaaatcacatgattgatgaaggactgaaccatgaatgcaaactctgcagccagacctttgactctcctgccaaactccagtgccacctgatagagcacagcttcgaagggatgggaggcaccttcaagtgtccagtctgctttacagtatttgttcaagcaaacaagttgcagcagcatattttctctgcccatggacaagaagacaagatctatgactgtacacaatgtccacagaagtttttcttccaaacagagctgcagaatcatacaatgacccaacacagcagt

SEQ ID NO: 5776 - DNA, 3882 bp, Homo sapiens
  source 1..3882: mol_type = genomic DNA
atgccttatgaagtcaatgctgggtatgattttacaaatatggtccggaaaaagaacccccctctgagaaacgttgcaagtgaaggcgagggccagatcctggagcctataggtacagaaagcaaggtatctggaaagaacaaagaattttctgcagatcagatgtcagaaaatacggatcagagtgatgctgcagaactaaatcataaggaggaacatagcttgcatgttcaagatccatcttctagcagtaagaaggacttgaaaagcgcagttctgagtgagaaggctggcttcaattatgaaagccccagtaagggaggaaactttccctcctttccgcatgatgaggtgacagacagaaatatgttggctttctcatctccagctgctgggggagtctgtgagcccttgaagtctccgcaaagagcagaggcagatgaccctcaagatatggcctgcaccccctcaggggactcactggagacaaaggaagatcagaagatgtcaccaaaggctacagaggaaacagggcaagcacagagtggtcaagccaattgtcaaggtttgagcccagtttcagtggcctcaaaaaacccacaagtgccttcagatgggggtgtaagactgaataaatccaaaactgacttactggtgaatgacaacccagacccggcacctctgtctccagagcttcaggactttaaatgcaatatctgtggatatggttactacggcaacgaccccacagatctgattaagcacttccgaaagtatcacttaggactgcataaccgcaccaggcaagatgctgagctggacagcaaaatcttggcccttcataacatggtgcagttcagccattccaaagacttccagaaggtcaaccgttctgtgttttctggtgtgctgcaggacatcaattcttcaaggcctgttttactaaatgggacctatgatgtgcaggtgacttcaggtggaacattcattggcattggacggaaaacaccagattgccaagggaacaccaagtatttccgctgtaaattctgcaatttcacttatatgggcaactcatccaccgaattagaacaacattttcttcagactcacccaaacaaaataaaagcttctctcccctcctctgaggttgcaaaaccttcagagaaaaactctaacaagtccatccctgcacttcaatccagtgattctggagacttgggaaaatggcaggacaagataacagtcaaagcaggagatgacactcctgttgggtactcagtgcccataaagcccctcgattcctctagacaaaatggtacagaggccaccagttactactggtgtaaattttgtagtttcagctgtgagtcatctagctcacttaaactgctagaacattatggcaagcagcacggagcagtgcagtcaggcggccttaatccagagttaaatgataagctttccaggggctctgtcattaatcagaatgatctagccaaaagttcagaaggagagacaatgaccaagacagacaagagctcgagtggggctaaaaagaaggacttctccagcaagggagccgaggataatatggtaacgagctataattgtcagttctgtgacttccgatattccaaaagccatggccctgatgtaattgtagtggggccacttctccgtcattatcaacagctccataacattcacaagtgtaccattaaacactgtccattctgtcccagaggactttgcagcccagaaaagcaccttggagaaattacttatccgtttgcttgtagaaaaagtaattgttcccactgtgcactcttgcttctgcacttgtctcctggggcggctggaagctcgcgagtcaaacatcagtgccatcagtgttcattcaccacccctgacgtagatgtactcctctttcactatgaaagtgtgcatgagtcccaagcatcggatgtcaaacaagaagcaaatcacctgcaaggatcggatgggcagcagtctgtcaaggaaagcaaagaacactcatgtaccaaatgtgattttattacccaagtggaagaagagatttcccgacactacaggagagcacacagctgctacaaatgccgtcagtgcagttttacagctgccgatactcagtcactactggagcacttcaacactgttcactgccaggaacaggacatcactacagccaacggcgaagaggacggtcatgccatatccaccatcaaagaggagcccaaaattgacttcagggtctacaatctgctaactccagactctaaaatgggagagccagtttctgagagtgtggtgaagagagagaagctggaagagaaggacgggctcaaagagaaagtttggaccgagagttccagtgatgaccttcgcaatgtgacttggagaggggcagacatcctgcgggggagtccgtcatacacccaagcaagcctggggctgctgacgcctgtgtctggcacccaagagcagacaaagactctaagggatagtcccaatgtggaggccgcccatctggcgcgacctatttatggcttggctgtggaaaccaagggattcctgcagggggcgccagctggcggagagaagtctggggccctcccccagcagtatcctgcatcgggagaaaacaagtccaaggatgaatcccagtccctgttacggaggcgtagaggctccggtgttttttgtgccaattgcctgaccacaaagacctctctctggcgaaagaatgcaaatggcggatatgtatgcaacgcgtgtggcctctaccagaagcttcactcgactcccaggcctttaaacatcattaaacaaaacaacggtgagcagattattaggaggagaacaagaaagcgccttaacccagaggcacttcaggctgagcagctcaacaaacagcagaggggcagcaatgaggagcaagtcaatggaagcccgttagagaggaggtcagaagatcatctaactgaaagtcaccagagagaaattccactccccagcctaagtaaatacgaagcccagggttcattgactaaaagccattctgctcagcagccagtcctggtcagccaaactctggatattcacaaaaggatgcaacctttgcacattcagataaaaagtcctcaggaaagtactggagatccaggaaatagttcatccgtatctgaagggaaaggaagttctgagagaggcagtcctatagaaaagtacatgagacctgcgaaacacccaaattattcaccaccaggcagccctattgaaaagtaccagtacccactttttggacttccctttgtacataatgacttccagagtgaagctgattggctgcggttctggagtaaatataagctctccgttcctgggaatccgcactacttgagtcacgtgcctggcctaccaaatccttgccaaaactatgtgccttatcccaccttcaatctgcctcctcatttttcagctgttggatcagacaatgacattcctctagatttggcgatcaagcattccagacctgggccaactgcaaacggtgcctccaaggagaaaacgaaggcaccaccaaatgtaaaaaatgaaggtcccttgaatgtagtaaaaacagagaaagttgatagaagtactcaagatgaactttcaacaaaatgtgtgcactgtggcattgtctttctggatgaagtgatgtatgctttgcatatgagttgccatggtgacagtggacctttccagtgcagcatatgccagcatctttgcacggacaaatatgacttcacaacacatatccagaggggcctgcataggaacaatgcacaagtggaaaaaaatggaaaacctaaagag

SEQ ID NO: 5777 - DNA, 3843 bp, Homo sapiens
  source 1..3843: mol_type = genomic DNA
atggtccggaaaaagaacccccctctgagaaacgttgcaagtgaaggcgagggccagatcctggagcctataggtacagaaagcaaggtatctggaaagaacaaagaattttctgcagatcagatgtcagaaaatacggatcagagtgatgctgcagaactaaatcataaggaggaacatagcttgcatgttcaagatccatcttctagcagtaagaaggacttgaaaagcgcagttctgagtgagaaggctggcttcaattatgaaagccccagtaagggaggaaactttccctcctttccgcatgatgaggtgacagacagaaatatgttggctttctcatctccagctgctgggggagtctgtgagcccttgaagtctccgcaaagagcagaggcagatgaccctcaagatatggcctgcaccccctcaggggactcactggagacaaaggaagatcagaagatgtcaccaaaggctacagaggaaacagggcaagcacagagtggtcaagccaattgtcaaggtttgagcccagtttcagtggcctcaaaaaacccacaagtgccttcagatgggggtgtaagactgaataaatccaaaactgacttactggtgaatgacaacccagacccggcacctctgtctccagagcttcaggactttaaatgcaatatctgtggatatggttactacggcaacgaccccacagatctgattaagcacttccgaaagtatcacttaggactgcataaccgcaccaggcaagatgctgagctggacagcaaaatcttggcccttcataacatggtgcagttcagccattccaaagacttccagaaggtcaaccgttctgtgttttctggtgtgctgcaggacatcaattcttcaaggcctgttttactaaatgggacctatgatgtgcaggtgacttcaggtggaacattcattggcattggacggaaaacaccagattgccaagggaacaccaagtatttccgctgtaaattctgcaatttcacttatatgggcaactcatccaccgaattagaacaacattttcttcagactcacccaaacaaaataaaagcttctctcccctcctctgaggttgcaaaaccttcagagaaaaactctaacaagtccatccctgcacttcaatccagtgattctggagacttgggaaaatggcaggacaagataacagtcaaagcaggagatgacactcctgttgggtactcagtgcccataaagcccctcgattcctctagacaaaatggtacagaggccaccagttactactggtgtaaattttgtagtttcagctgtgagtcatctagctcacttaaactgctagaacattatggcaagcagcacggagcagtgcagtcaggcggccttaatccagagttaaatgataagctttccaggggctctgtcattaatcagaatgatctagccaaaagttcagaaggagagacaatgaccaagacagacaagagctcgagtggggctaaaaagaaggacttctccagcaagggagccgaggataatatggtaacgagctataattgtcagttctgtgacttccgatattccaaaagccatggccctgatgtaattgtagtggggccacttctccgtcattatcaacagctccataacattcacaagtgtaccattaaacactgtccattctgtcccagaggactttgcagcccagaaaagcaccttggagaaattacttatccgtttgcttgtagaaaaagtaattgttcccactgtgcactcttgcttctgcacttgtctcctggggcggctggaagctcgcgagtcaaacatcagtgccatcagtgttcattcaccacccctgacgtagatgtactcctctttcactatgaaagtgtgcatgagtcccaagcatcggatgtcaaacaagaagcaaatcacctgcaaggatcggatgggcagcagtctgtcaaggaaagcaaagaacactcatgtaccaaatgtgattttattacccaagtggaagaagagatttcccgacactacaggagagcacacagctgctacaaatgccgtcagtgcagttttacagctgccgatactcagtcactactggagcacttcaacactgttcactgccaggaacaggacatcactacagccaacggcgaagaggacggtcatgccatatccaccatcaaagaggagcccaaaattgacttcagggtctacaatctgctaactccagactctaaaatgggagagccagtttctgagagtgtggtgaagagagagaagctggaagagaaggacgggctcaaagagaaagtttggaccgagagttccagtgatgaccttcgcaatgtgacttggagaggggcagacatcctgcgggggagtccgtcatacacccaagcaagcctggggctgctgacgcctgtgtctggcacccaagagcagacaaagactctaagggatagtcccaatgtggaggccgcccatctggcgcgacctatttatggcttggctgtggaaaccaagggattcctgcagggggcgccagctggcggagagaagtctggggccctcccccagcagtatcctgcatcgggagaaaacaagtccaaggatgaatcccagtccctgttacggaggcgtagaggctccggtgttttttgtgccaattgcctgaccacaaagacctctctctggcgaaagaatgcaaatggcggatatgtatgcaacgcgtgtggcctctaccagaagcttcactcgactcccaggcctttaaacatcattaaacaaaacaacggtgagcagattattaggaggagaacaagaaagcgccttaacccagaggcacttcaggctgagcagctcaacaaacagcagaggggcagcaatgaggagcaagtcaatggaagcccgttagagaggaggtcagaagatcatctaactgaaagtcaccagagagaaattccactccccagcctaagtaaatacgaagcccagggttcattgactaaaagccattctgctcagcagccagtcctggtcagccaaactctggatattcacaaaaggatgcaacctttgcacattcagataaaaagtcctcaggaaagtactggagatccaggaaatagttcatccgtatctgaagggaaaggaagttctgagagaggcagtcctatagaaaagtacatgagacctgcgaaacacccaaattattcaccaccaggcagccctattgaaaagtaccagtacccactttttggacttccctttgtacataatgacttccagagtgaagctgattggctgcggttctggagtaaatataagctctccgttcctgggaatccgcactacttgagtcacgtgcctggcctaccaaatccttgccaaaactatgtgccttatcccaccttcaatctgcctcctcatttttcagctgttggatcagacaatgacattcctctagatttggcgatcaagcattccagacctgggccaactgcaaacggtgcctccaaggagaaaacgaaggcaccaccaaatgtaaaaaatgaaggtcccttgaatgtagtaaaaacagagaaagttgatagaagtactcaagatgaactttcaacaaaatgtgtgcactgtggcattgtctttctggatgaagtgatgtatgctttgcatatgagttgccatggtgacagtggacctttccagtgcagcatatgccagcatctttgcacggacaaatatgacttcacaacacatatccagaggggcctgcataggaacaatgcacaagtggaaaaaaatggaaaacctaaagag

SEQ ID NO: 5778 - DNA, 3855 bp, Homo sapiens
  source 1..3855: mol_type = genomic DNA
atgcagagtaatatggtccggaaaaagaacccccctctgagaaacgttgcaagtgaaggcgagggccagatcctggagcctataggtacagaaagcaaggtatctggaaagaacaaagaattttctgcagatcagatgtcagaaaatacggatcagagtgatgctgcagaactaaatcataaggaggaacatagcttgcatgttcaagatccatcttctagcagtaagaaggacttgaaaagcgcagttctgagtgagaaggctggcttcaattatgaaagccccagtaagggaggaaactttccctcctttccgcatgatgaggtgacagacagaaatatgttggctttctcatctccagctgctgggggagtctgtgagcccttgaagtctccgcaaagagcagaggcagatgaccctcaagatatggcctgcaccccctcaggggactcactggagacaaaggaagatcagaagatgtcaccaaaggctacagaggaaacagggcaagcacagagtggtcaagccaattgtcaaggtttgagcccagtttcagtggcctcaaaaaacccacaagtgccttcagatgggggtgtaagactgaataaatccaaaactgacttactggtgaatgacaacccagacccggcacctctgtctccagagcttcaggactttaaatgcaatatctgtggatatggttactacggcaacgaccccacagatctgattaagcacttccgaaagtatcacttaggactgcataaccgcaccaggcaagatgctgagctggacagcaaaatcttggcccttcataacatggtgcagttcagccattccaaagacttccagaaggtcaaccgttctgtgttttctggtgtgctgcaggacatcaattcttcaaggcctgttttactaaatgggacctatgatgtgcaggtgacttcaggtggaacattcattggcattggacggaaaacaccagattgccaagggaacaccaagtatttccgctgtaaattctgcaatttcacttatatgggcaactcatccaccgaattagaacaacattttcttcagactcacccaaacaaaataaaagcttctctcccctcctctgaggttgcaaaaccttcagagaaaaactctaacaagtccatccctgcacttcaatccagtgattctggagacttgggaaaatggcaggacaagataacagtcaaagcaggagatgacactcctgttgggtactcagtgcccataaagcccctcgattcctctagacaaaatggtacagaggccaccagttactactggtgtaaattttgtagtttcagctgtgagtcatctagctcacttaaactgctagaacattatggcaagcagcacggagcagtgcagtcaggcggccttaatccagagttaaatgataagctttccaggggctctgtcattaatcagaatgatctagccaaaagttcagaaggagagacaatgaccaagacagacaagagctcgagtggggctaaaaagaaggacttctccagcaagggagccgaggataatatggtaacgagctataattgtcagttctgtgacttccgatattccaaaagccatggccctgatgtaattgtagtggggccacttctccgtcattatcaacagctccataacattcacaagtgtaccattaaacactgtccattctgtcccagaggactttgcagcccagaaaagcaccttggagaaattacttatccgtttgcttgtagaaaaagtaattgttcccactgtgcactcttgcttctgcacttgtctcctggggcggctggaagctcgcgagtcaaacatcagtgccatcagtgttcattcaccacccctgacgtagatgtactcctctttcactatgaaagtgtgcatgagtcccaagcatcggatgtcaaacaagaagcaaatcacctgcaaggatcggatgggcagcagtctgtcaaggaaagcaaagaacactcatgtaccaaatgtgattttattacccaagtggaagaagagatttcccgacactacaggagagcacacagctgctacaaatgccgtcagtgcagttttacagctgccgatactcagtcactactggagcacttcaacactgttcactgccaggaacaggacatcactacagccaacggcgaagaggacggtcatgccatatccaccatcaaagaggagcccaaaattgacttcagggtctacaatctgctaactccagactctaaaatgggagagccagtttctgagagtgtggtgaagagagagaagctggaagagaaggacgggctcaaagagaaagtttggaccgagagttccagtgatgaccttcgcaatgtgacttggagaggggcagacatcctgcgggggagtccgtcatacacccaagcaagcctggggctgctgacgcctgtgtctggcacccaagagcagacaaagactctaagggatagtcccaatgtggaggccgcccatctggcgcgacctatttatggcttggctgtggaaaccaagggattcctgcagggggcgccagctggcggagagaagtctggggccctcccccagcagtatcctgcatcgggagaaaacaagtccaaggatgaatcccagtccctgttacggaggcgtagaggctccggtgttttttgtgccaattgcctgaccacaaagacctctctctggcgaaagaatgcaaatggcggatatgtatgcaacgcgtgtggcctctaccagaagcttcactcgactcccaggcctttaaacatcattaaacaaaacaacggtgagcagattattaggaggagaacaagaaagcgccttaacccagaggcacttcaggctgagcagctcaacaaacagcagaggggcagcaatgaggagcaagtcaatggaagcccgttagagaggaggtcagaagatcatctaactgaaagtcaccagagagaaattccactccccagcctaagtaaatacgaagcccagggttcattgactaaaagccattctgctcagcagccagtcctggtcagccaaactctggatattcacaaaaggatgcaacctttgcacattcagataaaaagtcctcaggaaagtactggagatccaggaaatagttcatccgtatctgaagggaaaggaagttctgagagaggcagtcctatagaaaagtacatgagacctgcgaaacacccaaattattcaccaccaggcagccctattgaaaagtaccagtacccactttttggacttccctttgtacataatgacttccagagtgaagctgattggctgcggttctggagtaaatataagctctccgttcctgggaatccgcactacttgagtcacgtgcctggcctaccaaatccttgccaaaactatgtgccttatcccaccttcaatctgcctcctcatttttcagctgttggatcagacaatgacattcctctagatttggcgatcaagcattccagacctgggccaactgcaaacggtgcctccaaggagaaaacgaaggcaccaccaaatgtaaaaaatgaaggtcccttgaatgtagtaaaaacagagaaagttgatagaagtactcaagatgaactttcaacaaaatgtgtgcactgtggcattgtctttctggatgaagtgatgtatgctttgcatatgagttgccatggtgacagtggacctttccagtgcagcatatgccagcatctttgcacggacaaatatgacttcacaacacatatccagaggggcctgcataggaacaatgcacaagtggaaaaaaatggaaaacctaaagag

SEQ ID NO: 5779 - DNA, 1827 bp, Homo sapiens
  source 1..1827: mol_type = genomic DNA
atggctgtggggctttgtaaagccatgtcccaggggttggtgaccttcagagatgtggcgctagacttttcccaagaagagtgggaatggctgaagccatctcagaaggatttatacagagatgtcatgttggagaactacaggaacttggtatggcttggactctccatttctaagcccaacatgatctccttactggagcaagggaaggaaccgtggatggtggagagaaagatgtcacagggtcactgtgcagactgggagtcttggtgtgaaattgaggaattatctccaaaatggttcattgatgaagatgaaatatcccaggagatggtaatggaaaggctagcaagtcatggccttgaatgctccagtttcagagaagcctggaaatataagggtgaatttgagctacatcagggaaatgcggagaggcatttcatgcaagtgacagctgttaaggaaatctctactgggaaaagagacaatgaatttagtaattctgggagaagcatacccctgaaatcagtatttttaacacaacagaaagttcctaccatacagcaagtacataaatttgatatttatgataaactcttcccccaaaattcagtcataattgaatataaaagactccatgctgagaaggaatctttgataggtaatgaatgtgaagaattcaaccagagtacgtaccttagtaaagatataggaattcctcctggggagaaaccttatgaaagtcatgatttttcaaagctcttaagtttccactcattatttactcaacatcagaccactcattttggaaaattaccccatggatacgatgaatgtggtgatgcctttagctgttactcattctttactcaacctcagagaattcacagtggagaaaaaccatatgcatgcaatgactgtggaaaagcctttagccacgacttctttctcagtgaacatcaaagaactcatattggggagaaaccttatgaatgtaaggaatgtaacaaagctttcagacagagtgctcaccttgctcaacatcagaggatccacactggagagaaaccgtttgcgtgcaatgaatgtgggaaggcctttagccgttatgccttccttgttgaacatcagagaattcacacaggtgagaaaccatatgaatgtaaagaatgtaataaagccttcagacagagtgctcaccttaatcaacatcagaggattcacactggagagaaaccctatgaatgtaatcagtgtggaaaagccttcagcagacgcatagcccttactctacatcaaagaattcacacaggagagaaacccttcaaatgtagtgaatgtgggaagacctttggctatcgctcacacctgaatcaacatcagagaattcataccggagaaaagccctatgaatgcatcaaatgtgggaagttttttaggactgactcacaacttaatcgacatcatagaattcacactggagagagaccatttgaatgcagtaaatgtgggaaagccttcagtgatgctttagttctaattcaccataagagaagtcatgcaggagagaaaccctatgaatgtaacaaatgtggaaaggccttcagttgtggctcatatcttaatcaacatcaaagaattcatactggagagaaaccctatgaatgtagtgaatgtgggaaggcttttcatcagatcttgtccctaagactacaccagagaattcacgctggagaaaaaccttataaatgtaacgaatgtgggaataattttagctgtgtctcagcccttagacgacatcagagaattcataatagagaaacgctc

SEQ ID NO: 5780 - DNA, 1437 bp, Homo sapiens
  source 1..1437: mol_type = genomic DNA
atggctcttcctcagggtctattgacattcagggatgtggccatagaattctctcaggaggagtggaaatgcctggaccctgctcagaggactctatacagggacgtgatgctggagaattataggaacctggtctccctgggtatctcttccaaatgcacaatgaaggagttctcatcaacagcacaaggcaatacagaagtgatccacacagggacattgcaaagacatgaacgtcatcacattggagatttttccttccaggaaattgagaaagatattcataactttgagtttcagtggcaagaagatgaaagaaatggccatgaagcacccatgacaaaaatcaaaaaattgatgggtagtacagagcaatatgatcacaggcatgctggaaacaagcctattaaatatcagcttggatcaagctttcattcacatctgtctgaactccacatatttcagcccaaagggaaaattaataatcaagtggagaagtctatcaacgatgcttcctcggtttcaacagcccaaagaatttcttgtaggcccaaaacccatatatctaataactatggggataattttctgaattattcattactcacacaaagacaggaagtacgcatgagagaaaaatctttccaatgtattgagagtggcaaagcctttaattatagctcactcttaaggaaacatcagattattcatctaggagagaaacaatataaatgtgatgtatgtgacaaggtctttattcggaagcgataccttgcacgccatcgtagatgtcacactggtgagaaaccttacaagtgtaatgagtgtggcaagtccttcagtcagatgtcatcccttacatatcatcatcgacttcatactggagagaaaccttacaaatgtgaagaatgtgacaaagctttcagacacaattcagcccttcaaagacataggagaattcatactggagagaaaccacataagtgtaatgagtgtggcaagacctttagtcagaagtcataccttgcatgccatcgtagcattcatactggaaagaaaccttacgaatgtgaagaatgtgacaaagctttcagtttcaaatcaaaccttgaaagtcataggataactcatactggagagaaaccatacaagtgtaatgattgtggcaagaccttcagtcatatgtcaacccttacatgccatcgtagacttcatactggagagaaaccttacaagtgtgaagaatgtgatgaagctttccgtttcaaatcaagtcttgaaagacataggagaattcataatggagagaaactgtacaaatgtaatgagtgtggcaagaccttcagtcaggagttatcccttacctgccattgtagacttcatagtggagagaaaccttgcaagtgtggagaatgtgacaaggcttacagtttcaaa

SEQ ID NO: 5781 - DNA, 357 bp, Homo sapiens
  source 1..357: mol_type = genomic DNA
atggctcttcctcagggtctattgacattcagggatgtggccatagaattctctcaggaggagtggaaatgcctggaccctgctcagaggactctatacagggacgtgatgctggagaattataggaacctggtctccctgggttcttgctgtgcggttgaagttggtcttgatctcctgggctcaagacatcctcctcggcctcccaagaagctgggattacaggcgccaacccccgtacctaactattggcttttgtttttaaactttttgcatatgtgtgtccttagggctaatatgagtcttctgtggacaacaagtagttggttcctgttgattgagtcagtctttgccttc

SEQ ID NO: 5782 - DNA, 156 bp, Homo sapiens
  source 1..156: mol_type = genomic DNA
atggctcttcctcagggtctattgacattcagggatgtggccatagaattctctcaggaggagtggaaatgcctggaccctgctcagaggactctatacagggacgtgatgctggagaattataggaacctggtctccctggatggagttttcctc

SEQ ID NO: 5783 - DNA, 1329 bp, Homo sapiens
  source 1..1329: mol_type = genomic DNA
atgctggagaattataggaacctggtctccctgggtatctcttccaaatgcacaatgaaggagttctcatcaacagcacaaggcaatacagaagtgatccacacagggacattgcaaagacatgaacgtcatcacattggagatttttccttccaggaaattgagaaagatattcataactttgagtttcagtggcaagaagatgaaagaaatggccatgaagcacccatgacaaaaatcaaaaaattgatgggtagtacagagcaatatgatcacaggcatgctggaaacaagcctattaaatatcagcttggatcaagctttcattcacatctgtctgaactccacatatttcagcccaaagggaaaattaataatcaagtggagaagtctatcaacgatgcttcctcggtttcaacagcccaaagaatttcttgtaggcccaaaacccatatatctaataactatggggataattttctgaattattcattactcacacaaagacaggaagtacgcatgagagaaaaatctttccaatgtattgagagtggcaaagcctttaattatagctcactcttaaggaaacatcagattattcatctaggagagaaacaatataaatgtgatgtatgtgacaaggtctttattcggaagcgataccttgcacgccatcgtagatgtcacactggtgagaaaccttacaagtgtaatgagtgtggcaagtccttcagtcagatgtcatcccttacatatcatcatcgacttcatactggagagaaaccttacaaatgtgaagaatgtgacaaagctttcagacacaattcagcccttcaaagacataggagaattcatactggagagaaaccacataagtgtaatgagtgtggcaagacctttagtcagaagtcataccttgcatgccatcgtagcattcatactggaaagaaaccttacgaatgtgaagaatgtgacaaagctttcagtttcaaatcaaaccttgaaagtcataggataactcatactggagagaaaccatacaagtgtaatgattgtggcaagaccttcagtcatatgtcaacccttacatgccatcgtagacttcatactggagagaaaccttacaagtgtgaagaatgtgatgaagctttccgtttcaaatcaagtcttgaaagacataggagaattcataatggagagaaactgtacaaatgtaatgagtgtggcaagaccttcagtcaggagttatcccttacctgccattgtagacttcatagtggagagaaaccttgcaagtgtggagaatgtgacaaggcttacagtttcaaa

SEQ ID NO: 5784 - DNA, 150 bp, Homo sapiens
  source 1..150: mol_type = genomic DNA
atggctcttcctcagggtctattgacattcagggatgtggccatagaattctctcaggaggagtggaaatgcctggaccctgctcagaggactctatacagggacgtgatgctggagaattataggaacctggtctccctgggatttcta

SEQ ID NO: 5785 - DNA, 1689 bp, Homo sapiens
  source 1..1689: mol_type = genomic DNA
atggccaactcaagtttcattggggatcatgtccatggagctcctcatgctgtcatgccagaagtggaattccctgaccaattctttacagttctaaccatggaccatgaactggtgacactcagggatgtggtcatcaacttctctcaggaggaatgggaatatctggattctgctcagaggaacttgtactgggatgtgatgatggagaactacagcaacttactctcactggatttggagtccaggaatgagactaagcatttatctgtaggaaaagatattattcaaaacactggttctcagtgggaggtaatggaaagtagcaagttatgtggccttgaaggttccattttcagaaatgactggcaaagcaaaagcaagattgacttacaaggacctgaagtgggatatttcagtcaaatgaaaatcatctctgaaaatgtgcccagttacaaaactcatgaatctcttactttacctcggagaactcatgacagtgagaagccctatgaatacaaggaatatgagaaggtcttcagttgtgacttagagtttgatgaatatcagaaaatacatactggtggaaaaaactatgaatgtaatcaatgttggaaaacctttgggatagataactccagtatgttacaactgaatattcatactggtgtgaaaccttgtaaatatatggaatatgggaatacatgtagtttttataaagactttaatgtataccagaaaattcataatgagaagttctataaatgtaaggaatacagaaggacctttgaaagagttggaaaagttactccacttcaaagagttcatgatggtgagaaacactttgaatgctcattctgtgggaaatcctttagagtgcatgcacaacttactcgacatcagaaaatccatactgatgagaaaacttacaaatgtatggaatgtggcaaggacttcagatttcattcacagcttaccgaacatcagagaattcatactggtgagaaaccctacaaatgtatgcactgtgagaaggtttttagaattagttcacagctcattgaacatcagagaattcacactggtgagaaaccttatgcatgtaaggaatgtgggaaggcttttggagtatgtagagaacttgctcgtcatcagagaattcatactggtaagaaaccctatgaatgcaaagcatgtggaaaggtctttagaaatagttcatccctgactagacatcagaggattcatactggtgaaaaaccctataaatgtaaagaatgtgagaaagcatttggagtaggtagtgaacttactcgacatgaaagaattcacagtggtcaaaaaccttatgaatgtaaggagtgtggaaagttctttagacttacgtcagcccttattcaacatcaaagaattcatagtggtgagaaaccttatgaatgtaaggtatgtgggaaggcctttagacatagttcagcccttacagaacatcagagaattcatactggagaaaaaccctatgaatgcaaggcatgtgggaaggcctttagacatagttcatcctttaccaaacatcagcgcattcatactgatgataaaccctatgaatgtaaggagtgtgggaattcctttagtgttgttgggcatcttacttgccaaccgaaaatttacactggtgagaaatcatttgac

SEQ ID NO: 5786 - DNA, 1374 bp, Homo sapiens
  source 1..1374: mol_type = genomic DNA
atggaaagtagcaagttatgtggccttgaaggttccattttcagaaatgactggcaaagcaaaagcaagattgacttacaaggacctgaagtgggatatttcagtcaaatgaaaatcatctctgaaaatgtgcccagttacaaaactcatgaatctcttactttacctcggagaactcatgacagtgagaagccctatgaatacaaggaatatgagaaggtcttcagttgtgacttagagtttgatgaatatcagaaaatacatactggtggaaaaaactatgaatgtaatcaatgttggaaaacctttgggatagataactccagtatgttacaactgaatattcatactggtgtgaaaccttgtaaatatatggaatatgggaatacatgtagtttttataaagactttaatgtataccagaaaattcataatgagaagttctataaatgtaaggaatacagaaggacctttgaaagagttggaaaagttactccacttcaaagagttcatgatggtgagaaacactttgaatgctcattctgtgggaaatcctttagagtgcatgcacaacttactcgacatcagaaaatccatactgatgagaaaacttacaaatgtatggaatgtggcaaggacttcagatttcattcacagcttaccgaacatcagagaattcatactggtgagaaaccctacaaatgtatgcactgtgagaaggtttttagaattagttcacagctcattgaacatcagagaattcacactggtgagaaaccttatgcatgtaaggaatgtgggaaggcttttggagtatgtagagaacttgctcgtcatcagagaattcatactggtaagaaaccctatgaatgcaaagcatgtggaaaggtctttagaaatagttcatccctgactagacatcagaggattcatactggtgaaaaaccctataaatgtaaagaatgtgagaaagcatttggagtaggtagtgaacttactcgacatgaaagaattcacagtggtcaaaaaccttatgaatgtaaggagtgtggaaagttctttagacttacgtcagcccttattcaacatcaaagaattcatagtggtgagaaaccttatgaatgtaaggtatgtgggaaggcctttagacatagttcagcccttacagaacatcagagaattcatactggagaaaaaccctatgaatgcaaggcatgtgggaaggcctttagacatagttcatcctttaccaaacatcagcgcattcatactgatgataaaccctatgaatgtaaggagtgtgggaattcctttagtgttgttgggcatcttacttgccaaccgaaaatttacactggtgagaaatcatttgac

SEQ ID NO: 5787 - DNA, 1884 bp, Homo sapiens
  source 1..1884: mol_type = genomic DNA
atggcccttactcagggacccttgaaattcatggatgtggccatagagttctctcaggaagagtggaaatgcctggaccctgcgcagaggactttatacagggacgtgatgttggagaattataggaacctggtctccctgggaatctgtcttcctgacctgagtgttacctccatgttagagcaaaagagagatccctggactctgcagagtgaagagaaaatagcaaacgatccagacggcagggagtgcatcaaaggtgtgaacacagagaggagctctaaattgggaagtaatgcaggaaacaagccttgtaaaaatcaacttggattcacttttcagttacatctgagtgatctacagctatttcaagctgaaaggaaaatttctgggtgtaagcattttgaaaaacccgtcagtgacaattcctcagtttcaccgcttgaaaaaatttcttccagtgtcaaatcccaccttttaaataaatatagaaataattttgatcatgctccattacttccacaagaacagaaagcacacattagggaaaaagcttataaatgtaatgagcacggccaagtctttagagcatctgcaagccttactaaccaagtaatccataacgcagataatccttacaaatgcagtgaatgtggcaaggtctttagttgcagttcaaagcttgtgatacatcgaagaatgcatactggagagaagccttacaaatgtcatgaatgtggcaagctcttcagtagcaattcaaacctttcacaacatcaaagaattcatactggagagaagccttacaaatgtcatgaatgtgacaaggtctttcgaagcagttcaaagcttgcacaacatcaaagaattcatactggagagaagccttacaaatgtcatgaatgtgacaaggtcttcaatcaaattgcacaccttgtacgacatcaaaaaattcatactggagagaaaccttacagttgtaataaatgtggcaaggtctttagtcgccattcatatctagcagaacatcaaacggttcatactggtgagaaaccttacaaatgtgaagaatgtggcaaagcattttcagtgcgttccagcctcataacccatcagttaattcacactggaaggaaaccttacaaatgtaaagaatgtgacaaggtctttgggcgcaagtgtttcctgacctctcatcagagaattcatactagagagagaccttatggatgcagtcagtgtggcaagatctttagtcagaaatcagaccttatacgacatcgaaaaactcatactgatgagaagccttacaaatgtaataaatgtggcacagcgtttagagagttttcagaccttactgcccattttctaatccatagtggagagaaaccttatgaatgtaaagaatgtggcaaagtcttcaggtacaagtcttctctaaccagtcatcatagaattcatactggagagaagccttacaaatgtaacagatgtggcaaggtcttcagtcgcagttcaaacctggtatgccatcagaaaattcatacaggagaaaagccttacaaatgtaatcaatgtggcaaggtctttaatcaagcatcataccttacaagacatcaaataattcatactggagagaggccttacagatgtagtaaatgtggcaaagcatttcgagggtgttcaggccttactgcccatcttgcaatccatactgaaaagaaatctcatgagtgtaaagaatgtggcaagatcttcactcagaagtcttccctcaccaatcaccatagaattcacattggagagaaaccttacaaatgcaccctgtgcagtaaggtcttcagtcacaattctgaccttgcacagcatcagagagttcattca

SEQ ID NO: 5788 - DNA, 2013 bp, Homo sapiens
  source 1..2013: mol_type = genomic DNA
atggcagccacattccagcttccagggcaccaggagatgccgctgaccttccaggatgtggccgtgtacttctctcaggcggaggggcggcagctgggcccccagcagcgggcgctctaccgggatgtgatgctggagaactatgggaacgtggcctctctgggattccctgtccctaagccggagttgatctcccagctggagcaggggaaggaactttgggtcctgaatcttctgggagctgaggaaccagatatcttgaaaagctgccagaaagattctgaggttgggaccaagaaggaactatctattttaaaccaaaaattttccgaagaagtaaaaaccccagaatttgtatcaagaagactcttaagggataatgcacaggccgctgagtttcgggaagcatggggccgtgagggcaaactcaaagagcgcgtgggaaattctgccgggcagagtttgaacaaacccaatattcacaagagagttttaacagaagctaccgtgggcagggaaagatctttgggagaaagaacccaagagtgtagtgcatttgatagaaacttgaatctggaccaaaatgttgttagacttcaaagaaataaaacaggagagagggtctttaaatgtgatatatgcagcaaaaccttcaaatataattcagacctaagtagacaccagagaagtcacactggggagaagccgtacgaatgtggccggtgtgggcgagcctttactcacagctcaaatcttgttctgcaccatcacattcacactggaaataaaccatttaaatgtgatgaatgtgggaaaacttttggactcaattctcacctccgtcttcatcggagaattcacactggagaaaaaccctttggctgtggtgagtgtgggaaggctttcagtcgaagctcaactcttattcaacatcggatcattcacacaggagagaaaccctacaagtgtaatgaatgtggaagaggctttagccagagcccccagttaactcagcatcagagaattcacactggagagaagccgcatgaatgcagtcactgtgggaaggccttcagtcgaagctccagccttattcagcatgagagaattcacactggagagaagccccataaatgcaatcagtgtgggaaggccttcagtcagagctcaagccttttcctccatcatcgggttcatactggagagaaaccctatgtatgtaatgaatgcggcagagcctttggttttaactctcatcttactgaacacgtaaggattcacacaggagaaaaaccctatgtttgtaatgagtgcggcaaagcctttcgtcggagttccactcttgttcagcatcgaagagttcacactggggagaagccctaccagtgcgttgaatgtgggaaagctttcagccagagctcccagctcaccctacatcagcgagttcacactggagagaagccctatgactgtggtgactgtgggaaggccttcagccggaggtcaaccctcattcagcatcagaaagttcacagcggagagactcgtaagtgcagaaaacatggtccagcctttgttcatggctccagcctcacagcagatggacagattcccactggagagaagcacggcagagcctttaaccatggtgcaaatctcattctgcgctggacagttcacactggtgagaaatcctttggatgtaatgaatatggaaaagctttcagtcccacctcacgacccactgaagatcagataatgcatgctggggaaaagccctataaatgtcaagaatgtggaaacgccttcagtggaaagtcaacccttattcaacatcaggtaactcacactggtcagaaaccatgtcattgcagtgtgtatgggaaagccttcagccagagttcacagctcacaccacctcagcagactcgtgttggagagaaacctgctttaaatgatggctctaaaagatactttattcatatcaagaagattttccaagaaagacatttt

SEQ ID NO: 5789 - DNA, 1665 bp, Homo sapiens
  source 1..1665: mol_type = genomic DNA
atggcagcagccagactcctgccagtgccggcaggaccccaggccaagctgaccttcgaggatgtggctgtgctcctctcccaggatgaatgggaccgcctgtgccctgctcagaggggtctctacagaaatgtgatgatggaaacctatgggaatgtagtctcattgggacttccaggatccaagcctgacataatctcccagctggagcgaggggaagatccctgggtcctggacaggaagggggctaagaagagccagggcctgtggagtgactactcagacaacctcaaatatgaccacactacagcctgtacacaacaagacagtttatcttgtccatgggaatgtgaaaccaagggagagagtcaaaatacagacttgagtccgaagccattaatttcagagcaaacagtgattctggggaaaacacccttggggaggattgatcaagaaaataatgaaacaaagcaaagcttctgtctgagtccaaactctgttgaccaccgtgaagttcaggtcttaagccaaagcatgccactcactccgcaccaggcagtgcctagtggagagaggccctacatgtgtgttgagtgtgggaagtgctttggccggagttcccacctccttcagcatcagcgtatccacactggagagaagccctatgtgtgcagtgtatgtgggaaggccttcagccagagctcagtccttagtaaacacaggagaattcacacaggtgagaagccctatgagtgtaatgagtgtggaaaagcctttagagtgagctcagatcttgctcagcatcacaagatacatacaggagagaagcctcacgaatgtcttgagtgtcggaaagccttcactcaactctcacatctcattcagcaccagcggatccacacgggagaaaggccatatgtgtgtccgttgtgtgggaaagccttcaaccatagcactgttctgcggagccaccagagggtacacactggggagaagcctcacaggtgcaatgagtgtgggaaaaccttcagtgtgaagaggacactgctgcagcaccagaggatccacaccggggagaagccctacacgtgcagcgagtgtgggaaggccttcagcgaccgctcagtcctcattcagcaccacaacgtgcacaccggggagaagccctatgagtgcagtgagtgtgggaagaccttcagccaccgctccacactgatgaatcacgagcggatccacaccgaggaaaagccctatgcatgctacgaatgtgggaaggccttcgttcagcactcacacctgatccagcaccagagagtccacactggggagaagccctatgtgtgtggtgaatgtgggcacgccttcagtgcacgccggtctctgatccagcatgagagaatccacacaggtgaaaagcccttccagtgcacagaatgtggcaaagccttcagcctgaaagcaactctgattgtgcacctgaggacccacacgggcgagaagccatatgagtgcaatagctgcgggaaggccttcagccagtactcagtgctcatccagcaccagcggatccacacaggcgagaagccctatgagtgcggggagtgtgggcgtgccttcaaccagcatggccacctaatccagcaccagaaagtgcacagaaagttg

SEQ ID NO: 5790 - DNA, 1680 bp, Homo sapiens
  source 1..1680: mol_type = genomic DNA
atggcagcagccagactcctgccagtgccggcaggaccccagcccctgtcgttccaggccaagctgaccttcgaggatgtggctgtgctcctctcccaggatgaatgggaccgcctgtgccctgctcagaggggtctctacagaaatgtgatgatggaaacctatgggaatgtagtctcattgggacttccaggatccaagcctgacataatctcccagctggagcgaggggaagatccctgggtcctggacaggaagggggctaagaagagccagggcctgtggagtgactactcagacaacctcaaatatgaccacactacagcctgtacacaacaagacagtttatcttgtccatgggaatgtgaaaccaagggagagagtcaaaatacagacttgagtccgaagccattaatttcagagcaaacagtgattctggggaaaacacccttggggaggattgatcaagaaaataatgaaacaaagcaaagcttctgtctgagtccaaactctgttgaccaccgtgaagttcaggtcttaagccaaagcatgccactcactccgcaccaggcagtgcctagtggagagaggccctacatgtgtgttgagtgtgggaagtgctttggccggagttcccacctccttcagcatcagcgtatccacactggagagaagccctatgtgtgcagtgtatgtgggaaggccttcagccagagctcagtccttagtaaacacaggagaattcacacaggtgagaagccctatgagtgtaatgagtgtggaaaagcctttagagtgagctcagatcttgctcagcatcacaagatacatacaggagagaagcctcacgaatgtcttgagtgtcggaaagccttcactcaactctcacatctcattcagcaccagcggatccacacgggagaaaggccatatgtgtgtccgttgtgtgggaaagccttcaaccatagcactgttctgcggagccaccagagggtacacactggggagaagcctcacaggtgcaatgagtgtgggaaaaccttcagtgtgaagaggacactgctgcagcaccagaggatccacaccggggagaagccctacacgtgcagcgagtgtgggaaggccttcagcgaccgctcagtcctcattcagcaccacaacgtgcacaccggggagaagccctatgagtgcagtgagtgtgggaagaccttcagccaccgctccacactgatgaatcacgagcggatccacaccgaggaaaagccctatgcatgctacgaatgtgggaaggccttcgttcagcactcacacctgatccagcaccagagagtccacactggggagaagccctatgtgtgtggtgaatgtgggcacgccttcagtgcacgccggtctctgatccagcatgagagaatccacacaggtgaaaagcccttccagtgcacagaatgtggcaaagccttcagcctgaaagcaactctgattgtgcacctgaggacccacacgggcgagaagccatatgagtgcaatagctgcgggaaggccttcagccagtactcagtgctcatccagcaccagcggatccacacaggcgagaagccctatgagtgcggggagtgtgggcgtgccttcaaccagcatggccacctaatccagcaccagaaagtgcacagaaagttg

SEQ ID NO: 5791 - DNA, 1467 bp, Homo sapiens
  source 1..1467: mol_type = genomic DNA
atgctggacatgggagataggaaagaggtgaaaatgatccccaagtcctcgttcagcatcaacagcctggtgcccgaggcggtccagaacgacaaccaccacgcgagccacggccaccacaacagccaccacccccagcaccaccaccaccaccaccaccatcaccaccacccgccgccgcccgccccgcaaccgccgccgccgccgcagcagcagcagccgccgccgccgccgcccccggcaccgcagcccccccagacgcggggcgccccggccgccgacgacgacaagggcccccagcagctgctgctcccgccgccgccaccgccaccaccggccgccgccctggacggggctaaagcggacgggctgggcggcaagggcgagccgggcggcgggccgggggagctggcgcccgtcgggccggacgagaaggagaagggcgccggcgccgggggggaggagaagaagggggcgggcgagggcggcaaggacggggaggggggcaaggagggcgagaagaagaacggcaagtacgagaagccgccgttcagctacaacgcgctcatcatgatggccatccggcagagccccgagaagcggctcacgctcaacggcatctacgagttcatcatgaagaacttcccttactaccgcgagaacaagcagggctggcagaactccatccgccacaatctgtccctcaacaagtgcttcgtgaaggtgccgcgccactacgacgacccgggcaagggcaactactggatgctggacccgtcgagcgacgacgtgttcatcggcggcaccacgggcaagctgcggcgccgctccaccacctcgcgggccaagctggccttcaagcgcggtgcgcgcctcacctccaccggcctcaccttcatggaccgcgccggctccctctactggcccatgtcgcccttcctgtccctgcaccacccccgcgccagcagcactttgagttacaacggcaccacgtcggcctaccccagccaccccatgccctacagctccgtgttgactcagaactcgctgggcaacaaccactccttctccaccgccaacggcctgagcgtggaccggctggtcaacggggagatcccgtacgccacgcaccacctcacggccgccgcgctagccgcctcggtgccctgcggcctgtcggtgccctgctctgggacctactccctcaacccctgctccgtcaacctgctcgcgggccagaccagttactttttcccccacgtcccgcacccgtcaatgacttcgcagagcagcacgtccatgagcgccagggccgcgtcctcctccacgtcgccgcaggccccctcgaccctgccctgtgagtctttaagaccctctttgccaagttttacgacgggactgtctgggggactgtctgattatttcacacatcaaaatcaggggtcttcttccaaccctttaatacat

SEQ ID NO: 5792 - DNA, 2319 bp, Homo sapiens
  source 1..2319: mol_type = genomic DNA
atgtctcgccgcaagcaaggcaaaccccagcacttaagcaaacgggaattctcgcccgagcctcttgaagccattcttacagatgatgaaccagaccacggcccgttgggagctccagaaggggatcatgacctcctcacctgtgggcagtgccagatgaacttcccattgggggacattcttatttttatcgagcacaaacggaaacaatgcaatggcagcctctgcttagaaaaagctgtggataagccaccttccccttcaccaatcgagatgaaaaaagcatccaatcccgtggaggttggcatccaggtcacgccagaggatgacgattgtttatcaacgtcatctagaggaatttgccccaaacaggaacacatagcagataaacttctgcactggaggggcctctcctcccctcgttctgcacatggagctctaatccccacgcctgggatgagtgcagaatatgccccgcagggtatttgtaaagatgagcccagcagctacacatgtacaacttgcaaacagccattcaccagtgcatggtttctcttgcaacacgcacagaacactcatggattaagaatctacttagaaagcgaacacggaagtcccctgaccccgcgggttggtatcccttcaggactaggtgcagaatgtccttcccagccacctctccatgggattcatattgcagacaataacccctttaacctgctaagaataccaggatcagtatcgagagaggcttccggcctggcagaagggcgctttccacccactccccccctgtttagtccaccaccgagacatcacttggacccccaccgcatagagcgcctgggggcggaagagatggccctggccacccatcacccgagtgcctttgacagggtgctgcggttgaatccaatggctatggagcctcccgccatggatttctctaggagacttagagagctggcagggaacacgtctagcccaccgctgtccccaggccggcccagccctatgcaaaggttactgcaaccattccagccaggtagcaagccgcccttcctggcgacgccccccctccctcctctgcaatccgcccctcctccctcccagcccccggtcaagtccaagtcatgcgagttctgcggcaagacgttcaaatttcagagcaacctggtggtgcaccggcgcagccacacgggcgagaagccctacaagtgcaacctgtgcgaccacgcgtgcacccaggccagcaagctgaagcgccacatgaagacgcacatgcacaaatcgtcccccatgacggtcaagtccgacgacggtctctccaccgccagctccccggaacccggcaccagcgacttggtgggcagcgccagcagcgcgctcaagtccgtggtggccaagttcaagagcgagaacgaccccaacctgatcccggagaacggggacgaggaggaagaggaggacgacgaggaagaggaagaagaggaggaagaggaggaggaggagctgacggagagcgagagggtggactacggcttcgggctgagcctggaggcggcgcgccaccacgagaacagctcgcggggcgcggtcgtgggcgtgggcgacgagagccgcgccctgcccgacgtcatgcagggcatggtgctcagctccatgcagcacttcagcgaggccttccaccaggtcctgggcgagaagcataagcgcggccacctggccgaggccgagggccacagggacacttgcgacgaagactcggtggccggcgagtcggaccgcatagacgatggcactgttaatggccgcggctgctccccgggcgagtcggcctcggggggcctgtccaaaaagctgctgctgggcagccccagctcgctgagccccttctctaagcgcatcaagctcgagaaggagttcgacctgcccccggccgcgatgcccaacacggagaacgtgtactcgcagtggctcgccggctacgcggcctccaggcagctcaaagatcccttccttagcttcggagactccagacaatcgccttttgcctcctcgtcggagcactcctcggagaacgggagtttgcgcttctccacaccgcccggggagctggacggagggatctcggggcgcagcggcacgggaagtggagggagcacgccccatattagtggtccgggcccgggcaggcccagctcaaaagagggcagacgcagcgacacttgttcttcacacacccccattcggcgtagtacccagagagctcaagatgtgtggcagttttcggatggaagctcgagagcccttaagttc

SEQ ID NO: 5793 - DNA, 2403 bp, Homo sapiens
  source 1..2403: mol_type = genomic DNA
atgtctcgccgcaagcaaggcaaaccccagcacttaagcaaacgggaattctcgcccgagcctcttgaagccattcttacagatgatgaaccagaccacggcccgttgggagctccagaaggggatcatgacctcctcacctgtgggcagtgccagatgaacttcccattgggggacattcttatttttatcgagcacaaacggaaacaatgcaatggcagcctctgcttagaaaaagctgtggataagccaccttccccttcaccaatcgagatgaaaaaagcatccaatcccgtggaggttggcatccaggtcacgccagaggatgacgattgtttatcaacgtcatctagaggaatttgccccaaacaggaacacatagcaggtaaagatgagcccagcagctacacatgtacaacttgcaaacagccattcaccagtgcatggtttctcttgcaacacgcacagaacactcatggattaagaatctacttagaaagcgaacacggaagtcccctgaccccgcgggttggtatcccttcaggactaggtgcagaatgtccttcccagccacctctccatgggattcatattgcagacaataacccctttaacctgctaagaataccaggatcagtatcgagagaggcttccggcctggcagaagggcgctttccacccactccccccctgtttagtccaccaccgagacatcacttggacccccaccgcatagagcgcctgggggcggaagagatggccctggccacccatcacccgagtgcctttgacagggtgctgcggttgaatccaatggctatggagcctcccgccatggatttctctaggagacttagagagctggcagggaacacgtctagcccaccgctgtccccaggccggcccagccctatgcaaaggttactgcaaccattccagccaggtagcaagccgcccttcctggcgacgccccccctccctcctctgcaatccgcccctcctccctcccagcccccggtcaagtccaagtcatgcgagttctgcggcaagacgttcaaatttcagagcaacctggtggtgcaccggcgcagccacacgggcgagaagccctacaagtgcaacctgtgcgaccacgcgtgcacccaggccagcaagctgaagcgccacatgaagacgcacatgcacaaatcgtcccccatgacggtcaagtccgacgacggtctctccaccgccagctccccggaacccggcaccagcgacttggtgggcagcgccagcagcgcgctcaagtccgtggtggccaagttcaagagcgagaacgaccccaacctgatcccggagaacggggacgaggaggaagaggaggacgacgaggaagaggaagaagaggaggaagaggaggaggaggagctgacggagagcgagagggtggactacggcttcgggctgagcctggaggcggcgcgccaccacgagaacagctcgcggggcgcggtcgtgggcgtgggcgacgagagccgcgccctgcccgacgtcatgcagggcatggtgctcagctccatgcagcacttcagcgaggccttccaccaggtcctgggcgagaagcataagcgcggccacctggccgaggccgagggccacagggacacttgcgacgaagactcggtggccggcgagtcggaccgcatagacgatggcactgttaatggccgcggctgctccccgggcgagtcggcctcggggggcctgtccaaaaagctgctgctgggcagccccagctcgctgagccccttctctaagcgcatcaagctcgagaaggagttcgacctgcccccggccgcgatgcccaacacggagaacgtgtactcgcagtggctcgccggctacgcggcctccaggcagctcaaagatcccttccttagcttcggagactccagacaatcgccttttgcctcctcgtcggagcactcctcggagaacgggagtttgcgcttctccacaccgcccggggagctggacggagggatctcggggcgcagcggcacgggaagtggagggagcacgccccatattagtggtccgggcccgggcaggcccagctcaaaagagggcagacgcagcgacacttgtgagtactgtgggaaagtcttcaagaactgtagcaatctcactgtccacaggagaagccacacgggcgaaaggccttataaatgcgagctgtgcaactatgcctgtgcccagagtagcaagctcaccaggcacatgaaaacgcatggccaggtggggaaggacgtttacaaatgtgaaatttgtaagatgccttttagcgtgtacagtaccctggagaaacacatgaaaaaatggcacagtgatcgagtgttgaataatgatataaaaactgaa

SEQ ID NO: 5794 - DNA, 729 bp, Homo sapiens
  source 1..729: mol_type = genomic DNA
atgtctcgccgcaagcaaggcaaaccccagcacttaagcaaacgggaattctcgcccgagcctcttgaagccattcttacagatgatgaaccagaccacggcccgttgggagctccagaaggggatcatgacctcctcacctgtgggcagtgccagatgaacttcccattgggggacattcttatttttatcgagcacaaacggaaacaatgcaatggcagcctctgcttagaaaaagctgtggataagccaccttccccttcaccaatcgagatgaaaaaagcatccaatcccgtggaggttggcatccaggtcacgccagaggatgacgattgtttatcaacgtcatctagaggaatttgccccaaacaggaacacatagcagataaacttctgcactggaggggcctctcctcccctcgttctgcacatggagctctaatccccacgcctgggatgagtgcagaatatgccccgcagggtatttgtaaagatgagcccagcagctacacatgtacaacttgcaaacagccattcaccagtgcatggtttctcttgcaacacgcacagaacactcatggattaagaatctacttagaaagcgaacacggaagtcccctgaccccgcgggttcttcacacacccccattcggcgtagtacccagagagctcaagatgtgtggcagttttcggatggaagctcgagagcccttaagttctgagaaaatt

SEQ ID NO: 5795 - DNA, 2505 bp, Homo sapiens
  source 1..2505: mol_type = genomic DNA
atgtctcgccgcaagcaaggcaaaccccagcacttaagcaaacgggaattctcgcccgagcctcttgaagccattcttacagatgatgaaccagaccacggcccgttgggagctccagaaggggatcatgacctcctcacctgtgggcagtgccagatgaacttcccattgggggacattcttatttttatcgagcacaaacggaaacaatgcaatggcagcctctgcttagaaaaagctgtggataagccaccttccccttcaccaatcgagatgaaaaaagcatccaatcccgtggaggttggcatccaggtcacgccagaggatgacgattgtttatcaacgtcatctagaggaatttgccccaaacaggaacacatagcagataaacttctgcactggaggggcctctcctcccctcgttctgcacatggagctctaatccccacgcctgggatgagtgcagaatatgccccgcagggtatttgtaaagatgagcccagcagctacacatgtacaacttgcaaacagccattcaccagtgcatggtttctcttgcaacacgcacagaacactcatggattaagaatctacttagaaagcgaacacggaagtcccctgaccccgcgggttggtatcccttcaggactaggtgcagaatgtccttcccagccacctctccatgggattcatattgcagacaataacccctttaacctgctaagaataccaggatcagtatcgagagaggcttccggcctggcagaagggcgctttccacccactccccccctgtttagtccaccaccgagacatcacttggacccccaccgcatagagcgcctgggggcggaagagatggccctggccacccatcacccgagtgcctttgacagggtgctgcggttgaatccaatggctatggagcctcccgccatggatttctctaggagacttagagagctggcagggaacacgtctagcccaccgctgtccccaggccggcccagccctatgcaaaggttactgcaaccattccagccaggtagcaagccgcccttcctggcgacgccccccctccctcctctgcaatccgcccctcctccctcccagcccccggtcaagtccaagtcatgcgagttctgcggcaagacgttcaaatttcagagcaacctggtggtgcaccggcgcagccacacgggcgagaagccctacaagtgcaacctgtgcgaccacgcgtgcacccaggccagcaagctgaagcgccacatgaagacgcacatgcacaaatcgtcccccatgacggtcaagtccgacgacggtctctccaccgccagctccccggaacccggcaccagcgacttggtgggcagcgccagcagcgcgctcaagtccgtggtggccaagttcaagagcgagaacgaccccaacctgatcccggagaacggggacgaggaggaagaggaggacgacgaggaagaggaagaagaggaggaagaggaggaggaggagctgacggagagcgagagggtggactacggcttcgggctgagcctggaggcggcgcgccaccacgagaacagctcgcggggcgcggtcgtgggcgtgggcgacgagagccgcgccctgcccgacgtcatgcagggcatggtgctcagctccatgcagcacttcagcgaggccttccaccaggtcctgggcgagaagcataagcgcggccacctggccgaggccgagggccacagggacacttgcgacgaagactcggtggccggcgagtcggaccgcatagacgatggcactgttaatggccgcggctgctccccgggcgagtcggcctcggggggcctgtccaaaaagctgctgctgggcagccccagctcgctgagccccttctctaagcgcatcaagctcgagaaggagttcgacctgcccccggccgcgatgcccaacacggagaacgtgtactcgcagtggctcgccggctacgcggcctccaggcagctcaaagatcccttccttagcttcggagactccagacaatcgccttttgcctcctcgtcggagcactcctcggagaacgggagtttgcgcttctccacaccgcccggggagctggacggagggatctcggggcgcagcggcacgggaagtggagggagcacgccccatattagtggtccgggcccgggcaggcccagctcaaaagagggcagacgcagcgacacttgtgagtactgtgggaaagtcttcaagaactgtagcaatctcactgtccacaggagaagccacacgggcgaaaggccttataaatgcgagctgtgcaactatgcctgtgcccagagtagcaagctcaccaggcacatgaaaacgcatggccaggtggggaaggacgtttacaaatgtgaaatttgtaagatgccttttagcgtgtacagtaccctggagaaacacatgaaaaaatggcacagtgatcgagtgttgaataatgatataaaaactgaa

SEQ ID NO: 5796 - DNA, 864 bp, Homo sapiens
  source 1..864: mol_type = genomic DNA
atggagcctccggaccagtgtagccagtatatgaccagcttgctcagccctgcagtcgacgacgagaaagaactacaggatatgaatgctatggtgctgtcgcttactgaagaggtcaaagaggaggaagaggatgcacagcctgagcctgagcaaggcacagcagcaggagaaaagttaaagtcggcaggagcccaaggcggagaagaaaaagatggcggcggagaagaaaaagatggcggcggcgccggagttcctggccacctatgggaaggagacctcgagggcaccagcggcagcgatggcaacgttgaggacagcgaccagagcgagaaggaacctgggcagcagtattcgcgcccacagggcgccgtcggggggctggagcctggcaacgcgcagcagcccaacgtccacgccttcaccccattgcagctgcaggagctggagcgcattttccaacgcgagcagttccccagtgagttcctgcgaaggaggctggcaagaagcatgaatgtgactgaactcgcagtgcagatttggtttgagaatagaagagccaaatggaggagacatcagagggcattaatggcaagaaacatgctgcccttcatggcagtgggccagcctgtcatggtaaccgcagctgaggccataacggcacccttgttcatcagcgggatgagagatgattacttctgggaccacagccattccagcagcctgtgtttccccatgccaccctttcctcctccgtccttgccccttccactcatgcttcttccacctatgccacccgctggccaggctgaatttggcccattcccttttgttatcgtgccttctttcacattccccaatgtc

SEQ ID NO: 5797 - DNA, 552 bp, Homo sapiens
  source 1..552: mol_type = genomic DNA
atggcgcgttcgctcgtccacgacaccgtgttctactgcctgagtgtataccaggtaaaaataagccccacacctcagctgggggcagcatcaagcgcagaaggccatgttggccaaggagctccaggcctcatgggtaatatgaaccctgagggcggtgtgaaccacgagaacggcatgaaccgcgatggcggcatgatccccgagggcggcggtggaaaccaggagcctcggcagcagccgcagcccccgccggaggagccggcccaggcggccatggagggtccgcagcccgagaacatgcagccacgaactcggcgcacgaagttcacgctgttgcaggtggaggagctggaaagtgttttccgacacactcaataccctgatgtgcccacaagaagggaacttgccgaaaacttaggtgtgactgaagacaaagtgcgggtttggtttaagaataaaagggccagatgtaggcgacatcagagagaattaatgctcgccaatgaactacgtgctgacccagacgactgtgtctacatcgtcgtggac

SEQ ID NO: 5798 - DNA, 2682 bp, Homo sapiens
  source 1..2682: mol_type = genomic DNA
atgtcccgccgcaaacagggcaacccgcagcacttgtcccagagggagctcatcaccccagaggctgaccatgtggaggccgccatcctcgaagaagacgagggtctggagatagaggagccaagtggcctggggctgatggtgggtggccccgaccctgacctgctcacctgtggccagtgtcaaatgaacttccccttgggggacatcctggtttttatagagcacaaaaggaagcagtgtggcggcagcttgggtgcctgctatgacaaggccctggacaaggacagcccgccaccctcctcacgctccgagctcaggaaagtgtccgagccggtggagatcgggatccaagtcacccccgacgaagatgaccacctgctctcacccacgaaaggcatctgtcccaagcaggagaacattgcagggccgtgcaggcctgcccagctgccagcggtggcccccatagctgcctcctcccaccctcactcatccgtgatcacttcacctctgcgtgccctgggcgctctcccgccctgcctccccctgccgtgctgcagcgcgcgcccggtctcgggtgacgggactcagggtgagggtcagacggaggctccctttggatgccagtgtcagttgtcaggtaaagatgagccttccagctacatttgcacaacatgcaagcagcccttcaacagcgcgtggttcctgctgcagcacgcgcagaacacgcacggcttccgcatctacctggagcccgggccggccagcagctcgctcacgccgcggctcaccatcccgccgccgctcgggccggaggccgtggcgcagtccccgctcatgaatttcctgggcgacagcaaccccttcaacctgctgcgcatgacgggccccatcctgcgggaccacccgggcttcggcgagggccgcctgccgggcacgccgcctctcttcagtcccccgccgcgccaccacctggacccgcaccgcctcagtgccgaggagatggggctcgtcgcccagcaccccagtgccttcgaccgagtcatgcgcctgaaccccatggccatcgactcgcccgccatggacttctcgcggcggctccgcgagctggcgggcaacagctccacgccgccgcccgtgtccccgggccgcggcaaccctatgcaccggctcctgaaccccttccagcccagccccaagtccccgttcctgagcacgccgccgctgccgcccatgccccctggcggcacgccgcccccgcagccgccagccaagagcaagtcgtgcgagttctgcggcaagaccttcaagttccagagcaatctcatcgtgcaccggcgcagtcacacgggcgagaagccctacaagtgccagctgtgcgaccacgcgtgctcgcaggccagcaagctcaagcgccacatgaagacgcacatgcacaaggccggctcgctggccggccgctccgacgacgggctctcggccgccagctcccccgagcccggcaccagcgagctggcgggcgagggcctcaaggcggccgacggtgacttccgccaccacgagagcgacccgtcgctgggccacgagccggaggaggaggacgaggaggaggaggaggaggaggaggagctgctactggagaacgagagccggcccgagtcgagcttcagcatggactcggagctgagccgcaaccgcgagaacggcggtggtggggtgcccggggtcccgggcgcggggggcggcgcggccaaggcgctggctgacgagaaggcgctggtgctgggcaaggtcatggagaacgtgggcctaggcgcactgccgcagtacggcgagctcctggccgacaagcagaagcgcggcgccttcctgaagcgtgcggcgggcggcggggacgcgggcgacgacgacgacgcgggcggctgcggggacgcgggcgcgggcggcgcggtcaacgggcgcgggggcggcttcgcgccaggcaccgagcccttccccgggctcttcccgcgcaagcccgcgccgctgcccagccccgggctcaacagcgccgccaagcgcatcaaggtggagaaggacctggagctgccgcccgccgcgctcatcccgtccgagaacgtgtactcgcagtggctggtgggctacgcggcgtcgcggcacttcatgaaggaccccttcctgggcttcacggacgcacgacagtcgcccttcgccacgtcgtccgagcactcgtccgagaacggcagcctgcgcttctccacgccgcccggggacctgctggacggcggcctctcgggccgcagcggcacggccagcggaggcagcaccccgcacctgggcggcccgggccccgggcggcccagctccaaggagggccgccgcagcgacacgtgcgagtactgcggcaaggtgttcaagaactgcagcaacttgacggtgcaccggcggagccacaccggcgagcggccttacaagtgcgagctgtgcaactacgcgtgcgcgcagagcagcaagctcacgcgccacatgaagacgcacgggcagatcggcaaggaggtgtaccgctgcgacatctgccagatgcccttcagcgtctacagcaccctggagaaacacatgaaaaagtggcacggcgagcacttgctgactaacgacgtcaaaatcgagcaggccgagaggagc

SEQ ID NO: 5799 - DNA, 2469 bp, Homo sapiens
  source 1..2469: mol_type = genomic DNA
atgtcccgccgcaaacagggcaacccgcagcacttgtcccagagggagctcatcaccccagaggctgaccatgtggaggccgccatcctcgaagaagacgagggtctggagatagaggagccaagtggcctggggctgatggtgggtggccccgaccctgacctgctcacctgtggccagtgtcaaatgaacttccccttgggggacatcctggtttttatagagcacaaaaggaagcagtgtggcggcagcttgggtgcctgctatgacaaggccctggacaaggacagcccgccaccctcctcacgctccgagctcaggaaagtgtccgagccggtggagatcgggatccaagtcacccccgacgaagatgaccacctgctctcacccacgaaaggcatctgtcccaagcaggagaacattgcaggtaaagatgagccttccagctacatttgcacaacatgcaagcagcccttcaacagcgcgtggttcctgctgcagcacgcgcagaacacgcacggcttccgcatctacctggagcccgggccggccagcagctcgctcacgccgcggctcaccatcccgccgccgctcgggccggaggccgtggcgcagtccccgctcatgaatttcctgggcgacagcaaccccttcaacctgctgcgcatgacgggccccatcctgcgggaccacccgggcttcggcgagggccgcctgccgggcacgccgcctctcttcagtcccccgccgcgccaccacctggacccgcaccgcctcagtgccgaggagatggggctcgtcgcccagcaccccagtgccttcgaccgagtcatgcgcctgaaccccatggccatcgactcgcccgccatggacttctcgcggcggctccgcgagctggcgggcaacagctccacgccgccgcccgtgtccccgggccgcggcaaccctatgcaccggctcctgaaccccttccagcccagccccaagtccccgttcctgagcacgccgccgctgccgcccatgccccctggcggcacgccgcccccgcagccgccagccaagagcaagtcgtgcgagttctgcggcaagaccttcaagttccagagcaatctcatcgtgcaccggcgcagtcacacgggcgagaagccctacaagtgccagctgtgcgaccacgcgtgctcgcaggccagcaagctcaagcgccacatgaagacgcacatgcacaaggccggctcgctggccggccgctccgacgacgggctctcggccgccagctcccccgagcccggcaccagcgagctggcgggcgagggcctcaaggcggccgacggtgacttccgccaccacgagagcgacccgtcgctgggccacgagccggaggaggaggacgaggaggaggaggaggaggaggaggagctgctactggagaacgagagccggcccgagtcgagcttcagcatggactcggagctgagccgcaaccgcgagaacggcggtggtggggtgcccggggtcccgggcgcggggggcggcgcggccaaggcgctggctgacgagaaggcgctggtgctgggcaaggtcatggagaacgtgggcctaggcgcactgccgcagtacggcgagctcctggccgacaagcagaagcgcggcgccttcctgaagcgtgcggcgggcggcggggacgcgggcgacgacgacgacgcgggcggctgcggggacgcgggcgcgggcggcgcggtcaacgggcgcgggggcggcttcgcgccaggcaccgagcccttccccgggctcttcccgcgcaagcccgcgccgctgcccagccccgggctcaacagcgccgccaagcgcatcaaggtggagaaggacctggagctgccgcccgccgcgctcatcccgtccgagaacgtgtactcgcagtggctggtgggctacgcggcgtcgcggcacttcatgaaggaccccttcctgggcttcacggacgcacgacagtcgcccttcgccacgtcgtccgagcactcgtccgagaacggcagcctgcgcttctccacgccgcccggggacctgctggacggcggcctctcgggccgcagcggcacggccagcggaggcagcaccccgcacctgggcggcccgggccccgggcggcccagctccaaggagggccgccgcagcgacacgtgcgagtactgcggcaaggtgttcaagaactgcagcaacttgacggtgcaccggcggagccacaccggcgagcggccttacaagtgcgagctgtgcaactacgcgtgcgcgcagagcagcaagctcacgcgccacatgaagacgcacgggcagatcggcaaggaggtgtaccgctgcgacatctgccagatgcccttcagcgtctacagcaccctggagaaacacatgaaaaagtggcacggcgagcacttgctgactaacgacgtcaaaatcgagcaggccgagaggagc

SEQ ID NO: 5800 - DNA, 1581 bp, Homo sapiens
  source 1..1581: mol_type = genomic DNA
atgatcctttcctcctataacaccatccagtcggttttctgttgctgctgttgctgttcagtgcagaagcgacaaatgagaacacagataagcctgagcacagatgaagagcttccagaaaaatacacccagcgtcgcaggccgtggctcagccaattgtcaaataagaagcaatccaacacgggccgtgtgcagccgtcaaaacgaaagccactgcctcccctcccaccctctgaggttgctgaagagaagatccaagtcaaggcactttatgattttctgcccagagaaccctgtaatttagccttaaggagagcagaagaatacctgatactggagaaatacaatcctcactggtggaaggcaagagaccgtttggggaatgaaggcttaatcccaagcaactatgtgactgaaaacaaaataactaatttagaaatatatgagtggtaccatagaaacattaccagaaatcaggcagaacatctattgagacaagagtctaaagaaggtgcatttattgtcagagattcaagacatttaggatcctacacaatttccgtatttatgggagctagaagaagtacggaggctgccataaaacattatcagataaaaaagaatgactcaggacagtggtatgtggctgaaagacacgcctttcaatcaatccctgagttaatctggtatcaccagcacaatgcagccggtctcatgactcgtctccgatatccagttgggctgatgggcagttgtttaccagccacagctgggtttagctacgaaaagtgggagatagatccatctgagttggcttttataaaggagattggaagcggtcagtttggagtggtccatttaggtgaatggcggtcacatatccaggtagctatcaaggccatcaatgaaggctccatgtctgaagaggatttcattgaagaggccaaagtgatgatgaaattatctcattcaaagctagtgcaactttatggagtctgtatacagcggaagcccctttacattgtgacagagttcatggaaaatggctgcctgcttaactatctcagggagaataaaggaaagcttaggaaggaaatgctactgagtgtatgccaggatatatgtgaaggaatggaatatctggagaggaatggctatattcatagggatttggcggcaaggaattgtttggtcagttcaacatgcatagtaaaaatttcagactttggaatgacaaggtacgttttggatgatgagtatgtcagttcttttggagccaagttcccaatcaagtggtcccctcctgaagtttttcttttcaataagtacagcagtaaatctgatgtctggtcatttggagttttaatgtgggaagtttttacagaaggaaaaatgccttttgaaaataagtcaaatttgcaagtcgtggaagctatttctgaaggcttcaggctatatcgccctcacctggcaccaatgtccatatatgaagtcatgtacagctgctggcatgagaaacctgaaggccgccctacatttgccgagctgctgcgggctgtcacagagattgcggaaacctgg

SEQ ID NO: 5801 - DNA, 1854 bp, Homo sapiens
  source 1..1854: mol_type = genomic DNA
atgacacaggagtacgacaacaaacggccagtgttggttcttcagaatgaagcactttatccacagcggcggtcctacactagtgaggatgaggcctggaaatccttcctggaaaaccctctcactgcagcgaccaaagcgatgatgagcatcaatggagatgaagacagcgccgctgcgctgggcctgctctatgactactacaaggttccaagagagagaaggtcatcaacagcaaagccagaggtggagcaccctgagccagatcacagcaaaagaaacagcataccaattgtgacagagcagcccctcatctctgctggagaaaacagagtgcaagtactgaaaaatgtgccatttaacattgtccttccccatggcaaccagctgggcattgataagagaggccatctgacagctccagatacgacagtcactgtctccatagcaacgatgcctacccactccatcaagacagaaacccagccacatggcttcgctgtgggaatccccccagcagtgtatcatcctgagcccactgagcgggtggtggttttcgatcggaatctcaatactgaccagttcagctctggtgctcaagccccaaatgctcaaaggcgaactccagactcgaccttctcagagaccttcaaggaaggcgttcaggaggttttcttcccctcggatctcagtctgcggatgcctggcatgaattcagaggactatgtttttgacagtgtttctgggaacaactttgaatataccctagaagcttcaaaatcacttcgacagaagccaggagacagtaccatgacgtacctgaacaaaggccagttctatcccatcaccttgaaggaggtgagcagcagtgaaggaatccatcatcccatcagcaaagttcgaagtgtgatcatggtggtttttgctgaagacaaaagcagagaagatcagttaaggcattggaagtactggcactcccggcagcacaccgctaaacaaagatgcattgacatagctgactataaagaaagcttcaacactatcagtaacatcgaggagattgcgtataacgccatttccttcacatgggacatcaacgatgaagcaaaggttttcatctctgtgaactgcttaagcacagatttctcttcccagaagggagtgaaggggttgcctcttaacattcaagttgatacctatagttacaacaaccgcagcaacaagcctgtgcaccgggcctactgccagatcaaggtcttctgtgacaagggagctgagcggaaaatcagggatgaagaacgaaagcaaagcaaaagaaaagtttctgatgttaaagtgccactgcttccctctcacaagcgaatggatatcacagttttcaaacccttcattgatctcgatactcagcctgtcctcttcattcctgacgtgcactttgccaacttgcagcggggcactcatgtccttcccattgcctctgaagaattggagggtgaaggctctgtcttgaaaagggggccgtacggcacagaagatgactttgctgtccctccttctaccaagctggcccggatagaagaaccaaagagagtgctgctctacgttcgaaaggagtcagaagaagtctttgatgccctgatgctcaaaaccccatctttgaagggcttgatggaagctatctcagacaaatacgatgttccccatgacaagattgggaaaatattcaagaagtgtaaaaaggggatcctggtgaacatggacgacaacattgtgaagcattactccaatgaggacaccttccagctgcagattgaagaagccggggggtcttacaagctcaccctgacggagatc

SEQ ID NO: 5802 - DNA, 1287 bp, Homo sapiens
  source 1..1287: mol_type = genomic DNA
atggcttcgctgtgggaatccccccagcagtgtatcatcctgagcccactgagcgggtggtggttttcgatcggaatctcaatactgaccagttcagctctggtgctcaagccccaaatgctcaaaggcgaactccagactcgaccttctcagagaccttcaaggaaggcgttcaggaggaacaactttgaatataccctagaagcttcaaaatcacttcgacagaagccaggagacagtaccatgacgtacctgaacaaaggccagttctatcccatcaccttgaaggaggtgagcagcagtgaaggaatccatcatcccatcagcaaagttcgaagtgtgatcatggtggtttttgctgaagacaaaagcagagaagatcagttaaggcattggaagtactggcactcccggcagcacaccgctaaacaaagatgcattgacatagctgactataaagaaagcttcaacactatcagtaacatcgaggagattgcgtataacgccatttccttcacatgggacatcaacgatgaagcaaaggttttcatctctgtgaactgcttaagcacagatttctcttcccagaagggagtgaaggggttgcctcttaacattcaagttgatacctatagttacaacaaccgcagcaacaagcctgtgcaccgggcctactgccagatcaaggtcttctgtgacaagggagctgagcggaaaatcagggatgaagaacgaaagcaaagcaaaagaaaagtttctgatgttaaagtgccactgcttccctctcacaagcgaatggatatcacagttttcaaacccttcattgatctcgatactcagcctgtcctcttcattcctgacgtgcactttgccaacttgcagcggggcactcatgtccttcccattgcctctgaagaattggagggtgaaggctctgtcttgaaaagggggccgtacggcacagaagatgactttgctgtccctccttctaccaagctggcccggatagaagaaccaaagagagtgctgctctacgttcgaaaggagtcagaagaagtctttgatgccctgatgctcaaaaccccatctttgaagggcttgatggaagctatctcagacaaatacgatgttccccatgacaagattgggaaaatattcaagaagtgtaaaaaggggatcctggtgaacatggacgacaacattgtgaagcattactccaatgaggacaccttccagctgcagattgaagaagccggggggtcttacaagctcaccctgacggagatc

SEQ ID NO: 5803 - DNA, 1827 bp, Homo sapiens
  source 1..1827: mol_type = genomic DNA
atgcccagtgaccctccattcaatacccgaagagcctacaccagtgaggatgaagcctggaagtcatacttggagaatcccctgacagcagccaccaaggccatgatgagcattaatggtgatgaggacagtgctgctgccctcggcctgctctatgactactacaaggttcctcgagacaagaggctgctgtctgtaagcaaagcaagtgacagccaagaagaccaggagaaaagaaactgccttggcaccagtgaagcccagagtaatttgagtggaggagaaaaccgagtgcaagtcctaaagactgttccagtgaacctttccctaaatcaagatcacctggagaattccaagcgggaacagtacagcatcagcttccccgagagctctgccatcatcccggtgtcgggaatcacggtggtgaaagctgaagatttcacaccagttttcatggccccacctgtgcactatccccggggagatggggaagagcaacgagtggttatctttgaacagactcagtatgacgtgccctcgctggccacccacagcgcctatctcaaagacgaccagcgcagcactccggacagcacatacagcgagagcttcaaggacgcagccacagagaaatttcggagtgcttcagttggggctgaggagtacatgtatgatcagacatcaagtggcacatttcagtacaccctggaagccaccaaatctctccgtcagaagcagggggagggccccatgacctacctcaacaaaggacagttctatgccataacactcagcgagaccggagacaacaaatgcttccgacaccccatcagcaaagtcaggagtgtggtgatggtggtcttcagtgaagacaaaaacagagatgaacagctcaaatactggaaatactggcactctcggcagcatacggcgaagcagagggtccttgacattgccgattacaaggagagctttaatacgattggaaacattgaagagattgcatataatgctgtttcctttacctgggacgtgaatgaagaggcgaagattttcatcaccgtgaattgcttgagcacagatttctcctcccaaaaaggggtgaaaggacttcctttgatgattcagattgacacatacagttataacaatcgtagcaataaacccattcatagagcttattgccagatcaaggtcttctgtgacaaaggagcagaaagaaaaatccgagatgaagagcggaagcagaacaggaagaaagggaaaggccaggcctcccaaactcaatgcaacagctcctctgatgggaagttggctgccatacctttacagaagaagagtgacatcacctacttcaaaaccatgcctgatctccactcacagccagttctcttcatacctgatgttcactttgcaaacctgcagaggaccggacaggtgtattacaacacggatgatgaacgagaaggtggcagtgtccttgttaaacggatgttccggcccatggaagaggagtttggtccagtgccttcaaagcagatgaaagaagaagggacaaagcgagtgctcttgtacgtgaggaaggagactgacgatgtgttcgatgcattgatgttgaagtctcccacagtgaagggcctgatggaagcgatatctgagaaatatgggctgcccgtggagaagatagcaaagctttacaagaaaagcaaaaaaggcatcttggtgaacatggatgacaacatcatcgagcactactcgaacgaggacaccttcatcctcaacatggagagcatggtggagggcttcaaggtcacgctcatggaaatc

SEQ ID NO: 5804 - DNA, 1875 bp, Homo sapiens
  source 1..1875: mol_type = genomic DNA
atgtcacaagagtcggacaataataaaagactagtggccttagtgcccatgcccagtgaccctccattcaatacccgaagagcctacaccagtgaggatgaagcctggaagtcatacttggagaatcccctgacagcagccaccaaggccatgatgagcattaatggtgatgaggacagtgctgctgccctcggcctgctctatgactactacaaggttcctcgagacaagaggctgctgtctgtaagcaaagcaagtgacagccaagaagaccaggagaaaagaaactgccttggcaccagtgaagcccagagtaatttgagtggaggagaaaaccgagtgcaagtcctaaagactgttccagtgaacctttccctaaatcaagatcacctggagaattccaagcgggaacagtacagcatcagcttccccgagagctctgccatcatcccggtgtcgggaatcacggtggtgaaagctgaagatttcacaccagttttcatggccccacctgtgcactatccccggggagatggggaagagcaacgagtggttatctttgaacagactcagtatgacgtgccctcgctggccacccacagcgcctatctcaaagacgaccagcgcagcactccggacagcacatacagcgagagcttcaaggacgcagccacagagaaatttcggagtgcttcagttggggctgaggagtacatgtatgatcagacatcaagtggcacatttcagtacaccctggaagccaccaaatctctccgtcagaagcagggggagggccccatgacctacctcaacaaaggacagttctatgccataacactcagcgagaccggagacaacaaatgcttccgacaccccatcagcaaagtcaggagtgtggtgatggtggtcttcagtgaagacaaaaacagagatgaacagctcaaatactggaaatactggcactctcggcagcatacggcgaagcagagggtccttgacattgccgattacaaggagagctttaatacgattggaaacattgaagagattgcatataatgctgtttcctttacctgggacgtgaatgaagaggcgaagattttcatcaccgtgaattgcttgagcacagatttctcctcccaaaaaggggtgaaaggacttcctttgatgattcagattgacacatacagttataacaatcgtagcaataaacccattcatagagcttattgccagatcaaggtcttctgtgacaaaggagcagaaagaaaaatccgagatgaagagcggaagcagaacaggaagaaagggaaaggccaggcctcccaaactcaatgcaacagctcctctgatgggaagttggctgccatacctttacagaagaagagtgacatcacctacttcaaaaccatgcctgatctccactcacagccagttctcttcatacctgatgttcactttgcaaacctgcagaggaccggacaggtgtattacaacacggatgatgaacgagaaggtggcagtgtccttgttaaacggatgttccggcccatggaagaggagtttggtccagtgccttcaaagcagatgaaagaagaagggacaaagcgagtgctcttgtacgtgaggaaggagactgacgatgtgttcgatgcattgatgttgaagtctcccacagtgaagggcctgatggaagcgatatctgagaaatatgggctgcccgtggagaagatagcaaagctttacaagaaaagcaaaaaaggcatcttggtgaacatggatgacaacatcatcgagcactactcgaacgaggacaccttcatcctcaacatggagagcatggtggagggcttcaaggtcacgctcatggaaatc

SEQ ID NO: 5805 - DNA, 1806 bp, Homo sapiens
  source 1..1806: mol_type = genomic DNA
atgtcgaatgaacttgatttcaggtctgtgcggctgctaaagaacgacccagtcaacttgcagaaattctcttacactagtgaggatgaggcctggaagacgtacctagaaaacccgttgacagctgccacaaaggccatgatgagagtcaatggagatgatgacagtgttgcggccttgagcttcctctatgattactacatgggtcccaaggagaagcggatattgtcctccagcactgggggcaggaatgaccaaggaaagaggtactaccatggcatggaatatgagacggacctcactccccttgaaagccccacacacctcatgaaattcctgacagagaacgtgtctggaaccccagagtacccagatttgctcaagaagaataacctgatgagcttggagggggccttgcccacccctggcaaggcagctcccctccctgcaggccccagcaagctggaggccggctctgtggacagctacctgttacccaccactgatatgtatgataatggctccctcaactccttgtttgagagcattcatggggtgccgcccacacagcgctggcagccagacagcaccttcaaagatgacccacaggagtcgatgctcttcccagatatcctgaaaacctccccggaacccccatgtccagaggactaccccagcctcaaaagtgactttgaatacaccctgggctcccccaaagccatccacatcaagtcaggcgagtcacccatggcctacctcaacaaaggccagttctaccccgtcaccctgcggaccccagcaggtggcaaaggccttgccttgtcctccaacaaagtcaagagtgtggtgatggttgtcttcgacaatgagaaggtcccagtagagcagctgcgcttctggaagcactggcattcccggcaacccactgccaagcagcgggtcattgacgtggctgactgcaaagaaaacttcaacactgtggagcacattgaggaggtggcctataatgcactgtcctttgtgtggaacgtgaatgaagaggccaaggtgttcatcggcgtaaactgtctgagcacagacttttcctcacaaaagggggtgaagggtgtccccctgaacctgcagattgacacctatgactgtggcttgggcactgagcgcctggtacaccgtgctgtctgccagatcaagatcttctgtgacaagggagctgagaggaagatgcgcgatgacgagcggaagcagttccggaggaaggtcaagtgccctgactccagcaacagtggcgtcaagggctgcctgctgtcgggcttcaggggcaatgagacgacctaccttcggccagagactgacctggagacgccacccgtgctgttcatccccaatgtgcacttctccagcctgcagcgctctggaggggcagccccctcggcaggacccagcagctccaacaggctgcctctgaagcgtacctgctcgcccttcactgaggagtttgagcctctgccctccaagcaggccaaggaaggcgaccttcagagagttctgctgtatgtgcggagggagactgaggaggtgtttgacgcgctcatgttgaagaccccagacctgaaggggctgaggaatgcgatctctgagaagtatgggttccctgaagagaacatttacaaagtctacaagaaatgcaagcgaggaatcttagtcaacatggacaacaacatcattcagcattacagcaaccacgtcgccttcctgctggacatgggggagctggacggcaaaattcagatcatccttaaggagctg

SEQ ID NO: 5806 - DNA, 1878 bp, Homo sapiens
  source 1..1878: mol_type = genomic DNA
atgtcgaatgaacttgatttcaggtctgtgcggctgctaaagaacgacccagtcaacttgcagaaattctcttacactagtgaggatgaggcctggaagacgtacctagaaaacccgttgacagctgccacaaaggccatgatgagagtcaatggagatgatgacagtgttgcggccttgagcttcctctatgattactacatgggtcccaaggagaagcggatattgtcctccagcactgggggcaggaatgaccaaggaaagaggtactaccatggcatggaatatgagacggacctcactccccttgaaagccccacacacctcatgaaattcctgacagagaacgtgtctggaaccccagagtacccagatttgctcaagaagaataacctgatgagcttggagggggccttgcccacccctggcaaggcagctcccctccctgcaggccccagcaagctggaggccggctctgtggacagctacctgttacccaccactgatatgtatgataatggctccctcaactccttgtttgagagcattcatggggtgccgcccacacagcgctggcagccagacagcaccttcaaagatgacccacaggagtcgatgctcttcccagatatcctgaaaacctccccggaacccccatgtccagaggactaccccagcctcaaaagtgactttgaatacaccctgggctcccccaaagccatccacatcaagtcaggcgagtcacccatggcctacctcaacaaaggccagttctaccccgtcaccctgcggaccccagcaggtggcaaaggccttgccttgtcctccaacaaagtcaagagtgtggtgatggttgtcttcgacaatgagaaggtcccagtagagcagctgcgcttctggaagcactggcattcccggcaacccactgccaagcagcgggtcattgacgtggctgactgcaaagaaaacttcaacactgtggagcacattgaggaggtggcctataatgcactgtcctttgtgtggaacgtgaatgaagaggccaaggtgttcatcggcgtaaactgtctgagcacagacttttcctcacaaaagggggtgaagggtgtccccctgaacctgcagattgacacctatgactgtggcttgggcactgagcgcctggtacaccgtgctgtctgccagatcaagatcttctgtgacaagggagctgagaggaagatgcgcgatgacgagcggaagcagttccggaggaaggtcaagtgccctgactccagcaacagtggcgtcaagggctgcctgctgtcgggcttcaggggcaatgagacgacctaccttcggccagagactgacctggagacgccacccgtgctgttcatccccaatgtgcacttctccagcctgcagcgctctggaggggcagccccctcggcaggacccagcagctccaacaggctgcctctgaagcgtacctgctcgcccttcactgaggagtttgagcctctgccctccaagcaggccaaggaaggcgaccttcagagagttctgctgtatgtgcggagggagactgaggaggtgtttgacgcgctcatgttgaagaccccagacctgaaggggctgaggaatgcgatctctgagaagtatgggttccctgaagagaacatttacaaagtctacaagaaatgcaagcgaggggaaacttctctcctccacccacgcctgtctcgccaccccccacctgactgtcttgaatgttcccatcctgtgactcaagtgaggaacatgggttttggagatggattttggaggcagagggacctggattcaaatcccagccccaccaccgtcaacagcctgcacttcactgtaaactcggaa

SEQ ID NO: 5807 - DNA, 1821 bp, Homo sapiens
  source 1..1821: mol_type = genomic DNA
atgtggatgaattccattcttcctatttttcttttcaggtctgtgcggctgctaaagaacgacccagtcaacttgcagaaattctcttacactagtgaggatgaggcctggaagacgtacctagaaaacccgttgacagctgccacaaaggccatgatgagagtcaatggagatgatgacagtgttgcggccttgagcttcctctatgattactacatgggtcccaaggagaagcggatattgtcctccagcactgggggcaggaatgaccaaggaaagaggtactaccatggcatggaatatgagacggacctcactccccttgaaagccccacacacctcatgaaattcctgacagagaacgtgtctggaaccccagagtacccagatttgctcaagaagaataacctgatgagcttggagggggccttgcccacccctggcaaggcagctcccctccctgcaggccccagcaagctggaggccggctctgtggacagctacctgttacccaccactgatatgtatgataatggctccctcaactccttgtttgagagcattcatggggtgccgcccacacagcgctggcagccagacagcaccttcaaagatgacccacaggagtcgatgctcttcccagatatcctgaaaacctccccggaacccccatgtccagaggactaccccagcctcaaaagtgactttgaatacaccctgggctcccccaaagccatccacatcaagtcaggcgagtcacccatggcctacctcaacaaaggccagttctaccccgtcaccctgcggaccccagcaggtggcaaaggccttgccttgtcctccaacaaagtcaagagtgtggtgatggttgtcttcgacaatgagaaggtcccagtagagcagctgcgcttctggaagcactggcattcccggcaacccactgccaagcagcgggtcattgacgtggctgactgcaaagaaaacttcaacactgtggagcacattgaggaggtggcctataatgcactgtcctttgtgtggaacgtgaatgaagaggccaaggtgttcatcggcgtaaactgtctgagcacagacttttcctcacaaaagggggtgaagggtgtccccctgaacctgcagattgacacctatgactgtggcttgggcactgagcgcctggtacaccgtgctgtctgccagatcaagatcttctgtgacaagggagctgagaggaagatgcgcgatgacgagcggaagcagttccggaggaaggtcaagtgccctgactccagcaacagtggcgtcaagggctgcctgctgtcgggcttcaggggcaatgagacgacctaccttcggccagagactgacctggagacgccacccgtgctgttcatccccaatgtgcacttctccagcctgcagcgctctggaggggcagccccctcggcaggacccagcagctccaacaggctgcctctgaagcgtacctgctcgcccttcactgaggagtttgagcctctgccctccaagcaggccaaggaaggcgaccttcagagagttctgctgtatgtgcggagggagactgaggaggtgtttgacgcgctcatgttgaagaccccagacctgaaggggctgaggaatgcgatctctgagaagtatgggttccctgaagagaacatttacaaagtctacaagaaatgcaagcgaggaatcttagtcaacatggacaacaacatcattcagcattacagcaaccacgtcgccttcctgctggacatgggggagctggacggcaaaattcagatcatccttaaggagctg

SEQ ID NO: 5808 - DNA, 1668 bp, Homo sapiens
  source 1..1668: mol_type = genomic DNA
atgatgagagtcaatggagatgatgacagtgttgcggccttgagcttcctctatgattactacatgggtcccaaggagaagcggatattgtcctccagcactgggggcaggaatgaccaaggaaagaggtactaccatggcatggaatatgagacggacctcactccccttgaaagccccacacacctcatgaaattcctgacagagaacgtgtctggaaccccagagtacccagatttgctcaagaagaataacctgatgagcttggagggggccttgcccacccctggcaaggcagctcccctccctgcaggccccagcaagctggaggccggctctgtggacagctacctgttacccaccactgatatgtatgataatggctccctcaactccttgtttgagagcattcatggggtgccgcccacacagcgctggcagccagacagcaccttcaaagatgacccacaggagtcgatgctcttcccagatatcctgaaaacctccccggaacccccatgtccagaggactaccccagcctcaaaagtgactttgaatacaccctgggctcccccaaagccatccacatcaagtcaggcgagtcacccatggcctacctcaacaaaggccagttctaccccgtcaccctgcggaccccagcaggtggcaaaggccttgccttgtcctccaacaaagtcaagagtgtggtgatggttgtcttcgacaatgagaaggtcccagtagagcagctgcgcttctggaagcactggcattcccggcaacccactgccaagcagcgggtcattgacgtggctgactgcaaagaaaacttcaacactgtggagcacattgaggaggtggcctataatgcactgtcctttgtgtggaacgtgaatgaagaggccaaggtgttcatcggcgtaaactgtctgagcacagacttttcctcacaaaagggggtgaagggtgtccccctgaacctgcagattgacacctatgactgtggcttgggcactgagcgcctggtacaccgtgctgtctgccagatcaagatcttctgtgacaagggagctgagaggaagatgcgcgatgacgagcggaagcagttccggaggaaggtcaagtgccctgactccagcaacagtggcgtcaagggctgcctgctgtcgggcttcaggggcaatgagacgacctaccttcggccagagactgacctggagacgccacccgtgctgttcatccccaatgtgcacttctccagcctgcagcgctctggaggggcagccccctcggcaggacccagcagctccaacaggctgcctctgaagcgtacctgctcgcccttcactgaggagtttgagcctctgccctccaagcaggccaaggaaggcgaccttcagagagttctgctgtatgtgcggagggagactgaggaggtgtttgacgcgctcatgttgaagaccccagacctgaaggggctgaggaatgcgatctctgagaagtatgggttccctgaagagaacatttacaaagtctacaagaaatgcaagcgaggaatcttagtcaacatggacaacaacatcattcagcattacagcaaccacgtcgccttcctgctggacatgggggagctggacggcaaaattcagatcatccttaaggagctg

SEQ ID NO: 5809 - DNA, 522 bp, Homo sapiens
  source 1..522: mol_type = genomic DNA
atgactactaaaaatttagaaaccaaagtcaccgttacttcatccccaatccgaggagcaggagatggaatggaaactgaggaaccacctaaatctgttgaagttacctccggagtccaatctagaaagcatcatagtcttcagagtccatggaagaaagcagttccatcagagagcccaggagttcttcagctagggaaaatgctcactgaaaaagcaatggaagttaaagctgtaagaatattagttcccaaagctgctataactcatgatatccccaacaaaaatacaaaggttaagtctctgggacatcataaaggagaattccttggtcagtcagagggagttatagaacctaataaggaactctcagaggtaaagaatgtattggaaaagctcaagaattctgaaagaaggttactacaggacaaagaaggtctttcaaaccagctccgtgtacagacagaggtaagaagagccttaatcgataaaatgagtactactctttacgtctggaccttt

SEQ ID NO: 5810 - DNA, 1143 bp, Homo sapiens
  source 1..1143: mol_type = genomic DNA
atggagcgcgggatgcacctcggtgcagcggccgccggcgaggacgacctcttcctgcacaagagcctgagcgcctccacctccaagcgcttggaagcggctttccgctccacgcccccgggcatggacctgtccctggcgccgccgcctcgggaacgcccggcgtcctcctcctcgtcgcccctgggctgcttcgagccggctgaccccgagggggcagggctgctgttgccgccgcctggaggaggcggcggcggcagcgcgggaagtggcggcggcggcggcggcggggtgggtgtccccgggctgctagtaggttcagccggcgttgggggcgaccctagcctaagcagcctgccggccggggccgccctttgcctcaagtacggcgaaagcgcgagccggggctcggtggccgagagcagcggcggcgagcagagccccgacgacgacagcgacggtcgctgcgagctcgtgctgcgggccggagtagccgacccgcgggcctccccgggagcgggaggtggtggcgcgaaggcagccgagggctgctccaatgcccacctccacggcggcgccagcgtccccccggggggcctgggcggcggcggcggcgggggtagcagcagcggtagcagtggcggcggtggcggtagcggtagcggcagcggcggcagcagcagcagcagcagcagcagcagcaagaaatccaaagagcaaaaggcgctgcggcttaacatcaatgcccgagagcgccggcggatgcacgacctgaacgacgcgctggacgagctgcgcgcggtgatcccctacgcgcacagcccctcggtgcgaaagctctccaagatcgccacgctgctgctcgccaagaactacatcctcatgcaggcgcaggccctggaggagatgcggcgcctagtcgcctacctcaaccagggccaggccatctcggctgcctccctgcccagctcggcggctgcagcggcagcagctgctgccctgcacccggcgctcggcgcctacgagcaggcagccggctacccgttcagcgccggactgcccccggctgcctcctgcccggagaagtgcgccctgtttaacagcgtctcctccagcctctgcaaacagtgcacggagaagcct

SEQ ID NO: 5811 - DNA, 723 bp, Homo sapiens
  source 1..723: mol_type = genomic DNA
atgagcatccgcccacccggcgagcccccgagcccaggcggcgcggccatggccgagctcaagtcgctgtcgggggacgcgtacctggcactaagccacggctacgcggcggcggctgcgggtctcgcctacggggcggcgcgagaacccgaagcggcccgcggctacggcactccgggcccgggcggcgacctccccgcggcgcctgcacctcgcgccccagctcaggcggcggagagcagcggcgaacagagcggggacgaggacgacgccttcgagcagcggcggcggcggcgcgggccagggagcgcggcggacgggcggcggcggccgcgagagcagcggtctctgcggctcagcatcaacgcgcgcgagcggcggcgcatgcacgacctaaacgacgcgctggacgggctgcgagccgtcatcccctacgcgcacagcccgtcggtgcgcaagctctccaagatcgccacgctgctgctcgccaagaactatatcctcatgcaggcgcaggccctggacgagatgcggcgcctggtggccttcctcaaccagggccagggcctggccgcgcccgtaaacgccgcgcccttgacgcccttcggccaggccactgtgtgccccttctccgcaggcgccgccctggggccctgccctgacaagtgcgccgccttctccgggacgccctccgcgctttgcaaacactgtcacgagaagccg

SEQ ID NO: 5812 - DNA, 1530 bp, Homo sapiens
  source 1..1530: mol_type = genomic DNA
atggcggcggccgccctgagggaccccgctcaggttcctgtggctgcagacttgcttacagaccatgaggagggctatgtgacctttgaggatgtggctgtctacttctcccaggaggaatggagattgcttgatgacgctcagaggctcctctaccgcaatgtgatgctggagaactttacacttctggcctctctgggacttgcatcttccaagacccatgaaataacccagctggagtcatgggaggagcccttcatgcctgcttgggaagttgtgacttcagccataccgagaggttgttggcatggagccgaggctgaggaggctcctgagcagattgcttctgtaggactgctcagttcaaacattcagcaacaccagaagcagcactgtggagagaaacccttaaaaagacaagagggcagggtcccagttttgaggagttgcaaagttcacctatcagagaagtccttgcaaagcagggaggttgggaaggccctcctgatcagctcaggtgttctcaagcaccaggtgactcacacaggagagaagtcacataggagctccaaaagtagggaggcctttcatgctggaaaaaggcattacaaatgcagtgaatgtgggaaagcctttggtcagaaatatttacttgttcagcaccagagactacatgctgggaaaaagacgtatgaatgcagtgaatgtgggaagttatttagagatatgtccaacctttttatacaccaaatagttcacactggagaaaggccttacgggtgtagtaactgtggaaaatcctttagccgtaatgctcacctcattgaacaccagagagttcacactggagaaaagccttttacatgcagtgaatgtggaaaagctttcaggcataattccacacttgttcagcatcacaaaatccacactggagtaaggccttatgagtgcagtgaatgtggaaaattgtttagtttcaactccagcctcatgaaacatcagagaattcacactggagaaagaccttataagtgcagtgaatgtggaaaattctatagccacaagtccaaccttatcaaacattggcgtgttcatactggagaaaggccttacaagtgcagcgactgtgggaaattttttacccaatgctcaagcctcatgcaacatcaaaaagttcacactggagaaaagccttttaagtgcaatgaatgtgggagattctttagagagaattccaccctagttagacatcagagggttcacactggagcaaagccttatgagtgcagggaatgtgggaaattttttagccaaagctcaaccctcatgcaacatcgaaaagttcacattggagaaaagccttttaagtgcaatgaatgtgggagattgtttagagagaattccagccttgttaaacatcagagggttcacactggagcaaagccttatgagtgcagggaatgtgggaagttttttcgccacaactccagtctttttaaacatcgaaggattcacactggagaaatgcag

SEQ ID NO: 5813 - DNA, 1392 bp, Homo sapiens
  source 1..1392: mol_type = genomic DNA
atggcggcggccgccctgagggaccccgctcagggctatgtgacctttgaggatgtggctgtctacttctcccaggaggaatggagattgcttgatgacgctcagaggctcctctaccgcaatgtgatgctggagaactttacacttctggcctctctgggttgttggcatggagccgaggctgaggaggctcctgagcagattgcttctgtaggactgctcagttcaaacattcagcaacaccagaagcagcactgtggagagaaacccttaaaaagacaagagggcagggtcccagttttgaggagttgcaaagttcacctatcagagaagtccttgcaaagcagggaggttgggaaggccctcctgatcagctcaggtgttctcaagcaccaggtgactcacacaggagagaagtcacataggagctccaaaagtagggaggcctttcatgctggaaaaaggcattacaaatgcagtgaatgtgggaaagcctttggtcagaaatatttacttgttcagcaccagagactacatgctgggaaaaagacgtatgaatgcagtgaatgtgggaagttatttagagatatgtccaacctttttatacaccaaatagttcacactggagaaaggccttacgggtgtagtaactgtggaaaatcctttagccgtaatgctcacctcattgaacaccagagagttcacactggagaaaagccttttacatgcagtgaatgtggaaaagctttcaggcataattccacacttgttcagcatcacaaaatccacactggagtaaggccttatgagtgcagtgaatgtggaaaattgtttagtttcaactccagcctcatgaaacatcagagaattcacactggagaaagaccttataagtgcagtgaatgtggaaaattctatagccacaagtccaaccttatcaaacattggcgtgttcatactggagaaaggccttacaagtgcagcgactgtgggaaattttttacccaatgctcaagcctcatgcaacatcaaaaagttcacactggagaaaagccttttaagtgcaatgaatgtgggagattctttagagagaattccaccctagttagacatcagagggttcacactggagcaaagccttatgagtgcagggaatgtgggaaattttttagccaaagctcaaccctcatgcaacatcgaaaagttcacattggagaaaagccttttaagtgcaatgaatgtgggagattgtttagagagaattccagccttgttaaacatcagagggttcacactggagcaaagccttatgagtgcagggaatgtgggaagttttttcgccacaactccagtctttttaaacatcgaaggattcacactggagaaatgcag

SEQ ID NO: 5814 - DNA, 1533 bp, Homo sapiens
  source 1..1533: mol_type = genomic DNA
atggcggcggccgccctgagggaccccgctcaggttcctgtggctgcagacttgcttacagaccatgaggagcagggctatgtgacctttgaggatgtggctgtctacttctcccaggaggaatggagattgcttgatgacgctcagaggctcctctaccgcaatgtgatgctggagaactttacacttctggcctctctgggacttgcatcttccaagacccatgaaataacccagctggagtcatgggaggagcccttcatgcctgcttgggaagttgtgacttcagccataccgagaggttgttggcatggagccgaggctgaggaggctcctgagcagattgcttctgtaggactgctcagttcaaacattcagcaacaccagaagcagcactgtggagagaaacccttaaaaagacaagagggcagggtcccagttttgaggagttgcaaagttcacctatcagagaagtccttgcaaagcagggaggttgggaaggccctcctgatcagctcaggtgttctcaagcaccaggtgactcacacaggagagaagtcacataggagctccaaaagtagggaggcctttcatgctggaaaaaggcattacaaatgcagtgaatgtgggaaagcctttggtcagaaatatttacttgttcagcaccagagactacatgctgggaaaaagacgtatgaatgcagtgaatgtgggaagttatttagagatatgtccaacctttttatacaccaaatagttcacactggagaaaggccttacgggtgtagtaactgtggaaaatcctttagccgtaatgctcacctcattgaacaccagagagttcacactggagaaaagccttttacatgcagtgaatgtggaaaagctttcaggcataattccacacttgttcagcatcacaaaatccacactggagtaaggccttatgagtgcagtgaatgtggaaaattgtttagtttcaactccagcctcatgaaacatcagagaattcacactggagaaagaccttataagtgcagtgaatgtggaaaattctatagccacaagtccaaccttatcaaacattggcgtgttcatactggagaaaggccttacaagtgcagcgactgtgggaaattttttacccaatgctcaagcctcatgcaacatcaaaaagttcacactggagaaaagccttttaagtgcaatgaatgtgggagattctttagagagaattccaccctagttagacatcagagggttcacactggagcaaagccttatgagtgcagggaatgtgggaaattttttagccaaagctcaaccctcatgcaacatcgaaaagttcacattggagaaaagccttttaagtgcaatgaatgtgggagattgtttagagagaattccagccttgttaaacatcagagggttcacactggagcaaagccttatgagtgcagggaatgtgggaagttttttcgccacaactccagtctttttaaacatcgaaggattcacactggagaaatgcag

SEQ ID NO: 5815 - DNA, 1434 bp, Homo sapiens
  source 1..1434: mol_type = genomic DNA
atggcggcggccgccctgagggaccccgctcaggttcctgtggctgcagacttgcttacagaccatgaggagcagggctatgtgacctttgaggatgtggctgtctacttctcccaggaggaatggagattgcttgatgacgctcagaggctcctctaccgcaatgtgatgctggagaactttacacttctggcctctctgggttgttggcatggagccgaggctgaggaggctcctgagcagattgcttctgtaggactgctcagttcaaacattcagcaacaccagaagcagcactgtggagagaaacccttaaaaagacaagagggcagggtcccagttttgaggagttgcaaagttcacctatcagagaagtccttgcaaagcagggaggttgggaaggccctcctgatcagctcaggtgttctcaagcaccaggtgactcacacaggagagaagtcacataggagctccaaaagtagggaggcctttcatgctggaaaaaggcattacaaatgcagtgaatgtgggaaagcctttggtcagaaatatttacttgttcagcaccagagactacatgctgggaaaaagacgtatgaatgcagtgaatgtgggaagttatttagagatatgtccaacctttttatacaccaaatagttcacactggagaaaggccttacgggtgtagtaactgtggaaaatcctttagccgtaatgctcacctcattgaacaccagagagttcacactggagaaaagccttttacatgcagtgaatgtggaaaagctttcaggcataattccacacttgttcagcatcacaaaatccacactggagtaaggccttatgagtgcagtgaatgtggaaaattgtttagtttcaactccagcctcatgaaacatcagagaattcacactggagaaagaccttataagtgcagtgaatgtggaaaattctatagccacaagtccaaccttatcaaacattggcgtgttcatactggagaaaggccttacaagtgcagcgactgtgggaaattttttacccaatgctcaagcctcatgcaacatcaaaaagttcacactggagaaaagccttttaagtgcaatgaatgtgggagattctttagagagaattccaccctagttagacatcagagggttcacactggagcaaagccttatgagtgcagggaatgtgggaaattttttagccaaagctcaaccctcatgcaacatcgaaaagttcacattggagaaaagccttttaagtgcaatgaatgtgggagattgtttagagagaattccagccttgttaaacatcagagggttcacactggagcaaagccttatgagtgcagggaatgtgggaagttttttcgccacaactccagtctttttaaacatcgaaggattcacactggagaaatgcag

SEQ ID NO: 5816 - DNA, 1494 bp, Homo sapiens
  source 1..1494: mol_type = genomic DNA
atggcggcggccgccctgagggaccccgctcagcagggctatgtgacctttgaggatgtggctgtctacttctcccaggaggaatggagattgcttgatgacgctcagaggctcctctaccgcaatgtgatgctggagaactttacacttctggcctctctgggacttgcatcttccaagacccatgaaataacccagctggagtcatgggaggagcccttcatgcctgcttgggaagttgtgacttcagccataccgagaggttgttggcatggagccgaggctgaggaggctcctgagcagattgcttctgtaggactgctcagttcaaacattcagcaacaccagaagcagcactgtggagagaaacccttaaaaagacaagagggcagggtcccagttttgaggagttgcaaagttcacctatcagagaagtccttgcaaagcagggaggttgggaaggccctcctgatcagctcaggtgttctcaagcaccaggtgactcacacaggagagaagtcacataggagctccaaaagtagggaggcctttcatgctggaaaaaggcattacaaatgcagtgaatgtgggaaagcctttggtcagaaatatttacttgttcagcaccagagactacatgctgggaaaaagacgtatgaatgcagtgaatgtgggaagttatttagagatatgtccaacctttttatacaccaaatagttcacactggagaaaggccttacgggtgtagtaactgtggaaaatcctttagccgtaatgctcacctcattgaacaccagagagttcacactggagaaaagccttttacatgcagtgaatgtggaaaagctttcaggcataattccacacttgttcagcatcacaaaatccacactggagtaaggccttatgagtgcagtgaatgtggaaaattgtttagtttcaactccagcctcatgaaacatcagagaattcacactggagaaagaccttataagtgcagtgaatgtggaaaattctatagccacaagtccaaccttatcaaacattggcgtgttcatactggagaaaggccttacaagtgcagcgactgtgggaaattttttacccaatgctcaagcctcatgcaacatcaaaaagttcacactggagaaaagccttttaagtgcaatgaatgtgggagattctttagagagaattccaccctagttagacatcagagggttcacactggagcaaagccttatgagtgcagggaatgtgggaaattttttagccaaagctcaaccctcatgcaacatcgaaaagttcacattggagaaaagccttttaagtgcaatgaatgtgggagattgtttagagagaattccagccttgttaaacatcagagggttcacactggagcaaagccttatgagtgcagggaatgtgggaagttttttcgccacaactccagtctttttaaacatcgaaggattcacactggagaaatgcag

SEQ ID NO: 5817 - DNA, 1491 bp, Homo sapiens
  source 1..1491: mol_type = genomic DNA
atggcggcggccgccctgagggaccccgctcagggctatgtgacctttgaggatgtggctgtctacttctcccaggaggaatggagattgcttgatgacgctcagaggctcctctaccgcaatgtgatgctggagaactttacacttctggcctctctgggacttgcatcttccaagacccatgaaataacccagctggagtcatgggaggagcccttcatgcctgcttgggaagttgtgacttcagccataccgagaggttgttggcatggagccgaggctgaggaggctcctgagcagattgcttctgtaggactgctcagttcaaacattcagcaacaccagaagcagcactgtggagagaaacccttaaaaagacaagagggcagggtcccagttttgaggagttgcaaagttcacctatcagagaagtccttgcaaagcagggaggttgggaaggccctcctgatcagctcaggtgttctcaagcaccaggtgactcacacaggagagaagtcacataggagctccaaaagtagggaggcctttcatgctggaaaaaggcattacaaatgcagtgaatgtgggaaagcctttggtcagaaatatttacttgttcagcaccagagactacatgctgggaaaaagacgtatgaatgcagtgaatgtgggaagttatttagagatatgtccaacctttttatacaccaaatagttcacactggagaaaggccttacgggtgtagtaactgtggaaaatcctttagccgtaatgctcacctcattgaacaccagagagttcacactggagaaaagccttttacatgcagtgaatgtggaaaagctttcaggcataattccacacttgttcagcatcacaaaatccacactggagtaaggccttatgagtgcagtgaatgtggaaaattgtttagtttcaactccagcctcatgaaacatcagagaattcacactggagaaagaccttataagtgcagtgaatgtggaaaattctatagccacaagtccaaccttatcaaacattggcgtgttcatactggagaaaggccttacaagtgcagcgactgtgggaaattttttacccaatgctcaagcctcatgcaacatcaaaaagttcacactggagaaaagccttttaagtgcaatgaatgtgggagattctttagagagaattccaccctagttagacatcagagggttcacactggagcaaagccttatgagtgcagggaatgtgggaaattttttagccaaagctcaaccctcatgcaacatcgaaaagttcacattggagaaaagccttttaagtgcaatgaatgtgggagattgtttagagagaattccagccttgttaaacatcagagggttcacactggagcaaagccttatgagtgcagggaatgtgggaagttttttcgccacaactccagtctttttaaacatcgaaggattcacactggagaaatgcag

SEQ ID NO: 5818 - DNA, 2091 bp, Homo sapiens
  source 1..2091: mol_type = genomic DNA
atgcaagaaggccttcatagaatgacttgggactgcattgctattgggagccatgagaattctgtgcagggcactgtggcatttgaagatgtggctgtgaacttttcccaggaggagtggagtctccttagtgaggttcagagatgcctttaccatgacgtgatgctggagaactgggtacttatatcctccctgggttgttggtgtggatcagaagatgaggaggcaccttctaagaagagcatttctatacaaagagtgtctcaggtcagcactcctggggcaggtgtgtctcccaagaaggcccactcttgtgaaatgtgtggcgcgatcttgggagacattttgcacttggcagatcatcaggggacacatcacaagcagaaactgcacaggtgtgaggcatgggggaataaattgtatgatagttcaaaccgtccgcaccagaatcagtaccttggagagaaaccctatagaagcagtgttgaggaagcattgtttgtgaagaggtgtaagttccatgtgtcagaggagtcatctatcttcattcagagtggaaaggactttttgcccagctcaggattactgctgcaggaggccactcacactggggagaagtcaaacagcaaacctgagtgtgagtctccctttcagtggggagatactcattacagctgtggagaatgcatgaaacattctagcaccaaacacgtatttgttcaacagcagagacttccctctagagaggaatgttattgctgggaatgtgggaaatcctttagcaaatatgatagcgtcagtaatcatcagagagttcacactgggaaaagaccttatgaatgtggagaatgtgggaaatcttttagtcataagggcagccttgttcagcatcagcgagttcacactgggaaaagaccttatgaatgtggagaatgtgggaaatcttttagtcataagggcagccttgttcagcatcagcgagttcatactggagaaagaccttatgagtgtggagaatgtgggaaatcttttagtcaaaatggtactctcattaaacatcaacgagttcacactggagaaagaccttatgagtgtgaagaatgtgggaaatgttttactcagaagggcaatctcattcaacatcaacgaggtcacactagtgaaagaccttatgagtgtgaagaatgtggaaaatgttttagtcaaaagggcaccctaactgaacatcatcgagttcacactagagaacgaccttatgagtgtggagaatgtgggaaatcttttagtcgaaagggacaccttaggaaccatcagcgaggtcacactggagaaagaccttacgagtgtggagaatgtgggaaatcttttagtcgaaagggcaacctcattcagcatcagcgaagccacactggagaaaggccttatgagtgtagagagtgtaggaaattatttaggggcaagtcccacctcattgaacaccagagagttcacactggagaaaggccatatgaatgtaatgaatgtgggaaatcatttcaagacagctctgggtttcgtgttcatcagagagttcacactggagaaaaaccgtttgagtgtagtgaatgtgggaagtcatttcctcaaagctgttccctccttcgacatcggagagttcatactggagaaaggccttatgaatgtggagaatgtggaaagtcatttcatcagagctcttccctccttcgacatcagaaaactcacactgcagaaagaccttatgagtgcagagaatgtgggaaattcttctccagtctccttgaacacaggagagttcacactggagaaaggccttatgaatgcagggaatgtggaaaaacatttactcgaaggtctgcgcattttaaacatcagagacttcatactcgaggaaagccttacgagtgcagcgaatgtgggaaatcctttgctgaaaccttcagtcttactgaacacaggagagtacacactggagaaaggccttatgagtgcagtgaatgtggaaaatcatttcatcgaagctcttctctccttcgacatcagagagttcacacagaaagaagtccttacaag

SEQ ID NO: 5819 - DNA, 1773 bp, Homo sapiens
  source 1..1773: mol_type = genomic DNA
atgtgtggcgcgatcttgggagacattttgcacttggcagatcatcaggggacacatcacaagcagaaactgcacaggtgtgaggcatgggggaataaattgtatgatagttcaaaccgtccgcaccagaatcagtaccttggagagaaaccctatagaagcagtgttgaggaagcattgtttgtgaagaggtgtaagttccatgtgtcagaggagtcatctatcttcattcagagtggaaaggactttttgcccagctcaggattactgctgcaggaggccactcacactggggagaagtcaaacagcaaacctgagtgtgagtctccctttcagtggggagatactcattacagctgtggagaatgcatgaaacattctagcaccaaacacgtatttgttcaacagcagagacttccctctagagaggaatgttattgctgggaatgtgggaaatcctttagcaaatatgatagcgtcagtaatcatcagagagttcacactgggaaaagaccttatgaatgtggagaatgtgggaaatcttttagtcataagggcagccttgttcagcatcagcgagttcacactgggaaaagaccttatgaatgtggagaatgtgggaaatcttttagtcataagggcagccttgttcagcatcagcgagttcatactggagaaagaccttatgagtgtggagaatgtgggaaatcttttagtcaaaatggtactctcattaaacatcaacgagttcacactggagaaagaccttatgagtgtgaagaatgtgggaaatgttttactcagaagggcaatctcattcaacatcaacgaggtcacactagtgaaagaccttatgagtgtgaagaatgtggaaaatgttttagtcaaaagggcaccctaactgaacatcatcgagttcacactagagaacgaccttatgagtgtggagaatgtgggaaatcttttagtcgaaagggacaccttaggaaccatcagcgaggtcacactggagaaagaccttacgagtgtggagaatgtgggaaatcttttagtcgaaagggcaacctcattcagcatcagcgaagccacactggagaaaggccttatgagtgtagagagtgtaggaaattatttaggggcaagtcccacctcattgaacaccagagagttcacactggagaaaggccatatgaatgtaatgaatgtgggaaatcatttcaagacagctctgggtttcgtgttcatcagagagttcacactggagaaaaaccgtttgagtgtagtgaatgtgggaagtcatttcctcaaagctgttccctccttcgacatcggagagttcatactggagaaaggccttatgaatgtggagaatgtggaaagtcatttcatcagagctcttccctccttcgacatcagaaaactcacactgcagaaagaccttatgagtgcagagaatgtgggaaattcttctccagtctccttgaacacaggagagttcacactggagaaaggccttatgaatgcagggaatgtggaaaaacatttactcgaaggtctgcgcattttaaacatcagagacttcatactcgaggaaagccttacgagtgcagcgaatgtgggaaatcctttgctgaaaccttcagtcttactgaacacaggagagtacacactggagaaaggccttatgagtgcagtgaatgtggaaaatcatttcatcgaagctcttctctccttcgacatcagagagttcacacagaaagaagtccttacaag

SEQ ID NO: 5820 - DNA, 1725 bp, Homo sapiens
  source 1..1725: mol_type = genomic DNA
atggcagcggctgcgccgaggcgcccgactcagcagggcactgtgacctttgaagatgtggctgtgaacttttcccaggaggagtggtgtcttcttagtgaggctcagaggtgcttgtaccgtgatgtgatgctagagaacctggctctcatatcctcgctgggttgttggtgtggatcaaaagatgaggaggcaccttgtaagcagagaatttctgtacaaagagagtctcagagcaggactcctagggcaggtgtttctcctaagaaggctcacccctgtgaaatgtgtggcctcatcttggaggatgtttttcactttgctgaccaccaggaaactcatcacaagcagaagctgaacaggagtggagcatgtggaaaaaacttggatgacactgcataccttcatcagcaccagaagcagcatattggagagaaattctacagaaagagtgtcagagaagcatcgtttgtaaagaaacgtaagctcagggtgtcacaggagccatttgtcttccgcgagtttgggaaggacgttctgcccagttcaggattgtgccaagaagcagctgctgtagagaagacagacagtgaaactatgcatggcccaccctttcaggagggaaaaactaattacagttgtggaaaacgcacaaaagccttcagcaccaaacactcagttattccacaccagaaacttttcactagagatggatgttatgtgtgcagtgattgtggaaaatcctttagcagatatgtcagcttcagtaatcatcagcgagatcacactgcaaaaggaccttatgattgtggagagtgtgggaaatcttatagtcgaaagagcagccttattcaacatcagcgagtccacactggaaagacagcttatccctgtgaggagtgcgggaaatcttttagtcagaagggcagccttattagccatcagcgtgttcacactggagaaaggccttatgagtgtagagaatatgggaaatcttttggtcaaaagggtaacctcattcaacatcagcaaggtcacactggagagagagcttatcactgtggggaatgtgggaaatcttttcgtcagaagttctgctttattaaccatcagcgtgttcacactggagaaaggccttacaagtgtggagaatgtggaaaatcttttggtcaaaagggcaacctcgttcaacatcagcgaggtcatactggagaaaggccctatgagtgcaaggaatgtgggaaatcatttaggtacagatcccacctcactgaacaccagagacttcacactggggaaagaccttacaattgtagggaatgtgggaaattatttaacaggaagtatcatcttctcgttcatgagagagttcacactggagaaaggccatatgcgtgtgaggtatgtgggaaattatttggtaataagaactgcgtgactatacatcagaggattcacactggagaaaggccgtatgaatgcaatgaatgtgggaaatcatttctttccagctctgcgcttcatgttcataaaagagttcattctggacaaaagccttataagtgcagtgaatgtggaaaatcctttgctgaatgttccagtctcattaaacacaggagaattcacactggagaaaggccttatgaatgtaccaaatgtggaaaaacatttcagcgaagctctaccctccttcatcatcagagttcacacaggagaaaggcctta

SEQ ID NO: 5821 - DNA, 1722 bp, Homo sapiens
  source 1..1722: mol_type = genomic DNA
atggcagcggctgcgccgaggcgcccgactcagggcactgtgacctttgaagatgtggctgtgaacttttcccaggaggagtggtgtcttcttagtgaggctcagaggtgcttgtaccgtgatgtgatgctagagaacctggctctcatatcctcgctgggttgttggtgtggatcaaaagatgaggaggcaccttgtaagcagagaatttctgtacaaagagagtctcagagcaggactcctagggcaggtgtttctcctaagaaggctcacccctgtgaaatgtgtggcctcatcttggaggatgtttttcactttgctgaccaccaggaaactcatcacaagcagaagctgaacaggagtggagcatgtggaaaaaacttggatgacactgcataccttcatcagcaccagaagcagcatattggagagaaattctacagaaagagtgtcagagaagcatcgtttgtaaagaaacgtaagctcagggtgtcacaggagccatttgtcttccgcgagtttgggaaggacgttctgcccagttcaggattgtgccaagaagcagctgctgtagagaagacagacagtgaaactatgcatggcccaccctttcaggagggaaaaactaattacagttgtggaaaacgcacaaaagccttcagcaccaaacactcagttattccacaccagaaacttttcactagagatggatgttatgtgtgcagtgattgtggaaaatcctttagcagatatgtcagcttcagtaatcatcagcgagatcacactgcaaaaggaccttatgattgtggagagtgtgggaaatcttatagtcgaaagagcagccttattcaacatcagcgagtccacactggaaagacagcttatccctgtgaggagtgcgggaaatcttttagtcagaagggcagccttattagccatcagcgtgttcacactggagaaaggccttatgagtgtagagaatatgggaaatcttttggtcaaaagggtaacctcattcaacatcagcaaggtcacactggagagagagcttatcactgtggggaatgtgggaaatcttttcgtcagaagttctgctttattaaccatcagcgtgttcacactggagaaaggccttacaagtgtggagaatgtggaaaatcttttggtcaaaagggcaacctcgttcaacatcagcgaggtcatactggagaaaggccctatgagtgcaaggaatgtgggaaatcatttaggtacagatcccacctcactgaacaccagagacttcacactggggaaagaccttacaattgtagggaatgtgggaaattatttaacaggaagtatcatcttctcgttcatgagagagttcacactggagaaaggccatatgcgtgtgaggtatgtgggaaattatttggtaataagaactgcgtgactatacatcagaggattcacactggagaaaggccgtatgaatgcaatgaatgtgggaaatcatttctttccagctctgcgcttcatgttcataaaagagttcattctggacaaaagccttataagtgcagtgaatgtggaaaatcctttgctgaatgttccagtctcattaaacacaggagaattcacactggagaaaggccttatgaatgtaccaaatgtggaaaaacatttcagcgaagctctaccctccttcatcatcagagttcacacaggagaaaggcctta

SEQ ID NO: 5822 - DNA, 975 bp, Homo sapiens
  source 1..975: mol_type = genomic DNA
atgactgtacgtcaggtaagtcattctggagagaaaggatataaatgtgatctgtgtggcaaggtctttagtcaaaaatcaaaccttgcgcgtcattggagagttcatactggagagaaaccatacaaatgtaatgaatgtgacagaagtttcagtcgcaactcatgccttgcactacatcggagagttcacactggagagaaaccttacaaatgttatgagtgtgacaaggtcttcagtcgaaattcatgccttgcactacatcagaaaactcatattggagagaaaccttacacatgtaaagagtgtggcaaagcctttagtgtgaggtcaacacttaccaaccatcaggtaattcatagtggcaagaaaccttacaaatgcaatgaatgtggcaaggtgttcagtcagacttcaagccttgcaactcatcagagaattcacactggggagaaaccatacaagtgtaatgaatgtggtaaagtcttcagtcagacttcaagccttgcaaggcattggagaattcatactggagagaaaccttacaaatgcaatgaatgtggtaaggttttcagttacaattcacaccttgcgagtcatcggagagttcatactggagagaaaccttacaagtgtaatgagtgtgggaaagcctttagtgtgcattcgaacttaactacccatcaggtcatccatactggagagaagccttacaaatgtaatcaatgtggcaaaggcttcagtgtgcattcaagcctaactacccatcaggtcatccatactggagaaaaaccttacaaatgtaatgagtgtggcaaatcctttagtgtgcgcccaaacctcactagacatcagataatccatactggaaagaaaccttacaaatgtagtgattgtgggaagtcctttagtgtgcgcccaaacctcttcagacatcaaattatccatactaaggagaaaccttataaaagaaat

SEQ ID NO: 5823 - DNA, 1665 bp, Homo sapiens
  source 1..1665: mol_type = genomic DNA
atggcttttactcagttgacattcagggacgtggccatcgaattctctcaagatgagtggaaatgcctgaactctacacagaggactttatacagggatgtgatgttggagaactacaggaacctggtctccctggatctgtctcgtaactgtgtaatcaaggaactagcaccacaacaggaaggtaacccaggagaagtattccacacagtgacattggaacaacatgaaaaacatgacattgaagagttttgcttcagggaaatcaagaaaaaaatacacgactttgactgtcagtggagagatgatgaaagaaattgcaacaaagtgactacggccccaaaagaaaatcttacttgtaggagagaccaacgcgatagaagaggtataggaaacaagtctattaaacatcagcttggattaagctttctaccacatccccatgaactgcagcagtttcaagctgaagggaaaatttatgaatgtaaccatgttgagaagtctgtcaaccatggttcctcagtttcaccaccccaaataatttcttctaccatcaaaacccatgtttctaataaatatgggactgatttcatctgttcttcattactcacacaagaacagaaatcatgcattagggaaaaaccttacagatatattgagtgcgacaaagccttgaatcatggctcacacatgactgtacgtcaggtaagtcattctggagagaaaggatataaatgtgatctgtgtggcaaggtctttagtcaaaaatcaaaccttgcgcgtcattggagagttcatactggagagaaaccatacaaatgtaatgaatgtgacagaagtttcagtcgcaactcatgccttgcactacatcggagagttcacactggagagaaaccttacaaatgttatgagtgtgacaaggtcttcagtcgaaattcatgccttgcactacatcagaaaactcatattggagagaaaccttacacatgtaaagagtgtggcaaagcctttagtgtgaggtcaacacttaccaaccatcaggtaattcatagtggcaagaaaccttacaaatgcaatgaatgtggcaaggtgttcagtcagacttcaagccttgcaactcatcagagaattcacactggggagaaaccatacaagtgtaatgaatgtggtaaagtcttcagtcagacttcaagccttgcaaggcattggagaattcatactggagagaaaccttacaaatgcaatgaatgtggtaaggttttcagttacaattcacaccttgcgagtcatcggagagttcatactggagagaaaccttacaagtgtaatgagtgtgggaaagcctttagtgtgcattcgaacttaactacccatcaggtcatccatactggagagaagccttacaaatgtaatcaatgtggcaaaggcttcagtgtgcattcaagcctaactacccatcaggtcatccatactggagaaaaaccttacaaatgtaatgagtgtggcaaatcctttagtgtgcgcccaaacctcactagacatcagataatccatactggaaagaaaccttacaaatgtagtgattgtgggaagtcctttagtgtgcgcccaaacctcttcagacatcaaattatccatactaaggagaaaccttataaaagaaat

SEQ ID NO: 5824 - DNA, 1665 bp, Homo sapiens
  source 1..1665: mol_type = genomic DNA
atggatggagacgggttgacattcagggacgtggccatcgaattctctcaagatgagtggaaatgcctgaactctacacagaggactttatacagggatgtgatgttggagaactacaggaacctggtctccctggatctgtctcgtaactgtgtaatcaaggaactagcaccacaacaggaaggtaacccaggagaagtattccacacagtgacattggaacaacatgaaaaacatgacattgaagagttttgcttcagggaaatcaagaaaaaaatacacgactttgactgtcagtggagagatgatgaaagaaattgcaacaaagtgactacggccccaaaagaaaatcttacttgtaggagagaccaacgcgatagaagaggtataggaaacaagtctattaaacatcagcttggattaagctttctaccacatccccatgaactgcagcagtttcaagctgaagggaaaatttatgaatgtaaccatgttgagaagtctgtcaaccatggttcctcagtttcaccaccccaaataatttcttctaccatcaaaacccatgtttctaataaatatgggactgatttcatctgttcttcattactcacacaagaacagaaatcatgcattagggaaaaaccttacagatatattgagtgcgacaaagccttgaatcatggctcacacatgactgtacgtcaggtaagtcattctggagagaaaggatataaatgtgatctgtgtggcaaggtctttagtcaaaaatcaaaccttgcgcgtcattggagagttcatactggagagaaaccatacaaatgtaatgaatgtgacagaagtttcagtcgcaactcatgccttgcactacatcggagagttcacactggagagaaaccttacaaatgttatgagtgtgacaaggtcttcagtcgaaattcatgccttgcactacatcagaaaactcatattggagagaaaccttacacatgtaaagagtgtggcaaagcctttagtgtgaggtcaacacttaccaaccatcaggtaattcatagtggcaagaaaccttacaaatgcaatgaatgtggcaaggtgttcagtcagacttcaagccttgcaactcatcagagaattcacactggggagaaaccatacaagtgtaatgaatgtggtaaagtcttcagtcagacttcaagccttgcaaggcattggagaattcatactggagagaaaccttacaaatgcaatgaatgtggtaaggttttcagttacaattcacaccttgcgagtcatcggagagttcatactggagagaaaccttacaagtgtaatgagtgtgggaaagcctttagtgtgcattcgaacttaactacccatcaggtcatccatactggagagaagccttacaaatgtaatcaatgtggcaaaggcttcagtgtgcattcaagcctaactacccatcaggtcatccatactggagaaaaaccttacaaatgtaatgagtgtggcaaatcctttagtgtgcgcccaaacctcactagacatcagataatccatactggaaagaaaccttacaaatgtagtgattgtgggaagtcctttagtgtgcgcccaaacctcttcagacatcaaattatccatactaaggagaaaccttataaaagaaat

SEQ ID NO: 5825 - DNA, 936 bp, Homo sapiens
  source 1..936: mol_type = genomic DNA
atggaggagaaaccctcagggcccatcccagacatgctggccactgcagagcccagctccagtgagaccgacaaggaggtgttgtccccggctgtgccagctgcagccccttcctcctccatgtcggaggagccaggccctgagcaggcagccacaccgccagtgtgggaacgtggaggggctggagggatgcagcagggctcctccccagccccagacagctgccagcctggccccggacccagccctggcctgaccagcatagtctccgggaccagcgaggacctgcggcctcccagacgacgcccacctccagggaagcaaatcccttgctccagccctggctgctgcctcagttttcccagcgtccgtgacctggcacagcatctgcgaacccactgcccgcccacacagtccctggaaggcaagctcttccgctgctcagccctgagctgcaccgagaccttccccagcatgcaggagctggtggctcacagcaaactgcactacaaacccaatcgctacttcaagtgtgagaactgcctcctgcgcttccgcacgcaccgctcgctcttcaagcacctgcatgtttgcgcggagcatgcgcagagcccagccccgccgccacccccggccctggaccgagagccgcccgcgccggagcgccccccggaggttgaccccgcatcagcgccgggcctgccgttcccgctgctggaacccttcacgacccccgcccctgcccccaccggaccgttcctgccctacttgaaccctgcgccctttggcctaagccccccgcgcctgcgccccttcctggccgctgcacccgggccgccggcttccagcgccgccgtctggaaaaagagccaaggtgctggcagcagcccccgaagaccccagggcggctccgacgcgccctcaggtgcgtgcagg

SEQ ID NO: 5826 - DNA, 1170 bp, Homo sapiens
  source 1..1170: mol_type = genomic DNA
atggaggagaaaccctcagggcccatcccagacatgctggccactgcagagcccagctccagtgagaccgacaaggaggtgttgtccccggctgtgccagctgcagccccttcctcctccatgtcggaggagccaggccctgagcaggcagccacaccgccagtgtgggaacgtggaggggctggagggatgcagcagggctcctccccagccccagacagctgccagcctggccccggacccagccctggcctgaccagcatagtctccgggaccagcgaggacctgcggcctcccagacgacgcccacctccagggaagcaaatcccttgctccagccctggctgctgcctcagttttcccagcgtccgtgacctggcacagcatctgcgaacccactgcccgcccacacagtccctggaaggcaagctcttccgctgctcagccctgagctgcaccgagaccttccccagcatgcaggagctggtggctcacagcaaactgcactacaaacccaatcgctacttcaagtgtgagaactgcctcctgcgcttccgcacgcaccgctcgctcttcaagcacctgcatgtttgcgcggagcatgcgcagagcccagccccgccgccacccccggccctggaccgagagccgcccgcgccggagcgccccccggaggttgaccccgcatcagcgccgggcctgccgttcccgctgctggaacccttcacgacccccgcccctgcccccaccggaccgttcctgccctacttgaaccctgcgccctttggcctaagccccccgcgcctgcgccccttcctggccgctgcacccgggccgccggcttccagcgccgccgtctggaaaaagagccaaggtgctggcagcagcccccgaagaccccagggcggctccgacgcgccctcagggcacgcggccccgagccgcatcgtgtgggagcacacacgcggccgctactcgtgcatgcagtgcgccttctccacggcctcgcggcccgccatgaccctgcacctggaggaccaccgccccggcgcccccgcggcccccgcggccgggccgccgcgccccgacgcccccgcggatccggccccgcttgcacccaaggtgtcgccgctgctgtcagagggggagcttccagtgttctcgcagctc

SEQ ID NO: 5827 - DNA, 1983 bp, Homo sapiens
  source 1..1983: mol_type = genomic DNA
atgccagctaacgaggacgctccccagccaggggaacatggcagtgcctgtgaggtatcagtgtcatttgaggatgtgactgtggacttcagtagagaggagtggcagcaactggactctactcaaagacgcctgtaccaggatgtaatgttggagaactacagccacctgctctcagtggggttcgaagttcctaaaccagaggtcatcttcaagttggagcaaggagaggggccatggacattggaaggggaagccccacatcagagctgttcagatgggaaatttggaattaagccttcccagaggagaatttctgggaaatctacatttcatagtgaaatggagggtgaagacacaagagatgattcattatactctattttagaagaattgtggcaagatgctgaacagataaagagatgtcaggaaaaacacaacaaacttctgagtcgcactactttcctcaataagaaaatattgaatacagagtgggattatgaatataaagactttggaaaatttgttcatccaagcccaaatctcattctttcacagaaaagaccccataaacgtgattcatttgggaagagttttaagcataatttagacttacatattcataataaaagcaatgcagcaaagaacctggataaaactattgggcatggtcaagtttttacccagaactcttcttatagtcaccacgaaaatacacatacaggagtgaagttctgtgaacgtaatcaatgtggaaaagtcctcagcctcaaacactcactcagtcaaaatgtgaaatttcccattggagagaaagcaaacacatgtactgaatttgggaagatcttcacccagaggtcacatttctttgctcctcaaaaaattcatactgtggaaaaacctcatgagcttagcaaatgtgtaaatgtttttacacagaagccactactcagtatatatctgagagttcatagagatgaaaaactctacatatgtactaaatgtgggaaggccttcatccagaattcagaattaattatgcatgagaaaactcatactagagagaaaccctataaatgcaatgaatgtgggaaatcatttttccaggtgtcatctctactcaggcatcagacaactcatactggagaaaaactctttgaatgcagtgaatgtggtaaaggcttctccctgaactcagccctcaatatacatcagaaaattcacactggagagagacatcacaaatgcagtgagtgtgggaaagcctttacccaaaaatcaacactcaggatgcatcagagaattcatacaggagagaggtcctatatctgtactcaatgtgggcaggccttcatccagaaggcacacttgattgcacatcaaagaattcatactggagagaagccttatgaatgcagtgactgtgggaaatctttcccttctaagtcacaactccagatgcataagagaattcatacaggagagaaaccctatatatgcactgaatgtgggaaggctttcaccaacaggtcaaatctcaatactcaccagaagtctcatactggagaaaagtcttatatatgtgctgaatgtgggaaggccttcaccgacaggtcaaatttcaataaacaccagaccattcacactggagagaaaccctatgtttgtgctgattgtgggagggccttcatccagaagtcagagttgattacacatcagagaattcatactacagagaagccttataaatgtcctgactgtgagaaatccttctccaagaaaccacatctcaaagtacatcaacgaattcacacaggggagaaaccatatatatgtgcagaatgtgggaaagccttcactgataggtcaaatttcaataaacatcagacaattcatactggagataaaccgtataaatgcagcgactgtggaaaggggttcacccagaaatcagttctcagtatgcatcgcaatattcataca

SEQ ID NO: 5828 - DNA, 1434 bp, Homo sapiens
  source 1..1434: mol_type = genomic DNA
atgttatcagatgagttagaatccaaaccagagctcctggtacagtttgttcagaatacgtccatcccattgggacaggggcttgtagaatcagaagctaaagatattacttgcttgtccctccttcccgtgactgaagcctcagaatgcagtcggctaatgttaccagatgatactacaaatcattctaactcctccaaggaggtcccttcctcagctgttttgagaagccttcgggtgaatgtgggtccagacggagaggagacgagagctcagactgtacagaaatccccggagtttttgtccacttcagagtcttctagcttgttgcaagatctacagccaagtgatagcacttcttttattcttcttaacctaacaagagcaggtctgggctcttcagctgagcacttagtgtttgtacaggatgaggcagaagattcagggaatgatttcctctccagtgagagcacagacagtagcattccatggttcctccgggttcaggagttggcccatgacagtttgattgctgctactcgtgcacaactggcaaagaatgcaaaaaccagcagcaatggagaaaatgtccaccttggttctggtgatgggcagtcaaaagattctgggccccttcctcaagtggaaaagaagctcaagtgtacagttgaaggttgtgaccggacatttgtatggccagctcactttaaataccacctcaagactcatcgaaatgaccgctccttcatctgtcctgcagaaggttgtgggaaaagcttctatgtgctgcagaggctgaaggtgcacatgaggacccacaatggagagaagccctttatgtgccatgagtctggctgtggtaagcagtttactacagctggaaacctgaagaaccaccggcgcatccacacaggagagaaacctttcctttgtgaagcccaaggatgtggccgttcctttgctgagtattctagcctccgaaaacatctggtggttcactcaggagagaagcctcatcagtgccaagtctgtgggaagaccttctctcagagtggaagcaggaatgtgcatatgagaaagcatcacctgcagctgggagcagctgggagtcaagagcaggagcaaactgctgagccactaatgggcagtagtttgcttgaagaggcttcagtacccagtaaaaacctggtgtctatgaattcccagcccagccttggtggagagtccttgaacctaccaaataccaattctatcctgggagttgatgatgaggtgcttgctgaaggatccccacgttccctgtcttcagtgcctgatgtgacacatcacctggtgaccatgcagtcagggaggcaatcatatgaagtttctgtcttaactgcagtaaatccacaagagttactaaaccaaggagatttaactgaaagacggaca

SEQ ID NO: 5829 - DNA, 1548 bp, Homo sapiens
  source 1..1548: mol_type = genomic DNA
atgttatcagatgagttagaatccaaaccagagctcctggtacagtttgttcagaatacgtccatcccattgggacaggggcttgtagaatcagaagctaaagatattacttgcttgtccctccttcccgtgactgaagcctcagaatgcagtcggctaatgttaccagaacctgttccatggagagaagaggatggaaagtcaggctgcagtgacttgaatgatactacaaatcattctaactcctccaaggaggtcccttcctcagctgttttgagaagccttcgggtgaatgtgggtccagacggagaggagacgagagctcagactgtacagaaatccccggagtttttgtccacttcagagtcttctagcttgttgcaagatctacagccaagtgatagcacttcttttattcttcttaacctaacaagagcaggtctgggctcttcagctgagcacttagtgtttgtacaggatgaggcagaagattcagggaatgatttcctctccagtgagagcacagacagtagcattccatggttcctccgggttcaggagttggcccatgacagtttgattgctgctactcgtgcacaactggcaaagaatgcaaaaaccagcagcaatggagaaaatgtccaccttggttctggtgatgggcagtcaaaagattctgggccccttcctcaagtggaaaagaagctcaagtgtacagttgaaggttgtgaccggacatttgtatggccagctcactttaaataccacctcaagactcatcgaaatgaccgctccttcatctgtcctgcagaaggttgtgggaaaagcttctatgtgctgcagaggctgaaggtgcacatgaggacccacaatggagagaagccctttatgtgccatgagtctggctgtggtaagcagtttactacagctggaaacctgaagaaccaccggcgcatccacacaggagagaaacctttcctttgtgaagcccaaggatgtggccgttcctttgctgagtattctagcctccgaaaacatctggtggttcactcaggagagaagcctcatcagtgccaagtctgtgggaagaccttctctcagagtggaagcaggaatgtgcatatgagaaagcatcacctgcagctgggagcagctgggagtcaagagcaggagcaaactgctgagccactaatgggcagtagtttgcttgaagaggcttcagtacccagtaaaaacctggtgtctatgaattcccagcccagccttggtggagagtccttgaacctaccaaataccaattctatcctgggagttgatgatgaggtgcttgctgaaggatccccacgttccctgtcttcagtgcctgatgtgacacatcacctggtgaccatgcagtcagggaggcaatcatatgaagtttctgtcttaactgcagtaaatccacaagagagtctcgctccgttgcccaggctggagtgcagtggtgcgttctcggctcactgcaacctctgcctcccaggttcaagcgattctcctgcctcagcctcc

SEQ ID NO: 5830 - DNA, 1215 bp, Homo sapiens
  source 1..1215: mol_type = genomic DNA
atgttatcagatgagttagaatccaaaccagagctcctggtacagtttgttcagaatacgtccatcccattgggacaggggcttgtagaatcagaagctaaagatattacttgcttgtccctccttcccgtgactgaagcctcagaatgcagtcggctaatgttaccaggtctgggctcttcagctgagcacttagtgtttgtacaggatgaggcagaagattcagggaatgatttcctctccagtgagagcacagacagtagcattccatggttcctccgggttcaggagttggcccatgacagtttgattgctgctactcgtgcacaactggcaaagaatgcaaaaaccagcagcaatggagaaaatgtccaccttggttctggtgatgggcagtcaaaagattctgggccccttcctcaagtggaaaagaagctcaagtgtacagttgaaggttgtgaccggacatttgtatggccagctcactttaaataccacctcaagactcatcgaaatgaccgctccttcatctgtcctgcagaaggttgtgggaaaagcttctatgtgctgcagaggctgaaggtgcacatgaggacccacaatggagagaagccctttatgtgccatgagtctggctgtggtaagcagtttactacagctggaaacctgaagaaccaccggcgcatccacacaggagagaaacctttcctttgtgaagcccaaggatgtggccgttcctttgctgagtattctagcctccgaaaacatctggtggttcactcaggagagaagcctcatcagtgccaagtctgtgggaagaccttctctcagagtggaagcaggaatgtgcatatgagaaagcatcacctgcagctgggagcagctgggagtcaagagcaggagcaaactgctgagccactaatgggcagtagtttgcttgaagaggcttcagtacccagtaaaaacctggtgtctatgaattcccagcccagccttggtggagagtccttgaacctaccaaataccaattctatcctgggagttgatgatgaggtgcttgctgaaggatccccacgttccctgtcttcagtgcctgatgtgacacatcacctggtgaccatgcagtcagggaggcaatcatatgaagtttctgtcttaactgcagtaaatccacaagagttactaaaccaaggagatttaactgaaagacggaca

SEQ ID NO: 5831 - DNA, 552 bp, Homo sapiens
  source 1..552: mol_type = genomic DNA
atgttcctgagcccgggcgaggggccggcaaccgagggtgggggtctggggccgggcgaggaggcccccaagaagaagcaccggaggaaccgcaccaccttcaccacctaccagctgcaccagctggagcgggcgttcgaggcctctcactacccggatgtgtacagccgtgaggagctggcagccaaggtgcacctacctgaggtgcgcgtgcaggtgtggttccagaaccgccgggccaagtggcgccgccaggagcggctggagtcaggctcgggtgccgtggcagctccgagactccccgaggccccagcgctgccgttcgcccgccccccggccatgtcgctgcccctggagccctggttgggccccggaccgccggccgtgccaggcctcccccgcctcctgggcccgggcccggggctgcaagcgtccttcgggcctcatgcctttgctcccaccttcgcagatggcttcgccctggaggaggcgtccctgcggctgctggccaaggaacatgcacaggctctggacagggcctggccgccagcc

SEQ ID NO: 5832 - DNA, 711 bp, Homo sapiens
  source 1..711: mol_type = genomic DNA
atggagcttacccagcctgcagaagacctcatccagacccagcagacccctgcctcagaacttggggaccctgaagaccccggagaggaggctgcagatggctcagacactgtggtcctcagtctctttccctgcacccctgagcctgtgaatcctgaaccggatgccagtgtttcctctccacagggcagctccctgaagcactccaccactctcaccaaccggcagcgagggaacgaggtgtcagctctgccggccaccctagactgtgacaacctcgtcaacaagccagacgagcgcggcttcacccccctcatctgggcctccgcctttggagagattgagaccgttcgcttcctgctggagtggggtgccgacccccacatcctggcaaaagagcgagagagcgccctgtcgctggccagcacaggcggctacacagacattgtggggctgctgctggagcgtgacgtggacatcaacatctatgattggaatggagggacgccactgctgtacgctgtgcgcgggaaccacgtgaaatgcgttgaggccttgctggcccgaggcgctgacctcaccaccgaagccgactctggctacaccccgatggaccttgccgtggccctgggataccggaaagtgcaacaggtgatcgagaaccacatcctcaagctcttccagagcaacctggtgcccgctgaccctgag

SEQ ID NO: 5833 - DNA, 738 bp, Homo sapiens
  source 1..738: mol_type = genomic DNA
atggcgtttctccgaagcatgtggggcgtgctgagtgccctgggaaggtctggagcagagctgtgcaccggctgtggaagtcgactgcgctcccccttcagttttgtgtatttaccgaggtggttttcatctgtcttggcaagttgtccaaagaaacctgtaagttcttaccttcgattttctaaagaacaactacccatatttaaagctcagaacccagatgcaaaaactacagaactaattagaagaattgcccagcgttggagggaacttcctgattcaaagaaaaaaatatatcaagatgcttatagggcggagtggcaggtatataaagaagagataagcagatttaaagaacagctaactccaagtcagattatgtctttggaaaaagaaatcatggacaaacatttaaaaaggaaagctatgacaaaaaaaaaagagttaacactgcttggaaaaccaaaaagacctcgttcagcttataacgtttatgtagctgaaagattccaagaagctaagggtgattcaccgcaggaaaagctgaagactgtaaaggaaaactggaaaaatctgtctgactctgaaaaggaattatatattcagcatgctaaagaggacgaaactcgttatcataatgaaatgaagtcttgggaagaacaaatgattgaagttggacgaaaggatcttctacgtcgcacaataaagaaacaacgaaaatatggtgctgaggagtgt

SEQ ID NO: 5834 - DNA, 642 bp, Homo sapiens
  source 1..642: mol_type = genomic DNA
atggcgtttctccgaagcatgtggggcgtgctgagtgccctgggaaggtctggagcagagctgtgcaccggctgtggaagtcgactgcgctcccccttcagttttgtgtatttaccgaggtggttttcatctgtcttggcaagttgtccaaagaaacctgtaagttcttaccttcgattttctaaagaacaactacccatatttaaagctcagaacccagatgcaaaaactacagaactaattagaagaattgcccagcgttggagggaacttcctgattcaaagaaaaaaatatatcaagatgcttatagggcggagtggcaggtatataaagaagagataagcagatttaaagaacagctaactccaagtcagattatgtctttggaaaaagaaatcatggacaaacatttaaaaaggaaagctatgacaaaaaaaaaagaaaagctgaagactgtaaaggaaaactggaaaaatctgtctgactctgaaaaggaattatatattcagcatgctaaagaggacgaaactcgttatcataatgaaatgaagtcttgggaagaacaaatgattgaagttggacgaaaggatcttctacgtcgcacaataaagaaacaacgaaaatatggtgctgaggagtgt

SEQ ID NO: 5835 - DNA, 2493 bp, Homo sapiens
  source 1..2493: mol_type = genomic DNA
atggccggcgcgctggcaggtctggccgcgggcttgcaggtcccgcgggtcgcgcccagcccagactcggactcggacacagactcggaggacccgagtctccggcgcagcgcgggcggcttgctccgctcgcaggtcatccacagcggtcacttcatggtgtcgtcgccgcacagcgactcgctgccccggcggcgcgaccaggaggggtccgtggggccctccgacttcgggccgcgcagtatcgaccccacactcacacgcctcttcgagtgcttgagcctggcctacagtggcaagctggtgtctcccaagtggaagaatttcaaaggcctcaagctgctctgcagagacaagatccgcctgaacaacgccatctggagggcctggtatatccagtatgtgaagcggaggaagagccccgtgtgtggcttcgtgacccccctgcaggggcctgaggctgatgcgcaccggaagccggaggccgtggtcctggaggggaactactggaagcggcgcatcgaggtggtgatgcgggaataccacaagtggcgcatctactacaagaagcggctccgtaagcccagcagggaagatgacctcctggcccctaagcaggcggaaggcaggtggccgccgccggagcaatggtgcaaacagctcttctccagtgtggtccccgtgctgctgggggacccagaggaggagccgggtgggcggcagctcctggacctcaattgctttttgtccgacatctcagacactctcttcaccatgactcagtccggcccttcgcccctgcagctgccgcctgaggatgcctacgtcggcaatgctgacatgatccagccggacctgacgccactgcagccaagcctggatgacttcatggacatctcagatttctttaccaactcccgcctcccacagccgcccatgccttcaaacttcccagagccccccagcttcagccccgtggttgactccctcttcagcagtgggaccctgggcccagaggtgcccccggcttcctcggccatgacccacctctctggacacagccgtctgcaggctcggaacagctgccctggccccttggactccagcgccttcctgagttctgatttcctccttcctgaagaccccaagccccggctcccaccccctcctgtacccccacctctgctgcattaccctccccctgccaaggtgccaggcctggagccctgccccccacctcccttccctcccatggcaccacccactgctttgctgcaggaagagcctctcttctctcccaggtttcccttccccaccgtccctcctgccccaggagtgtctccgctgcctgctcctgcagccttcccacccaccccacagtctgtccccagcccagcccccacccccttccccatagagcttctacccttggggtattcggagcctgcctttgggccttgcttctccatgcccagaggcaagccccccgccccatcccctaggggacagaaagccagcccccctaccttagcccctgccactgccagtccccccaccactgcggggagcaacaacccctgcctcacacagctgctcacagcagctaagccggagcaagccctggagccaccacttgtatccagcaccctcctccggtccccagggtccccgcaggagacagtccctgaattcccctgcacattccttcccccgaccccggcccctacaccgccccggccacctccaggcccggccacattggccccttccaggcccctgcttgtccccaaagcggagcggctctcacccccagcgcccagcggcagtgaacggcggctgtcaggggacctcagctccatgccaggccctgggactctgagcgtccgtgtctctcccccgcaacccatcctcagccggggccgtccagacagcaacaagaaccggcgtatcacacacatctccgcggagcagaagcggcgcttcaacatcaagctggggtttgacacccttcatgggctcgtgagcacactcagtgcccagcccagcctcaaggagcgtgcgggcttgcaggaggaggcccagcagctgcgggatgagattgaggagctcaatgccgccattaacctgtgccagcagcagctgcccgccacaggggtacccatcacacaccagcgttttgaccagatgcgagacatgtttgatgactacgtccgaacccgtacgctgcacaactggaagttctgggtgttcagcatcctcatccggcctctgtttgagtccttcaacgggatggtgtccacggcaagtgtgcacaccctccgccagacctcactggcctggctggaccagtactgctctctgcccgctctccggccaactgtcctgaactccctacgccagctgggcacatctaccagtatcctgaccgacccgggccgcatccctgagcaagccacacgggcagtcacagagggcacccttggcaaaccttta

SEQ ID NO: 5836 - DNA, 2550 bp, Homo sapiens
  source 1..2550: mol_type = genomic DNA
atggccggcgcgctggcaggtctggccgcgggcttgcaggtcccgcgggtcgcgcccagcccagactcggactcggacacagactcggaggacccgagtctccggcgcagcgcgggcggcttgctccgctcgcaggtcatccacagcggtcacttcatggtgtcgtcgccgcacagcgactcgctgccccggcggcgcgaccaggaggggtccgtggggccctccgacttcgggccgcgcagtatcgaccccacactcacacgcctcttcgagtgcttgagcctggcctacagtggcaagctggtgtctcccaagtggaagaatttcaaaggcctcaagctgctctgcagagacaagatccgcctgaacaacgccatctggagggcctggtatatccagtatgtgaagcggaggaagagccccgtgtgtggcttcgtgacccccctgcaggggcctgaggctgatgcgcaccggaagccggaggccgtggtcctggaggggaactactggaagcggcgcatcgaggtggtgatgcgggaataccacaagtggcgcatctactacaagaagcggctccgtaagcccagcagggaagatgacctcctggcccctaagcaggcggaaggcaggtggccgccgccggagcaatggtgcaaacagctcttctccagtgtggtccccgtgctgctgggggacccagaggaggagccgggtgggcggcagctcctggacctcaattgctttttgtccgacatctcagacactctcttcaccatgactcagtccggcccttcgcccctgcagctgccgcctgaggatgcctacgtcggcaatgctgacatgatccagccggacctgacgccactgcagccaagcctggatgacttcatggacatctcagatttctttaccaactcccgcctcccacagccgcccatgccttcaaacttcccagagccccccagcttcagccccgtggttgactccctcttcagcagtgggaccctgggcccagaggtgcccccggcttcctcggccatgacccacctctctggacacagccgtctgcaggctcggaacagctgccctggccccttggactccagcgccttcctgagttctgatttcctccttcctgaagaccccaagccccggctcccaccccctcctgtacccccacctctgctgcattaccctccccctgccaaggtgccaggcctggagccctgccccccacctcccttccctcccatggcaccacccactgctttgctgcaggaagagcctctcttctctcccaggtttcccttccccaccgtccctcctgccccaggagtgtctccgctgcctgctcctgcagccttcccacccaccccacagtctgtccccagcccagcccccacccccttccccatagagcttctacccttggggtattcggagcctgcctttgggccttgcttctccatgcccagaggcaagccccccgccccatcccctaggggacagaaagccagcccccctaccttagcccctgccactgccagtccccccaccactgcggggagcaacaacccctgcctcacacagctgctcacagcagctaagccggagcaagccctggagccaccacttgtatccagcaccctcctccggtccccagggtccccgcaggagacagtccctgaattcccctgcacattccttcccccgaccccggcccctacaccgccccggccacctccaggcccggccacattggccccttccaggcccctgcttgtccccaaagcggagcggctctcacccccagcgcccagcggcagtgaacggcggctgtcaggggacctcagctccatgccaggccctgggactctgagcgtccgtgtctctcccccgcaacccatcctcagccggggccgtccagacagcaacaagaaccggcgtatcacacacatctccgcggagcagaagcggcgcttcaacatcaagctggggtttgacacccttcatgggctcgtgagcacactcagtgcccagcccagcctcaaggtgagcaaagctaccacgctgcagaagacagctgagtacatccttatgctacagcaggagcgtgcgggcttgcaggaggaggcccagcagctgcgggatgagattgaggagctcaatgccgccattaacctgtgccagcagcagctgcccgccacaggggtacccatcacacaccagcgttttgaccagatgcgagacatgtttgatgactacgtccgaacccgtacgctgcacaactggaagttctgggtgttcagcatcctcatccggcctctgtttgagtccttcaacgggatggtgtccacggcaagtgtgcacaccctccgccagacctcactggcctggctggaccagtactgctctctgcccgctctccggccaactgtcctgaactccctacgccagctgggcacatctaccagtatcctgaccgacccgggccgcatccctgagcaagccacacgggcagtcacagagggcacccttggcaaaccttta

SEQ ID NO: 5837 - DNA, 2499 bp, Homo sapiens
  source 1..2499: mol_type = genomic DNA
atggccggcgcgctggcaggtctggccgcgggcttgcaggtcccgcgggtcgcgcccagcccagactcggactcggacacagactcggaggacccgagtctccggcgcagcgcgggcggcttgctccgctcgcaggtcatccacagcggtcacttcatggtgtcgtcgccgcacagcgactcgctgccccggcggcgcgaccaggaggggtccgtggggccctccgacttcgggccgcgcagtatcgaccccacactcacacgcctcttcgagtgcttgagcctggcctacagtggcaagctggtgtctcccaagtggaagaatttcaaaggcctcaagctgctctgcagagacaagatccgcctgaacaacgccatctggagggcctggtatatccagtatgtgaagcggaggaagagccccgtgtgtggcttcgtgacccccctgcaggggcctgaggctgatgcgcaccggaagccggaggccgtggtcctggaggggaactactggaagcggcgcatcgaggtggtgatgcgggaataccacaagtggcgcatctactacaagaagcggctccgtaagcccagcagggaagatgacctcctggcccctaagcaggcggaaggcaggtggccgccgccggagcaatggtgcaaacagctcttctccagtgtggtccccgtgctgctgggggacccagaggaggagccgggtgggcggcagctcctggacctcaattgctttttgtccgacatctcagacactctcttcaccatgactcagtccggcccttcgcccctgcagctgccgcctgaggatgcctacgtcggcaatgctgacatgatccagccggacctgacgccactgcagccaagcctggatgacttcatggacatctcagatttctttaccaactcccgcctcccacagccgcccatgccttcaaacttcccagagccccccagcttcagccccgtggttgactccctcttcagcagtgggaccctgggcccagaggtgcccccggcttcctcggccatgacccacctctctggacacagccgtctgcaggctcggaacagctgccctggccccttggactccagcgccttcctgagttctgatttcctccttcctgaagaccccaagccccggctcccaccccctcctgtacccccacctctgctgcattaccctccccctgccaaggtgccaggcctggagccctgccccccacctcccttccctcccatggcaccacccactgctttgctgcaggaagagcctctcttctctcccaggtttcccttccccaccgtccctcctgccccaggagtgtctccgctgcctgctcctgcagccttcccacccaccccacagtctgtccccagcccagcccccacccccttccccatagagcttctacccttggggtattcggagcctgcctttgggccttgcttctccatgcccagaggcaagccccccgccccatcccctaggggacagaaagccagcccccctaccttagcccctgccactgccagtccccccaccactgcggggagcaacaacccctgcctcacacagctgctcacagcagctaagccggagcaagccctggagccaccacttgtatccagcaccctcctccggtccccagggtccccgcaggagacagtccctgaattcccctgcacattccttcccccgaccccggcccctacaccgccccggccacctccaggcccggccacattggccccttccaggcccctgcttgtccccaaagcggagcggctctcacccccagcgcccagcggcagtgaacggcggctgtcaggggacctcagctccatgccaggccctgggactctgagcgtccgtgtctctcccccgcaacccatcctcagccggggccgtccagacagcaacaagaccgagaaccggcgtatcacacacatctccgcggagcagaagcggcgcttcaacatcaagctggggtttgacacccttcatgggctcgtgagcacactcagtgcccagcccagcctcaaggagcgtgcgggcttgcaggaggaggcccagcagctgcgggatgagattgaggagctcaatgccgccattaacctgtgccagcagcagctgcccgccacaggggtacccatcacacaccagcgttttgaccagatgcgagacatgtttgatgactacgtccgaacccgtacgctgcacaactggaagttctgggtgttcagcatcctcatccggcctctgtttgagtccttcaacgggatggtgtccacggcaagtgtgcacaccctccgccagacctcactggcctggctggaccagtactgctctctgcccgctctccggccaactgtcctgaactccctacgccagctgggcacatctaccagtatcctgaccgacccgggccgcatccctgagcaagccacacgggcagtcacagagggcacccttggcaaaccttta

SEQ ID NO: 5838 - DNA, 2556 bp, Homo sapiens
  source 1..2556: mol_type = genomic DNA
atggccggcgcgctggcaggtctggccgcgggcttgcaggtcccgcgggtcgcgcccagcccagactcggactcggacacagactcggaggacccgagtctccggcgcagcgcgggcggcttgctccgctcgcaggtcatccacagcggtcacttcatggtgtcgtcgccgcacagcgactcgctgccccggcggcgcgaccaggaggggtccgtggggccctccgacttcgggccgcgcagtatcgaccccacactcacacgcctcttcgagtgcttgagcctggcctacagtggcaagctggtgtctcccaagtggaagaatttcaaaggcctcaagctgctctgcagagacaagatccgcctgaacaacgccatctggagggcctggtatatccagtatgtgaagcggaggaagagccccgtgtgtggcttcgtgacccccctgcaggggcctgaggctgatgcgcaccggaagccggaggccgtggtcctggaggggaactactggaagcggcgcatcgaggtggtgatgcgggaataccacaagtggcgcatctactacaagaagcggctccgtaagcccagcagggaagatgacctcctggcccctaagcaggcggaaggcaggtggccgccgccggagcaatggtgcaaacagctcttctccagtgtggtccccgtgctgctgggggacccagaggaggagccgggtgggcggcagctcctggacctcaattgctttttgtccgacatctcagacactctcttcaccatgactcagtccggcccttcgcccctgcagctgccgcctgaggatgcctacgtcggcaatgctgacatgatccagccggacctgacgccactgcagccaagcctggatgacttcatggacatctcagatttctttaccaactcccgcctcccacagccgcccatgccttcaaacttcccagagccccccagcttcagccccgtggttgactccctcttcagcagtgggaccctgggcccagaggtgcccccggcttcctcggccatgacccacctctctggacacagccgtctgcaggctcggaacagctgccctggccccttggactccagcgccttcctgagttctgatttcctccttcctgaagaccccaagccccggctcccaccccctcctgtacccccacctctgctgcattaccctccccctgccaaggtgccaggcctggagccctgccccccacctcccttccctcccatggcaccacccactgctttgctgcaggaagagcctctcttctctcccaggtttcccttccccaccgtccctcctgccccaggagtgtctccgctgcctgctcctgcagccttcccacccaccccacagtctgtccccagcccagcccccacccccttccccatagagcttctacccttggggtattcggagcctgcctttgggccttgcttctccatgcccagaggcaagccccccgccccatcccctaggggacagaaagccagcccccctaccttagcccctgccactgccagtccccccaccactgcggggagcaacaacccctgcctcacacagctgctcacagcagctaagccggagcaagccctggagccaccacttgtatccagcaccctcctccggtccccagggtccccgcaggagacagtccctgaattcccctgcacattccttcccccgaccccggcccctacaccgccccggccacctccaggcccggccacattggccccttccaggcccctgcttgtccccaaagcggagcggctctcacccccagcgcccagcggcagtgaacggcggctgtcaggggacctcagctccatgccaggccctgggactctgagcgtccgtgtctctcccccgcaacccatcctcagccggggccgtccagacagcaacaagaccgagaaccggcgtatcacacacatctccgcggagcagaagcggcgcttcaacatcaagctggggtttgacacccttcatgggctcgtgagcacactcagtgcccagcccagcctcaaggtgagcaaagctaccacgctgcagaagacagctgagtacatccttatgctacagcaggagcgtgcgggcttgcaggaggaggcccagcagctgcgggatgagattgaggagctcaatgccgccattaacctgtgccagcagcagctgcccgccacaggggtacccatcacacaccagcgttttgaccagatgcgagacatgtttgatgactacgtccgaacccgtacgctgcacaactggaagttctgggtgttcagcatcctcatccggcctctgtttgagtccttcaacgggatggtgtccacggcaagtgtgcacaccctccgccagacctcactggcctggctggaccagtactgctctctgcccgctctccggccaactgtcctgaactccctacgccagctgggcacatctaccagtatcctgaccgacccgggccgcatccctgagcaagccacacgggcagtcacagagggcacccttggcaaaccttta

SEQ ID NO: 5839 - DNA, 1386 bp, Homo sapiens
  source 1..1386: mol_type = genomic DNA
atggacaccaaacatttcctgccgctcgatttctccacccaggtgaactcctccctcacctccccgacggggcgaggctccatggctgccccctcgctgcacccgtccctggggcctggcatcggctccccgggacagctgcattctcccatcagcaccctgagctcccccatcaacggcatgggcccgcctttctcggtcatcagctcccccatgggcccccactccatgtcggtgcccaccacacccaccctgggcttcagcactggcagcccccagctcagctcacctatgaaccccgtcagcagcagcgaggacatcaagccccccctgggcctcaatggcgtcctcaaggtccccgcccacccctcaggaaacatggcttccttcaccaagcacatctgcgccatctgcggggaccgctcctcaggcaagcactatggagtgtacagctgcgaggggtgcaagggcttcttcaagcggacggtgcgcaaggacctgacctacacctgccgcgacaacaaggactgcctgattgacaagcggcagcggaaccggtgccagtactgccgctaccagaagtgcctggccatgggcatgaagcgggaagccgtgcaggaggagcggcagcgtggcaaggaccggaacgagaatgaggtggagtcgaccagcagcgccaacgaggacatgccggtggagaggatcctggaggctgagctggccgtggagcccaagaccgagacctacgtggaggcaaacatggggctgaaccccagctcgccgaacgaccctgtcaccaacatttgccaagcagccgacaaacagcttttcaccctggtggagtgggccaagcggatcccacacttctcagagctgcccctggacgaccaggtcatcctgctgcgggcaggctggaatgagctgctcatcgcctccttctcccaccgctccatcgccgtgaaggacgggatcctcctggccaccgggctgcacgtccaccggaacagcgcccacagcgcaggggtgggcgccatctttgacagggtgctgacggagcttgtgtccaagatgcgggacatgcagatggacaagacggagctgggctgcctgcgcgccatcgtcctctttaaccctgactccaaggggctctcgaacccggccgaggtggaggcgctgagggagaaggtctatgcgtccttggaggcctactgcaagcacaagtacccagagcagccgggaaggttcgctaagctcttgctccgcctgccggctctgcgctccatcgggctcaaatgcctggaacatctcttcttcttcaagctcatcggggacacacccattgacaccttccttatggagatgctggaggcgccgcaccaaatgact

SEQ ID NO: 5840 - DNA, 1257 bp, Homo sapiens
  source 1..1257: mol_type = genomic DNA
atgatgtccatgaacagcaagcagcctcactttgccatgcatcccaccctccctgagcacaagtacccgtcgctgcactccagctccgaggccatccggcgggcctgcctgcccacgccgccgctgcagagcaacctcttcgccagcctggacgagacgctgctggcgcgggccgaggcgctggcggccgtggacatcgccgtgtcccagggcaagagccatcctttcaagccggacgccacgtaccacacgatgaacagcgtgccgtgcacgtccacttccacggtgcctctggcgcaccaccaccaccaccaccaccaccaccaggcgctcgaacccggcgatctgctggaccacatctcctcgccgtcgctcgcgctcatggccggcgcgggcggcgcgggcgcggcggccggcggcggcggcgcccacgacggcccggggggcggtggcggcccgggcggcggcggcggcccgggcggcggccccgggggaggcggcggtggcggcccggggggcggcggcggcggcccgggcggcgggctcctgggcggctccgcgcaccctcacccgcatatgcacagcctgggccacctgtcgcaccccgcggcggcggccgccatgaacatgccgtccgggctgccgcaccccgggctggtggcggcggcggcgcaccacggcgcggcagcggcagcggcggcggcggcggccgggcaggtggcagcggcatcggcggcggcggccgtggtgggcgcagcgggcctggcgtccatctgcgactcggacacggacccgcgcgagctcgaggcgttcgcggagcgcttcaagcagcggcgcatcaagctgggcgtgacgcaggccgacgtgggctcggcgctggccaacctcaagatcccgggcgtgggctcactcagccagagcaccatctgcaggttcgagtcgctcacgctctcgcacaacaacatgatcgcgctcaagcccatcctgcaggcgtggctcgaggaggccgagggcgcccagcgcgagaaaatgaacaagcctgagctcttcaacggcggcgagaagaagcgcaagcggacttccatcgccgcgcccgagaagcgctccctcgaggcctacttcgccgtgcagccccggccctcgtccgagaagatcgccgccatcgccgagaaactggacctcaaaaagaacgtggtgcgggtgtggttttgcaaccagagacagaagcagaagcggatgaaattctctgccacttac

SEQ ID NO: 5841 - DNA, 1227 bp, Homo sapiens
  source 1..1227: mol_type = genomic DNA
atgatgatgatgtccctgaacagcaagcaggcgtttagcatgccgcacggcggcagcctgcacgtggagcccaagtactcggcactgcacagcacctcgccgggctcctcggctcccatcgcgccctcggccagctcccccagcagctcgagcaacgctggtggtggcggcggcggcggcggcggcggcggcggcggcggaggccgaagcagcagctccagcagcagtggcagcagcggcggcgggggctcggaggctatgcggagagcctgtcttccaaccccaccgagcaatatattcggcgggctggatgagagtctgctggcccgcgccgaggctctggcagccgtggacatcgtctcccagagcaagagccaccaccaccatccaccccaccacagccccttcaaaccggacgccacctaccacactatgaataccatcccgtgcacgtcggccgcctcttcttcatcggtgcccatctcgcacccttccgcgttggcgggcacgcaccaccaccaccaccatcaccaccaccaccaccaccaaccgcaccaggcgctggagggcgagctgctggagcacctgagtcccgggctggccctgggcgctatggcgggccccgacggcgctgtggtgtccacgccggctcacgcgccgcacatggccaccatgaaccccatgcaccaagcagcgctcagcatggcccacgcgcacgggctgccgtcgcacatgggctgcatgagcgacgtggacgccgacccgcgggacctggaggcattcgccgagcgcttcaagcagcgacgcatcaagctgggggtgacccaggcagatgtgggctccgcgctggccaacctcaagatccccggcgtgggctcgcttagccagagcaccatctgcaggttcgagtccctcacactgtcccacaataatatgatcgcgctcaaacccatcctgcaggcatggctcgaggaggccgagaagtcccaccgcgagaagctcaccaagcctgaactcttcaatggcgcggagaagaagcgcaagcgcacgtccatcgctgcgccagagaagcgctcgctcgaagcctactttgccattcagcctcggccctcctctgaaaagatcgccgccatcgcggagaagctggacctgaagaaaaacgtggtgcgcgtctggttctgcaaccagaggcagaaacagaaaagaatgaaatattccgccggcatt

SEQ ID NO: 5842 - DNA, 1014 bp, Homo sapiens
  source 1..1014: mol_type = genomic DNA
atgatggccatgaactccaagcagcctttcggcatgcacccggtgctgcaagaacccaaattctccagtctgcactctggctccgaggccatgcgccgagtctgtctcccagccccgcagctgcagggtaatatatttggaagctttgatgagagcctgctggcacgcgccgaagctctggcggcggtggatatcgtctcccacggcaagaaccatccgttcaagcccgacgccacctaccataccatgagcagcgtgccctgcacgtccacttcgtccaccgtgcccatctcccacccagctgcgctcacctcacaccctcaccacgccgtgcaccagggcctcgaaggcgacctgctggagcacatctcgcccacgctgagtgtgagcggcctgggcgctccggaacactcggtgatgcccgcacagatccatccacaccacctgggcgccatgggccacctgcaccaggccatgggcatgagtcacccgcacaccgtggcccctcatagcgccatgcctgcatgcctcagcgacgtggagtcagacccgcgcgagctggaagccttcgccgagcgcttcaagcagcggcgcatcaagctgggggtgacccaggcggacgtgggcgcggctctggctaatctcaagatccccggcgtgggctcgctgagccaaagcaccatctgcaggttcgagtctctcactctctcgcacaacaacatgatcgctctcaagccggtgctccaggcctggttggaggaggccgaggccgcctaccgagagaagaacagcaagccagagctcttcaacggcagcgaacggaagcgcaaacgcacgtccatcgcggcgccggagaagcgttcactcgaggcctatttcgctatccagccacgtccttcatctgagaagatcgcggccatcgctgagaaactggaccttaaaaagaacgtggtgagagtctggttctgcaaccagagacagaaacagaaacgaatgaagtattcggctgtccac

SEQ ID NO: 5843 - DNA, 1830 bp, Homo sapiens
  source 1..1830: mol_type = genomic DNA
atgcagtattcgcaccactgtgagcaccttttagagagactgaacaaacagcgggaagcaggttttctctgtgactgtaccatagtgattggggaattccagtttaaagctcataggaatgtgctggcctcctttagtgagtattttggtgcgatctacagaagcacttctgagaacaatgtctttcttgatcagagtcaggtgaaggctgatggatttcagaaactgttggagtttatatacacaggaactttaaatcttgacagttggaatgttaaagaaattcatcaggctgctgactatctcaaagtggaagaggtggtcactaaatgcaaaataaagatggaagattttgcttttattgctaatccttcttctacagagatatctagtattactggaaacattgaattgaatcaacagacttgtcttcttactctgcgagattataataatcgagagaaatcagaagtatctacagatttgattcaggcaaatcctaaacaaggcgcgttagcgaaaaagtcatctcaaacgaaaaagaagaagaaggctttcaactccccgaaaacagggcagaataaaacagtgcaatatcccagtgacatcttagagaatgcatctgttgaattattcctagatgcaaataaactgcccacacctgtagtagaacaagttgcacaaataaatgataattcagaactcgagttgacatcagttgtggaaaatacttttccagcacaagatattgtgcacactgttacagtgaaacggaaacgtggaaaatcacagccaaactgtgctctgaaagaacactctatgtctaatatagccagcgtcaagagtccttatgaggcggagaactccggggaagagctggatcagaggtattccaaggccaagccaatgtgtaacacatgtgggaaagtgttttcagaagccagcagtttgagaaggcacatgagaatacataaaggagtcaaaccttacgtctgccacttatgtggaaaggcatttacccaatgtaaccagctgaaaacgcatgtaagaactcatacaggtgagaagccatacaaatgtgaattgtgtgataaaggatttgctcagaaatgtcagctagtcttccatagtcgcatgcatcatggtgaagaaaaaccctataaatgtgatgtatgcaacttacagtttgcaacttctagcaatctcaagattcatgcaaggaagcatagtggagagaagccatatgtctgtgataggtgtggacagagatttgctcaagccagcacactgacctatcatgtccgtaggcatactggagaaaagccttatgtatgtgatacctgtgggaaggcatttgctgtctctagttctcttatcactcattctcgaaaacatacaggtgaaaaaccatacatatgtggtatttgtgggaaaagttttatttcctcaggagagctcaacaaacactttcggtcccatacaggagaaagaccatttatctgcgaattatgtggaaattcttacacagatattaaaaatttaaagaagcacaaaacaaaagtccattctggtgcagataaaactctagactccagtgcagaggatcatactttgagtgaacaggattccatacaaaaaagtcctttatcagaaactatggatgtgaagccttctgatatgactttaccattagctcttccacttgggactgaggaccatcacatgcttctgcctgtcacggatactcagtctcctacatcagatacattgttgaggtcaactgtgaatgggtattcagaaccacagttgatttttttacaacaattatac

SEQ ID NO: 5844 - DNA, 1743 bp, Homo sapiens
  source 1..1743: mol_type = genomic DNA
atgcagtattcgcaccactgtgagcaccttttagagagactgaacaaacagcgggaagcaggttttctctgtgactgtaccatagtgattggggaattccagtttaaagctcataggaatgtgctggcctcctttagtgagtattttggtgcgatctacagaagcacttctgagaacaatgtctttcttgatcagagtcaggtgaaggctgatggatttcagaaactgttggagtttatatacacaggaactttaaatcttgacagttggaatgttaaagaaattcatcaggctgctgactatctcaaagtggaagaggtggtcactaaatgcaaaataaagatggaagattttgcttttattgctaatccttcttctacagagatatctagtattactggaaacattgaattgaatcaacagacttgtcttcttactctgcgagattataataatcgagagaaatcagaagtatctacagatttgattcaggcaaatcctaaacaaggcgcgttagcgaaaaagtcatctcaaacgaaaaagaagaagaaggctttcaactccccgaaaacagggcagaataaaacagtgcaatatcccagtgacatcttagagaatgcatctgttgaattattcctagatgcaaataaactgcccacacctgtagtagaacaagttgcacaaataaatgataattcagaactcgagttgacatcagttgtggaaaatacttttccagcacaagatattgtgcacactgttacagtgaaacggaaacgtggaaaatcacagccaaactgtgctctgaaagaacactctatgtctaatatagccagcgtcaagagtccttatgaggcggagaactccggggaagagctggatcagaggtattccaaggccaagccaatgtgtaacacatgtgggaaagtgttttcagaagccagcagtttgagaaggcacatgagaatacataaaggagtcaaaccttacgtctgccacttatgtggaaaggcatttacccaatgtaaccagctgaaaacgcatgtaagaactcatacaggtgagaagccatacaaatgtgaattgtgtgataaaggatttgctcagaaatgtcagctagtcttccatagtcgcatgcatcatggtgaagaaaaaccctataaatgtgatgtatgcaacttacagtttgcaacttctagcaatctcaagattcatgcaaggaagcatagtggagagaagccatatgtctgtgataggtgtggacagagatttgctcaagccagcacactgacctatcatgtccgtaggcatactggagaaaagccttatgtatgtgatacctgtgggaaggcatttgctgtctctagttctcttatcactcattctcgaaaacatacaggtgaaaaaccatacatatgtggtatttgtgggaaaagttttatttcctcaggagagctcaacaaacactttcggtcccatacaggtgcagataaaactctagactccagtgcagaggatcatactttgagtgaacaggattccatacaaaaaagtcctttatcagaaactatggatgtgaagccttctgatatgactttaccattagctcttccacttgggactgaggaccatcacatgcttctgcctgtcacggatactcagtctcctacatcagatacattgttgaggtcaactgtgaatgggtattcagaaccacagttgatttttttacaacaattatac

SEQ ID NO: 5845 - DNA, 1314 bp, Homo sapiens
  source 1..1314: mol_type = genomic DNA
atggagtctccaagaactgctaaaggaggaagggatatcaagatgagtggggatgtagccgattccacggatgctcgcagcactctcagccaggtggagccaggaaatgatcgaaatggcctagatttcaacaggcagattaaaaccgaagatctcagtgactccctgcagcagaccctctcccatcggccatgccacctgagtcaaggacctgccatgatgtccggaaaccaaatgtctgggctaaatgccagcccatgtcaggacatggcttccctccatccgctccagcagcttgtgctggttcccggccacttacagtctgtatcccagttcctgctatctcagacccagcctgggcagcaaggtctgcagccaaatctcctcccctttccacagcaacaaagcggtctcctcctcccacagactgggccgggactggcatcccaggcatttgggcaccctgggctgccaggatcctctttagaaccccacctggaagcatcccagcatctcccagtgcccaagcatctacccagctctggaggggccgatgagcccagtgacctcgaggagctggagaagtttgccaagaccttcaagcagaggcgcattaagctgggcttcacacagggagatgtggggctggcgatgggaaagctgtatggcaacgacttcagccagaccaccatctcacgatttgaggccctcaacctgagcttcaagaacatgtgcaagctcaagcccctgctggagaagtggctgaatgatgcagagtcctctccgtcagacccctcagtgagcacgcccagctcctaccccagcctcagtgaagtatttggtaggaagagaaagaaacggaccagcatcgagaccaacatccgcctgactctggagaagaggtttcaagataacccaaaacccagctcggaggagatctccatgattgcagagcagttgtccatggagaaggaggtggtgagggtctggttctgcaaccgacgccaaaaggagaagcgaatcaactgccctgtggccacacccatcaaaccacctgtctacaactcccggctggtatctccctcagggtctctgggccccctctctgtccctcctgtccacagtaccatgcctggaacagtaacgtcatcctgttcccctgggaacaacagcaggccttcatctcctggctcaggactccacgccagcagccccactgcatctcaaaataactccaaagcagcagtgaactccgcctccagttttaactcttcaggatcttggtaccgatggaatcattccacctacctccac

SEQ ID NO: 5846 - DNA, 1308 bp, Homo sapiens
  source 1..1308: mol_type = genomic DNA
atggtgaatctggagtccatgcacacagatatcaagatgagtggggatgtagccgattccacggatgctcgcagcactctcagccaggtggagccaggaaatgatcgaaatggcctagatttcaacaggcagattaaaaccgaagatctcagtgactccctgcagcagaccctctcccatcggccatgccacctgagtcaaggacctgccatgatgtccggaaaccaaatgtctgggctaaatgccagcccatgtcaggacatggcttccctccatccgctccagcagcttgtgctggttcccggccacttacagtctgtatcccagttcctgctatctcagacccagcctgggcagcaaggtctgcagccaaatctcctcccctttccacagcaacaaagcggtctcctcctcccacagactgggccgggactggcatcccaggcatttgggcaccctgggctgccaggatcctctttagaaccccacctggaagcatcccagcatctcccagtgcccaagcatctacccagctctggaggggccgatgagcccagtgacctcgaggagctggagaagtttgccaagaccttcaagcagaggcgcattaagctgggcttcacacagggagatgtggggctggcgatgggaaagctgtatggcaacgacttcagccagaccaccatctcacgatttgaggccctcaacctgagcttcaagaacatgtgcaagctcaagcccctgctggagaagtggctgaatgatgcagagtcctctccgtcagacccctcagtgagcacgcccagctcctaccccagcctcagtgaagtatttggtaggaagagaaagaaacggaccagcatcgagaccaacatccgcctgactctggagaagaggtttcaagataacccaaaacccagctcggaggagatctccatgattgcagagcagttgtccatggagaaggaggtggtgagggtctggttctgcaaccgacgccaaaaggagaagcgaatcaactgccctgtggccacacccatcaaaccacctgtctacaactcccggctggtatctccctcagggtctctgggccccctctctgtccctcctgtccacagtaccatgcctggaacagtaacgtcatcctgttcccctgggaacaacagcaggccttcatctcctggctcaggactccacgccagcagccccactgcatctcaaaataactccaaagcagcagtgaactccgcctccagttttaactcttcaggatcttggtaccgatggaatcattccacctacctccac

SEQ ID NO: 5847 - DNA, 1560 bp, Homo sapiens
  source 1..1560: mol_type = genomic DNA
atggaggtgctggagagcggggagcagggcgtgctgcagtgggaccgcaagctgagcgagctgtcagagcccggggacggcgaggccctcatgtaccacacgcacttctcagaacttctggatgagttttcccagaacgtcttgggtcagctcctgaatgatcctttcctctcagagaagagtgtgtcaatggaggtggaaccttccccgacgtccccggcgcctctcatccaggctgagcacagctactccctgtgcgaggagcctcgggcccagtcgcccttcacccacattaccaccagtgacagcttcaatgacgatgaggtggaaagtgagaaatggtacctgtctacagacttcccttcaacatccatcaagacagagccagttacagacgaaccacccccaggactcgttccgtctgtcactctgaccatcacagccatctccaccccgttggaaaaggaggaacctcctctggaaatgaacactggggttgattcctcgtgccagaccattattcctaaaattaagctggagcctcatgaagtggatcagtttctaaacttctctcctaaagaagccccagtggaccacctgcatttgccgcccacccctccgagcagtcacggcagtgactcagagggcagcctgagtcccaacccacgcctgcaccccttcagcctgcctcagacccacagcccctccagagctgcaccccgggccccctccgccctctccagctcccctctcctcacggctcctcataaactgcagggatcaggccctctggtcctgacagaggaggagaagaggaccctgatcgctgagggctatcccatccccaccaaattgcccctgtcaaaatcagaggagaaggccctgaagaaaattcggaggaagatcaagaataagatttctgctcaggaaagtaggagaaagaagaaagaatacatggacagcctggagaaaaaagtggagtcttgttcaactgagaacttggagcttcggaagaaggtagaggttctagagaacactaataggactctccttcagcaactccagaagcttcagactttggtgatgggcaaggtttctcgaacctgcaagttagctggcacgcagactggcacctgcctcatggttgtggtgctgtgctttgccgttgcattcggcagcttctttcaaggctacgggccctatccttctgccaccaagatggctctgcccagccagcattccctgcaggagccctacacagcctccgtggtgagatccagaaacctgctgatctacgaggaacattctcccccagaggagtcatccagcccgggctcggctggggagctggggggctgggatagaggttcctccctgctcagggtgtcagggctggagtccaggccggatgtggatcttccccatttcattatctcgaatgagaccagcctggagaagtcagtgcttttggagctgcagcagcacctggtcagcgccaaactggaggggaatgaaacactaaaagttgtagaactcgacagaagagtgaacaccactttc

SEQ ID NO: 5848 - DNA, 744 bp, Homo sapiens
  source 1..744: mol_type = genomic DNA
atggaggtgctggagagcggggagcagggcgtgctgcagtgggaccgcaagctgagcgagctgtcagagcccggggacggcgaggccctcatgtaccacacgcacttctcagaacttctggatgagttttcccagaacgtcttgggtcagctcctgaatgatcctttcctctcagagaagagtgtgtcaatggaggtggaaccttccccgacgtccccggcgcctctcatccaggctgagcacagctactccctgtgcgaggagcctcgggcccagtcgcccttcacccacattaccaccagtgacagcttcaatgacgatgaggtggaaagtgagaaatggtacctgtctacagacttcccttcaacatccatcaagacagagccagttacagacgaaccacccccaggactcgttccgtctgtcactctgaccatcacagccatctccaccccgttggaaaaggaggaacctcctctggaaatgaacactggggttgattcctcgtgccagaccattattcctaaaattaagctggagcctcatgaagtggatcagtttctaaacttctctcctaaagaaggtctgtctgccctccctgtgtccctttgggttatggatatggtctctgggtctacagagagggaatatggcgagagagctgggatgagtttgtaccacagatgttgtagctggctttatgaaatagctctgttcttaaaaaataaaaattttgcttccaaa

SEQ ID NO: 5849 - DNA, 1383 bp, Homo sapiens
  source 1..1383: mol_type = genomic DNA
atgaatacggatttagctgctggaaagatggcttctgctgcctgctccatggaccccatcgacagctttgagctcctggatctcctgtttgaccggcaggacggcatcctgagacacgtggagctgggcgagggctggggtcacgtcaaggaccagcaggtcctgccaaaccccgactctgacgacttcctcagctccatcctgggctctggagactcactgcccagctccccactctggtcccccgaaggcagtgatagtggcatctccgaagacctcccctccgacccccaggacacccctccacgcagcggaccagccacctcccccgccggctgccatcctgcccagcctggcaaggggccctgcctctcctatcatcctggcaactcttgctccaccacaaccccagggccagtgatccaagtacctgaagcctctgtgaccatagacctggaaatgtggagcccaggaggaaggatctgtgctgagaagccggctgatccggtggacctgtccccacgatgcaatctcaccgtgaaagacctcctcctttcgggcagcagtggggacctgcaacagcatcacctgggggcctcctacctcctgcgacctggggctgggcactgtcaggagctggtgctcaccgaggatgagaagaagctgctggctaaagaaggcatcaccctgcccactcagctgcccctcactaagtacgaggagcgagtgctgaaaaaaatccgccggaaaatccggaacaagcagtcggcgcaagaaagcaggaagaagaagaaggaatatatcgatggcctggagactcggatgtcagcttgcactgctcagaatcaggagttacagaggaaagtcttgcatctcgagaagcaaaacctgtccctcttggagcaactgaagaaactccaggccattgtggtgcagtccaccagcaagtcagcccagacaggcacctgtgtcgcagtcctgttgctgtcctttgccctcatcatcctcccctccatcagcccttttggccccaacaaaaccgagagccctggggactttgcgcctgtacgagtgttctccagaactttgcacaacgatgctgcctcccgcgtggctgctgatgctgtgccaggctccgaggccccaggaccccgacccgaggctgacacaacccgagaagagtctccaggaagccccggggcagactggggcttccaggacaccgcgaacctgaccaattcgacggaggagctggacaacgccaccctggtcctgaggaatgcaacagaggggctgggccaggtcgccctgctggactgggtggcgcctgggccgagcactggctcaggacgtgcagggctggaggcggcgggagacgagctg

SEQ ID NO: 5850 - DNA, 1011 bp, Homo sapiens
  source 1..1011: mol_type = genomic DNA
atgaatacggatttagctgctggaaagatggcttctgctgcctgctccatggaccccatcgacagctttgagctcctggatctcctgtttgaccggcaggacggcatcctgagacacgtggagctgggcgagggctggggtcacgtcaaggaccagcaggtcctgccaaaccccgactctgacgacttcctcagctccatcctgggctctggagactcactgcccagctccccactctggtcccccgaaggcagtgatagtggcatctccgaagacctcccctccgacccccaggacacccctccacgcagcggaccagccacctcccccgccggctgccatcctgcccagcctggcaaggggccctgcctctcctatcatcctggcaactcttgctccaccacaaccccagggccagtgatccaagtacctgaagcctctgtgaccatagacctggaaatgtggagcccaggaggaaggatctgtgctgagaagccggctgatccggtggacctgtccccacgatgcaatctcaccgtgaaagacctcctcctttcgggcagcagtggggacctgcaacagcatcacctgggggcctcctacctcctgcgacctggggctgggcactgtcaggagctggtgctcaccgaggatgagaagaagctgctggctaaagaaggcatcaccctgcccactcagctgcccctcactaaggatgtcagcttgcactgctcagaatcaggagttacagaggaaagtcttgcatctcgagaagcaaaacctgtccctcttggagcaactgaagaaactccaggccattgtggtgcagtccaccagcaagtcagcccagacaggcacctgtgtcgcagtcctgttgctgtcctttgccctcatcatcctcccctccatcagcccttttggccccaacaaaaccgagagccctggggactttgcgcctgtacgagtgttctccagaactttgcacaacgatgctgcctcccgcgtggctgc

SEQ ID NO: 5851 - DNA, 1380 bp, Homo sapiens
  source 1..1380: mol_type = genomic DNA
atgaatacggatttagctgctggaaagatggcttctgctgcctgctccatggaccccatcgacagctttgagctcctggatctcctgtttgaccggcaggacggcatcctgagacacgtggagctgggcgagggctggggtcacgtcaaggaccaggtcctgccaaaccccgactctgacgacttcctcagctccatcctgggctctggagactcactgcccagctccccactctggtcccccgaaggcagtgatagtggcatctccgaagacctcccctccgacccccaggacacccctccacgcagcggaccagccacctcccccgccggctgccatcctgcccagcctggcaaggggccctgcctctcctatcatcctggcaactcttgctccaccacaaccccagggccagtgatccaagtacctgaagcctctgtgaccatagacctggaaatgtggagcccaggaggaaggatctgtgctgagaagccggctgatccggtggacctgtccccacgatgcaatctcaccgtgaaagacctcctcctttcgggcagcagtggggacctgcaacagcatcacctgggggcctcctacctcctgcgacctggggctgggcactgtcaggagctggtgctcaccgaggatgagaagaagctgctggctaaagaaggcatcaccctgcccactcagctgcccctcactaagtacgaggagcgagtgctgaaaaaaatccgccggaaaatccggaacaagcagtcggcgcaagaaagcaggaagaagaagaaggaatatatcgatggcctggagactcggatgtcagcttgcactgctcagaatcaggagttacagaggaaagtcttgcatctcgagaagcaaaacctgtccctcttggagcaactgaagaaactccaggccattgtggtgcagtccaccagcaagtcagcccagacaggcacctgtgtcgcagtcctgttgctgtcctttgccctcatcatcctcccctccatcagcccttttggccccaacaaaaccgagagccctggggactttgcgcctgtacgagtgttctccagaactttgcacaacgatgctgcctcccgcgtggctgctgatgctgtgccaggctccgaggccccaggaccccgacccgaggctgacacaacccgagaagagtctccaggaagccccggggcagactggggcttccaggacaccgcgaacctgaccaattcgacggaggagctggacaacgccaccctggtcctgaggaatgcaacagaggggctgggccaggtcgccctgctggactgggtggcgcctgggccgagcactggctcaggacgtgcagggctggaggcggcgggagacgagctg

SEQ ID NO: 5852 - DNA, 1377 bp, Homo sapiens
  source 1..1377: mol_type = genomic DNA
atgaatacggatttagctgctggaaagatggcttctgctgcctgctccatggaccccatcgacagctttgagctcctggatctcctgtttgaccggcaggacggcatcctgagacacgtggagctgggcgagggctggggtcacgtcaaggaccagcaggtcctgccaaaccccgactctgacgacttcctcagctccatcctgggctctggagactcactgcccagctccccactctggtcccccgaaggcagtgatagtggcatctccgaagacctcccctccgacccccaggacacccctccacgcagcggaccagccacctcccccgccggctgccatcctgcccagcctggcaaggggccctgcctctcctatcatcctggcaactcttgctccaccacaaccccagggccagtgatccaagtacctgaagcctctgtgaccatagacctggaaatgtggagcccaggaggaaggatctgtgctgagaagccggctgatccggtggacctgtccccacgatgcaatctcaccgtgaaagacctcctcctttcgggcagcagtggggacctgcatcacctgggggcctcctacctcctgcgacctggggctgggcactgtcaggagctggtgctcaccgaggatgagaagaagctgctggctaaagaaggcatcaccctgcccactcagctgcccctcactaagtacgaggagcgagtgctgaaaaaaatccgccggaaaatccggaacaagcagtcggcgcaagaaagcaggaagaagaagaaggaatatatcgatggcctggagactcggatgtcagcttgcactgctcagaatcaggagttacagaggaaagtcttgcatctcgagaagcaaaacctgtccctcttggagcaactgaagaaactccaggccattgtggtgcagtccaccagcaagtcagcccagacaggcacctgtgtcgcagtcctgttgctgtcctttgccctcatcatcctcccctccatcagcccttttggccccaacaaaaccgagagccctggggactttgcgcctgtacgagtgttctccagaactttgcacaacgatgctgcctcccgcgtggctgctgatgctgtgccaggctccgaggccccaggaccccgacccgaggctgacacaacccgagaagagtctccaggaagccccggggcagactggggcttccaggacaccgcgaacctgaccaattcgacggaggagctggacaacgccaccctggtcctgaggaatgcaacagaggggctgggccaggtcgccctgctggactgggtggcgcctgggccgagcactggctcaggacgtgcagggctggaggcggcgggagacgagctg

SEQ ID NO: 5853 - DNA, 1557 bp, Homo sapiens
  source 1..1557: mol_type = genomic DNA
atggacgccgtcttggaacccttcccggccgacaggctgttccccggatccagcttcctggacttgggggatctgaacgagtcggacttcctcaacaatgcgcactttcctgagcacctggaccactttacggagaacatggaggacttctccaatgacctgttcagcagcttctttgatgaccctgtgctggatgagaagagccctctattggacatggaactggactcccctacgccaggcatccaggcggagcacagctactccctgagcggcgactcagcgccccagagcccccttgtgcccatcaagatggaggacaccacccaagatgcagagcatggagcatgggcgctgggacacaaactgtgctccatcatggtgaagcaggagcagagcccggagctgcccgtggaccctctggctgccccctcggccatggctgccgcggccgccatggccaccaccccgctgctgggcctcagccccttgtccaggctgcccatcccccaccaggccccgggagagatgactcagctgccagtgatcaaagcagagcctctggaggtgaaccagttcctcaaagtgacaccggaggacctggtgcagatgcctccgacgccccccagcagccatggcagtgacagcgacggctcccagagtccccgctctctgcccccctccagccctgtcaggcccatggcgcgctcctccacggccatctccacctccccactcctcactgcccctcacaaattacaggggacatcagggccactgctcctgacagaggaggagaagcggaccctgattgctgagggctaccccatccccacaaaactccccctcaccaaagccgaggagaaggccttgaagagagtccggaggaaaatcaagaacaagatctcagcccaggagagccgtcgtaagaagaaggagtatgtggagtgtctagaaaagaaggtggagacatttacatctgagaacaatgaactgtggaagaaggtggagaccctggagaatgccaacaggaccctgctccagcagctgcagaaactccagactctggtcaccaacaagatctccagaccttacaagatggccgccacccagactgggacctgcctcatggtggcagccttgtgctttgttctggtgctgggctccctcgtgccctgccttcccgagttctcctccggctcccagactgtgaaggaagaccccctggccgcagacggcgtctacacggccagccagatgccctcccgaagcctcctattctacgatgacggggcaggcttatgggaagatggccgcagcaccctgctgcccatggagcccccagatggctgggaaatcaaccccggggggccggcagagcagcggccccgggaccacctgcagcatgatcacctggacagcacccacgagaccaccaagtacctgagtgaggcctggcctaaagacggtggaaacggcaccagccccgacttctcccactccaaggagtggttccacgacagggatctgggccccaacaccaccatcaaactctcc

SEQ ID NO: 5854 - DNA, 1125 bp, Homo sapiens
  source 1..1125: mol_type = genomic DNA
atggatctcggaatccctgacctgctggacgcgtggctggagcccccagaggatatcttctcgacaggatccgtcctggagctgggactccactgcccccctccagaggttccgggccttcaagagagtgagcctgaagatttcttgaagcttttcattgatcccaatgaggtgtactgctcagaagcatctcctggcagtgacagtggcatctctgaggacccctgccatccagacagtccccctgcccccagggcaaccagttctcctatgctctatgaggttgtctatgaggcaggggccctggagaggatgcagggggaaactgggccaaatgtaggccttatctccatccagctagatcagtggagcccagcatttatggtgcctgattcctgcatggtcagtgagctgccctttgatgctcatgcccacatcctgcccagagcaggcaccgtagccccagtgccctgtacaaccctgctgccctgtcaaaccctgttcctgaccgatgaggagaagcgtctgctggggcaggaaggggtttccctgccctctcacctgcccctcaccaaggcagaggagagggtcctcaagaaggtcaggaggaaaatccgtaacaagcagtcagctcaggacagtcggcggcggaagaaggagtacattgatgggctggagagcagggtggcagcctgttctgcacagaaccaagaattacagaaaaaagtccaggagctggagaggcacaacatctccttggtagctcagctccgccagctgcagacgctaattgctcaaacttccaacaaagctgcccagaccagcacttgtgttttgattcttcttttttccctggctctcatcatcctgcccagcttcagtccattccagagtcgaccagaagctgggtctgaggattaccagcctcacggagtgacttccagaaatatcctgacccacaaggacgtaacagaaaatctggagacccaagtggtagagtccagactgagggagccacctggagccaaggatgcaaatggctcaacaaggacactgcttgagaagatgggagggaagccaagacccagtgggcgcatccggtccgtgctgcatgcagatgagatg

SEQ ID NO: 5855 - DNA, 1185 bp, Homo sapiens
  source 1..1185: mol_type = genomic DNA
atggatctcggaatccctgacctgctggacgcgtggctggagcccccagaggatatcttctcgacaggatccgtcctggagctgggactccactgcccccctccagaggttccggtaactaggctacaggaacagggactgcaaggctggaagtccggtggggaccgtggctgtggccttcaagagagtgagcctgaagatttcttgaagcttttcattgatcccaatgaggtgtactgctcagaagcatctcctggcagtgacagtggcatctctgaggacccctgccatccagacagtccccctgcccccagggcaaccagttctcctatgctctatgaggttgtctatgaggcaggggccctggagaggatgcagggggaaactgggccaaatgtaggccttatctccatccagctagatcagtggagcccagcatttatggtgcctgattcctgcatggtcagtgagctgccctttgatgctcatgcccacatcctgcccagagcaggcaccgtagccccagtgccctgtacaaccctgctgccctgtcaaaccctgttcctgaccgatgaggagaagcgtctgctggggcaggaaggggtttccctgccctctcacctgcccctcaccaaggcagaggagagggtcctcaagaaggtcaggaggaaaatccgtaacaagcagtcagctcaggacagtcggcggcggaagaaggagtacattgatgggctggagagcagggtggcagcctgttctgcacagaaccaagaattacagaaaaaagtccaggagctggagaggcacaacatctccttggtagctcagctccgccagctgcagacgctaattgctcaaacttccaacaaagctgcccagaccagcacttgtgttttgattcttcttttttccctggctctcatcatcctgcccagcttcagtccattccagagtcgaccagaagctgggtctgaggattaccagcctcacggagtgacttccagaaatatcctgacccacaaggacgtaacagaaaatctggagacccaagtggtagagtccagactgagggagccacctggagccaaggatgcaaatggctcaacaaggacactgcttgagaagatgggagggaagccaagacccagtgggcgcatccggtccgtgctgcatgcagatgagatg

SEQ ID NO: 5856 - DNA, 753 bp, Homo sapiens
  source 1..753: mol_type = genomic DNA
atgcctagccccaggccgcgaggcagcccgccacccgctccctcgggctctcgggtccgacctccgcgctctggccgctctccggcgcccaggtcccctactggcccgaacacgccccgcgctcccggacgcttcgagtcccctttctcggtcgaggccatcctggcgaggcccgacccctgcgcgccggcggcctcccagccgtcgggctccgcctgcgtccacccggccttctggaccgctgcttccctgtgcgccaccgggggtctgccctgggcttgcccgacatcgtggctgcccgcctacctgagcgtaggtttttaccctgtgccagggccgcgcgtggctcccgtctgcggcctgctgggcttcggcgtcacagggttggagctggctcactgctcaggactctgggccttcccagactgggccccaacggaggacctacaggacactgagagacagcaaaagagagtccgaactatgtttaacttggagcagctggaagagttggagaaagtgtttgcaaaacagcacaatctggtggggaagaagagagcccagctggcagctcggctcaaacttacagagaaccaggtgagagtctggttccagaaccgcagggtcaagtatcagaagcagcaaaagctgagggcagcagttacatctgccgaggctgcctccctggatgagccttccagcagctccatcgccagtatccagagtgatgatgccgagtcaggagtggacggc

SEQ ID NO: 5857 - DNA, 1362 bp, Homo sapiens
  source 1..1362: mol_type = genomic DNA
atggatcccgggcagcagccgccgcctcaaccggccccccagggccaagggcagccgccttcgcagcccccgcaggggcagggcccgccgtccggacccgggcaaccggcacccgcggcgacccaggcggcgccgcaggcaccccccgccgggcatcagatcgtgcacgtccgcggggactcggagaccgacctggaggcgctcttcaacgccgtcatgaaccccaagacggccaacgtgccccagaccgtgcccatgaggctccggaagctgcccgactccttcttcaagccgccggagcccaaatcccactcccgacaggccagtactgatgcaggcactgcaggagccctgactccacagcatgttcgagctcattcctctccagcttctctgcagttgggagctgtttctcctgggacactgacccccactggagtagtctctggcccagcagctacacccacagctcagcatcttcgacagtcttcttttgagatacctgatgatgtacctctgccagcaggttgggagatggcaaagacatcttctggtcagagatacttcttaaatcacatcgatcagacaacaacatggcaggaccccaggaaggccatgctgtcccagatgaacgtcacagcccccaccagtccaccagtgcagcagaatatgatgaactcggcttcagccatgaaccagagaatcagtcagagtgctccagtgaaacagccaccacccctggctccccagagcccacagggaggcgtcatgggtggcagcaactccaaccagcagcaacagatgcgactgcagcaactgcagatggagaaggagaggctgcggctgaaacagcaagaactgcttcggcaggtgaggccacaggagttagccctgcgtagccagttaccaacactggagcaggatggtgggactcaaaatccagtgtcttctcccgggatgtctcaggaattgagaacaatgacgaccaatagctcagatcctttccttaacagtggcacctatcactctcgagatgagagtacagacagtggactaagcatgagcagctacagtgtccctcgaaccccagatgacttcctgaacagtgtggatgagatggatacaggtgatactatcaaccaaagcaccctgccctcacagcagaaccgtttcccagactaccttgaagccattcctgggacaaatgtggaccttggaacactggaaggagatggaatgaacatagaaggagaggagctgatgccaagtctgcaggaagctttgagttctgacatccttaatgacatggagtctgttttggctgccaccaagctagataaagaaagctttcttacatggtta

SEQ ID NO: 5858 - DNA, 1410 bp, Homo sapiens
  source 1..1410: mol_type = genomic DNA
atggatcccgggcagcagccgccgcctcaaccggccccccagggccaagggcagccgccttcgcagcccccgcaggggcagggcccgccgtccggacccgggcaaccggcacccgcggcgacccaggcggcgccgcaggcaccccccgccgggcatcagatcgtgcacgtccgcggggactcggagaccgacctggaggcgctcttcaacgccgtcatgaaccccaagacggccaacgtgccccagaccgtgcccatgaggctccggaagctgcccgactccttcttcaagccgccggagcccaaatcccactcccgacaggccagtactgatgcaggcactgcaggagccctgactccacagcatgttcgagctcattcctctccagcttctctgcagttgggagctgtttctcctgggacactgacccccactggagtagtctctggcccagcagctacacccacagctcagcatcttcgacagtcttcttttgagatacctgatgatgtacctctgccagcaggttgggagatggcaaagacatcttctggtcagagatacttcttaaatcacatcgatcagacaacaacatggcaggaccccaggaaggccatgctgtcccagatgaacgtcacagcccccaccagtccaccagtgcagcagaatatgatgaactcggcttcagccatgaaccagagaatcagtcagagtgctccagtgaaacagccaccacccctggctccccagagcccacagggaggcgtcatgggtggcagcaactccaaccagcagcaacagatgcgactgcagcaactgcagatggagaaggagaggctgcggctgaaacagcaagaactgcttcggcaggtgaggccacaggcaatgcggaatatcaatcccagcacagcaaattctccaaaatgtcaggagttagccctgcgtagccagttaccaacactggagcaggatggtgggactcaaaatccagtgtcttctcccgggatgtctcaggaattgagaacaatgacgaccaatagctcagatcctttccttaacagtggcacctatcactctcgagatgagagtacagacagtggactaagcatgagcagctacagtgtccctcgaaccccagatgacttcctgaacagtgtggatgagatggatacaggtgatactatcaaccaaagcaccctgccctcacagcagaaccgtttcccagactaccttgaagccattcctgggacaaatgtggaccttggaacactggaaggagatggaatgaacatagaaggagaggagctgatgccaagtctgcaggaagctttgagttctgacatccttaatgacatggagtctgttttggctgccaccaagctagataaagaaagctttcttacatggtta

SEQ ID NO: 5859 - DNA, 1512 bp, Homo sapiens
  source 1..1512: mol_type = genomic DNA
atggatcccgggcagcagccgccgcctcaaccggccccccagggccaagggcagccgccttcgcagcccccgcaggggcagggcccgccgtccggacccgggcaaccggcacccgcggcgacccaggcggcgccgcaggcaccccccgccgggcatcagatcgtgcacgtccgcggggactcggagaccgacctggaggcgctcttcaacgccgtcatgaaccccaagacggccaacgtgccccagaccgtgcccatgaggctccggaagctgcccgactccttcttcaagccgccggagcccaaatcccactcccgacaggccagtactgatgcaggcactgcaggagccctgactccacagcatgttcgagctcattcctctccagcttctctgcagttgggagctgtttctcctgggacactgacccccactggagtagtctctggcccagcagctacacccacagctcagcatcttcgacagtcttcttttgagatacctgatgatgtacctctgccagcaggttgggagatggcaaagacatcttctggtcagagatacttcttaaatcacatcgatcagacaacaacatggcaggaccccaggaaggccatgctgtcccagatgaacgtcacagcccccaccagtccaccagtgcagcagaatatgatgaactcggcttcaggtcctcttcctgatggatgggaacaagccatgactcaggatggagaaatttactatataaaccataagaacaagaccacctcttggctagacccaaggcttgaccctcgttttgccatgaaccagagaatcagtcagagtgctccagtgaaacagccaccacccctggctccccagagcccacagggaggcgtcatgggtggcagcaactccaaccagcagcaacagatgcgactgcagcaactgcagatggagaaggagaggctgcggctgaaacagcaagaactgcttcggcaggcaatgcggaatatcaatcccagcacagcaaattctccaaaatgtcaggagttagccctgcgtagccagttaccaacactggagcaggatggtgggactcaaaatccagtgtcttctcccgggatgtctcaggaattgagaacaatgacgaccaatagctcagatcctttccttaacagtggcacctatcactctcgagatgagagtacagacagtggactaagcatgagcagctacagtgtccctcgaaccccagatgacttcctgaacagtgtggatgagatggatacaggtgatactatcaaccaaagcaccctgccctcacagcagaaccgtttcccagactaccttgaagccattcctgggacaaatgtggaccttggaacactggaaggagatggaatgaacatagaaggagaggagctgatgccaagtctgcaggaagctttgagttctgacatccttaatgacatggagtctgttttggctgccaccaagctagataaagaaagctttcttacatggtta

SEQ ID NO: 5860 - DNA, 1350 bp, Homo sapiens
  source 1..1350: mol_type = genomic DNA
atggatcccgggcagcagccgccgcctcaaccggccccccagggccaagggcagccgccttcgcagcccccgcaggggcagggcccgccgtccggacccgggcaaccggcacccgcggcgacccaggcggcgccgcaggcaccccccgccgggcatcagatcgtgcacgtccgcggggactcggagaccgacctggaggcgctcttcaacgccgtcatgaaccccaagacggccaacgtgccccagaccgtgcccatgaggctccggaagctgcccgactccttcttcaagccgccggagcccaaatcccactcccgacaggccagtactgatgcaggcactgcaggagccctgactccacagcatgttcgagctcattcctctccagcttctctgcagttgggagctgtttctcctgggacactgacccccactggagtagtctctggcccagcagctacacccacagctcagcatcttcgacagtcttcttttgagatacctgatgatgtacctctgccagcaggttgggagatggcaaagacatcttctggtcagagatacttcttaaatcacatcgatcagacaacaacatggcaggaccccaggaaggccatgctgtcccagatgaacgtcacagcccccaccagtccaccagtgcagcagaatatgatgaactcggcttcagccatgaaccagagaatcagtcagagtgctccagtgaaacagccaccacccctggctccccagagcccacagggaggcgtcatgggtggcagcaactccaaccagcagcaacagatgcgactgcagcaactgcagatggagaaggagaggctgcggctgaaacagcaagaactgcttcggcaggagttagccctgcgtagccagttaccaacactggagcaggatggtgggactcaaaatccagtgtcttctcccgggatgtctcaggaattgagaacaatgacgaccaatagctcagatcctttccttaacagtggcacctatcactctcgagatgagagtacagacagtggactaagcatgagcagctacagtgtccctcgaaccccagatgacttcctgaacagtgtggatgagatggatacaggtgatactatcaaccaaagcaccctgccctcacagcagaaccgtttcccagactaccttgaagccattcctgggacaaatgtggaccttggaacactggaaggagatggaatgaacatagaaggagaggagctgatgccaagtctgcaggaagctttgagttctgacatccttaatgacatggagtctgttttggctgccaccaagctagataaagaaagctttcttacatggtta

SEQ ID NO: 5861 - DNA, 1524 bp, Homo sapiens
  source 1..1524: mol_type = genomic DNA
atggatcccgggcagcagccgccgcctcaaccggccccccagggccaagggcagccgccttcgcagcccccgcaggggcagggcccgccgtccggacccgggcaaccggcacccgcggcgacccaggcggcgccgcaggcaccccccgccgggcatcagatcgtgcacgtccgcggggactcggagaccgacctggaggcgctcttcaacgccgtcatgaaccccaagacggccaacgtgccccagaccgtgcccatgaggctccggaagctgcccgactccttcttcaagccgccggagcccaaatcccactcccgacaggccagtactgatgcaggcactgcaggagccctgactccacagcatgttcgagctcattcctctccagcttctctgcagttgggagctgtttctcctgggacactgacccccactggagtagtctctggcccagcagctacacccacagctcagcatcttcgacagtcttcttttgagatacctgatgatgtacctctgccagcaggttgggagatggcaaagacatcttctggtcagagatacttcttaaatcacatcgatcagacaacaacatggcaggaccccaggaaggccatgctgtcccagatgaacgtcacagcccccaccagtccaccagtgcagcagaatatgatgaactcggcttcaggtcctcttcctgatggatgggaacaagccatgactcaggatggagaaatttactatataaaccataagaacaagaccacctcttggctagacccaaggcttgaccctcgttttgccatgaaccagagaatcagtcagagtgctccagtgaaacagccaccacccctggctccccagagcccacagggaggcgtcatgggtggcagcaactccaaccagcagcaacagatgcgactgcagcaactgcagatggagaaggagaggctgcggctgaaacagcaagaactgcttcggcaggtgaggccacaggcaatgcggaatatcaatcccagcacagcaaattctccaaaatgtcaggagttagccctgcgtagccagttaccaacactggagcaggatggtgggactcaaaatccagtgtcttctcccgggatgtctcaggaattgagaacaatgacgaccaatagctcagatcctttccttaacagtggcacctatcactctcgagatgagagtacagacagtggactaagcatgagcagctacagtgtccctcgaaccccagatgacttcctgaacagtgtggatgagatggatacaggtgatactatcaaccaaagcaccctgccctcacagcagaaccgtttcccagactaccttgaagccattcctgggacaaatgtggaccttggaacactggaaggagatggaatgaacatagaaggagaggagctgatgccaagtctgcaggaagctttgagttctgacatccttaatgacatggagtctgttttggctgccaccaagctagataaagaaagctttcttacatggtta

SEQ ID NO: 5862 - DNA, 1464 bp, Homo sapiens
  source 1..1464: mol_type = genomic DNA
atggatcccgggcagcagccgccgcctcaaccggccccccagggccaagggcagccgccttcgcagcccccgcaggggcagggcccgccgtccggacccgggcaaccggcacccgcggcgacccaggcggcgccgcaggcaccccccgccgggcatcagatcgtgcacgtccgcggggactcggagaccgacctggaggcgctcttcaacgccgtcatgaaccccaagacggccaacgtgccccagaccgtgcccatgaggctccggaagctgcccgactccttcttcaagccgccggagcccaaatcccactcccgacaggccagtactgatgcaggcactgcaggagccctgactccacagcatgttcgagctcattcctctccagcttctctgcagttgggagctgtttctcctgggacactgacccccactggagtagtctctggcccagcagctacacccacagctcagcatcttcgacagtcttcttttgagatacctgatgatgtacctctgccagcaggttgggagatggcaaagacatcttctggtcagagatacttcttaaatcacatcgatcagacaacaacatggcaggaccccaggaaggccatgctgtcccagatgaacgtcacagcccccaccagtccaccagtgcagcagaatatgatgaactcggcttcaggtcctcttcctgatggatgggaacaagccatgactcaggatggagaaatttactatataaaccataagaacaagaccacctcttggctagacccaaggcttgaccctcgttttgccatgaaccagagaatcagtcagagtgctccagtgaaacagccaccacccctggctccccagagcccacagggaggcgtcatgggtggcagcaactccaaccagcagcaacagatgcgactgcagcaactgcagatggagaaggagaggctgcggctgaaacagcaagaactgcttcggcaggagttagccctgcgtagccagttaccaacactggagcaggatggtgggactcaaaatccagtgtcttctcccgggatgtctcaggaattgagaacaatgacgaccaatagctcagatcctttccttaacagtggcacctatcactctcgagatgagagtacagacagtggactaagcatgagcagctacagtgtccctcgaaccccagatgacttcctgaacagtgtggatgagatggatacaggtgatactatcaaccaaagcaccctgccctcacagcagaaccgtttcccagactaccttgaagccattcctgggacaaatgtggaccttggaacactggaaggagatggaatgaacatagaaggagaggagctgatgccaagtctgcaggaagctttgagttctgacatccttaatgacatggagtctgttttggctgccaccaagctagataaagaaagctttcttacatggtta

SEQ ID NO: 5863 - DNA, 978 bp, Homo sapiens
  source 1..978: mol_type = genomic DNA
atggcaaagacatcttctggtcagagatacttcttaaatcacatcgatcagacaacaacatggcaggaccccaggaaggccatgctgtcccagatgaacgtcacagcccccaccagtccaccagtgcagcagaatatgatgaactcggcttcaggtcctcttcctgatggatgggaacaagccatgactcaggatggagaaatttactatataaaccataagaacaagaccacctcttggctagacccaaggcttgaccctcgttttgccatgaaccagagaatcagtcagagtgctccagtgaaacagccaccacccctggctccccagagcccacagggaggcgtcatgggtggcagcaactccaaccagcagcaacagatgcgactgcagcaactgcagatggagaaggagaggctgcggctgaaacagcaagaactgcttcggcaggcaatgcggaatatcaatcccagcacagcaaattctccaaaatgtcaggagttagccctgcgtagccagttaccaacactggagcaggatggtgggactcaaaatccagtgtcttctcccgggatgtctcaggaattgagaacaatgacgaccaatagctcagatcctttccttaacagtggcacctatcactctcgagatgagagtacagacagtggactaagcatgagcagctacagtgtccctcgaaccccagatgacttcctgaacagtgtggatgagatggatacaggtgatactatcaaccaaagcaccctgccctcacagcagaaccgtttcccagactaccttgaagccattcctgggacaaatgtggaccttggaacactggaaggagatggaatgaacatagaaggagaggagctgatgccaagtctgcaggaagctttgagttctgacatccttaatgacatggagtctgttttggctgccaccaagctagataaagaaagctttcttacatggtta

SEQ ID NO: 5864 - DNA, 1476 bp, Homo sapiens
  source 1..1476: mol_type = genomic DNA
atggatcccgggcagcagccgccgcctcaaccggccccccagggccaagggcagccgccttcgcagcccccgcaggggcagggcccgccgtccggacccgggcaaccggcacccgcggcgacccaggcggcgccgcaggcaccccccgccgggcatcagatcgtgcacgtccgcggggactcggagaccgacctggaggcgctcttcaacgccgtcatgaaccccaagacggccaacgtgccccagaccgtgcccatgaggctccggaagctgcccgactccttcttcaagccgccggagcccaaatcccactcccgacaggccagtactgatgcaggcactgcaggagccctgactccacagcatgttcgagctcattcctctccagcttctctgcagttgggagctgtttctcctgggacactgacccccactggagtagtctctggcccagcagctacacccacagctcagcatcttcgacagtcttcttttgagatacctgatgatgtacctctgccagcaggttgggagatggcaaagacatcttctggtcagagatacttcttaaatcacatcgatcagacaacaacatggcaggaccccaggaaggccatgctgtcccagatgaacgtcacagcccccaccagtccaccagtgcagcagaatatgatgaactcggcttcaggtcctcttcctgatggatgggaacaagccatgactcaggatggagaaatttactatataaaccataagaacaagaccacctcttggctagacccaaggcttgaccctcgttttgccatgaaccagagaatcagtcagagtgctccagtgaaacagccaccacccctggctccccagagcccacagggaggcgtcatgggtggcagcaactccaaccagcagcaacagatgcgactgcagcaactgcagatggagaaggagaggctgcggctgaaacagcaagaactgcttcggcaggtgaggccacaggagttagccctgcgtagccagttaccaacactggagcaggatggtgggactcaaaatccagtgtcttctcccgggatgtctcaggaattgagaacaatgacgaccaatagctcagatcctttccttaacagtggcacctatcactctcgagatgagagtacagacagtggactaagcatgagcagctacagtgtccctcgaaccccagatgacttcctgaacagtgtggatgagatggatacaggtgatactatcaaccaaagcaccctgccctcacagcagaaccgtttcccagactaccttgaagccattcctgggacaaatgtggaccttggaacactggaaggagatggaatgaacatagaaggagaggagctgatgccaagtctgcaggaagctttgagttctgacatccttaatgacatggagtctgttttggctgccaccaagctagataaagaaagctttcttacatggtta

SEQ ID NO: 5865 - DNA, 1527 bp, Homo sapiens
  source 1..1527: mol_type = genomic DNA
atgctggagaattacaggaatcttctctcattggcagaaccaaagccagaaatctacacttgttcctcctgccttctggccttctcctgtcagcagttcctcagtcaacatgtacttcagatcttcctgggcttatgtgcagaaaatcacttccatccagggaattctagcccagggcattggaaacagcaggggcagcagtattcccatgtaagctgttggtttgaaaatgcagaaggtcaggagagaggaggtggctccaaaccctggtctgcaaggacagaggagagagaaacctcaagggcattccccagcccactccaaagacagtcagcaagtcctagaaaaggcaacatggtggtagaaacagagcccagctcagcccaaagaccaaaccctgtgcagctagacaaaggcttgaaggaattagaaaccttgagatttggagcaatcaactgtagagagtatgaaccggaccataacctggaatcaaactttattacaaacccgaggaccctcttagggaagaagccctacatttgcagtgattgtgggcgaagctttaaagatagatcaaccctcatcagacaccatcgtatacactcgatggagaagccttatgtgtgcagtgagtgcgggcgaggttttagccagaagtccaacctcagcagacaccagagaacacattcagaagagaagccttatttgtgcagggagtgtgggcaaagctttagaagtaagtccatcctcaatagacatcagtggactcactcagaggagaagccctatgtttgcagcgagtgtgggcgaggctttagcgagaagtcatccttcatcagacaccagaggacacactccggtgagaaaccctatgtgtgcctggagtgtggacgaagcttttgtgataagtcaaccctcagaaaacaccagaggatacactcaggggagaagccttatgtttgcagggagtgtgggcgaggctttagccagaactcagatctcatcaaacaccagaggacacacttggatgagaagccttatgtttgcagggagtgtgggcgaggcttttgtgacaagtcaaccctcatcatacacgagcggacgcactctggagagaagccttatgtgtgtggtgagtgtggccgaggctttagtcggaaatcactcctccttgtccaccagaggacacactcaggggagaagcattatgtctgcagggagtgtaggcgaggttttagccagaagtcaaatctcatcagacaccagaggacgcactcaaatgagaagccttatatttgcagggaatgtgggcgaggcttttgtgacaagtcaaccctcattgtacatgagaggacacactcaggagagaagccttacgtgtgcagtgagtgtggccgaggctttagccggaaatcactcctccttgtccaccagaggacacactcaggggagaagcattatgtttgtagggagtgtgggcgaggctttagtcataagtcaaatctcatcagacaccagaggacacac

SEQ ID NO: 5866 - DNA, 1920 bp, Homo sapiens
  source 1..1920: mol_type = genomic DNA
atgatgttgccttatccttcagcactgggagatcaatactgggaagagattttgcttccaaagaatggggaaaatgtagagactatgaagaaattgacccaaaatcataaagcgaaaggcttgccttctaatgatactgactgcccccagaaaaaggagggaaaggcccaaatagtggtaccagttacattcagggatgtgactgtgatcttcacagaagcagaatggaagagactgagtccagagcagaggaatctatacaaagaagtgatgctggagaattacaggaatcttctctcattggatggagtttcgctcttgttgcccaggctagagtgcaatcgtgcaatctcggctcaccacaacctttgcctcccgggttcaagcaattctcctgccacagcctctcgagtagttgggattacagcagaaccaaagccagaaatctacacttgttcctcctgccttctggccttctcctgtcagcagttcctcagtcaacatgtacttcagatcttcctgggcttatgtgcagaaaatcacttccatccagggaattctagcccagggcattggaaacagcaggggcagcagtattcccatgtaagctgttggtttgaaaatgcagaaggtcaggagagaggaggtggctccaaaccctggtctgcaaggacagaggagagagaaacctcaagggcattccccagcccactccaaagacagtcagcaagtcctagaaaaggcaacatggtggtagaaacagagcccagctcagcccaaagaccaaaccctgtgcagctagacaaaggcttgaaggaattagaaaccttgagatttggagcaatcaactgtagagagtatgaaccggaccataacctggaatcaaactttattacaaacccgaggaccctcttagggaagaagccctacatttgcagtgattgtgggcgaagctttaaagatagatcaaccctcatcagacaccatcgtatacactcgatggagaagccttatgtgtgcagtgagtgcgggcgaggttttagccagaagtccaacctcagcagacaccagagaacacattcagaagagaagccttatttgtgcagggagtgtgggcaaagctttagaagtaagtccatcctcaatagacatcagtggactcactcagaggagaagccctatgtttgcagcgagtgtgggcgaggctttagcgagaagtcatccttcatcagacaccagaggacacactccggtgagaaaccctatgtgtgcctggagtgtggacgaagcttttgtgataagtcaaccctcagaaaacaccagaggatacactcaggggagaagccttatgtttgcagggagtgtgggcgaggctttagccagaactcagatctcatcaaacaccagaggacacacttggatgagaagccttatgtttgcagggagtgtgggcgaggcttttgtgacaagtcaaccctcatcatacacgagcggacgcactctggagagaagccttatgtgtgtggtgagtgtggccgaggctttagtcggaaatcactcctccttgtccaccagaggacacactcaggggagaagcattatgtctgcagggagtgtaggcgaggttttagccagaagtcaaatctcatcagacaccagaggacgcactcaaatgagaagccttatatttgcagggaatgtgggcgaggcttttgtgacaagtcaaccctcattgtacatgagaggacacactcaggagagaagccttacgtgtgcagtgagtgtggccgaggctttagccggaaatcactcctccttgtccaccagaggacacactcaggggagaagcattatgtttgtagggagtgtgggcgaggctttagtcataagtcaaatctcatcagacaccagaggacacac

SEQ ID NO: 5867 - DNA, 354 bp, Homo sapiens
  source 1..354: mol_type = genomic DNA
atgatgttgccttatccttcagcactgggagatcaatactgggaagagattttgcttccaaagaatggggaaaatgtagagactatgaagaaattgacccaaaatcataaagcgaaaggcttgccttctaatgatactgactgcccccagaaaaaggagggaaaggcccaaatagtggtaccagttacattcagggatgtgactgtgatcttcacagaagcagaatggaagagactgagtccagagcagaggaatctatacaaagaagtgatgctggagaattacaggaatcttctctcattgggtcaggagatcgagaccatcctggccaacatagtgaaatcccatctctac

SEQ ID NO: 5868 - DNA, 1797 bp, Homo sapiens
  source 1..1797: mol_type = genomic DNA
atgatgttgccttatccttcagcactgggagatcaatactgggaagagattttgcttccaaagaatggggaaaatgtagagactatgaagaaattgacccaaaatcataaagcgaaaggcttgccttctaatgatactgactgcccccagaaaaaggagggaaaggcccaaatagtggtaccagttacattcagggatgtgactgtgatcttcacagaagcagaatggaagagactgagtccagagcagaggaatctatacaaagaagtgatgctggagaattacaggaatcttctctcattggcagaaccaaagccagaaatctacacttgttcctcctgccttctggccttctcctgtcagcagttcctcagtcaacatgtacttcagatcttcctgggcttatgtgcagaaaatcacttccatccagggaattctagcccagggcattggaaacagcaggggcagcagtattcccatgtaagctgttggtttgaaaatgcagaaggtcaggagagaggaggtggctccaaaccctggtctgcaaggacagaggagagagaaacctcaagggcattccccagcccactccaaagacagtcagcaagtcctagaaaaggcaacatggtggtagaaacagagcccagctcagcccaaagaccaaaccctgtgcagctagacaaaggcttgaaggaattagaaaccttgagatttggagcaatcaactgtagagagtatgaaccggaccataacctggaatcaaactttattacaaacccgaggaccctcttagggaagaagccctacatttgcagtgattgtgggcgaagctttaaagatagatcaaccctcatcagacaccatcgtatacactcgatggagaagccttatgtgtgcagtgagtgcgggcgaggttttagccagaagtccaacctcagcagacaccagagaacacattcagaagagaagccttatttgtgcagggagtgtgggcaaagctttagaagtaagtccatcctcaatagacatcagtggactcactcagaggagaagccctatgtttgcagcgagtgtgggcgaggctttagcgagaagtcatccttcatcagacaccagaggacacactccggtgagaaaccctatgtgtgcctggagtgtggacgaagcttttgtgataagtcaaccctcagaaaacaccagaggatacactcaggggagaagccttatgtttgcagggagtgtgggcgaggctttagccagaactcagatctcatcaaacaccagaggacacacttggatgagaagccttatgtttgcagggagtgtgggcgaggcttttgtgacaagtcaaccctcatcatacacgagcggacgcactctggagagaagccttatgtgtgtggtgagtgtggccgaggctttagtcggaaatcactcctccttgtccaccagaggacacactcaggggagaagcattatgtctgcagggagtgtaggcgaggttttagccagaagtcaaatctcatcagacaccagaggacgcactcaaatgagaagccttatatttgcagggaatgtgggcgaggcttttgtgacaagtcaaccctcattgtacatgagaggacacactcaggagagaagccttacgtgtgcagtgagtgtggccgaggctttagccggaaatcactcctccttgtccaccagaggacacactcaggggagaagcattatgtttgtagggagtgtgggcgaggctttagtcataagtcaaatctcatcagacaccagaggacacac

SEQ ID NO: 5869 - DNA, 1509 bp, Homo sapiens
  source 1..1509: mol_type = genomic DNA
atgggagcgttgacatttagagatgtggccatagaattctctctggaggagtggcaatgtctggacaccgaacaacagaatttatatagaaatgtaatgttagataactacagaaacctggtcttcctgggtattgctgtctcaaagccagacctgatcacctgtctggagcaagaaaaagagccttggaatttgaagacacatgatatggtagccaaacccccagttatatgttctcatattgcccaagacctttggccagagcaaggcataaaagattatttccaagaagtcatactgagacaatataaaaaatgtagacatgagaatttactgttaagaaaaggctgtaaaaatgtggatgagtttaagatgcacaaaaaaggttataatagacataaccagtgtttgacaacttcccatagcaaaatatttcagtgtgacaaatatgtgaaagtctttcataaattttcaaattcaaacagacataagataagacatacttcgaagaaacctttcaaatgtaaagaatgtggaaaattattttgcattctttcacacttagctcaacataaaaaaattcatactggagagaaatcctacaaatgtgaagaatatggcaaagcctttaatgagtcctcaaactgtactacacataaaagaattactgagaaaaaaccttacaaatgtaaagaatgtggcaaagcctttaactggttttcacattttactacacataagagaattcatactggagaaaaaccctaccaatgtgagaaatgtggcaaattttttaaccaatccacaaaccttactacacataaaagaattcatactggagagaaaccctataaatgtgaagaatgtggcaaagcctttaaccagtcctcaaaccttactgaacataagaaaattcatactaaagagcaaccatacaaatgcgaaaaatgtggcaaagcttttaagtggtcctcaacccttacaaaacataaaagaattcataatggagaaaaaccctacaaatgtgaagaatgtggcaaagcttttaaccgatcctcaacccttaatagacataagataactcatactggagggaaaccctacaaatataaagaatgtggtaaagcttttaaccaatcctcaactcttactatacataagataattcatactgtagagaaattttacaaatgtgaagaatgtggcaaagcctttagccgtatctcacaccttactacacataagagaattcatactggagagaaaccctacaaatgtgaagaatgtggcagagctttcaaccagtcctcaacccttactacacataaaagaattcatactggagagaaaccctatgaatgtgaagaatgtggcaaagcttttaaccggtcctcaaccctcactacacataagataattcattctggggaaaaaatctacaaatgtaaagaatgtggtaaagcctttaggcggttctcacaccttactaggcataagacaattcataca

SEQ ID NO: 5870 - DNA, 831 bp, Homo sapiens
  source 1..831: mol_type = genomic DNA
atgattctggaaggaggtggtgtaatgaatctcaaccccggcaacaacctccttcaccagccgccagcctggacagacagctactccacgtgcaatgtttccagtgggttttttggaggccagtggcatgaaattcatcctcagtactggaccaagtaccaggtgtgggagtggctccagcacctcctggacaccaaccagctggatgccaattgtatccctttccaagagttcgacatcaacggcgagcacctctgcagcatgagtttgcaggagttcacccgggcggcagggacggcggggcagctcctctacagcaacttgcagcatctgaagtggaacggccagtgcagtagtgacctgttccagtccacacacaatgtcattgtcaagactgaacaaactgagccttccatcatgaacacctggaaagacgagaactatttatatgacaccaactatggtagcacagtagcagagtcacctgatatgaaaaaggagcaagacccccctgccaagtgccacaccaaaaagcacaacccgagagggactcacttatgggaattcatccgcgacatcctcttgaacccagacaagaacccaggattaataaaatgggaagaccgatctgagggcgtcttcaggttcttgaaatcagaggcagtggctcagctatggggtaaaaagaagaacaacagcagcatgacctatgaaaagctcagccgagctatgagatattactacaaaagagaaattctggagcgtgtggatggacgaagactggtatataaatttgggaagaatgcccgaggatggagagaaaatgaaaac

SEQ ID NO: 5871 - DNA, 900 bp, Homo sapiens
  source 1..900: mol_type = genomic DNA
atgattctggaaggaggtggtgtaatgaatctcaaccccggcaacaacctccttcaccagccgccagcctggacagacagctactccacgtgcaatgtttccagtgggttttttggaggccagtggcatgaaattcatcctcagtactggaccaagtaccaggtgtgggagtggctccagcacctcctggacaccaaccagctggatgccaattgtatccctttccaagagttcgacatcaacggcgagcacctctgcagcatgagtttgcaggagttcacccgggcggcagggacggcggggcagctcctctacagcaacttgcagcatctgaagtggaacggccagtgcagtagtgacctgttccagtccacacacaatgtcattgtcaagactgaacaaactgagccttccatcatgaacacctggaaagacgagaactatttatatgacaccaactatggtagcacagtagatttgttggacagcaaaactttctgccgggctcagatctccatgacaaccaccagtcaccttcctgttgcagagtcacctgatatgaaaaaggagcaagacccccctgccaagtgccacaccaaaaagcacaacccgagagggactcacttatgggaattcatccgcgacatcctcttgaacccagacaagaacccaggattaataaaatgggaagaccgatctgagggcgtcttcaggttcttgaaatcagaggcagtggctcagctatggggtaaaaagaagaacaacagcagcatgacctatgaaaagctcagccgagctatgagatattactacaaaagagaaattctggagcgtgtggatggacgaagactggtatataaatttgggaagaatgcccgaggatggagagaaaatgaaaac

SEQ ID NO: 5872 - DNA, 966 bp, Homo sapiens
  source 1..966: mol_type = genomic DNA
atggggttgccggagagaagaggattggtcctgcttttaagcctagctgaaattcttttcaagatcatgattctggaaggaggtggtgtaatgaatctcaaccccggcaacaacctccttcaccagccgccagcctggacagacagctactccacgtgcaatgtttccagtgggttttttggaggccagtggcatgaaattcatcctcagtactggaccaagtaccaggtgtgggagtggctccagcacctcctggacaccaaccagctggatgccaattgtatccctttccaagagttcgacatcaacggcgagcacctctgcagcatgagtttgcaggagttcacccgggcggcagggacggcggggcagctcctctacagcaacttgcagcatctgaagtggaacggccagtgcagtagtgacctgttccagtccacacacaatgtcattgtcaagactgaacaaactgagccttccatcatgaacacctggaaagacgagaactatttatatgacaccaactatggtagcacagtagatttgttggacagcaaaactttctgccgggctcagatctccatgacaaccaccagtcaccttcctgttgcagagtcacctgatatgaaaaaggagcaagacccccctgccaagtgccacaccaaaaagcacaacccgagagggactcacttatgggaattcatccgcgacatcctcttgaacccagacaagaacccaggattaataaaatgggaagaccgatctgagggcgtcttcaggttcttgaaatcagaggcagtggctcagctatggggtaaaaagaagaacaacagcagcatgacctatgaaaagctcagccgagctatgagatattactacaaaagagaaattctggagcgtgtggatggacgaagactggtatataaatttgggaagaatgcccgaggatggagagaaaatgaaaac

SEQ ID NO: 5873 - DNA, 1422 bp, Homo sapiens
  source 1..1422: mol_type = genomic DNA
atggcggcccgggcgggtttccagtctgtggctccaagcggcggcgccggagcctcaggaggggcgggcgcggctgctgccttgggcccgggcggaactccggggcctcctgtgcgaatgggcccggctccgggtcaagggctgtaccgctccccgatgcccggagcggcctatccgagaccaggtatgttgccaggcagccgaatgacacctcagggaccttccatgggaccccctggctatggggggaacccttcagtccgacctggcctggcccagtcagggatggatcagtcccgcaagagacctgcccctcagcagatccagcaggtccagcagcaggcggtccaaaatcgaaaccacaatgcaaagaaaaagaagatggctgacaaaattctacctcaaaggattcgtgaactggtaccagaatcccaggcctatatggatctcttggcttttgaaaggaaactggaccagactatcatgaggaaacggctagatatccaagaggccttgaaacgtcccatcaagcaaaaacggaagctgcgaattttcatttctaacactttcaatccggctaagtcagatgccgaggatggggaagggacggtggcttcctgggagcttcgggtagaaggacggctcctggaggattcagccttgtccaaatatgatgccactaaacaaaagaggaagttctcttccttttttaagtccttggtgattgaactggacaaagacctgtatgggccagacaaccatctggtagaatggcacaggaccgccactacccaggagaccgatggctttcaggtgaagcggccgggagacgtgaatgtacggtgtactgtcctactgatgctggattaccagcctccccagtttaaattagacccccgcctagctcgactcctgggcatccatacccagactcgtccagtgatcatccaagcactgtggcaatatattaagacacataagctccaggaccctcacgagcgggagtttgtcatctgtgacaagtacctgcagcagatctttgagtctcaacgtatgaagttttcagagatccctcagcggctccatgccttgcttatgccaccagaacctatcatcattaatcatgtcatcagtgttgacccgaatgatcagaaaaagacagcttgttatgacattgatgttgaagtggatgacaccttgaagacccagatgaattcttttctgctgtccactgccagccaacaggagattgctactctagacaacaagacaatgactgatgtggtgggtaacccagaggaggagcgccgagctgagttctacttccagccctgggctcaggaggctgtgtgccgatacttctactccaaggtgcagcagagacgacaagaattagagcaagccctgggaatccggaataca

SEQ ID NO: 5874 - DNA, 1785 bp, Homo sapiens
  source 1..1785: mol_type = genomic DNA
atggccttgactgacggcggctggtgcttgccgaagcgcttcggggccgcgggtgcggacgccagcgactccagagcctttccagcgcgggagccctccacgccgccttcccccatctcttcctcgtcctcctcctgctcccggggcggagagcggggccccggcggcgccagcaactgcgggacgcctcagctcgacacggaggcggcggccggacccccggcccgctcgctgctgctcagttcctacgcttcgcatcccttcggggctccccacggaccttcggcgcctggggtcgcgggccccgggggcaacctgtcgagctgggaggacttgctgctgttcactgacctcgaccaagccgcgaccgccagcaagctgctgtggtccagccgcggcgccaagctgagccccttcgcacccgagcagccggaggagatgtaccagaccctcgccgctctctccagccagggtccggccgcctacgacggcgcgcccggcggcttcgtgcactctgcggccgcggcggcagcagccgcggcggcggccagctccccggtctacgtgcccaccacccgcgtgggttccatgctgcccggcctaccgtaccacctgcaggggtcgggcagtgggccagccaaccacgcgggcggcgcgggcgcgcaccccggctggcctcaggcctcggccgacagccctccatacggcagcggaggcggcgcggctggcggcggggccgcggggcctggcggcgctggctcagccgcggcgcacgtctcggcgcgcttcccctactctcccagcccgcccatggccaacggcgccgcgcgggagccgggaggctacgcggcggcgggcagtgggggcgcgggaggcgtgagcggcggcggcagtagcctggcggccatgggcggccgcgagccccagtacagctcgctgtcggccgcgcggccgctgaacgggacgtaccaccaccaccaccaccaccaccaccaccatccgagcccctactcgccctacgtgggggcgccactgacgcctgcctggcccgccggacccttcgagaccccggtgctgcacagcctgcagagccgcgccggagccccgctcccggtgccccggggtcccagtgcagacctgctggaggacctgtccgagagccgcgagtgcgtgaactgcggctccatccagacgccgctgtggcggcgggacggcaccggccactacctgtgcaacgcctgcgggctctacagcaagatgaacggcctcagccggcccctcatcaagccgcagaagcgcgtgccttcatcacggcggcttggattgtcctgtgccaactgtcacaccacaactaccaccttatggcgcagaaacgccgagggtgaacccgtgtgcaatgcttgtggactctacatgaaactccatggggtgcccagaccacttgctatgaaaaaagagggaattcaaaccaggaaacgaaaacctaagaacataaataaatcaaagacttgctctggtaatagcaataattccattcccatgactccaacttccacctcttctaactcagatgattgcagcaaaaatacttcccccacaacacaacctacagcctcaggggcgggtgccccggtgatgactggtgcgggagagagcaccaatcccgagaacagcgagctcaagtattcgggtcaagatgggctctacataggcgtcagtctcgcctcgccggccgaagtcacgtcctccgtgcgaccggattcctggtgcgccctggccctggcc

SEQ ID NO: 5875 - DNA, 1731 bp, Homo sapiens
  source 1..1731: mol_type = genomic DNA
atgctgcggcgtggacacttggcattcagggacgtggccatagaattccctcaggaggagtggaaatgtctggaccctgctcagaggactttatacagggaagtgatggtggagaactacaggaacctggtctttctgggaatctgtcttcctgacctgagtgttatctccatgttggagcaaaggagagatccccggaatctgcagagtgaagtgaaaatagcaaacaatccaggtggcagggagtgcatcaaaggtgtgaacgcagagagcagctctaaattgggaagcaatgccggaaacaagtctcttaaaaatcaacttggattaacctttcagttacatctgagtgaactgcagctatttcaagctgaaaggaatatttctggatgtaaacatgtcgaaaaacctatcaacaattccttagtttcaccacttcaaaaaatttattctagtgtcaaatcccacattttaaataaatacagaaatgattttgatgattctccatttctcccacaagaacaaaaagcacaaataagggaaaaaccgtgtgaatgtaatgagcatggcaaagcctttagagtgtcttcaagacttgctaacaatcaagtaatccacactgcagataacccttacaaatgtaatgaatgtgacaaggtcttcagtaacagttcaaaccttgtacaacatcaaagaattcatactggagagaagccttacaagtgtcatgaatgtggcaagctcttcaatcgaatttcactccttgcacgacatcagagaatacatactggagagaaaccttacaaatgtcatgagtgtggcaaagtcttcactcaaaattctcaccttgcaaatcatcacagaatccacactggagagaaaccttacaaatgtaatgagtgtggcaaggtcttcaacagaaatgcacaccttgcacgacatcagaaaattcatagtggagagaaaccttacaaatgtaaggaatgtggcaaagcattttcagggggttcaggccttactgctcatcttgtaattcacactggagagaaactttacaaatgtaataaatgtggcaaggtcttcaatcgaaatgcacaccttaccagacatcaaagaatccatactggagagaaaccttatgaatgtaaagaatgtggcaaggtcttcaggcacaagttttgtctaaccaatcatcatagaatgcacacgggagagcaaccttacaaatgtaatgaatgtggcaaagcatttagagactgttcaggccttactgcccatctactaattcacactggagagaaaccttacaaatgtaaagaatgtgccaaggtcttcaggcatagattatccctaagcaatcatcagagatttcatactggagagaaaccttacagatgtgatgaatgtggcaaggacttcactcgaaattcaaaccttgcaaatcatcacagaatccatactggagagaaaccttacaaatgcagtgaatgtcacaaagtctttagtcacaattcacaccttgcacgacataggcaaattcatactggagagaagtcttacaaatgcaatgaatgtggcaaggtcttcagccacaagttatacctaaaaaaacatgagagaattcatactggggagaaaccgtacagatgtcatgaatgtggtaaggacttcactcgaaattcaaacctggcaaatcatcacagaatccatactggagagaaaccgtacaga

SEQ ID NO: 5876 - DNA, 708 bp, Homo sapiens
  source 1..708: mol_type = genomic DNA
atgtttgacgacttctcagaaggcagagagtgtgtcaactgtggggctatgtccaccccgctctggaggcgagatgggacgggtcactatctgtgcaacgcctgcggcctctaccacaagatgaacggcatcaaccggccgctcatcaagcctcagcgccggctgtccgcctcccgccgagtgggcctctcctgtgccaactgccagaccaccaccaccacgctgtggcgccgcaatgcggagggcgagcctgtgtgcaatgcctgcggcctctacatgaagctccacggggtccccaggcctcttgcaatgcggaaagaggggatccaaaccagaaaacggaagcccaagaacctgaataaatctaagacaccagcagctccttcaggcagtgagagccttcctcccgccagcggtgcttccagcaactccagcaacgccaccaccagcagcagcgaggagatgcgtcccatcaagacggagcctggcctgtcatctcactacgggcacagcagctccgtgtcccagacgttctcagtcagtgcgatgtctggccatgggccctccatccaccctgtcctctcggccctgaagctctccccacaaggctatgcgtctcccgtcagccagtctccacagaccagctccaagcaggactcttggaacagcctggtcttggccgacagtcacggggacataatcactgcg

SEQ ID NO: 5877 - DNA, 1329 bp, Homo sapiens
  source 1..1329: mol_type = genomic DNA
atgtatcagagcttggccatggccgccaaccacgggccgccccccggtgcctacgaggcgggcggccccggcgccttcatgcacggcgcgggcgccgcgtcctcgccagtctacgtgcccacaccgcgggtgccctcctccgtgctgggcctgtcctacctccagggcggaggcgcgggctctgcgtccggaggcgcctcgggcggcagctccggtggggccgcgtctggtgcggggcccgggacccagcagggcagcccgggatggagccaggcgggagccgacggagccgcttacaccccgccgccggtgtcgccgcgcttctccttcccggggaccaccgggtccctggcggccgccgccgccgctgccgcggcccgggaagctgcggcctacagcagtggcggcggagcggcgggtgcgggcctggcgggccgcgagcagtacgggcgcgccggcttcgcgggctcctactccagcccctacccggcttacatggccgacgtgggcgcgtcctgggccgcagccgccgccgcctccgccggccccttcgacagcccggtcctgcacagcctgcccggccgggccaacccggccgcccgacaccccaatctcgtagatatgtttgacgacttctcagaaggcagagagtgtgtcaactgtggggctatgtccaccccgctctggaggcgagatgggacgggtcactatctgtgcaacgcctgcggcctctaccacaagatgaacggcatcaaccggccgctcatcaagcctcagcgccggctgtccgcctcccgccgagtgggcctctcctgtgccaactgccagaccaccaccaccacgctgtggcgccgcaatgcggagggcgagcctgtgtgcaatgcctgcggcctctacatgaagctccacggggtccccaggcctcttgcaatgcggaaagaggggatccaaaccagaaaacggaagcccaagaacctgaataaatctaagacaccagcagctccttcaggcagtgagagccttcctcccgccagcggtgcttccagcaactccagcaacgccaccaccagcagcagcgaggagatgcgtcccatcaagacggagcctggcctgtcatctcactacgggcacagcagctccgtgtcccagacgttctcagtcagtgcgatgtctggccatgggccctccatccaccctgtcctctcggccctgaagctctccccacaaggctatgcgtctcccgtcagccagtctccacagaccagctccaagcaggactcttggaacagcctggtcttggccgacagtcacggggacataatcactgcg

SEQ ID NO: 5878 - DNA, 1326 bp, Homo sapiens
  source 1..1326: mol_type = genomic DNA
atgtatcagagcttggccatggccgccaaccacgggccgccccccggtgcctacgaggcgggcggccccggcgccttcatgcacggcgcgggcgccgcgtcctcgccagtctacgtgcccacaccgcgggtgccctcctccgtgctgggcctgtcctacctccagggcggaggcgcgggctctgcgtccggaggcgcctcgggcggcagctccggtggggccgcgtctggtgcggggcccgggacccagcagggcagcccgggatggagccaggcgggagccgacggagccgcttacaccccgccgccggtgtcgccgcgcttctccttcccggggaccaccgggtccctggcggccgccgccgccgctgccgcggcccgggaagctgcggcctacagcagtggcggcggagcggcgggtgcgggcctggcgggccgcgagcagtacgggcgcgccggcttcgcgggctcctactccagcccctacccggcttacatggccgacgtgggcgcgtcctgggccgcagccgccgccgcctccgccggccccttcgacagcccggtcctgcacagcctgcccggccgggccaacccggccgcccgacaccccaatctcgatatgtttgacgacttctcagaaggcagagagtgtgtcaactgtggggctatgtccaccccgctctggaggcgagatgggacgggtcactatctgtgcaacgcctgcggcctctaccacaagatgaacggcatcaaccggccgctcatcaagcctcagcgccggctgtccgcctcccgccgagtgggcctctcctgtgccaactgccagaccaccaccaccacgctgtggcgccgcaatgcggagggcgagcctgtgtgcaatgcctgcggcctctacatgaagctccacggggtccccaggcctcttgcaatgcggaaagaggggatccaaaccagaaaacggaagcccaagaacctgaataaatctaagacaccagcagctccttcaggcagtgagagccttcctcccgccagcggtgcttccagcaactccagcaacgccaccaccagcagcagcgaggagatgcgtcccatcaagacggagcctggcctgtcatctcactacgggcacagcagctccgtgtcccagacgttctcagtcagtgcgatgtctggccatgggccctccatccaccctgtcctctcggccctgaagctctccccacaaggctatgcgtctcccgtcagccagtctccacagaccagctccaagcaggactcttggaacagcctggtcttggccgacagtcacggggacataatcactgcg

SEQ ID NO: 5879 - DNA, 1191 bp, Homo sapiens
  source 1..1191: mol_type = genomic DNA
atgtaccagagcctggcgctggccgcgagcccccgccaggccgcctacgccgactcgggctccttcctgcacgctccgggcgccggctctccgatgtttgtgccgccggcgcgcgtcccctcgatgctgtcctacctgtccgggtgtgagccgagcccgcagccccccgagctcgctgcgcgccccggctgggcgcagacagccaccgcggattcgtcggccttcggcccgggcagtccgcaccccccagccgcgcacccgcccggggccaccgccttccctttcgcgcacagcccctcggggcccggcagcggcggcagcgcggggggccgagacggcagtgcctaccagggcgcgctgttgcctcgagaacagttcgcggccccgcttgggcggccggtggggacctcgtactccgccacctacccggcctacgtgagccccgacgtggcccagtcctggactgccgggcccttcgatggcagcgtcctgcacggcctcccaggccgcaggcccaccttcgtgtccgacttcttggaggagttcccgggtgagggtcgtgagtgtgtcaactgcggggccctgtccacaccgctgtggcgccgagacggcaccggccactacctgtgcaatgcctgcggcctctaccacaagatgaatggcgtcaaccggccgctcgttcggcctcagaagcgcctgtcctcgtcccgccgcgccggcctctgctgcaccaactgccacacgaccaacaccacgctgtggcggcggaactcggagggggagcccgtgtgcaatgcctgcggcctctacatgaagctgcacggggtgccgcggcctctggctatgaagaaggaaagcatccagacacggaagcggaagccaaagaccatcgccaaggccaggggctcctcaggatccacaaggaatgcctcggcctccccatctgctgtcgccagcactgacagctcagcagccacttcgaaagccaagcccagcctggcgtccccagtgtgccctgggcccagcatggccccccaggcctctggccaggaggatgactctcttgcccccggccacttggagttcaagttcgagcctgaggactttgccttcccctccacggccccaagcccccaggctggcctcaggggggctctgcgccaagaggcctggtgtgcgctggccttggcc

SEQ ID NO: 5880 - DNA, 1329 bp, Homo sapiens
  source 1..1329: mol_type = genomic DNA
atggaggtgacggcggaccagccgcgctgggtgagccaccaccaccccgccgtgctcaacgggcagcacccggacacgcaccacccgggcctcagccactcctacatggacgcggcgcagtacccgctgccggaggaggtggatgtgctttttaacatcgacggtcaaggcaaccacgtcccgccctactacggaaactcggtcagggccacggtgcagaggtaccctccgacccaccacgggagccaggtgtgccgcccgcctctgcttcatggatccctaccctggctggacggcggcaaagccctgggcagccaccacaccgcctccccctggaatctcagccccttctccaagacgtccatccaccacggctccccggggcccctctccgtctaccccccggcctcgtcctcctccttgtcggggggccacgccagcccgcacctcttcaccttcccgcccaccccgccgaaggacgtctccccggacccatcgctgtccaccccaggctcggccggctcggcccggcaggacgagaaagagtgcctcaagtaccaggtgcccctgcccgacagcatgaagctggagtcgtcccactcccgtggcagcatgaccgccctgggtggagcctcctcgtcgacccaccaccccatcaccacctacccgccctacgtgcccgagtacagctccggactcttcccccccagcagcctgctgggcggctcccccaccggcttcggatgcaagtccaggcccaaggcccggtccagcacaggcagggagtgtgtgaactgtggggcaacctcgaccccactgtggcggcgagatggcacgggacactacctgtgcaacgcctgcgggctctatcacaaaatgaacggacagaaccggcccctcattaagcccaagcgaaggctgtctgcagccaggagagcagggacgtcctgtgcgaactgtcagaccaccacaaccacactctggaggaggaatgccaatggggaccctgtctgcaatgcctgtgggctctactacaagcttcacaatattaacagacccctgactatgaagaaggaaggcatccagaccagaaaccgaaaaatgtctagcaaatccaaaaagtgcaaaaaagtgcatgactcactggaggacttccccaagaacagctcgtttaacccggccgccctctccagacacatgtcctccctgagccacatctcgcccttcagccactccagccacatgctgaccacgcccacgccgatgcacccgccatccagcctgtcctttggaccacaccacccctccagcatggtcaccgccatgggt

SEQ ID NO: 5881 - DNA, 1332 bp, Homo sapiens
  source 1..1332: mol_type = genomic DNA
atggaggtgacggcggaccagccgcgctgggtgagccaccaccaccccgccgtgctcaacgggcagcacccggacacgcaccacccgggcctcagccactcctacatggacgcggcgcagtacccgctgccggaggaggtggatgtgctttttaacatcgacggtcaaggcaaccacgtcccgccctactacggaaactcggtcagggccacggtgcagaggtaccctccgacccaccacgggagccaggtgtgccgcccgcctctgcttcatggatccctaccctggctggacggcggcaaagccctgggcagccaccacaccgcctccccctggaatctcagccccttctccaagacgtccatccaccacggctccccggggcccctctccgtctaccccccggcctcgtcctcctccttgtcggggggccacgccagcccgcacctcttcaccttcccgcccaccccgccgaaggacgtctccccggacccatcgctgtccaccccaggctcggccggctcggcccggcaggacgagaaagagtgcctcaagtaccaggtgcccctgcccgacagcatgaagctggagtcgtcccactcccgtggcagcatgaccgccctgggtggagcctcctcgtcgacccaccaccccatcaccacctacccgccctacgtgcccgagtacagctccggactcttcccccccagcagcctgctgggcggctcccccaccggcttcggatgcaagtccaggcccaaggcccggtccagcacagaaggcagggagtgtgtgaactgtggggcaacctcgaccccactgtggcggcgagatggcacgggacactacctgtgcaacgcctgcgggctctatcacaaaatgaacggacagaaccggcccctcattaagcccaagcgaaggctgtctgcagccaggagagcagggacgtcctgtgcgaactgtcagaccaccacaaccacactctggaggaggaatgccaatggggaccctgtctgcaatgcctgtgggctctactacaagcttcacaatattaacagacccctgactatgaagaaggaaggcatccagaccagaaaccgaaaaatgtctagcaaatccaaaaagtgcaaaaaagtgcatgactcactggaggacttccccaagaacagctcgtttaacccggccgccctctccagacacatgtcctccctgagccacatctcgcccttcagccactccagccacatgctgaccacgcccacgccgatgcacccgccatccagcctgtcctttggaccacaccacccctccagcatggtcaccgccatgggt

SEQ ID NO: 5882 - DNA, 1239 bp, Homo sapiens
  source 1..1239: mol_type = genomic DNA
atggagttccctggcctggggtccctggggacctcagagcccctcccccagtttgtggatcctgctctggtgtcctccacaccagaatcaggggttttcttcccctctgggcctgagggcttggatgcagcagcttcctccactgccccgagcacagccaccgctgcagctgcggcactggcctactacagggacgctgaggcctacagacactccccagtctttcaggtgtacccattgctcaactgtatggaggggatcccagggggctcaccatatgccggctgggcctacggcaagacggggctctaccctgcctcaactgtgtgtcccacccgcgaggactctcctccccaggccgtggaagatctggatggaaaaggcagcaccagcttcctggagactttgaagacagagcggctgagcccagacctcctgaccctgggacctgcactgccttcatcactccctgtccccaatagtgcttatgggggccctgacttttccagtaccttcttttctcccaccgggagccccctcaattcagcagcctattcctctcccaagcttcgtggaactctccccctgcctccctgtgaggccagggagtgtgtgaactgcggagcaacagccactccactgtggcggagggacaggacaggccactacctatgcaacgcctgcggcctctatcacaagatgaatgggcagaacaggcccctcatccggcccaagaagcgcctgattgtcagtaaacgggcaggtactcagtgcaccaactgccagacgaccaccacgacactgtggcggagaaatgccagtggggatcccgtgtgcaatgcctgcggcctctactacaagctacaccaggtgaaccggccactgaccatgcggaaggatggtattcagactcgaaaccgcaaggcatctggaaaagggaaaaagaaacggggctccagtctgggaggcacaggagcagccgaaggaccagctggtggctttatggtggtggctgggggcagcggtagcgggaattgtggggaggtggcttcaggcctgacactgggccccccaggtactgcccatctctaccaaggcctgggccctgtggtgctgtcagggcctgttagccacctcatgcctttccctggacccctactgggctcacccacgggctccttccccacaggccccatgccccccaccaccagcactactgtggtggctccgctcagctca

SEQ ID NO: 5883 - DNA, 456 bp, Homo sapiens
  source 1..456: mol_type = genomic DNA
atgtcggttccaggaccttaccaggcggccactgggccttcctcagcaccatccgcacctccatcctatgaagagacagtggctgttaacagttattaccccacacctccagctcccatgcctgggccaactacggggcttgtgacggggcctgatgggaagggcatgaatcctccttcgtattatacccagccagcgcccatccccaataacaatccaattaccgtgcagacggtctacgtgcagcaccccatcacctttttggaccgccctatccaaatgtgttgtccttcctgcaacaagatgatcgtgagtcagctgtcctataacgccggtgctctgacctggctgtcctgcgggagcctgtgcctgctggggcaggagtgcagtggtacgatcgtagctctccgcagctttgatctcctgggctcctgcaatccgcccagctcagcctcc

SEQ ID NO: 5884 - DNA, 597 bp, Homo sapiens
  source 1..597: mol_type = genomic DNA
atggcgttcgcgctgctgcggcccgtcggcgcgcacgtgctgtacccggacgtgcggctgctgagcgaggacgaggagaaccgcagcgagagcgacgcgtcggaccagtcgttcggctgctgcgagggcccggaggcggcgcggcgcggcccgggccccgggggcgggcggcgggcgggcggcggcggcggcgcgggccccgtggtggtggtgcgacagcggcaggcggccaacgcgcgggagcgggaccgcactcagagcgtgaacacggccttcacggcgctgcgcacgctcatccccaccgagccggtggaccgcaagctgtccaagatcgagaccgtgcgcctggcgtccagctacatcgcgcacctggccaacgtgctgctgctgggcgactcggccgacgacgggcagccgtgcttccgtgccgcgggcagtgccaagggcgccgtccccgccgccgccgacggcggccgccagccgcgctccatctgcaccttctgcctcagcaaccagcgcaaggggggtggccgtcgtgacctggggggcagctgcttgaaggtgaggggggtggccccccttcgagggccacggaga

SEQ ID NO: 5885 - DNA, 1608 bp, Homo sapiens
  source 1..1608: mol_type = genomic DNA
atgtattgtgcttatcctgtccctggaatgggcagcaattctttgatgtattactacaatgggaaaacggtatatgcaccatccccaaattcagatgatttcaaccgtgaatctcctagttatccatctcctaagccaccaaccagtatgttcgctagcactttctttatgcaagatgggacccacaattcttctgacctttggagttcatcaaatgggatgagccagcctggttttggtggaattctggggacctccacttcccacatgtctcaatccagtagttatggcaaccttcattcacatgaccgcttgagttatcctccacactcagtttcaccaacagacataaacacgagtcttccaccaatgtccagctttcatcgcggcagtaccagcagttcaccttacgttgctgcctcacacactcctcccatcaatggatcagacagcattctaggaaccagagggaatgctgctggaagctcacagacaggtgatgcacttggaaaggctttggcatctatttattctcctgaccataccagcagtagttttccgtcaaatccatcaacaccagttggatcaccttcacctctcacaggtaccagtcagtggccaagacctggagggcaagcaccttcatccccaagctatgaaaactcactccactccctgaaaaatcgagttgagcagcaacttcacgagcatttgcaagatgcaatgtccttcttaaaggatgtctgtgagcagtctcgaatggaggatcgtttagacagactggatgatgcaatccatgtgctgcggaaccatgctgtgggaccttccaccagtttgcctgctggtcacagtgatatacatagtttattgggaccatcccataatgcaccaattggaagcctcaattcaaactatggaggatcaagccttgttgcaagcagtcgatcagcttcaatggttggaactcatcgggaagactctgtcagtctcaatggcaatcattcagtcctgtctagtacagtcactacttcaagcacagacctgaaccataaaacacaagaaaattatagaggtggcttgcaaagtcagtctggaactgttgttacaacagaaatcaagactgaaaacaaagaaaaggatgaaaaccttcatgaacctccttcatcagatgacatgaagtcagatgatgaatcctcccaaaaagatatcaaggtttcatctagaggcagaacaagcagtactaatgaagatgaggatttgaaccctgaacagaagatagaaagggagaaggagaggcggatggctaacaatgccagagaacgcttacgcgtgcgggatattaatgaagcattcaaagagcttggccgaatgtgtcagcttcacttgaagagtgaaaaaccccaaacaaaactccttattcttcatcaagccgtggcagtcatccttagtctagaacagcaagtcagagagaggaaccttaaccccaaagcagcctgccttaagagaagggaagaagaaaaagtttctgccgtatcggcagagccgccaaccacactgccaggaacccatcctgggcttagtgaaactaccaaccctatgggtcatatg

SEQ ID NO: 5886 - DNA, 1536 bp, Homo sapiens
  source 1..1536: mol_type = genomic DNA
atgtattgtgcttatcctgtccctggaatgggcagcaattctttgatgtattactacaatgggaaaacggtatatgcaccatccccaaattcagatgatttcaaccgtgaatctcctagttatccatctcctaagccaccaaccagtatgttcgctagcactttctttatgcaagatgggacccacaattcttctgacctttggagttcatcaaatgggatgagccagcctggttttggtggaattctggggacctccacttcccacatgtctcaatccagtagttatggcaaccttcattcacatgaccgcttgagttatcctccacactcagtttcaccaacagacataaacacgagtcttccaccaatgtccagctttcatcgcggcagtaccagcagttcaccttacgttgctgcctcacacactcctcccatcaatggatcagacagcattctaggaaccagagggaatgctgctggaagctcacagacaggtgatgcacttggaaaggctttggcatctatttattctcctgaccataccagcagtagttttccgtcaaatccatcaacaccagttggatcaccttcacctctcacaggtaccagtcagtggccaagacctggagggcaagcaccttcatccccaagctatgaaaactcactccactccctgcagtctcgaatggaggatcgtttagacagactggatgatgcaatccatgtgctgcggaaccatgctgtgggaccttccaccagtttgcctgctggtcacagtgatatacatagtttattgggaccatcccataatgcaccaattggaagcctcaattcaaactatggaggatcaagccttgttgcaagcagtcgatcagcttcaatggttggaactcatcgggaagactctgtcagtctcaatggcaatcattcagtcctgtctagtacagtcactacttcaagcacagacctgaaccataaaacacaagaaaattatagaggtggcttgcaaagtcagtctggaactgttgttacaacagaaatcaagactgaaaacaaagaaaaggatgaaaaccttcatgaacctccttcatcagatgacatgaagtcagatgatgaatcctcccaaaaagatatcaaggtttcatctagaggcagaacaagcagtactaatgaagatgaggatttgaaccctgaacagaagatagaaagggagaaggagaggcggatggctaacaatgccagagaacgcttacgcgtgcgggatattaatgaagcattcaaagagcttggccgaatgtgtcagcttcacttgaagagtgaaaaaccccaaacaaaactccttattcttcatcaagccgtggcagtcatccttagtctagaacagcaagtcagagagaggaaccttaaccccaaagcagcctgccttaagagaagggaagaagaaaaagtttctgccgtatcggcagagccgccaaccacactgccaggaacccatcctgggcttagtgaaactaccaaccctatgggtcatatg

SEQ ID NO: 5887 - DNA, 2046 bp, Homo sapiens
  source 1..2046: mol_type = genomic DNA
atgaatccccagcaacaacgcatggccgctatagggaccgacaaggagctgagcgacctactggacttcagtgcgatgttttccccacctgttaatagtgggaaaactagaccaactacactgggaagcagtcaattcagtggatcaggtattgatgaaagaggaggtacaacatcttggggaacaagtggtcaaccaagtccttcctatgattcatctagaggttttacagacagccctcattacagtgatcacttgaatgacagtcgattaggagcccatgaaggcttgtccccaacacctttcatgaactcaaatctgatgggaaaaacatcagagagaggctcattttccctgtacagcagagatactggattaccaggctgtcaatctagtctcctgagacaagatctggggcttgggagcccagcacagctatcttcttcaggaaaacctgggacagcatactattcattctctgctacaagttccaggaggagaccactccatgactctgcagcgcttgatcccttgcaagcaaaaaaagtcagaaaggtgcctcctggtttgccttcttctgtatatgcaccatccccaaattcagatgatttcaaccgtgaatctcctagttatccatctcctaagccaccaaccagtatgttcgctagcactttctttatgcaagatgggacccacaattcttctgacctttggagttcatcaaatgggatgagccagcctggttttggtggaattctggggacctccacttcccacatgtctcaatccagtagttatggcaaccttcattcacatgaccgcttgagttatcctccacactcagtttcaccaacagacataaacacgagtcttccaccaatgtccagctttcatcgcggcagtaccagcagttcaccttacgttgctgcctcacacactcctcccatcaatggatcagacagcattctaggaaccagagggaatgctgctggaagctcacagacaggtgatgcacttggaaaggctttggcatctatttattctcctgaccataccagcagtagttttccgtcaaatccatcaacaccagttggatcaccttcacctctcacaggtaccagtcagtggccaagacctggagggcaagcaccttcatccccaagctatgaaaactcactccactccctgcagtctcgaatggaggatcgtttagacagactggatgatgcaatccatgtgctgcggaaccatgctgtgggaccttccaccagtttgcctgctggtcacagtgatatacatagtttattgggaccatcccataatgcaccaattggaagcctcaattcaaactatggaggatcaagccttgttgcaagcagtcgatcagcttcaatggttggaactcatcgggaagactctgtcagtctcaatggcaatcattcagtcctgtctagtacagtcactacttcaagcacagacctgaaccataaaacacaagaaaattatagaggtggcttgcaaagtcagtctggaactgttgttacaacagaaatcaagactgaaaacaaagaaaaggatgaaaaccttcatgaacctccttcatcagatgacatgaagtcagatgatgaatcctcccaaaaagatatcaaggtttcatctagaggcagaacaagcagtactaatgaagatgaggatttgaaccctgaacagaagatagaaagggagaaggagaggcggatggctaacaatgccagagaacgcttacgcgtgcgggatattaatgaagcattcaaagagcttggccgaatgtgtcagcttcacttgaagagtgaaaaaccccaaacaaaactccttattcttcatcaagccgtggcagtcatccttagtctagaacagcaagtcagagagaggaaccttaaccccaaagcagcctgccttaagagaagggaagaagaaaaagtttctgccgtatcggcagagccgccaaccacactgccaggaacccatcctgggcttagtgaaactaccaaccctatgggtcatatg

SEQ ID NO: 5888 - DNA, 1338 bp, Homo sapiens
  source 1..1338: mol_type = genomic DNA
atgggaaaacggtatatgcaccatccccaaattcagatgatttcaaccgtgaatctcctagttatccatctcctaagccaccaaccagtatgttcgctagcactttctttatgcaagagttatcctccacactcagtttcaccaacagacataaacacgagtcttccaccaatgtccagctttcatcgcggcagtaccagcagttcaccttacgttgctgcctcacacactcctcccatcaatggatcagacagcattctaggaaccagagggaatgctgctggaagctcacagacaggtgatgcacttggaaaggctttggcatctatttattctcctgaccataccagcagtagttttccgtcaaatccatcaacaccagttggatcaccttcacctctcacaggtaccagtcagtggccaagacctggagggcaagcaccttcatccccaagctatgaaaactcactccactccctgcagtctcgaatggaggatcgtttagacagactggatgatgcaatccatgtgctgcggaaccatgctgtgggaccttccaccagtttgcctgctggtcacagtgatatacatagtttattgggaccatcccataatgcaccaattggaagcctcaattcaaactatggaggatcaagccttgttgcaagcagtcgatcagcttcaatggttggaactcatcgggaagactctgtcagtctcaatggcaatcattcagtcctgtctagtacagtcactacttcaagcacagacctgaaccataaaacacaagaaaattatagaggtggcttgcaaagtcagtctggaactgttgttacaacagaaatcaagactgaaaacaaagaaaaggatgaaaaccttcatgaacctccttcatcagatgacatgaagtcagatgatgaatcctcccaaaaagatatcaaggtttcatctagaggcagaacaagcagtactaatgaagatgaggatttgaaccctgaacagaagatagaaagggagaaggagaggcggatggctaacaatgccagagaacgcttacgcgtgcgggatattaatgaagcattcaaagagcttggccgaatgtgtcagcttcacttgaagagtgaaaaaccccaaacaaaactccttattcttcatcaagccgtggcagtcatccttagtctagaacagcaagtcagagagaggaaccttaaccccaaagcagcctgccttaagagaagggaagaagaaaaagtttctgccgtatcggcagagccgccaaccacactgccaggaacccatcctgggcttagtgaaactaccaaccctatgggtcatatg

SEQ ID NO: 5889 - DNA, 2118 bp, Homo sapiens
  source 1..2118: mol_type = genomic DNA
atgaatccccagcaacaacgcatggccgctatagggaccgacaaggagctgagcgacctactggacttcagtgcgatgttttccccacctgttaatagtgggaaaactagaccaactacactgggaagcagtcaattcagtggatcaggtattgatgaaagaggaggtacaacatcttggggaacaagtggtcaaccaagtccttcctatgattcatctagaggttttacagacagccctcattacagtgatcacttgaatgacagtcgattaggagcccatgaaggcttgtccccaacacctttcatgaactcaaatctgatgggaaaaacatcagagagaggctcattttccctgtacagcagagatactggattaccaggctgtcaatctagtctcctgagacaagatctggggcttgggagcccagcacagctatcttcttcaggaaaacctgggacagcatactattcattctctgctacaagttccaggaggagaccactccatgactctgcagcgcttgatcccttgcaagcaaaaaaagtcagaaaggtgcctcctggtttgccttcttctgtatatgcaccatccccaaattcagatgatttcaaccgtgaatctcctagttatccatctcctaagccaccaaccagtatgttcgctagcactttctttatgcaagatgggacccacaattcttctgacctttggagttcatcaaatgggatgagccagcctggttttggtggaattctggggacctccacttcccacatgtctcaatccagtagttatggcaaccttcattcacatgaccgcttgagttatcctccacactcagtttcaccaacagacataaacacgagtcttccaccaatgtccagctttcatcgcggcagtaccagcagttcaccttacgttgctgcctcacacactcctcccatcaatggatcagacagcattctaggaaccagagggaatgctgctggaagctcacagacaggtgatgcacttggaaaggctttggcatctatttattctcctgaccataccagcagtagttttccgtcaaatccatcaacaccagttggatcaccttcacctctcacaggtaccagtcagtggccaagacctggagggcaagcaccttcatccccaagctatgaaaactcactccactccctgaaaaatcgagttgagcagcaacttcacgagcatttgcaagatgcaatgtccttcttaaaggatgtctgtgagcagtctcgaatggaggatcgtttagacagactggatgatgcaatccatgtgctgcggaaccatgctgtgggaccttccaccagtttgcctgctggtcacagtgatatacatagtttattgggaccatcccataatgcaccaattggaagcctcaattcaaactatggaggatcaagccttgttgcaagcagtcgatcagcttcaatggttggaactcatcgggaagactctgtcagtctcaatggcaatcattcagtcctgtctagtacagtcactacttcaagcacagacctgaaccataaaacacaagaaaattatagaggtggcttgcaaagtcagtctggaactgttgttacaacagaaatcaagactgaaaacaaagaaaaggatgaaaaccttcatgaacctccttcatcagatgacatgaagtcagatgatgaatcctcccaaaaagatatcaaggtttcatctagaggcagaacaagcagtactaatgaagatgaggatttgaaccctgaacagaagatagaaagggagaaggagaggcggatggctaacaatgccagagaacgcttacgcgtgcgggatattaatgaagcattcaaagagcttggccgaatgtgtcagcttcacttgaagagtgaaaaaccccaaacaaaactccttattcttcatcaagccgtggcagtcatccttagtctagaacagcaagtcagagagaggaaccttaaccccaaagcagcctgccttaagagaagggaagaagaaaaagtttctgccgtatcggcagagccgccaaccacactgccaggaacccatcctgggcttagtgaaactaccaaccctatgggtcatatg

SEQ ID NO: 5890 - DNA, 1035 bp, Homo sapiens
  source 1..1035: mol_type = genomic DNA
atgctgccctgcttccaactgctgcgcatagggggcggcaggggcggtgatctctacaccttccacccccccgccggggctggctgcacctatcgcttgggccacagggccgacctgtgtgatgtggccctgcggccccagcaggagcctggcctcatctctgggatccacgccgaactgcatgccgagccccggggtgatgactggagggtcagcctggaagaccacagcagccaaggtactttggtcaataatgtccgactcccaagaggtcacaggctggaattgagtgatggagacctcctgacctttggccctgaagggcccccaggaaccagcccctcggagttctacttcatgttccaacaagtacgagtcaagcctcaggactttgctgccattaccatcccacggtctaggggagaagcccgggttggggctggtttccggcctatgctgccctcccagggggctccacagcggcctctcagcaccttctcccctgcccccaaggccacactgatcctaaactccataggcagcctcagcaagctccggccccagcccctcaccttctcccctagttggggtggaccaaagagcctgcctgttcccgccccacctggggaaatggggaccacgccttctgctccaccacaacgcaatcggaggaaatctgttcaccgagtgttggcggaactggatgatgagagtgagcctcctgagaacccgccaccggtccttatggagcccaggaagaaactccgtgtagacaaagccccactgactcccactggaaatcgacgtggccgtcctcggaagtacccagtgagcgctcccatggctccccctgcagttgggggcggggagccctgtgcagctccttgttgctgcctgccccaggaagagacagtggcctgggttcagtgtgatggctgtgacgtctggttccatgtggcctgtgttggctgcagcatccaggctgccagggaggccgacttccgatgcccagggtgccgggctggcattcagacc

SEQ ID NO: 5891 - DNA, 1971 bp, Homo sapiens
  source 1..1971: mol_type = genomic DNA
atgattgagtcccaggaaccagtgacatttgaggatgtggctgtggacttcacgcaggaagagtggcagcagttgaatcctgctcagaagaccctgcatagggatgtgatgctggagacctataatcacctggtctccgtggggtgttcaggtataaaaccagatgtaatctttaagttggaacatggaaaggacccatggatcatagagagtgagttgtcaaggtggatctacccagacagagtgaaaggccttgaatcttcccagcagatcatttctggagaacttttatttcaaagggagatactagaaagagccccaaaggataattcattgtactctgttttaaaaatctggcatattgataatcagatggatagatatcaaggaaatcaagacagagttttgaggcaggtcacagtcatcagtcgtgaaacattgactgatgagatgggttccaagtacagtgcatttgggaaaatgttcaatcggtgcacagaccttgctcctttaagtcaaaaattccataagtttgattcatgtgaaaatagcttgaagtctaattcagacttactaaattataacaggagctatgcaagaaagaaccccactaagagatttagatgtgggagaccacctaagtataatgcttcctgttctgtgcctgagaaggaaggcttcattcatactggaatggagccctatggagatagtcaatgtgaaaaagttctcagtcataagcaagcccatgttcagtataagaaatttcaagccagagagaaacccaatgtttgtagtatgtgtgggaaagcctttatcaagaagtcacagctcattatacatcaaagaattcatactggagagaaaccatatgtatgtggagattgtaggaaagccttcagtgagaaatcacacctcattgtgcatcagaggattcatactggggagaaaccctatgaatgtactaagtatggaagagcattctcccggaagtcacctttcactgttcatcagagagtccatactggagagaaaccctatgagtgttttgagtgtccaaaagctttctcccagaagtcacatctaattatacatcagagagttcataccagagagaagccctttgaatgcagtgaatgcaggaaagccttctgtgagatgtctcacctttttatacaccagataactcatactgggaagaagccctatgaatgtactgaatgtgggaagaccttccctcggaaaacacagctcattatacatcagagaacgcatactggagagaagccctataagtgtggtgaatgtgggaaaactttctgccaacagtcccacctcataggacatcaaagaattcatacaggagaaaaaccttatgtgtgtactgactgtgggaaggccttttcccagaagtcacacctcactggccatcaaagacttcatactggagagaaaccttatatgtgtactgaatgtggaaaatccttctctcagaaatcacctcttatcatacaccagagaattcatacaggggagaaaccttatcagtgtggtgaatgtggcaaaaccttctcccagaaatcactcctcattattcatctgagagttcacacaggggagaaaccttatgagtgtactgagtgtgggagggccttttccctgaagtcacatctcattctacatcagagaggtcatactggagagaaaccctatgaatgtagtgaatgtggaaaggccttctgtggaaagtctccactcattatacatcagaaaactcatcctagggagaaaacccctgaatgtgctgagtctggaatgacttttttctggaaatcacagatgattacatatcagagaagacacactggggagaaaccctccagatgcagtgactgtgggaaggcattctgccagcatgtatactttactgggcatcagaatccatataggaaagacaccttgtatatatgc

SEQ ID NO: 5892 - DNA, 1599 bp, Homo sapiens
  source 1..1599: mol_type = genomic DNA
atggatagatatcaaggaaatcaagacagagttttgaggcaggtcacagtcatcagtcgtgaaacattgactgatgagatgggttccaagtacagtgcatttgggaaaatgttcaatcggtgcacagaccttgctcctttaagtcaaaaattccataagtttgattcatgtgaaaatagcttgaagtctaattcagacttactaaattataacaggagctatgcaagaaagaaccccactaagagatttagatgtgggagaccacctaagtataatgcttcctgttctgtgcctgagaaggaaggcttcattcatactggaatggagccctatggagatagtcaatgtgaaaaagttctcagtcataagcaagcccatgttcagtataagaaatttcaagccagagagaaacccaatgtttgtagtatgtgtgggaaagcctttatcaagaagtcacagctcattatacatcaaagaattcatactggagagaaaccatatgtatgtggagattgtaggaaagccttcagtgagaaatcacacctcattgtgcatcagaggattcatactggggagaaaccctatgaatgtactaagtatggaagagcattctcccggaagtcacctttcactgttcatcagagagtccatactggagagaaaccctatgagtgttttgagtgtccaaaagctttctcccagaagtcacatctaattatacatcagagagttcataccagagagaagccctttgaatgcagtgaatgcaggaaagccttctgtgagatgtctcacctttttatacaccagataactcatactgggaagaagccctatgaatgtactgaatgtgggaagaccttccctcggaaaacacagctcattatacatcagagaacgcatactggagagaagccctataagtgtggtgaatgtgggaaaactttctgccaacagtcccacctcataggacatcaaagaattcatacaggagaaaaaccttatgtgtgtactgactgtgggaaggccttttcccagaagtcacacctcactggccatcaaagacttcatactggagagaaaccttatatgtgtactgaatgtggaaaatccttctctcagaaatcacctcttatcatacaccagagaattcatacaggggagaaaccttatcagtgtggtgaatgtggcaaaaccttctcccagaaatcactcctcattattcatctgagagttcacacaggggagaaaccttatgagtgtactgagtgtgggagggccttttccctgaagtcacatctcattctacatcagagaggtcatactggagagaaaccctatgaatgtagtgaatgtggaaaggccttctgtggaaagtctccactcattatacatcagaaaactcatcctagggagaaaacccctgaatgtgctgagtctggaatgacttttttctggaaatcacagatgattacatatcagagaagacacactggggagaaaccctccagatgcagtgactgtgggaaggcattctgccagcatgtatactttactgggcatcagaatccatataggaaagacaccttgtatatatgc

SEQ ID NO: 5893 - DNA, 297 bp, Homo sapiens
  source 1..297: mol_type = genomic DNA
atgccgaagagaaagtctccagagaatacagagggcaaagatggatccaaagtaactaaacaggagcccacaagacggtctgccagattgtcagcgaaacctgctccaccaaaacctgaacccaaaccaagaaaaacatctgctaagaaagaacctggagcaaagattagcagaggtgctaaagggaagaaggaggaaaagcaggaagctggaaaggaaggtactgcaccatctgaaaatggtgaaactaaagctgaagaggcacagaaaactgaatctgtagataacgagggagaa

SEQ ID NO: 5894 - DNA, 390 bp, Homo sapiens
  source 1..390: mol_type = genomic DNA
atgccgaagagaaagtctccagagaatacagagggcaaagatggatccaaagtaactaaacaggagcccacaagacggtctgccagattgtcagcgaaacctgctccaccaaaacctgaacccaaaccaagaaaaacatctgctaagaaagaacctggagcaaagattagcagaggtgctaaagggaagaaggaggaaaagcaggaagctggaaaggaaggtactgcaccatctgaaaatggtgaaactaaagctgaagagatccacatctctcgctcaactgttaatgtctcaacctccagaggcaccccacccagcacactgtcagtaaaggggcagattgaaacagtgagagcacagaaaactgaatctgtagataacgagggagaa

SEQ ID NO: 5895 - DNA, 1878 bp, Homo sapiens
  source 1..1878: mol_type = genomic DNA
atggcagaccagagaatggacatttcttcaaccatcagtgatttcatgtccccgggccccaccgacctgctttccagctctcttggtaccagtggtgtggattgcaaccgcaaacggaaaggcagctccactgactaccaagaaagcatggacacagacaaagatgaccctcatggaaggttagaatatacagaacaccaaggaaggataaaaaatgcaagggaagctcacagtcagattgaaaagcggcgtcgggataaaatgaacagttttatagatgaattggcttctttggtaccaacatgcaacgcaatgtccaggaaattagataaacttactgtgctaaggatggctgttcagcacatgaaaacattaagaggtgccaccaatccatacacagaagcaaactacaaaccaacttttctatcagacgatgaattgaaacacctcattctcagggcagcagatggatttttgtttgtcgtaggatgtgaccgagggaagatactctttgtctcagagtctgtcttcaagatcctcaactacagccagaatgatctgattggtcagagtttgtttgactacctgcatcctaaagatattgccaaagtcaaggagcagctctcctcctctgacaccgcaccccgggagcggctcatagatgcaaaaactggacttccagttaaaacagatataacccctgggccatctcgattatgttctggagcacgacgttctttcttctgtaggatgaagtgtaacaggccttcagtaaaggttgaagacaaggacttcccctctacctgctcaaagaaaaaagcagatcgaaaaagcttctgcacaatccacagcacaggctatttgaaaagctggccacccacaaagatggggctggatgaagacaacgaaccagacaatgaggggtgtaacctcagctgcctcgtcgcaattggacgactgcattctcatgtagttccacaaccagtgaacggggaaatcagggtgaaatctatggaatatgtttctcggcacgcgatagatggaaagtttgtttttgtagaccagagggcaacagctattttggcatatttaccacaagaacttctaggcacatcgtgttatgaatattttcaccaagatgacataggacatcttgcagaatgtcataggcaagttttacagacgagagaaaaaattacaactaattgctataaatttaaaatcaaagatggttcttttatcacactacggagtcgatggttcagtttcatgaacccttggaccaaggaagtagaatatattgtctcaactaacactgttgttttagccaacgtcctggaaggcggggacccaaccttcccacagctcacagcatccccccacagcatggacagcatgctgccctctggagaaggtggcccaaagaggacccaccccactgttccagggattccagggggaacccgggctggggcaggaaaaataggccgaatgattgctgaggaaatcatggaaatccacaggataagagggtcatcgccttctagctgtggctccagcccattgaacatcacgagtacgcctccccctgatgcctcttctccaggaggcaagaagattttaaatggagggactccagacattccttccagtggcctactatcaggccaggctcaggagaacccaggttatccatattctgatagttcttctattcttggtgagaacccccacataggtatagacatgattgacaacgaccaaggatcaagtagtcccagtaatgatgaggcagcaatggctgtcatcatgagcctcttggaagcagatgctggactgggtggccctgttgactttagtgacttgccatggccgctg

SEQ ID NO: 5896 - DNA, 1749 bp, Homo sapiens
  source 1..1749: mol_type = genomic DNA
atgattaatatagaaagcatggacacagacaaagatgaccctcatggaaggttagaatatacagaacaccaaggaaggataaaaaatgcaagggaagctcacagtcagattgaaaagcggcgtcgggataaaatgaacagttttatagatgaattggcttctttggtaccaacatgcaacgcaatgtccaggaaattagataaacttactgtgctaaggatggctgttcagcacatgaaaacattaagaggtgccaccaatccatacacagaagcaaactacaaaccaacttttctatcagacgatgaattgaaacacctcattctcagggcagcagatggatttttgtttgtcgtaggatgtgaccgagggaagatactctttgtctcagagtctgtcttcaagatcctcaactacagccagaatgatctgattggtcagagtttgtttgactacctgcatcctaaagatattgccaaagtcaaggagcagctctcctcctctgacaccgcaccccgggagcggctcatagatgcaaaaactggacttccagttaaaacagatataacccctgggccatctcgattatgttctggagcacgacgttctttcttctgtaggatgaagtgtaacaggccttcagtaaaggttgaagacaaggacttcccctctacctgctcaaagaaaaaagcagatcgaaaaagcttctgcacaatccacagcacaggctatttgaaaagctggccacccacaaagatggggctggatgaagacaacgaaccagacaatgaggggtgtaacctcagctgcctcgtcgcaattggacgactgcattctcatgtagttccacaaccagtgaacggggaaatcagggtgaaatctatggaatatgtttctcggcacgcgatagatggaaagtttgtttttgtagaccagagggcaacagctattttggcatatttaccacaagaacttctaggcacatcgtgttatgaatattttcaccaagatgacataggacatcttgcagaatgtcataggcaagttttacagacgagagaaaaaattacaactaattgctataaatttaaaatcaaagatggttcttttatcacactacggagtcgatggttcagtttcatgaacccttggaccaaggaagtagaatatattgtctcaactaacactgttgttttagccaacgtcctggaaggcggggacccaaccttcccacagctcacagcatccccccacagcatggacagcatgctgccctctggagaaggtggcccaaagaggacccaccccactgttccagggattccagggggaacccgggctggggcaggaaaaataggccgaatgattgctgaggaaatcatggaaatccacaggataagagggtcatcgccttctagctgtggctccagcccattgaacatcacgagtacgcctccccctgatgcctcttctccaggaggcaagaagattttaaatggagggactccagacattccttccagtggcctactatcaggccaggctcaggagaacccaggttatccatattctgatagttcttctattcttggtgagaacccccacataggtatagacatgattgacaacgaccaaggatcaagtagtcccagtaatgatgaggcagcaatggctgtcatcatgagcctcttggaagcagatgctggactgggtggccctgttgactttagtgacttgccatggccgctg

SEQ ID NO: 5897 - DNA, 1746 bp, Homo sapiens
  source 1..1746: mol_type = genomic DNA
atgattaatatagaaagcatggacacagacaaagatgaccctcatggaaggttagaatatacagaacaccaaggaaggataaaaaatgcaagggaagctcacagtcagattgaaaagcggcgtcgggataaaatgaacagttttatagatgaattggcttctttggtaccaacatgcaacgcaatgtccaggaaattagataaacttactgtgctaaggatggctgttcagcacatgaaaacattaagaggtgccaccaatccatacacagaagcaaactacaaaccaacttttctatcagacgatgaattgaaacacctcattctcagggcagcagatggatttttgtttgtcgtaggatgtgaccgagggaagatactctttgtctcagagtctgtcttcaagatcctcaactacagccagaatgatctgattggtcagagtttgtttgactacctgcatcctaaagatattgccaaagtcaaggagcagctctcctcctctgacaccgcaccccgggagcggctcatagatgcaaaaactggacttccagttaaaacagatataacccctgggccatctcgattatgttctggagcacgacgttctttcttctgtaggatgaagtgtaacaggccttcagtaaaggttgaagacaaggacttcccctctacctgctcaaagaaaaaagatcgaaaaagcttctgcacaatccacagcacaggctatttgaaaagctggccacccacaaagatggggctggatgaagacaacgaaccagacaatgaggggtgtaacctcagctgcctcgtcgcaattggacgactgcattctcatgtagttccacaaccagtgaacggggaaatcagggtgaaatctatggaatatgtttctcggcacgcgatagatggaaagtttgtttttgtagaccagagggcaacagctattttggcatatttaccacaagaacttctaggcacatcgtgttatgaatattttcaccaagatgacataggacatcttgcagaatgtcataggcaagttttacagacgagagaaaaaattacaactaattgctataaatttaaaatcaaagatggttcttttatcacactacggagtcgatggttcagtttcatgaacccttggaccaaggaagtagaatatattgtctcaactaacactgttgttttagccaacgtcctggaaggcggggacccaaccttcccacagctcacagcatccccccacagcatggacagcatgctgccctctggagaaggtggcccaaagaggacccaccccactgttccagggattccagggggaacccgggctggggcaggaaaaataggccgaatgattgctgaggaaatcatggaaatccacaggataagagggtcatcgccttctagctgtggctccagcccattgaacatcacgagtacgcctccccctgatgcctcttctccaggaggcaagaagattttaaatggagggactccagacattccttccagtggcctactatcaggccaggctcaggagaacccaggttatccatattctgatagttcttctattcttggtgagaacccccacataggtatagacatgattgacaacgaccaaggatcaagtagtcccagtaatgatgaggcagcaatggctgtcatcatgagcctcttggaagcagatgctggactgggtggccctgttgactttagtgacttgccatggccgctg

SEQ ID NO: 5898 - DNA, 1323 bp, Homo sapiens
  source 1..1323: mol_type = genomic DNA
atggtgcagcaggcggagagcttggaagcggagagcaacctgccccgggaggcgctggacacggaggagggcgaattcatggcttgcagcccggtggccctggacgagagcgacccagactggtgcaagacggcgtcgggccacatcaagcggccgatgaacgcgttcatggtatggtccaagatcgaacgcaggaagatcatggagcagtctccggacatgcacaacgccgagatctccaagaggctgggcaagcgctggaaaatgctgaaggacagcgagaagatcccgttcatccgggaggcggagcggctgcggctcaagcacatggccgactaccccgactacaagtaccggccccggaaaaagcccaaaatggacccctcggccaagcccagcgccagccagagcccagagaagagcgcggccggcggcggcggcgggagcgcgggcggaggcgcgggcggtgccaagacctccaagggctccagcaagaaatgcggcaagctcaaggcccccgcggccgcgggcgccaaggcgggcgcgggcaaggcggcccagtccggggactacgggggcgcgggcgacgactacgtgctgggcagcctgcgcgtgagcggctcgggcggcggcggcgcgggcaagacggtcaagtgcgtgtttctggatgaggacgacgacgacgacgacgacgacgacgagctgcagctgcagatcaaacaggagccggacgaggaggacgaggaaccaccgcaccagcagctcctgcagccgccggggcagcagccgtcgcagctgctgagacgctacaacgtcgccaaagtgcccgccagccctacgctgagcagctcggcggagtcccccgagggagcgagcctctacgacgaggtgcgggccggcgcgacctcgggcgccgggggcggcagccgcctctactacagcttcaagaacatcaccaagcagcacccgccgccgctcgcgcagcccgcgctgtcgcccgcgtcctcgcgctcggtgtccacctcctcgtccagcagcagcggcagcagcagcggcagcagcggcgaggacgccgacgacctgatgttcgacctgagcttgaatttctctcaaagcgcgcacagcgccagcgagcagcagctggggggcggcgcggcggccgggaacctgtccctgtcgctggtggataaggatttggattcgttcagcgagggcagcctgggctcccacttcgagttccccgactactgcacgccggagctgagcgagatgatcgcgggggactggctggaggcgaacttctccgacctggtgttcacatat

SEQ ID NO: 5899 - DNA, 1866 bp, Homo sapiens
  source 1..1866: mol_type = genomic DNA
atgtccatgaggagccccatctctgcccagctggccctggatggcgttggcaccatggtgaactgcaccatcaagtcagaggagaagaaagagccttgccacgaggccccccagggctcagccactgccgctgaacctcagcctggagacccagcccgggcctcccaggatagtgctgacccccaagctccagcccaggggaatttcaggggctcctgggactgtagctctccagagggtaatgggtccccagaacccaagagaccaggagtgtcggaggctgcctctggaagccaggagaagctggacttcaaccgaaatttgaaagaagtggtgccagccatagagaagctgttgtccagtgactggaaggagaggtttctaggaaggaactctatggaagccaaagatgtcaaagggacccaagagagcctagcagagaaggagctccagcttctggtcatgattcaccagctgtccaccctgcgggaccagctcctgacagcccactcggagcagaagaacatggctgccatgctgtttgagaagcagcagcagcagatggagcttgcccggcagcagcaggagcagattgcaaagcagcagcagcagctgattcagcagcagcataagatcaacctccttcagcagcagatccagcaggttaacatgccttatgtcatgatcccagccttccccccaagccaccaacctctgcctgtcacccctgactcccagctggccttacccattcagcccattccctgcaaaccagtggagtatccgctgcagctgctgcacagcccccctgccccagtggtgaagaggcctggggccatggccacccaccaccccctgcaggagccctcccagcccctgaacctcacagccaagcccaaggcccccgagctgcccaacacctccagctccccaagcctgaagatgagcagctgtgtgccccgcccccccagccatggaggccccacgcgggacctgcagtccagccccccgagcctgcctctgggcttccttggtgaaggggacgctgtcaccaaagccatccaggatgctcggcagctgctgcacagccacagtggggccttggatggctcccccaacacccccttccgtaaggacctcatcagcctggactcatccccagccaaggagcggctggaggacggctgtgtgcacccactggaggaagccatgctgagctgcgacatggatggctcccgccacttccccgagtcccgaaacagcagccacatcaagaggcccatgaacgccttcatggtgtgggccaaggatgagcggaggaagatcctgcaagccttcccagacatgcacaactccagcatcagcaagatccttggatctcgctggaagtccatgaccaaccaggagaagcagccctactatgaggaacaggcgcggctgagccggcagcacctggagaagtatcctgactacaagtacaagccgcggcccaagcgcacctgcatcgtggagggcaagcggctgcgcgtgggagagtacaaggccctgatgaggacccggcgtcaggatgcccgccagagctacgtgatccccccgcaggctggccaggtgcagatgagctcctcagatgtcctgtaccctcgggcagcaggcatgccgctggcacagccactggtggagcactatgtccctcgtagcctggaccccaacatgcctgtgatcgtcaacacctgcagcctcagagaggagggtgagggcacagatgacaggcactcggtggctgatggcgagatgtaccggtacagcgaggacgaggactcggagggcgaagagaagagcgatggggagttggtggtgctcacagac

SEQ ID NO: 5900 - DNA, 1242 bp, Homo sapiens
  source 1..1242: mol_type = genomic DNA
atgagcagcccggatgcgggatacgccagtgacgaccagagccagacccagagcgcgctgcccgcggtgatggccgggctgggcccctgcccctgggccgagtcgctgagccccatcggggacatgaaggtgaagggcgaggcgccggcgaacagcggagcaccggccggggccgcgggccgagccaagggcgagtcccgtatccggcggccgatgaacgctttcatggtgtgggctaaggacgagcgcaagcggctggcgcagcagaatccagacctgcacaacgccgagttgagcaagatgctgggcaagtcgtggaaggcgctgacgctggcggagaagcggcccttcgtggaggaggcagagcggctgcgcgtgcagcacatgcaggaccaccccaactacaagtaccggccgcggcggcgcaagcaggtgaagcggctgaagcgggtggagggcggcttcctgcacggcctggctgagccgcaggcggccgcgctgggccccgagggcggccgcgtggccatggacggcctgggcctccagttccccgagcagggcttccccgccggcccgccgctgctgcctccgcacatgggcggccactaccgcgactgccagagtctgggcgcgcctccgctcgacggctacccgttgcccacgcccgacacgtccccgctggacggcgtggaccccgacccggctttcttcgccgccccgatgcccggggactgcccggcggccggcacctacagctacgcgcaggtctcggactacgctggccccccggagcctcccgccggtcccatgcacccccgactcggcccagagcccgcgggtccctcgattccgggcctcctggcgccacccagcgcccttcacgtgtactacggcgcgatgggctcgcccggggcgggcggcgggcgcggcttccagatgcagccgcaacaccagcaccagcaccagcaccagcaccaccccccgggccccggacagccgtcgccccctccggaggcactgccctgccgggacggcacggaccccagtcagcccgccgagctcctcggggaggtggaccgcacggaatttgaacagtatctgcacttcgtgtgcaagcctgagatgggcctcccctaccaggggcatgactccggtgtgaatctccccgacagccacggggccatttcctcggtggtgtccgacgccagctccgcggtatattactgcaactatcctgacgtg

SEQ ID NO: 5901 - DNA, 1401 bp, Homo sapiens
  source 1..1401: mol_type = genomic DNA
atggctacgggcgcggatgtacgggacattctagaactcgggggtccagaaggggatgcagcctctgggaccatcagcaagaaggacattatcaacccggacaagaaaaaatccaagaagtcctctgagacactgactttcaagaggcccgagggcatgcaccgggaagtctatgccttgctctactctgacaagaaggatgcacccccactgctacccagtgacactggccagggataccgtacagtgaaggccaagttgggctccaagaaggtgcggccttggaagtggatgccattcaccaacccggcccgcaaggacggagcaatgttcttccactggcgacgtgcagcggaggagggcaaggactacccctttgccaggttcaataagactgtgcaggtgcctgtgtactcggagcaggagtaccagctttatctccacgatgatgcttggactaaggcagaaactgaccacctctttgacctcagccgccgctttgacctgcgttttgttgttatccatgaccggtatgaccaccagcagttcaagaagcgttctgtggaagacctgaaggagcggtactaccacatctgtgctaagcttgccaacgtgcgggctgtgccaggcacagaccttaagataccagtatttgatgctgggcacgaacgacggcggaaggaacagcttgagcgtctctacaaccggaccccagagcaggtggcagaggaggagtacctgctacaggagctgcgcaagattgaggcccggaagaaggagcgggagaaacgcagccaggacctgcagaagctgatcacagcggcagacaccactgcagagcagcggcgcacggaacgcaaggcccccaaaaagaagctaccccagaaaaaggaggctgagaagccggctgttcctgagactgcaggcatcaagtttccagacttcaagtctgcaggtgtcacgctgcggagccaacggatgaagctgccaagctctgtgggacagaagaagatcaaggccctggaacagatgctgctggagcttggtgtggagctgagcccgacacctacggaggagctggtgcacatgttcaatgagctgcgaagcgacctggtgctgctctacgagctcaagcaggcctgtgccaactgcgagtatgagctgcagatgctgcggcaccgtcatgaggcactggcccgggctggtgtgctagggggccctgccacaccagcatcaggcccaggcccggcctctgctgagccggcagtgactgaacccggacttggtcctgaccccaaggacaccatcattgatgtggtgggcgcacccctcacgcccaattcgagaaagcgacgggagtcggcctccagctcatcttccgtgaagaaagccaagaagccg

SEQ ID NO: 5902 - DNA, 1047 bp, Homo sapiens
  source 1..1047: mol_type = genomic DNA
atgcggggggcggcgagcgcgagtgtccgcgagccgacgccgctcccgggtagaggcgccccccgcacaaagccccgggcgggccgaggcccgactgtagggactccagccaccttggccctccctgcccggggaaggccgcgctcaaggaatggcctcgcatccaaaggccagcgaggagcggcccctacggggcctgggcacagagctctgccttccagggacactgctcttccccaggagagaaacaagaagctggaggctgtggggacaggaattgaacctaaagccatgtcccagggcttggtgacatttggggatgtggctgtagatttctcccaagaggagtgggagtggctgaaccccattcagaggaacttgtacaggaaggtgatgttggagaactacaggaacctggcatcgctgggactttgtgtttctaagcccgatgtgatctcctcgttggaacaaggaaaagagccttggacagtgaagcgaaagatgacaagagcctggtgcccagacttgaaggctgtgtggaagatcaaggagttacctctcaagaaggacttctgcgaaggaaagctatcccaggcagtgataacagagagactcacaagctataatctggagtactctctgttaggggaacactgggattatgatgctctgtttgagacacagccgggcttggtgactatcaaaaacctggctgttgacttccgccagcagctacacccagctcagaagaatttctgtaagaatgggatatgggagaacaacagtgacctgggatcagcaggacattgtgtggctaagccagatttagtctctttactagagcaagagaaggagccctggatggtgaagcgagagctgacaggaagcctgttctcaggtgagtgcaggagagcctggtgtggaaaatctactgcaagagagagcggagcttttaccaaaaaggctgcatcctcactaatatacagtaggaaactttacccagggtctctgggtctggaaagaaaattgaactctgggagttccaaa

SEQ ID NO: 5903 - DNA, 2604 bp, Homo sapiens
  source 1..2604: mol_type = genomic DNA
atgcggggggcggcgagcgcgagtgtccgcgagccgacgccgctcccgggtagaggcgccccccgcacaaagccccgggcgggccgaggcccgactgtagggactccagccaccttggccctccctgcccggggaaggccgcgctcaaggaatggcctcgcatccaaaggccagcgaggagcggcccctacggggcctgggcacagagctctgccttccagggacactgctcttccccaggagagaaacaagaagctggaggctgtggggacaggaattgaacctaaagccatgtcccagggcttggtgacatttggggatgtggctgtagatttctcccaagaggagtgggagtggctgaaccccattcagaggaacttgtacaggaaggtgatgttggagaactacaggaacctggcatcgctgggactttgtgtttctaagcccgatgtgatctcctcgttggaacaaggaaaagagccttggacagtgaagcgaaagatgacaagagcctggtgcccagacttgaaggctgtgtggaagatcaaggagttacctctcaagaaggacttctgcgaaggaaagctatcccaggcagtgataacagagagactcacaagctataatctggagtactctctgttaggggaacactgggattatgatgctctgtttgagacacagccgggcttggtgactatcaaaaacctggctgttgacttccgccagcagctacacccagctcagaagaatttctgtaagaatgggatatgggagaacaacagtgacctgggatcagcaggacattgtgtggctaagccagatttagtctctttactagagcaagagaaggagccctggatggtgaagcgagagctgacaggaagcctgttctcaggccagcgatctgtacatgagacccaggaattatttccaaagcaagattcatatgctgaaggggtaacagacagaacctcaaacactaaacttgattgttccagtttcagagaaaattgggattctgactatgtgtttggaaggaagcttgcagtaggtcaagagacacaattcaggcaagagccaattactcataacaaaaccctctctaaggaaagagaacgtacatataacaaatctggaagatggttctatttggacgattcagaagagaaagttcataatcgtgattcaattaaaaattttcaaaaaagttcagtggtaataaaacaaacaggcatctatgcaggaaaaaagcttttcaagtgtaatgaatgtaagaaaacttttacccagagctcatctcttactgttcatcagagaattcacactggagagaaaccttataaatgtaatgaatgtgggaaggcctttagtgacggctcatcctttgcccgacaccagagatgtcacactggcaagaagccctatgagtgcattgagtgtgggaaagctttcatacagaacacatcccttatccgtcactggagatactatcatactggggagaaaccctttgattgcatcgattgtgggaaagccttcagtgaccacatagggcttaatcaacacaggagaattcatactggagagaaaccttacaaatgtgatgtatgtcacaaatccttcaggtatggttcctcccttactgtacatcaaaggattcataccggagaaaaaccatatgaatgtgatgtttgcagaaaagccttcagccatcatgcatcactcactcaacatcaaagagtacattctggagaaaagccttttaagtgtaaagagtgcggaaaagcttttaggcagaatatacaccttgccagtcatttaaggattcatactggggagaagccttttgaatgtgcggagtgtggaaaatccttcagcatcagttctcagcttgccactcatcagagaatccatactggagagaagccctatgaatgtaaggtttgtagtaaagcgttcacccagaaggctcaccttgcacagcatcagaaaacccatacaggagagaaaccatatgagtgcaaggaatgcggtaaagccttcagccagaccacacacctcattcaacatcagagagttcacactggtgagaaaccctataaatgtatggaatgtgggaaggcctttggtgataactcatcctgtactcaacatcaaagactgcacactggccaaagaccttatgaatgtattgagtgtggaaaggcattcaagacaaaatcctcccttatttgtcatcgcagaagtcatactggagaaaaaccttatgaatgcagtgtgtgtggcaaagcctttagtcatcgtcaatcccttagtgtacatcagagaatccattctggaaagaaaccatatgaatgtaaggaatgtaggaaaaccttcatccaaattggacaccttaatcaacataagagagttcatactggagagagatcttataactataagaaaagcagaaaagtcttcaggcaaactgctcacttagctcatcatcagcgaattcatactggagagtcgtcaacatgcccctctttaccttccacgtcaaatcctgtggatctgtttcccaaatttctctggaatccatcctccctcccatcacca

SEQ ID NO: 5904 - DNA, 1563 bp, Homo sapiens
  source 1..1563: mol_type = genomic DNA
atggagacagatttggctgaaatgcctgagaaaggagctctgtcttcccaggattctccccatttccaagagaagagcacagaagagggagaagtggctgctctgcgcctcacggccagatcccaggaaacagtgacattcaaggatgtggccatggactttacaccagaggagtgggggaagctggatcctgcacaaagggatgtgatgctggagaactataggaacctagtctcactttggcttccagtttccaaacctgagagctacaacttggagaatggaaaagaaccattgaagcttgagagaaaagcccccaaaagcagctattcagacatggagactagaccacagagcaaggattcaacttcagtgcaagatttttccaaagcagaatcatgcaaagttgcaataatagacagactgacacggaatagtgtctatgactctaacttggaagcagcccttgaatgtgaaaattggttagagaatcagcaaggaaatcaggagagacatttgagagaaatgttcactcacatgaattcactctctgaggaaacagaccataagcatgatgtatactggaaaagcttcaatcagaaatctgtccttatcactgaagacagagttcccaaaggatcttatgccttccatacacttgaaaaaagcttgaaacaaaaatcaaacttaatgaaaaagcagagaacttataaagagaaaaaacctcataaatgtaatgattgtggtgaactcttcacctaccattcagtgcttattcgacaccagagagtccatactggagagaaaccctatacctgcaatgaatgtgggaaatcttttagccacagagctaatttaactaaacaccagagaactcatactagaattctctttgaatgcagtgaatgcaagaaaaccttcacagaaagctcatcccttgcaacacatcagagaattcacgttggagagagaccttatgaatgcaatgaatgtgggaaaggttttaatcgaagtacacatcttgtgcagcatcagttgattcatactggagtgaagccttatgaatgtaatgaatgtgataaagcttttattcattcatcagcactcattaaacatcaaagaactcatactggagagaaaccttataaatgtcaagaatgtgggaaagcctttagccattgctcatccctaactaagcatcagagagttcatactggagaaaagccatatgaatgcagtgaatgtggaaaaacttttagtcagagcacacatcttgttcaacatcagagaattcacactggagagaaaccctatgagtgtaatgaatgtgggaaaaccttcagccggagctccaattttgctaaacatcaaagaattcatattggaaagaaaccgtacaaatgtagcgagtgtggaaaagccttcattcattcatcagctctcattcaacatcagagaactcataccggagagaaaccctttagatgtaatgagtgtgggaaaagctttaagtgcagttcatctctcatcagacatcaaagagttcacactgaagagcaaccc

SEQ ID NO: 5905 - DNA, 1533 bp, Homo sapiens
  source 1..1533: mol_type = genomic DNA
atgggagctctgtcttcccaggattctccccatttccaagagaagagcacagaagagggagaagtggctgctctgcgcctcacggccagatcccaggaaacagtgacattcaaggatgtggccatggactttacaccagaggagtgggggaagctggatcctgcacaaagggatgtgatgctggagaactataggaacctagtctcactttggcttccagtttccaaacctgagagctacaacttggagaatggaaaagaaccattgaagcttgagagaaaagcccccaaaagcagctattcagacatggagactagaccacagagcaaggattcaacttcagtgcaagatttttccaaagcagaatcatgcaaagttgcaataatagacagactgacacggaatagtgtctatgactctaacttggaagcagcccttgaatgtgaaaattggttagagaatcagcaaggaaatcaggagagacatttgagagaaatgttcactcacatgaattcactctctgaggaaacagaccataagcatgatgtatactggaaaagcttcaatcagaaatctgtccttatcactgaagacagagttcccaaaggatcttatgccttccatacacttgaaaaaagcttgaaacaaaaatcaaacttaatgaaaaagcagagaacttataaagagaaaaaacctcataaatgtaatgattgtggtgaactcttcacctaccattcagtgcttattcgacaccagagagtccatactggagagaaaccctatacctgcaatgaatgtgggaaatcttttagccacagagctaatttaactaaacaccagagaactcatactagaattctctttgaatgcagtgaatgcaagaaaaccttcacagaaagctcatcccttgcaacacatcagagaattcacgttggagagagaccttatgaatgcaatgaatgtgggaaaggttttaatcgaagtacacatcttgtgcagcatcagttgattcatactggagtgaagccttatgaatgtaatgaatgtgataaagcttttattcattcatcagcactcattaaacatcaaagaactcatactggagagaaaccttataaatgtcaagaatgtgggaaagcctttagccattgctcatccctaactaagcatcagagagttcatactggagaaaagccatatgaatgcagtgaatgtggaaaaacttttagtcagagcacacatcttgttcaacatcagagaattcacactggagagaaaccctatgagtgtaatgaatgtgggaaaaccttcagccggagctccaattttgctaaacatcaaagaattcatattggaaagaaaccgtacaaatgtagcgagtgtggaaaagccttcattcattcatcagctctcattcaacatcagagaactcataccggagagaaaccctttagatgtaatgagtgtgggaaaagctttaagtgcagttcatctctcatcagacatcaaagagttcacactgaagagcaaccc

SEQ ID NO: 5906 - DNA, 1137 bp, Homo sapiens
  source 1..1137: mol_type = genomic DNA
atgcagagcttcctgactctgctgaaggagcatgaggacacctgtgcacccccggcggagctggtgacccttgcgggcagactgtgccgggacttccaggatgaccttgcccaactgcagcctttggtcacagccattctggacagccagctccgcctgcatctcctggacaacgcagatgtggccctggcgtgcgcccgtgtcctggaccagcaggagcagcagcaggcggcttgccgcctcctggaggggtgccaggtgccgggaggcagccaggagttagtgcagctctggaacgacatccactaccgtctggtcatgaggaggctgggcgtggctgcgctcaccccggtgcagaagttccgctgcaggaagaggaaccccccgcccccctccctctgcccagaggggctgaagagccggaacttccccagagaggttcgtgagaagctgcacaatttcgctgtgggggtgaacaccaaccccagcaaggctgagagggagaacttggcattggagacgagcttgacccctgagcaggtgtacaactggtttgccaattaccggcgccgccaaagagcccttccccagcacatgaagccagcccagcaggccacagctgaagaccctggtgcgagggagaggggtcctgacctcctgcagccctcaggcaacccccgtgttgactctgggtttgtggacaggcctcagtggtcagaggaacgtgaggaaaaggggcctccacagtccccacagaccacccaaggaccatgggagccactggccttagccccggactttcccgcagatgagacagtctcaaagccactggatgtcagcggccatccccagagcgtgcaattggaggagggtctgggcacaagcagtggacggacagagctacgggtgggcagcttcctggtgacacagcccccactgcaagctcctgaattcatcctcacccagagccctccagagctggccccagccccatctgccttccccggccctgtgtctgccatggagctgagccaggccctgccctccagccaggtgcagtgttctgatagccaggcctctggtgatgccttctggggagccaggatgctccttgagttttcagggagcagcctgggc

SEQ ID NO: 5907 - DNA, 2151 bp, Homo sapiens
  source 1..2151: mol_type = genomic DNA
atggcaaccccggcggcggtcaaccctccggaaatggcttcagacatacctggatctgtgacgttgcccgttgcccccatggcggccaccggacaggtgaggatggcgggggccatgcctgcccgtggaggaaagcggcgttccggaatggacttcgatgatgaagatggtgaaggccccagtaaattttcaagagagaatcatagtgaaatcgaaaggcgcagacggaacaagatgactcagtacatcacggagctctccgacatggtccccacatgcagcgcactggctcggaagccagacaagctcaccatcctccgcatggccgtctcgcacatgaagtccatgaggggtacagggaacaagtccaccgatggcgcgtacaagccttccttcctcacagagcaggaactgaagcatctcatccttgaagcagctgatggatttctgtttgtggtggctgctgagacagggcgagtgatttatgtgtctgactccgtcacccctgttctgaaccagccccagtcagagtggtttgggagcacactgtatgaacaggtgcatcctgatgacgtggagaagctgagagagcaactgtgcacctcagaaaactcaatgacaggccggatcttggacctgaagactgggacggtcaagaaagaagggcagcagtcatccatgaggatgtgcatgggctcgcggcggtctttcatctgcaggatgaggtgtggaaatgctcctttggaccaccttcctctaaacagaataaccaccatgaggaaaaggttcaggaatggccttggccctgtgaaagaaggagaagcccaatatgctgtggtccactgtacaggatacatcaaggcctggccaccagcaggaatgaccatacctgaagaagacgctgatgtgggacaaggcagtaaatattgcctcgtggcaattgggagactccaggtgaccagctctcctgtatgcatggacatgaatgggatgtcggtgcccacagagttcttatcccggcataactccgatggaatcatcacatttgtggatccaagatgtatcagtgtgattggctaccaaccccaggatcttctgggaaaggacattttggaattctgccaccctgaggatcaaagccatctgcgtgagagcttccagcaggtggttaagctgaaaggccaagtcctgtcggtcatgtatcgatttcgcaccaagaaccgggagtggatgttgatccgcaccagcagcttcacattccagaatccctattctgatgagattgagtacatcatctgcaccaacaccaacgtcaagcaacttcagcaacagcaggcagaattggaagtgcaccagagagatggattgtcatcgtatgacttatcccaggtccccgtccccaacctaccagccggtgttcatgaggccgggaagtccgtggaaaaggcggatgcaatcttctcccaggaaagagatcctcggtttgctgaaatgtttgcaggaattagtgcatcggagaagaagatgatgagctcagcctctgcagcaggaacccagcagatctactcccaaggaagcccatttccctctggacactccgggaaggccttcagctcttcagtggttcatgtgcctggagtgaatgatattcagtcctcttcttccacgggccagaacatgtcccaaatctcccggcagctaaaccagagtcaggtggcatggacagggagtcgtccgccctttccgggacagcaaatcccatctcagtccagcaagactcagtcatctccctttgggattggaacgagccacacctacccggcagacccctcttcctacagccccctctccagcccagctacctcctcgccaagtgggaatgcctactccagtcttgccaacaggactccagggttcgctgaaagtggacaaagtagcgggcagttccaagggcggccctcggaagtctggtcgcagtggcaaagccagcaccatggccagcagagcggtgagcagcactcccaccagcagcccggtcagactgaagtgttccaggacatgctgcccatgccaggagatccaacccaggggactggcaactataacatcgaagactttgccgacctgggcatgtttccaccgttttctgag

SEQ ID NO: 5908 - DNA, 1593 bp, Homo sapiens
  source 1..1593: mol_type = genomic DNA
atggggtttctccatgttggtcaggatggtctcgaactcccgacatcaggtgatccgcctgcctcggcctcccaaagtgctgggattacaggtgtgagccaccgcactcagcctccctgttttgaaggattgacttctaaagacttggtacgtgaggaaaaaacacggaagaggaagaggaaagcaaaggagtcagggatggctcttcttcagggtctactgacattcagggatgtggccatagaattctctcaggaggagtggaaatgcctggaccctgctcagaggactctatacagagacgtgatgctggagaattataggaacctggtctccctggatacctcttccaaatgcatgatgaagatgttctcatcaacaggacaaggcaatacagaagtggtccacacagggacattgcaaatacatgcaagtcatcacattggagatacttgcttccaggaaattgagaaagatattcatgactttgtgtttcagtggcaagaaaatgaaacaaatggccatgaagcactcatgacaaaaaccaaaaagttgatgagtagtacagagcgacatgatcaaaggcatgctggaaacaaacctattaaaaatgagcttggatcaagctttcattcgcatctgcctgaagtgcacatatttcaccccgaagggaaaattggtaatcaagttgagaaggctatcaacgatgctttctcagtttcagcatcccaacgaatttcctgtaggccaaaaactcgtatttctaataagtataggaataatttcctccagtcttcattactcacacaaaaacgggaagtacacacaagagaaaaatctttccaacgtaatgagagtggcaaagcctttaatggtagctcactcttaaaaaaacatcagataatccatttaggagacaaacagtataaatgtgatgtatgcggcaaggactttcatcagaagcgataccttgcatgccatagatgtcacactggtgagaatccttacacgtgtaatgagtgtggcaagacattcagtcacaattcagccctgttagttcacaaggcaattcatactggagagaaaccttacaagtgtaatgaatgtggcaaggtttttaatcaacaatcaaaccttgcacgtcatcatagagttcatactggagagaaaccttacaaatgtgaagaatgtgacaaagttttcagtcgcaaatcacaccttgaaagacataggagaattcacactggagagaaaccatacaaatgtaaggtttgtgacaaggctttcagacgtgattcacacctggcacaacatactgtaattcacactggagagaaaccttacaagtgtaatgagtgtggcaagacctttgttcaaaattcatctcttgtaatgcataaggtcattcatactggagagaaacgttacaagtgtaatgaatgtggcaaggtttttaatcacaaatcaaaccttgcatgtcatcgtagacttcatactggagagaaaccttacaagtgtaatgaatgtggcaaggtttttaatcgaaaatcaaaccttgaacgtcatcatagacttcatactggaaagaaatct

SEQ ID NO: 5909 - DNA, 1395 bp, Homo sapiens
  source 1..1395: mol_type = genomic DNA
atggctcttcttcagggtctactgacattcagggatgtggccatagaattctctcaggaggagtggaaatgcctggaccctgctcagaggactctatacagagacgtgatgctggagaattataggaacctggtctccctggatacctcttccaaatgcatgatgaagatgttctcatcaacaggacaaggcaatacagaagtggtccacacagggacattgcaaatacatgcaagtcatcacattggagatacttgcttccaggaaattgagaaagatattcatgactttgtgtttcagtggcaagaaaatgaaacaaatggccatgaagcactcatgacaaaaaccaaaaagttgatgagtagtacagagcgacatgatcaaaggcatgctggaaacaaacctattaaaaatgagcttggatcaagctttcattcgcatctgcctgaagtgcacatatttcaccccgaagggaaaattggtaatcaagttgagaaggctatcaacgatgctttctcagtttcagcatcccaacgaatttcctgtaggccaaaaactcgtatttctaataagtataggaataatttcctccagtcttcattactcacacaaaaacgggaagtacacacaagagaaaaatctttccaacgtaatgagagtggcaaagcctttaatggtagctcactcttaaaaaaacatcagataatccatttaggagacaaacagtataaatgtgatgtatgcggcaaggactttcatcagaagcgataccttgcatgccatagatgtcacactggtgagaatccttacacgtgtaatgagtgtggcaagacattcagtcacaattcagccctgttagttcacaaggcaattcatactggagagaaaccttacaagtgtaatgaatgtggcaaggtttttaatcaacaatcaaaccttgcacgtcatcatagagttcatactggagagaaaccttacaaatgtgaagaatgtgacaaagttttcagtcgcaaatcacaccttgaaagacataggagaattcacactggagagaaaccatacaaatgtaaggtttgtgacaaggctttcagacgtgattcacacctggcacaacatactgtaattcacactggagagaaaccttacaagtgtaatgagtgtggcaagacctttgttcaaaattcatctcttgtaatgcataaggtcattcatactggagagaaacgttacaagtgtaatgaatgtggcaaggtttttaatcacaaatcaaaccttgcatgtcatcgtagacttcatactggagagaaaccttacaagtgtaatgaatgtggcaaggtttttaatcgaaaatcaaaccttgaacgtcatcatagacttcatactggaaagaaatct

SEQ ID NO: 5910 - DNA, 1572 bp, Homo sapiens
  source 1..1572: mol_type = genomic DNA
atgtacgccctcttcctcctggccagcctcctgggcgcggctctagccggcccggtccttggactgaaagaatgcaccaggggctcggcagtgtggtgccagaatgtgaagacggcgtccgactgcggggcagtgaagcactgcctgcagaccgtttggaacaagccaacagtgaaatcccttccctgcgacatatgcaaagacgttgtcaccgcagctggtgatatgctgaaggacaatgccactgaggaggagatccttgtttacttggagaagacctgtgactggcttccgaaaccgaacatgtctgcttcatgcaaggagatagtggactcctacctccctgtcatcctggacatcattaaaggagaaatgagccgtcctggggaggtgtgctctgctctcaacctctgcgagtctctccagaagcacctagcagagctgaatcaccagaagcagctggagtccaataagatcccagagctggacatgactgaggtggtggcccccttcatggccaacatccctctcctcctctaccctcaggacggcccccgcagcaagccccagccaaaggataatggggacgtttgccaggactgcattcagatggtgactgacatccagactgctgtacggaccaactccacctttgtccaggccttggtggaacatgtcaaggaggagtgtgaccgcctgggccctggcatggccgacatatgcaagaactatatcagccagtattctgaaattgctatccagatgatgatgcacatgcaacccaaggagatctgtgcgctggttgggttctgtgatgaggtgaaagagatgcccatgcagactctggtccccgccaaagtggcctccaagaatgtcatccctgccctggaactggtggagcccattaagaagcacgaggtcccagcaaagtctgatgtttactgtgaggtgtgtgaattcctggtgaaggaggtgaccaagctgattgacaacaacaagactgagaaagaaatactcgacgcttttgacaaaatgtgctcgaagctgccgaagtccctgtcggaagagtgccaggaggtggtggacacgtacggcagctccatcctgtccatcctgctggaggaggtcagccctgagctggtgtgcagcatgctgcacctctgctctggcacgcggctgcctgcactgaccgttcacgtgactcagccaaaggacggtggcttctgcgaagtgtgcaagaagctggtgggttatttggatcgcaacctggagaaaaacagcaccaagcaggagatcctggctgctcttgagaaaggctgcagcttcctgccagacccttaccagaagcagtgtgatcagtttgtggcagagtacgagcccgtgctgatcgagatcctggtggaggtgatggatccttccttcgtgtgcttgaaaattggagcctgcccctcggcccataagcccttgttgggaactgagaagtgtatatggggcccaagctactggtgccagaacacagagacagcagcccagtgcaatgctgtcgagcattgcaaacgccatgtgtggaac

SEQ ID NO: 5911 - DNA, 1503 bp, Homo sapiens
  source 1..1503: mol_type = genomic DNA
atgctgggcatgtacgtgccggacaggttctccctgaagtcctcccgggttcaggacggcatggggctctacacggcccgcagagtgcgaaagggtgaaaagttcggaccctttgctggagagaagagaatgcctgaagacttggatgaaaatatggattacaggttgatgtgggaggttcgtgggagtaagggagaagttttgtacattttggatgctaccaacccacggcactccaactggcttcgcttcgttcatgaggcaccatctcaggagcagaagaacttggctgccattcaagaaggagaaaacattttctatttggcagttgaagatatagaaacagacacggagcttctgattggctacctggatagtgacatggaggctgaggaggaagaacagcaaattatgacagtcatcaaagaaggggaagttgaaaattctagaagacaatcaacagcgggcagaaaagatcgccttggctgtaaagaggactatgcttgtcctcaatgtgaatcgagttttaccagtgaggatattcttgctgagcatctccagacattgcaccagaaacccacagaggagaaagaatttaagtgcaagaactgtgggaagaaattcccagttaagcaggctttgcaaagacattttgagcagcaccaggagacttgccggggggatgccaggtttgtgtgcaaggctgacagctgtggaaagaggctgaagagcaaggatgccctgaaaagacaccaggaaaatgtccacactggagatcctaagaaaaagcttatatgttcagtgtgcaataaaaagtgttcttcagcatcaagcctacaggaacatagaaagattcatgagatatttgattgtcaagaatgtatgaagaaatttatttcagctaatcagctaaaacgtcatatgatcacccactcagaaaaacgaccctataattgcgagatttgtaataagtctttcaagaggcttgatcaagtgggtgctcacaaagtaatacacagcgaagacaaaccttacaaatgcaaactttgtggaaagggatttgcccacagaaatgtttacaagaatcataagaagacccactctgaggagagaccgttccaatgtgaagaatgtaaagctttgttccggaccccattttctttacagagacacctgctaatacataacagtgagaggactttcaagtgccatcactgcgatgctacctttaagaggaaggatacattaaatgttcatgtccaggtggttcatgaaagacacaagaagtataggtgtgagctatgtaataaggcctttgttacaccttcagtgcttagaagtcataagaaaacacatacaggagaaaaggagaaaatctgtccatattgtggccagaaatttgccagcagtggtacactcagagttcatatccggagccacacaggagaagccgtacaagtgctcagagtgcagcaaggccttcagccagaagcgaggcctgga

SEQ ID NO: 5912 - DNA, 1890 bp, Homo sapiens
  source 1..1890: mol_type = genomic DNA
atgctgggcatgtacgtgccggacaggttctccctgaagtcctcccgggttcaggacggcatggggctctacacggcccgcagagtgcgaaagggtgaaaagttcggaccctttgctggagagaagagaatgcctgaagacttggatgaaaatatggattacaggttgatgtgggaggttcgtgggagtaagggagaagttttgtacattttggatgctaccaacccacggcactccaactggcttcgcttcgttcatgaggcaccatctcaggagcagaagaacttggctgccattcaagaaggagaaaacattttctatttggcagttgaagatatagaaacagacacggagcttctgattggctacctggatagtgacatggaggctgaggaggaagaacagcaaattatgacagtcatcaaagaaggggaagttgaaaattctagaagacaatcaacagcgggcagaaaagatcgccttggctgtaaagaggactatgcttgtcctcaatgtgaatcgagttttaccagtgaggatattcttgctgagcatctccagacattgcaccagaaacccacagaggagaaagaatttaagtgcaagaactgtgggaagaaattcccagttaagcaggctttgcaaagacatgttcttcagtgcacagcgaaaagcagtctaaaggagtcttcgcgaagttttcagtgctctgtttgcaattcttccttcagttcagcatcgagttttgagcagcaccaggagacttgccggggggatgccaggtttgtgtgcaaggctgacagctgtggaaagaggctgaagagcaaggatgccctgaaaagacaccaggaaaatgtccacactggagatcctaagaaaaagcttatatgttcagtgtgcaataaaaagtgttcttcagcatcaagcctacaggaacatagaaagattcatgagatatttgattgtcaagaatgtatgaagaaatttatttcagctaatcagctaaaacgtcatatgatcacccactcagaaaaacgaccctataattgcgagatttgtaataagtctttcaagaggcttgatcaagtgggtgctcacaaagtaatacacagcgaagacaaaccttacaaatgcaaactttgtggaaagggatttgcccacagaaatgtttacaagaatcataagaagacccactctgaggagagaccgttccaatgtgaagaatgtaaagctttgttccggaccccattttctttacagagacacctgctaatacataacagtgagaggactttcaagtgccatcactgcgatgctacctttaagaggaaggatacattaaatgttcatgtccaggtggttcatgaaagacacaagaagtataggtgtgagctatgtaataaggcctttgttacaccttcagtgcttagaagtcataagaaaacacatacaggagaaaaggagaaaatctgtccatattgtggccagaaatttgccagcagtggtacactcagagttcatatccggagccacacaggtgagcgtccctatcaatgtccttactgtgaaaaaggattcagtaaaaatgatggactgaagatgcacattcgtactcacaccagggagaagccgtacaagtgctcagagtgcagcaaggccttcagccagaagcgaggcctggatgagcacaagaggacgcacactggagaaaagccttttcagtgtgatgtttgtgatttggcttttagcctgaagaaaatgctgattcgacacaagatgactcataatcccaatcgtcccctggcagaatgccagttttgccataagaagtttacaaggaatgactacctcaaagtgcacatggacaatatccatggtgtagctgacagc

SEQ ID NO: 5913 - DNA, 1785 bp, Homo sapiens
  source 1..1785: mol_type = genomic DNA
atgctgaagcccggagaccccggcggttcggccttcctcaaagtggacccagcctacctgcagcactggcagcaactcttccctcacggaggcgcaggcccgctcaagggcagcggcgccgcgggtctcctgagcgcgccgcagcctcttcagccgccgccgccgcccccgcccccggagcgcgctgagcctccgccggacagcctgcgcccgcggcccgcctctctctcctccgcctcgtccacgccggcttcctcttccacctccgcctcctccgcctcctcctgcgctgctgcggccgctgccgccgcgctggctggtctctcggccctgccggtgtcgcagctgccggtgttcgcgcctctagccgccgctgccgtcgccgccgagccgctgccccccaaggaactgtgcctcggcgccacctccggccccgggcccgtcaagtgcggtggtggtggcggcggcggcggggagggtcgcggcgccccgcgcttccgctgcagcgcagaggagctggactattacctgtatggccagcagcgcatggagatcatcccgctcaaccagcacaccagcgaccccaacaaccgttgcgacatgtgcgcggacaaccgcaacggcgagtgccctatgcatgggccactgcactcgctgcgccggcttgtgggcaccagcagcgctgcggccgccgcgcccccgccggagctgccggagtggctgcgggacctgcctcgcgaggtgtgcctctgcaccagtactgtgcccggcctggcctacggcatctgcgcggcgcagaggatccagcaaggcacctggattggacctttccaaggcgtgcttctgcccccagagaaggtgcaggcaggcgccgtgaggaacacgcagcatctctgggagatatatgaccaggatgggacactacagcactttattgatggtggggaacctagtaagtcgagctggatgaggtatatccgatgtgcaaggcactgcggagaacagaatctaacagtagttcagtacaggtcgaatatattctaccgagcctgtatagatatccctaggggcaccgagcttctggtgtggtacaatgacagctatacgtctttctttgggatccccttacaatgcattgcccaggatgaaaacttaaatgtcccttcaacggtaatggaagccatgtgcagacaagacgccctgcagcccttcaacaaaagcagcaaactcgcccctaccacccagcagcgctccgttgttttcccccagactccgtgcagcaggaacttctctcttctggataagtctgggcccattgaatcaggatttaatcaaatcaacgtgaaaaaccagcgagtcctggcaagcccaacttccacaagccagctccactcggagttcagtgactggcatctttggaaatgtgggcagtgctttaagactttcacccagcggatcctcttacagatgcacgtgtgcacgcagaaccccgacagaccctaccaatgcggccactgctcccagtccttttcccagccttcagaactgaggaaccacgtggtcactcactctagtgaccggcctttcaagtgcggctactgtggtcgtgcctttgccggggccaccaccctcaacaaccacatccgaacccacactggagaaaagcccttcaagtgcgagaggtgtgagaggagcttcacgcaggccacccagctgagccgacaccagcggatgcccaatgagtgcaagccaataactgagagcccagaatcaatcgaagtggat

SEQ ID NO: 5914 - DNA, 1449 bp, Homo sapiens
  source 1..1449: mol_type = genomic DNA
atgcccaccgtggatgacattctggagcaggttggggagtctggctggttccagaagcaagccttcctcatcttatgcctgctgtcggctgcctttgcgcccatctgtgtgggcatcgtcttcctgggtttcacacctgaccaccactgccagagtcctggggtggctgagctgagccagcgctgtggctggagccctgcggaggagctgaactatacagtgccaggcctggggcccgcgggcgaggccttccttggccagtgcaggcgctatgaagtggactggaaccagagcgccctcagctgtgtagaccccctggctagcctggccaccaacaggagccacctgccgctgggtccctgccaggatggctgggtgtatgacacgcccggctcttccatcgtcactgagttcaacctggtgtgtgctgactcctggaagctggacctctttcagtcctgtttgaatgcgggcttcttgtttggctctctcggtgttggctactttgcagacaggtttggccgtaagctgtgtctcctgggaactgtgctggtcaacgcggtgtcgggcgtgctcatggccttctcgcccaactacatgtccatgctgctcttccgcctgctgcagggcctggtcagcaagggcaactggatggctggctacaccctaatcacagaatttgttggctcgggctccagaagaacggtggcgatcatgtaccagatggccttcacggtggggctggtggcgcttaccgggctggcctacgccctgcctcactggcgctggctgcagctggcagtctccctgcccaccttcctcttcctgctctactactggtgtgtgccggagtcccctcggtggctgttatcacaaaaaagaaacactgaagcaataaagataatggaccacatcgctcaaaagaatgggaagttgcctcctgctgatttaaagatgctttccctcgaagaggatgtcaccgaaaagctgagcccttcatttgcagacctgttccgcacgccgcgcctgaggaagcgcaccttcatcctgatgtacctgtggttcacggactctgtgctctatcaggggctcatcctgcacatgggcgccaccagcgggaacctctacctggatttcctttactccgctctggtcgaaatcccgggggccttcatagccctcatcaccattgaccgcgtgggccgcatctaccccatggccatgtcaaatttgttggcgggggcagcctgcctcgtcatgatttttatctcacctgacctgcactggttaaacatcataatcatgtgtgttggccgaatgggaatcaccattgcaatacaaatgatctgcctggtgaatgctgagctgtaccccacattcgtcagaaaagcaaagcccaaagaaaacacgatttaccttaaggtccaaacctcagaaccctcgggcacc

SEQ ID NO: 5915 - DNA, 1662 bp, Homo sapiens
  source 1..1662: mol_type = genomic DNA
atgcccaccgtggatgacattctggagcaggttggggagtctggctggttccagaagcaagccttcctcatcttatgcctgctgtcggctgcctttgcgcccatctgtgtgggcatcgtcttcctgggtttcacacctgaccaccactgccagagtcctggggtggctgagctgagccagcgctgtggctggagccctgcggaggagctgaactatacagtgccaggcctggggcccgcgggcgaggccttccttggccagtgcaggcgctatgaagtggactggaaccagagcgccctcagctgtgtagaccccctggctagcctggccaccaacaggagccacctgccgctgggtccctgccaggatggctgggtgtatgacacgcccggctcttccatcgtcactgagttcaacctggtgtgtgctgactcctggaagctggacctctttcagtcctgtttgaatgcgggcttcttgtttggctctctcggtgttggctactttgcagacaggtttggccgtaagctgtgtctcctgggaactgtgctggtcaacgcggtgtcgggcgtgctcatggccttctcgcccaactacatgtccatgctgctcttccgcctgctgcagggcctggtcagcaagggcaactggatggctggctacaccctaatcacagaatttgttggctcgggctccagaagaacggtggcgatcatgtaccagatggccttcacggtggggctggtggcgcttaccgggctggcctacgccctgcctcactggcgctggctgcagctggcagtctccctgcccaccttcctcttcctgctctactactggtgtgtgccggagtcccctcggtggctgttatcacaaaaaagaaacactgaagcaataaagataatggaccacatcgctcaaaagaatgggaagttgcctcctgctgatttaaagatgctttccctcgaagaggatgtcaccgaaaagctgagcccttcatttgcagacctgttccgcacgccgcgcctgaggaagcgcaccttcatcctgatgtacctgtggttcacggactctgtgctctatcaggggctcatcctgcacatgggcgccaccagcgggaacctctacctggatttcctttactccgctctggtcgaaatcccgggggccttcatagccctcatcaccattgaccgcgtgggccgcatctaccccatggccatgtcaaatttgttggcgggggcagcctgcctcgtcatgatttttatctcacctgacctgcactggttaaacatcataatcatgtgtgttggccgaatgggaatcaccattgcaatacaaatgatctgcctggtgaatgctgagctgtaccccacattcgtcaggaacctcggagtgatggtgtgttcctccctgtgtgacataggtgggataatcacccccttcatagtcttcaggctgagggaggtctggcaagccttgcccctcattttgtttgcggtgttgggcctgcttgccgcgggagtgacgctacttcttccagagaccaagggggtcgctttgccagagaccatgaaggacgccgagaaccttgggagaaaagcaaagcccaaagaaaacacgatttaccttaaggtccaaacctcagaaccctcgggcacc

SEQ ID NO: 5916 - DNA, 1518 bp, Homo sapiens
  source 1..1518: mol_type = genomic DNA
atgcccaccgtggatgacattctggagcaggttggggagtctggctggttccagaagcaagccttcctcatcttatgcctgctgtcggctgcctttgcgcccatctgtgtgggcatcgtcttcctgggtttcacacctgaccaccactgccagagtcctggggtggctgagctgagccagcgctgtggctggagccctgcggaggagctgaactatacagtgccaggcctggggcccgcgggcgaggccttccttggccagtgcaggcgctatgaagtggactggaaccagagcgccctcagctgtgtagaccccctggctagcctggccaccaacaggagccacctgccgctgggtccctgccaggatggctgggtgtatgacacgcccggctcttccatcgtcactgagttcaacctggtgtgtgctgactcctggaagctggacctctttcagtcctgtttgaatgcgggcttcttgtttggctctctcggtgttggctactttgcagacaggtttggccgtaagctgtgtctcctgggaactgtgctggtcaacgcggtgtcgggcgtgctcatggccttctcgcccaactacatgtccatgctgctcttccgcctgctgcagggcctggtcagcaagggcaactggatggctggctacaccctaatcacagaatttgttggctcgggctccagaagaacggtggcgatcatgtaccagatggccttcacggtggggctggtggcgcttaccgggctggcctacgccctgcctcactggcgctggctgcagctggcagtctccctgcccaccttcctcttcctgctctactactggtgtgtgccggagtcccctcggtggctgttatcacaaaaaagaaacactgaagcaataaagataatggaccacatcgctcaaaagaatgggaagttgcctcctgctgatttaaagatgctttccctcgaagaggatgtcaccgaaaagctgagcccttcatttgcagacctgttccgcacgccgcgcctgaggaagcgcaccttcatcctgatgtacctgtggttcacggactctgtgctctatcaggggctcatcctgcacatgggcgccaccagcgggaacctctacctggatttcctttactccgctctggtcgaaatcccgggggccttcatagccctcatcaccattgaccgcgtgggccgcatctaccccatggccatgtcaaatttgttggcgggggcagcctgcctcgtcatgatttttatctcacctgacctgcactggttaaacatcataatcatgtgtgttggccgaatgggaatcaccattgcaatacaaatgatctgcctggtgaatgctgagctgtaccccacattcgtcagcggtgttgggcctgcttgccgcgggagtgacgctacttcttccagagaccaagggggtcgctttgccagagaccatgaaggacgccgagaaccttgggagaaaagcaaagcccaaagaaaacacgatttacct

SEQ ID NO: 5917 - DNA, 678 bp, Homo sapiens
  source 1..678: mol_type = genomic DNA
atgaatcagaacactactgagcctgtggcggccaccgagaccctggctgaggtacccgaacatgtgctgcgaggacttccggaggaagtgaggcttttcccttctgctgttgacaagacccggattggtgtctgggccactaaaccaattttaaaaggcaaaaaatttgggccatttgttggtgataagaaaaaaagatctcaggttaagaataatgtatacatgtgggaggtgtattacccaaatttgggatggatgtgcattgatgccactgatccagagaagggaaactggctgcgatatgtgaattgggcttgctcaggagaagagcaaaatttattcccactggaaatcaacagagccatttactataaaactttaaagccaatcgcgccgggcgaggagctcctggtctggtacaatggggaagacaaccctgagatagcagctgcgattgaggaagagcgagccagcgcccggagcaagcggagctcccccaagagccggaaagctacagcctccgcttggcgtcccgatgctctccaccagcggccccgtacatcaccaggcagtataggaaggtcaaagctccagctgcagcccagttccagggaccattcttcaaagagtagacactctggctgctccctgacagcacctgaagtgacctggaatcag

SEQ ID NO: 5918 - DNA, 5046 bp, Homo sapiens
  source 1..5046: mol_type = genomic DNA
atgaatcagaacactactgagcctgtggcggccaccgagaccctggctgaggtacccgaacatgtgctgcgaggacttccggaggaagtgaggcttttcccttctgctgttgacaagacccggattggtgtctgggccactaaaccaattttaaaaggcaaaaaatttgggccatttgttggtgataagaaaaaaagatctcaggttaagaataatgtatacatgtgggaggtgtattacccaaatttgggatggatgtgcattgatgccactgatccagagaagggaaactggctgcgatatgtgaattgggcttgctcaggagaagagcaaaatttattcccactggaaatcaacagagccatttactataaaactttaaagccaatcgcgccgggcgaggagctcctggtctggtacaatggggaagacaaccctgagatagcagctgcgattgaggaagagcgagccagcgcccggagcaagcggagctcccccaagagccggaaagggaagaaaaaatcccaggaaaataaaaacaaaggaaacaaaatccaagacatacaactgaagacaagtgagccagatttcacctctgcaaatatgagagattctgcagaaggtcctaaagaagacgaagagaagccttcagcctcagcacttgagcagccggccaccctccaggaggtggccagtcaggaggtgcctccagaactagcaacccctgcccctgcctgggagccacagccagaaccagacgagcgattagaagcggcagcttgtgaggtgaatgatttgggggaagaggaggaggaggaagaggaggaggatgaagaagaagaagaagatgatgatgatgatgagttggaagacgagggggaagaagaagccagcatgccaaatgaaaattctgtgaaagagccagaaatacggtgtgatgagaagccagaagatttattagaggaaccaaaaacaacttcagaagaaactcttgaagactgctcagaggtaacacctgccatgcaaatccccagaactaaagaagaggccaatggtgatgtatttgaaacgtttatgtttccgtgtcaacattgtgaaaggaagtttacaaccaaacaggggcttgagcgtcacatgcatatccatatatccaccgtcaatcatgctttcaaatgcaagtactgtgggaaagcctttggcacacagattaaccggcggcgacatgagcggcgccatgaagcagggttaaagcggaaacccagccaaacactacagccgtcagaggatctggctgatggcaaagcatctggagaaaacgttgcttcaaaagatgattcgagtcctcccagtcttgggccagactgtctgatcatgaattcagagaaggcttcccaagacacaataaattcttctgtcgtagaagagaatggggaagttaaagaacttcatccgtgcaaatattgtaaaaaggtttttggaactcatactaatatgagacggcatcagcgtagagttcacgaacgtcatctgattcccaaaggtgtacggcgaaaaggaggccttgaagagccccagcctccagcagaacaggcccaggccacccagaacgtgtatgtaccaagcacagagccggaggaggaaggggaagcagatgatgtgtacatcatggacatttctagcaatatctctgaaaacttaaattactatattgatggtaaaattcaaactaataacaacactagtaactgtgatgtgattgagatggagtctgcttcggcagatttgtatggtataaattgtctgctcactccagttacagtggaaattactcaaaatataaagaccacacaggtccctgtaacagaagatcttcctaaagagcctttgggcagcacaaatagtgaggccaagaagcggagaactgcgagcccacctgcactgcccaaaattaaggccgaaacagactctgaccccatggtcccctcttgctctttaagtcttcctcttagcatatcaacaacagaggcagtgtctttccacaaagagaaaagtgtttatttgtcatcaaagctcaaacaacttcttcaaacccaagataaactaactcctgcagggatttcagcaactgaaatagctaaattaggtcctgtttgtgtgtctgctcctgcatcaatgttgcctgtgacctcaagtaggtttaagaggcggaccagctctcctcccagttctccacagcacagtcctgcccttcgagactttggaaagccaagtgatgggaaagcagcatggaccgatgccgggctgacttccaaaaaatccaaattagaaagtcacagcgactcaccagcatggagtttgtctgggagagatgagagagaaactgtgagccctccatgctttgatgaatataaaatgtctaaagagtggacagctagttctgcttttagcagtgtgtgcaaccagcagccactggatttatccagcggtgtcaaacagaaggctgagggtacaggcaagactccagtccagtgggaatctgtcttagatctcagtgtgcataaaaagcattgtagtgactctgaaggcaaggaattcaaagaaagtcattcagtgcagcctacgtgtagtgctgtaaagaaaaggaaaccaaccacctgcatgctgcagaaggttcttctcaatgaatataatggcatcgatttacctgtagaaaaccctgcagatgggaccaggagcccaagtccttgtaaatccctagaagctcagccagatcctgacctcggtccgggctctggtttccctgcccctactgttgagtccacacctgatgtttgtccttcatcacctgccctgcagacaccctccctttcatccggtcagctgcctcctctcttgatccccacagatccctcttcccctccaccctgtcccccggtattaactgttgccactccgccccctcccctccttcctaccgtacctcttccagccccctcttccagtgcatctccacacccatgcccctctccactctcaaatgccaccgcacagtccccacttccaattctgtccccaacagtgtccccctctccctctcccattcctcccgtggagcccctgatgtctgccgcctcacccgggcctccaacactttcttcttcctcctcttcatcttcctcctcctcttcgttttcttcttcatcttcctcctcttctccttctccacctcctctctccgcaatatcatctgttgtttcctctggtgataatctggaggcttctctccccatgatatctttcaaacaggaggaattagagaatgaaggtctgaaacccagggaagagccccagtctgctgctgaacaggatgttgttgttcaggaaacattcaacaaaaactttgtttgcaacgtctgtgaatcaccttttctttccattaaagatctaaccaaacatttatctattcatgctgaagaatggcccttcaaatgtgaattttgtgtgcagctttttaaggataaaacggacttgtcagaacatcgctttttgcttcatggagttgggaatatctttgtgtgttctgtttgtaaaaaagaatttgcttttttgtgcaatttgcagcagcaccagcgagatctccacccagataaggtgtgcacacatcacgagtttgaaagcgggactctgaggccccagaactttacagatcccagcaaggcccatgtagagcatatgcagagcttgccagaagatcctttagaaacttctaaagaagaagaggagttaaatgattcctctgaagagctttacacgactataaaaataatggcttctggaataaagacaaaagatccagatgttcgattgggcctcaatcagcattacccaagctttaaaccacctccatttcagtaccatcaccgtaaccccatggggattggtgtgacagccacaaatttcactacacacaatattccacagactttcactaccgccattcgctgcacaaagtgtggaaaaggtgtcgacaatatgccggagttgcacaaacatatcctggcttgtgcttctgcaagtgacaagaagaggtacacgcctaagaaaaacccagtaccattaaaacaaactgtgcaacccaaaaatggcgtggtggttttagataactctgggaaaaatgccttccgacgaatgggacagcccaaaaggcttaactttagtgttgagctcagcaaaatgtcgtcgaataagctcaaattaaatgcattgaagaaaaaaaatcagctagtacagaaagcaattcttcagaaaaacaaatctgcaaagcagaaggccgacttgaaaaatgcttgtgagtcatcctctcacatctgcccttactgtaatcgagagttcacttacattggaagcctgaataaacacgccgccttcagctgtcccaaaaaacccctttctcctcccaaaaaaaaagtttctcattcatctaagaaaggtggacactcatcacctgcaagtagtgacaaaaacagtaacagcaaccaccgcagacggacagcggatgcggagattaaaatgcaaagcatgcagactccgttgggcaagaccagagcccgcagctcaggccccacccaagtcccacttccctcctcatccttcaggtccaagcagaacgtcaagtttgcagcttcggtgaaatccaaaaaaccaagctcctcctctttaaggaactccagcccgataagaatggccaaaataactcatgttgaggggaaaaaacctaaagctgtggccaagaatcattctgctcagctttccagcaaaacatcacggagcctgcacgtgagggtacagaaaagcaaagctgttttacaaagcaaatccaccttggcgagtaagaaaagaacagaccggttcaatataaaatctagagagcggagtggggggccagtcacccggagccttcagctggcagctgctgctgacttgagtgagaacaagagagaggacggcagcgccaagcaggagctgaaggacttcaggaacttcctg

SEQ ID NO: 5919 - DNA, 5154 bp, Homo sapiens
  source 1..5154: mol_type = genomic DNA
atgaatcagaacactactgagcctgtggcggccaccgagaccctggctgaggtacccgaacatgtgctgcgaggacttccggaggaagtgaggcttttcccttctgctgttgacaagacccggattggtgtctgggccactaaaccaattttaaaaggcaaaaaatttgggccatttgttggtgataagaaaaaaagatctcaggttaagaataatgtatacatgtgggaggtgtattacccaaatttgggatggatgtgcattgatgccactgatccagagaagggaaactggctgcgatatgtgaattgggcttgctcaggagaagagcaaaatttattcccactggaaatcaacagagccatttactataaaactttaaagccaatcgcgccgggcgaggagctcctggtctggtacaatggggaagacaaccctgagatagcagctgcgattgaggaagagcgagccagcgcccggagcaagcggagctcccccaagagccggaaagggaagaaaaaatcccaggaaaataaaaacaaaggaaacaaaatccaagacatacaactgaagacaagtgagccagatttcacctctgcaaatatgagagattctgcagaaggtcctaaagaagacgaagagaagccttcagcctcagcacttgagcagccggccaccctccaggaggtggccagtcaggaggtgcctccagaactagcaacccctgcccctgcctgggagccacagccagaaccagacgagcgattagaagcggcagcttgtgaggtgaatgatttgggggaagaggaggaggaggaagaggaggaggatgaagaagaagaagaagatgatgatgatgatgagttggaagacgagggggaagaagaagccagcatgccaaatgaaaattctgtgaaagagccagaaatacggtgtgatgagaagccagaagatttattagaggaaccaaaaacaacttcagaagaaactcttgaagactgctcagaggtaacacctgccatgcaaatccccagaactaaagaagaggccaatggtgatgtatttgaaacgtttatgtttccgtgtcaacattgtgaaaggaagtttacaaccaaacaggggcttgagcgtcacatgcatatccatatatccaccgtcaatcatgctttcaaatgcaagtactgtgggaaagcctttggcacacagattaaccggcggcgacatgagcggcgccatgaagcagggttaaagcggaaacccagccaaacactacagccgtcagaggatctggctgatggcaaagcatctggagaaaacgttgcttcaaaagatgattcgagtcctcccagtcttgggccagactgtctgatcatgaattcagagaaggcttcccaagacacaataaattcttctgtcgtagaagagaatggggaagttaaagaacttcatccgtgcaaatattgtaaaaaggtttttggaactcatactaatatgagacggcatcagcgtagagttcacgaacgtcatctgattcccaaaggtgtacggcgaaaaggaggccttgaagagccccagcctccagcagaacaggcccaggccacccagaacgtgtatgtaccaagcacagagccggaggaggaaggggaagcagatgatgtgtacatcatggacatttctagcaatatctctgaaaacttaaattactatattgatggtaaaattcaaactaataacaacactagtaactgtgatgtgattgagatggagtctgcttcggcagatttgtatggtataaattgtctgctcactccagttacagtggaaattactcaaaatataaagaccacacaggtccctgtaacagaagatcttcctaaagagcctttgggcagcacaaatagtgaggccaagaagcggagaactgcgagcccacctgcactgcccaaaattaaggccgaaacagactctgaccccatggtcccctcttgctctttaagtcttcctcttagcatatcaacaacagaggcagtgtctttccacaaagagaaaagtgtttatttgtcatcaaagctcaaacaacttcttcaaacccaagataaactaactcctgcagggatttcagcaactgaaatagctaaattaggtcctgtttgtgtgtctgctcctgcatcaatgttgcctgtgacctcaagtaggtttaagaggcggaccagctctcctcccagttctccacagcacagtcctgcccttcgagactttggaaagccaagtgatgggaaagcagcatggaccgatgccgggctgacttccaaaaaatccaaattagaaagtcacagcgactcaccagcatggagtttgtctgggagagatgagagagaaactgtgagccctccatgctttgatgaatataaaatgtctaaagagtggacagctagttctgcttttagcagtgtgtgcaaccagcagccactggatttatccagcggtgtcaaacagaaggctgagggtacaggcaagactccagtccagtgggaatctgtcttagatctcagtgtgcataaaaagcattgtagtgactctgaaggcaaggaattcaaagaaagtcattcagtgcagcctacgtgtagtgctgtaaagaaaaggaaaccaaccacctgcatgctgcagaaggttcttctcaatgaatataatggcatcgatttacctgtagaaaaccctgcagatgggaccaggagcccaagtccttgtaaatccctagaagctcagccagatcctgacctcggtccgggctctggtttccctgcccctactgttgagtccacacctgatgtttgtccttcatcacctgccctgcagacaccctccctttcatccggtcagctgcctcctctcttgatccccacagatccctcttcccctccaccctgtcccccggtattaactgttgccactccgccccctcccctccttcctaccgtacctcttccagccccctcttccagtgcatctccacacccatgcccctctccactctcaaatgccaccgcacagtccccacttccaattctgtccccaacagtgtccccctctccctctcccattcctcccgtggagcccctgatgtctgccgcctcacccgggcctccaacactttcttcttcctcctcttcatcttcctcctcctcttcgttttcttcttcatcttcctcctcttctccttctccacctcctctctccgcaatatcatctgttgtttcctctggtgataatctggaggcttctctccccatgatatctttcaaacaggaggaattagagaatgaaggtctgaaacccagggaagagccccagtctgctgctgaacaggatgttgttgttcaggaaacattcaacaaaaactttgtttgcaacgtctgtgaatcaccttttctttccattaaagatctaaccaaacatttatctattcatgctgaagaatggcccttcaaatgtgaattttgtgtgcagctttttaaggataaaacggacttgtcagaacatcgctttttgcttcatggagttgggaatatctttgtgtgttctgtttgtaaaaaagaatttgcttttttgtgcaatttgcagcagcaccagcgagatctccacccagataaggtgtgcacacatcacgagtttgaaagcgggactctgaggccccagaactttacagatcccagcaaggcccatgtagagcatatgcagagcttgccagaagatcctttagaaacttctaaagaagaagaggagttaaatgattcctctgaagagctttacacgactataaaaataatggcttctggaataaagacaaaagatccagatgttcgattgggcctcaatcagcattacccaagctttaaaccacctccatttcagtaccatcaccgtaaccccatggggattggtgtgacagccacaaatttcactacacacaatattccacagactttcactaccgccattcgctgcacaaagtgtggaaaaggtgtcgacaatatgccggagttgcacaaacatatcctggcttgtgcttctgcaagtgacaagaagaggtacacgcctaagaaaaacccagtaccattaaaacaaactgtgcaacccaaaaatggcgtggtggttttagataactctgggaaaaatgccttccgacgaatgggacagcccaaaaggcttaactttagtgttgagctcagcaaaatgtcgtcgaataagctcaaattaaatgcattgaagaaaaaaaatcagctagtacagaaagcaattcttcagaaaaacaaatctgcaaagcagaaggccgacttgaaaaatgcttgtgagtcatcctctcacatctgcccttactgtaatcgagagttcacttacattggaagcctgaataaacacgccgccttcagctgtcccaaaaaacccctttctcctcccaaaaaaaaagtttctcattcatctaagaaaggtggacactcatcacctgcaagtagtgacaaaaacagtaacagcaaccaccgcagacggacagcggatgcggagattaaaatgcaaagcatgcagactccgttgggcaagaccagagcccgcagctcaggccccacccaagtcccacttccctcctcatccttcaggtccaagcagaacgtcaagtttgcagcttcggtgaaatccaaaaaaccaagctcctcctctttaaggaactccagcccgataagaatggccaaaataactcatgttgaggggaaaaaacctaaagctgtggccaagaatcattctgctcagctttccagcaaaacatcacggagcctgcacgtgagggtacagaaaagcaaagctgttttacaaagcaaatccaccttggcgagtaagaaaagaacagaccggttcaatataaaatctagagagcggagtggggggccagtcacccggagccttcagctggcagctgctgctgacttgagtgagaacaagagagaggacggcagcgccaagcaggagctgaaggacttcagctacagcctccgcttggcgtcccgatgctctccaccagcggccccgtacatcaccaggcagtataggaaggtcaaagctccagctgcagcccagttccagggaccattcttcaaagag

SEQ ID NO: 5920 - DNA, 4443 bp, Homo sapiens
  source 1..4443: mol_type = genomic DNA
atgagagattctgcagaaggtcctaaagaagacgaagagaagccttcagcctcagcacttgagcagccggccaccctccaggaggtggccagtcaggaggtgcctccagaactagcaacccctgcccctgcctgggagccacagccagaaccagacgagcgattagaagcggcagcttgtgaggtgaatgatttgggggaagaggaggaggaggaagaggaggaggatgaagaagaagaagaagatgatgatgatgatgagttggaagacgagggggaagaagaagccagcatgccaaatgaaaattctgtgaaagagccagaaatacggtgtgatgagaagccagaagatttattagaggaaccaaaaacaacttcagaagaaactcttgaagactgctcagaggtaacacctgccatgcaaatccccagaactaaagaagaggccaatggtgatgtatttgaaacgtttatgtttccgtgtcaacattgtgaaaggaagtttacaaccaaacaggggcttgagcgtcacatgcatatccatatatccaccgtcaatcatgctttcaaatgcaagtactgtgggaaagcctttggcacacagattaaccggcggcgacatgagcggcgccatgaagcagggttaaagcggaaacccagccaaacactacagccgtcagaggatctggctgatggcaaagcatctggagaaaacgttgcttcaaaagatgattcgagtcctcccagtcttgggccagactgtctgatcatgaattcagagaaggcttcccaagacacaataaattcttctgtcgtagaagagaatggggaagttaaagaacttcatccgtgcaaatattgtaaaaaggtttttggaactcatactaatatgagacggcatcagcgtagagttcacgaacgtcatctgattcccaaaggtgtacggcgaaaaggaggccttgaagagccccagcctccagcagaacaggcccaggccacccagaacgtgtatgtaccaagcacagagccggaggaggaaggggaagcagatgatgtgtacatcatggacatttctagcaatatctctgaaaacttaaattactatattgatggtaaaattcaaactaataacaacactagtaactgtgatgtgattgagatggagtctgcttcggcagatttgtatggtataaattgtctgctcactccagttacagtggaaattactcaaaatataaagaccacacaggtccctgtaacagaagatcttcctaaagagcctttgggcagcacaaatagtgaggccaagaagcggagaactgcgagcccacctgcactgcccaaaattaaggccgaaacagactctgaccccatggtcccctcttgctctttaagtcttcctcttagcatatcaacaacagaggcagtgtctttccacaaagagaaaagtgtttatttgtcatcaaagctcaaacaacttcttcaaacccaagataaactaactcctgcagggatttcagcaactgaaatagctaaattaggtcctgtttgtgtgtctgctcctgcatcaatgttgcctgtgacctcaagtaggtttaagaggcggaccagctctcctcccagttctccacagcacagtcctgcccttcgagactttggaaagccaagtgatgggaaagcagcatggaccgatgccgggctgacttccaaaaaatccaaattagaaagtcacagcgactcaccagcatggagtttgtctgggagagatgagagagaaactgtgagccctccatgctttgatgaatataaaatgtctaaagagtggacagctagttctgcttttagcagtgtgtgcaaccagcagccactggatttatccagcggtgtcaaacagaaggctgagggtacaggcaagactccagtccagtgggaatctgtcttagatctcagtgtgcataaaaagcattgtagtgactctgaaggcaaggaattcaaagaaagtcattcagtgcagcctacgtgtagtgctgtaaagaaaaggaaaccaaccacctgcatgctgcagaaggttcttctcaatgaatataatggcatcgatttacctgtagaaaaccctgcagatgggaccaggagcccaagtccttgtaaatccctagaagctcagccagatcctgacctcggtccgggctctggtttccctgcccctactgttgagtccacacctgatgtttgtccttcatcacctgccctgcagacaccctccctttcatccggtcagctgcctcctctcttgatccccacagatccctcttcccctccaccctgtcccccggtattaactgttgccactccgccccctcccctccttcctaccgtacctcttccagccccctcttccagtgcatctccacacccatgcccctctccactctcaaatgccaccgcacagtccccacttccaattctgtccccaacagtgtccccctctccctctcccattcctcccgtggagcccctgatgtctgccgcctcacccgggcctccaacactttcttcttcctcctcttcatcttcctcctcctcttcgttttcttcttcatcttcctcctcttctccttctccacctcctctctccgcaatatcatctgttgtttcctctggtgataatctggaggcttctctccccatgatatctttcaaacaggaggaattagagaatgaaggtctgaaacccagggaagagccccagtctgctgctgaacaggatgttgttgttcaggaaacattcaacaaaaactttgtttgcaacgtctgtgaatcaccttttctttccattaaagatctaaccaaacatttatctattcatgctgaagaatggcccttcaaatgtgaattttgtgtgcagctttttaaggataaaacggacttgtcagaacatcgctttttgcttcatggagttgggaatatctttgtgtgttctgtttgtaaaaaagaatttgcttttttgtgcaatttgcagcagcaccagcgagatctccacccagataaggtgtgcacacatcacgagtttgaaagcgggactctgaggccccagaactttacagatcccagcaaggcccatgtagagcatatgcagagcttgccagaagatcctttagaaacttctaaagaagaagaggagttaaatgattcctctgaagagctttacacgactataaaaataatggcttctggaataaagacaaaagatccagatgttcgattgggcctcaatcagcattacccaagctttaaaccacctccatttcagtaccatcaccgtaaccccatggggattggtgtgacagccacaaatttcactacacacaatattccacagactttcactaccgccattcgctgcacaaagtgtggaaaaggtgtcgacaatatgccggagttgcacaaacatatcctggcttgtgcttctgcaagtgacaagaagaggtacacgcctaagaaaaacccagtaccattaaaacaaactgtgcaacccaaaaatggcgtggtggttttagataactctgggaaaaatgccttccgacgaatgggacagcccaaaaggcttaactttagtgttgagctcagcaaaatgtcgtcgaataagctcaaattaaatgcattgaagaaaaaaaatcagctagtacagaaagcaattcttcagaaaaacaaatctgcaaagcagaaggccgacttgaaaaatgcttgtgagtcatcctctcacatctgcccttactgtaatcgagagttcacttacattggaagcctgaataaacacgccgccttcagctgtcccaaaaaacccctttctcctcccaaaaaaaaagtttctcattcatctaagaaaggtggacactcatcacctgcaagtagtgacaaaaacagtaacagcaaccaccgcagacggacagcggatgcggagattaaaatgcaaagcatgcagactccgttgggcaagaccagagcccgcagctcaggccccacccaagtcccacttccctcctcatccttcaggtccaagcagaacgtcaagtttgcagcttcggtgaaatccaaaaaaccaagctcctcctctttaaggaactccagcccgataagaatggccaaaataactcatgttgaggggaaaaaacctaaagctgtggccaagaatcattctgctcagctttccagcaaaacatcacggagcctgcacgtgagggtacagaaaagcaaagctgttttacaaagcaaatccaccttggcgagtaagaaaagaacagaccggttcaatataaaatctagagagcggagtggggggccagtcacccggagccttcagctggcagctgctgctgacttgagtgagaacaagagagaggacggcagcgccaagcaggagctgaaggacttcaggaacttcctg

SEQ ID NO: 5921 - DNA, 3996 bp, Homo sapiens
  source 1..3996: mol_type = genomic DNA
atggagagccgggatcccgcccagccgatgtcgcctggagaagcgacgcagagtggcgcccggcctgccgaccgctatggcctattgaagcacagtcgcgagttcttggacttcttctgggacattgcgaagcctgagcaggagacgcgacttgcggccacggagaagctgctggagtatctgcgtggcaggccgaaggggtccgagatgaaatatgccctgaagcgtctaatcacgggactcggggtcgggcgagaaacagcccggccctgctacagtttggccctggcacagctgttacagtcttttgaagacctccccttgtgcagcatcctgcagcagatacaagaaaaatatgacctgcatcaggtgaagaaggcaatgctgagacctgctctctttgcaaacctgtttggagtgctcgccctctttcagtcaggtcggctggtgaaggaccaggaggcactgatgaagtcggtgaagctgctgcaggccctggcccagtaccaaaaccacttgcaggagcagccccggaaggccctggtggacatcctctccgaggtctcgaaggccacattgcaggagatcctgccggaggtcctcaaagccgacttgaatataatactcagctcccctgaacagctagagctcttcctcctggcccagcagaaggtgccctccaagctcaagaagctggtgggatccgtgaacctattctcagatgagaatgtccccaggctggtgaatgtgctgaagatggccgcctcctctgtgaagaaggaccgcaagctgcccgccattgctctggacctgctccgcctggcactcaaggaagacaagttcccacggttctggaaggaggtggtggaacaagggctgctgaagatgcagttctggccagccagctacctgtgtttccgcctgctgggcgcggccctgcccctgctgaccaaggagcagctgcacctggtgatgcagggagacgtgatccgccattacggggagcacgtgtgcactgctaagctcccaaagcagttcaagtttgccccagagatggacgattacgtgggcaccttcctagaggggtgccaggatgaccctgagcggcagctggccgtgctagtggccttctcatctgtcaccaaccaaggcctccctgtcacgcctactttctggcgggtcgtgcggttcctgagccctccggccctgcagggctatgtggcctggctgcgggccatgtttctccagccagacctggactccttggttgacttcagcaccaacaaccagaagaaagcccaggattcatcgctccacatgcctgagcgagctgtgttccggctgaggaaatggatcatctttcgattggtgagcattgtggacagcctgcacctggagatggaggaggccttgactgagcaggtggccaggttttgtttgttccactcgttctttgtcacaaagaagcccacatcccagatccctgagacaaagcacccgttctccttccctttggaaaaccaggcccgagaggctgtcagcagtgccttcttcagtctgttgcagaccctcagcacgcagttcaagcaggcaccgggccagacccagggtgggcagccctggacctaccacctggtgcagttcgcagacctcctgttgaatcacagccacaacgtgaccaccgtgacacccttcactgcgcagcagcgccaggcctgggaccggatgctgcagactctgaaggagctggaggcccactccgcagaggccagggctgctgccttccagcaccttctgctcctcgtgggcatccacctcctcaagtcccctgcagagagctgtgacctgctgggtgacatccagacctgcatcaggaaaagtctgggagagaagccccgccggagccgcaccaagaccatcgacccccaggaacccccgtgggtagaggtgctggtggagatcttgctggccctgttggcccagcccagccacctcatgcgccaggtggcccggagcgtgtttggccacatctgctcccacctgaccccgcgtgccctgcagctaattctggatgtgctgaaccccgagaccagtgaggatgagaatgaccgtgtggtggtgacggacgattctgatgagcggcggctgaagggtgcagaggacaagagcgaggaaggtgaggacaacagaagctcagagagtgaagaggagagcgagggggaggagagcgaggaggaggagcgcgacggggacgtggatcagggcttccgggaacagctgatgaccgtgctgcaggctgggaaggcgctgggtggagaggacagtgagaacgaggaggagctgggggatgaggccatgatggccctggaccagagcctcgccagcctctttgccgagcagaagctgcgtatccaggcccggcgagacgagaagaacaagctgcagaaggagaaggctctgcggcgcgacttccagatccgggtgctggacctggtggaggtgctagtgaccaagcagcccgagaatgccctggtcctggagctgctggagccgctgctgagcatcatccggcgcagcctgcgcagcagcagctccaaacaggagcaggaccttctgcacaagacggcgcgcatcttcacgcaccacctgtgccgtgcccggcgctactgccacgacttgggtgagcgcgcaggggccctgcacgcccaggtggagcggttggtgcagcaggctggccgccagcccgactcccccaccgccctctaccacttcaacgcctctctctacctgctccgggtcttgaagggcaacactgctgagggctgcgtgcatgagacacaggagaagcagaaagctggcactgaccccagccacatgcccacgggcccgcaggctgccagctgcttggacttgaacctggtgacccgggtgtactcgacagcactgagctccttcctgaccaagcgcaacagccccctcacagttcccatgttcctcagcctcttctcccggcacccggtgctctgtcagagcctgctccccatcctggtccagcatatcacgggcccggtgcggccccgtcatcaggcctgcctgctgctccagaagaccctgtccatgcgggaggtgaggtcgtgctttgaggaccccgagtggaagcagctgatgggccaggtcctagcaaaggtcaccgagaacttgcgcgtgctgggggaggcgcagaccaaggcgcagcatcagcaggcactgtcctccctggagctgctcaacgttctcttcaggacctgcaaacatgagaagctgaccttggacctgacggtgctcctgggtgtgctgcaggggcaacagcagagcctacagcagggggcacactccaccggctccagccgcctgcacgacctctactggcaggccatgaaaaccctgggagtccagcgccccaagttggagaagaaggatgccaaggagatccccagtgccacccagagccccatcagtaagaagcggaagaaaaagggattcttgccagagacgaagaagcgcaagaaacgcaagtcagaggatggcacgccagcggaggatggcacacctgcagccaccggcgggagccagccccccagcatgggcaggaagaagaggaacaggacaaaggctaaggtcccagcccaggcaaacgggacgccaaccaccaagagtccagcccctggcgcccccacccggagccccagcacccctgccaaatccccaaaactgcagaagaaaaaccagaagccgtcccaggtgaatggagctcccgggtcccccacggaacctgcaggccaaaagcagcatcagaaggctcttcccaaaaagggggtcttgggcaaatcaccactgtccgcgctggcacggaaaaaggcaaggctgtctttggtcatcaggagtcccagcctgcttcagagtggggccaagaagaaagcacagactctgagattcacaatcagcagctctaaaaaa

SEQ ID NO: 5922 - DNA, 3984 bp, Homo sapiens
  source 1..3984: mol_type = genomic DNA
atggagagccgggatcccgcccagccgatgtcgcctggagaagcgacgcagagtggcgcccggcctgccgaccgctatggcctattgaagcacagtcgcgagttcttggacttcttctgggacattgcgaagcctgagcaggagacgcgacttgcggccacggagaagctgctggagtatctgcgtggcaggccgaaggggtccgagatgaaatatgccctgaagcgtctaatcacgggactcggggtcgggcgagaaacagcccggccctgctacagtttggccctggcacagctgttacagtcttttgaagacctccccttgtgcagcatcctgcagcagatacaagaaaaatatgacctgcatcaggtgaagaaggcaatgctgagacctgctctctttgcaaacctgtttggagtgctcgccctctttcagtcaggtcggctggtgaaggaccaggaggcactgatgaagtcggtgaagctgctgcaggccctggcccagtaccaaaaccacttgcaggagcagccccggaaggccctggtggacatcctctccgaggtctcgaaggccacattgcaggagatcctgccggaggtcctcaaagccgacttgaatataatactcagctcccctgaacagctagagctcttcctcctggcccagcagaaggtgccctccaagctcaagaagctggtgggatccgtgaacctattctcagatgagaatgtccccaggctggtgaatgtgctgaagatggccgcctcctctgtgaagaaggaccgcaagctgcccgccattgctctggacctgctccgcctggcactcaaggaagacaagttcccacggttctggaaggaggtggtggaacaagggctgctgaagatgcagttctggccagccagctacctgtgtttccgcctgctgggcgcggccctgcccctgctgaccaaggagcagctgcacctggtgatgcagggagacgtgatccgccattacggggagcacgtgtgcactgctaagctcccaaagcagttcaagtttgccccagagatggacgattacgtgggcaccttcctagaggggtgccaggatgaccctgagcggcagctggccgtgctagtggccttctcatctgtcaccaaccaaggcctccctgtcacgcctactttctggcgggtcgtgcggttcctgagccctccggccctgcagggctatgtggcctggctgcgggccatgtttctccagccagacctggactccttggttgacttcagcaccaacaaccagaagaaagcccaggattcatcgctccacatgcctgagcgagctgtgttccggctgaggaaatggatcatctttcgattggtgagcattgtggacagcctgcacctggagatggaggaggccttgactgagcaggtggccaggttttgtttgttccactcgttctttgtcacaaagaagcccacatcccagatccctgagacaaagcacccgttctccttccctttggaaaaccaggcccgagaggctgtcagcagtgccttcttcagtctgttgcagaccctcagcacgcagttcaagcaggcaccgggccagacccagggtgggcagccctggacctaccacctggtgcagttcgcagacctcctgttgaatcacagccacaacgtgaccaccgtgacacccttcactgcgcagcagcgccaggcctgggaccggatgctgcagactctgaaggagctggaggcccactccgcagaggccagggctgctgccttccagcaccttctgctcctcgtgggcatccacctcctcaagtcccctgcagagagctgtgacctgctgggtgacatccagacctgcatcaggaaaagtctgggagagaagccccgccggagccgcaccaagaccatcgacccccaggaacccccgtgggtagaggtgctggtggagatcttgctggccctgttggcccagcccagccacctcatgcgccaggtggcccggagcgtgtttggccacatctgctcccacctgaccccgcgtgccctgcagctaattctggatgtgctgaaccccgagaccagtgaggatgagaatgaccgtgtggtggtgacggacgattctgatgagcggcggctgaagggtgcagaggacaagagcgaggaaggtgaggacaacagaagctcagagagtgaagaggagagcgagggggaggagagcgaggaggaggagcgcgacggggacgtggatcagggcttccgggaacagctgatgaccgtgctgcaggctgggaaggcgctgggtggagaggacagtgagaacgaggaggagctgggggatgaggccatgatggccctggaccagagcctcgccagcctctttgccgagcagaagctgcgtatccaggcccggcgagacgagaagaacaagctgcagaaggagaaggctctgcggcgcgacttccagatccgggtgctggacctggtggaggtgctagtgaccaagcagcccgagaatgccctggtcctggagctgctggagccgctgctgagcatcatccggcgcagcctgcgcagcagcagctccaaacaggagcaggaccttctgcacaagacggcgcgcatcttcacgcaccacctgtgccgtgcccggcgctactgccacgacttgggtgagcgcgcaggggccctgcacgcccaggtggagcggttggtgcagcaggctggccgccagcccgactcccccaccgccctctaccacttcaacgcctctctctacctgctccgggtcttgaagggcaacactgctgagggctgcgtgcatgagacacaggagaagcagaaagctggcactgaccccagccacatgcccacgggcccgcaggctgccagctgcttggacttgaacctggtgacccgggtgtactcgacagcactgagctccttcctgaccaagcgcaacagccccctcacagttcccatgttcctcagcctcttctcccggcacccggtgctctgtcagagcctgctccccatcctggtccagcatatcacgggcccggtgcggccccgtcatcaggcctgcctgctgctccagaagaccctgtccatgcgggaggtgaggtcgtgctttgaggaccccgagtggaagcagctgatgggccaggtcctagcaaaggtcaccgagaacttgcgcgtgctgggggaggcgcagaccaaggcgcagcatcagcaggcactgtcctccctggagctgctcaacgttctcttcaggacctgcaaacatgagaagctgaccttggacctgacggtgctcctgggtgtgctgcaggggcaacagcagagcctacagcagggggcacactccaccggctccagccgcctgcacgacctctactggcaggccatgaaaaccctgggagtccagcgccccaagttggagaagaaggatgccaaggagatccccagtgccacccagagccccatcagtaagaagcggaagaaaaagggattcttgccagagacgaagaagcgcaagaaacgcaagtcagaggatggcacgccagcggaggatggcacacctgcagccaccggcgggagccagccccccagcatgggcaggaagaagaggaacaggacaaaggctaaggtcccagcccaggcaaacgggacgccaaccaccaagagtccagcccctggcgcccccacccggagccccagcacccctgccaaatccccaaaactgcagaagaaaaaccagaagccgtcccaggtgaatggagctcccgggtcccccacggaacctgcaggccaaaagcagcatcagaaggctcttcccaaaaagggggtcttgggcaaatcaccactgtccgcgctggcacggaaaaaggcaaggctgtctttggtcatcaggagtcccagcctgcttcagagtggggccaagaagaaagcacaggtgaggaaggcagggaagccc

SEQ ID NO: 5923 - DNA, 840 bp, Homo sapiens
  source 1..840: mol_type = genomic DNA
atgccagctgatataatggagaaaaattcctcgtccccggtggctgctaccccagccagtgtcaacacgacaccggataaaccaaagacagcatctgagcacagaaagtcatcaaagcctattatggagaaaagacgaagagcaagaataaatgaaagtctgagccagctgaaaacactgattttggatgctctgaagaaagatagctcgcggcattccaagctggagaaggcggacattctggaaatgacagtgaagcacctccggaacctgcagcgggcgcagatgacggctgcgctgagcacagacccaagtgtgctggggaagtaccgagccggcttcagcgagtgcatgaacgaggtgacccgcttcctgtccacgtgcgagggcgttaataccgaggtgcgcactcggctgctcggccacctggccaactgcatgacccagatcaatgccatgacctaccccgggcagccgcaccccgccttgcaggcgccgccaccgcccccaccgggacccggcggcccccagcacgcgccgttcgcgccgccgccgccactcgtgcccatccccgggggcgcggcgccccctcccggcggcgccccctgcaagctgggcagccaggctggagaggcggctaaggtgtttggaggcttccaggtggtaccggctcccgatggccagtttgctttcctcattcccaacggggccttcgcgcacagcggccctgtcatccccgtctacaccagcaacagcggcacctccgtgggccccaacgcagtgtcaccttccagcggcccctcgcttacggcggactccatgtggaggccgtggcggaac

SEQ ID NO: 5924 - DNA, 519 bp, Homo sapiens
  source 1..519: mol_type = genomic DNA
atggggctgcctcgccgggcaggggacgcggcggagctgcgcaagagcctgaagccgctgctggagaagcgccggcgcgcgcgcatcaaccagagcctgagccagcttaaggggctcatcctgccgctgctgggccgggagaactccaactgctcgaagctagagaaggcagacgtcctggaaatgaccgtgcgcttcctgcaggagctgcctgcgtcctcatggcccacggcagcgcccctgccttgcgacagctaccgcgagggctacagcgcctgtgtggcgcgcctggcccgcgtgctgcccgcctgccgtgtcctggagcccgccgtgagcgcgcgcctgctggagcacctgtggcggagagcggccagcgccaccctggacggcgggcgcgctggggattccagtggcccgtctgcccccgccccagcgcccgcgtctgccccagagcccgcatccgctccggtgccctcgccgccctcgcctccctgcggccctggcctctggcggccgtgg

SEQ ID NO: 5925 - DNA, 558 bp, Homo sapiens
  source 1..558: mol_type = genomic DNA
atggagaaaaagcgccgggcacgcatcaatgtgtcactggagcagctcaagtcgctgctggagaaacactactcgcaccagatccggaagcgcaaattggagaaggccgacatcctggagttgagcgtgaagtacatgagaagccttcagaactccttgcaagggctctggcctgtgcccaggggagccgagcaaccgtcgggcttccgcagctgcctgcccggcgtgagccagctccttcggcgcggagatgaggtcggcagcggcctgcgctgccccctggtgcccgagagcgccgccggcagcaccatggacagcgccgggttgggccaggaggcgcccgcgctgttccgcccttgcacccctgccgtctgggctcctgctccggccgccggcggcccgcggtccccaccacccctgctcctcctccccgaaagtctccctggctcgtccgccagcgtccccccgccgcagccagcgtcgagtcgctgcgccgagagtcccgggctgggcctgcgcgtgtggcggccctggggaagccccggggatgacctgaac

SEQ ID NO: 5926 - DNA, 567 bp, Homo sapiens
  source 1..567: mol_type = genomic DNA
atggccgcagacacgccggggaaaccgagcgcctcgccgatggcaggagcgccggccagcgccagccggaccccagacaagccccggagcgcggccgagcaccgcaagagctcccgccactcgaagctggagaaggcggacatcctggagatgaccgtgagacacctgcggagcctgcgtcgcgtgcaggtgacggccgcgctcagcgccgaccccgccgttctgggcaagtaccgcgccggcttccacgagtgtctggcggaggtgaaccgcttcctggccggctgcgagggcgtcccggccgacgtgcgctcccgcctgctgggccacctggcagcctgcctgcgccagctgggaccctcccgccgcccggcctcgctgtccccggctgcccccgcagaggccccagcgcccgaggtctacgcgggccgcccgctgctgccatcgctcggcggccccttccctctgctcgcgccgccgctgctgccgggtctgacccgggcgctgcccgccgcccccagggcggggccgcagggcccgggtgggccctggaggccgtggctgcgc

SEQ ID NO: 5927 - DNA, 741 bp, Homo sapiens
  source 1..741: mol_type = genomic DNA
atggccgcagacacgccggggaaaccgagcgcctcgccgatggcaggagcgccggccagcgccagccggaccccagacaagccccggagcgcggccgagcaccgcaaggtggggtcccggccgggcgtgaggggggcgaccggggggcgggagggacgcgggactcagccggtgcccgacccgcagtcctccaagccggtcatggagaagcggcgccgagcgcgtattaacgagagcctcgctcagctcaaaaccctcatcctggacgccctcagaaaagagagctcccgccactcgaagctggagaaggcggacatcctggagatgaccgtgagacacctgcggagcctgcgtcgcgtgcaggtgacggccgcgctcagcgccgaccccgccgttctgggcaagtaccgcgccggcttccacgagtgtctggcggaggtgaaccgcttcctggccggctgcgagggcgtcccggccgacgtgcgctcccgcctgctgggccacctggcagcctgcctgcgccagctgggaccctcccgccgcccggcctcgctgtccccggctgcccccgcagaggccccagcgcccgaggtctacgcgggccgcccgctgctgccatcgctcggcggccccttccctctgctcgcgccgccgctgctgccgggtctgacccgggcgctgcccgccgcccccagggcggggccgcagggcccgggtgggccctggaggccgtggctgcgc

SEQ ID NO: 5928 - DNA, 663 bp, Homo sapiens
  source 1..663: mol_type = genomic DNA
atggccgcagacacgccggggaaaccgagcgcctcgccgatggcaggagcgccggccagcgccagccggaccccagacaagccccggagcgcggccgagcaccgcaagtcctccaagccggtcatggagaagcggcgccgagcgcgtattaacgagagcctcgctcagctcaaaaccctcatcctggacgccctcagaaaagagagctcccgccactcgaagctggagaaggcggacatcctggagatgaccgtgagacacctgcggagcctgcgtcgcgtgcaggtgacggccgcgctcagcgccgaccccgccgttctgggcaagtaccgcgccggcttccacgagtgtctggcggaggtgaaccgcttcctggccggctgcgagggcgtcccggccgacgtgcgctcccgcctgctgggccacctggcagcctgcctgcgccagctgggaccctcccgccgcccggcctcgctgtccccggctgcccccgcagaggccccagcgcccgaggtctacgcgggccgcccgctgctgccatcgctcggcggccccttccctctgctcgcgccgccgctgctgccgggtctgacccgggcgctgcccgccgcccccagggcggggccgcagggcccgggtgggccctggaggccgtggctgcgc

SEQ ID NO: 5929 - DNA, 498 bp, Homo sapiens
  source 1..498: mol_type = genomic DNA
atggcccccagcactgtggccgtggagctgctcagccccaaagagaaaaaccgactgcggaagccggtggtggagaagatgcgccgcgaccgcatcaacagcagcatcgagcagctgaagctgctgctggagcaggagttcgcgcggcaccagcccaactccaagctggagaaggccgacatcctggagatggctgtcagctacctgaagcacagcaaagccttcgtcgccgccgccggccccaagagcctgcaccaggactacagcgaaggctactcgtggtgcctgcaggaggccgtgcagttcctgacgctccacgccgccagcgacacgcagatgaagctgctgtaccacttccagcggcccccggccgcgcccgccgcgcccgccaaggagcccaaggcgccgggcgccgcgcccccgcccgcgctctccgccaaggccaccgccgccgccgccgccgcgcaccagcccgcctgcggcctctggcggccctgg

SEQ ID NO: 5930 - DNA, 666 bp, Homo sapiens
  source 1..666: mol_type = genomic DNA
atggcgccacccgcggcgcctggccgggaccgtgtgggccgtgaggatgaggacggctgggagacgcgaggggaccgcaaggcccggaagcccctggtggagaagaagcggcgcgcgcggatcaacgagagcctgcaggagctgcggctgctgctggcgggcgccgaggccaagctggagaacgccgaagtgctggagctgacggtgcggcgggtccagggtgtgctgcggggccgggcgcgcgagcgcgagcagctgcaggcggaagcgagcgagcgcttcgctgccggctacatccagtgcatgcacgaggtgcacacgttcgtgtccacgtgccaggccatcgacgctaccgtcgctgccgagctcctgaaccatctgctcgagtccatgccgctgcgtgagggcagcagcttccaggatctgctgggggacgccctggcggggccacctagagcccctggacggagtggctggcctgcggggggcgctccgggatccccaatacccagccccccgggtcctggggacgacctgtgctccgacctggaggaggcccctgaggctgaactgagtcaggctcctgctgaggggcccgacttggtgcccgcagccctgggcagcctgaccacagcccaaattgcccggagtgtctggaggccttgg

SEQ ID NO: 5931 - DNA, 336 bp, Homo sapiens
  source 1..336: mol_type = genomic DNA
atggcgccacccgcggcgcctggccgggaccgtgtgggccgtgaggatgaggacggctgggagacgcgaggggaccgcaaggcccggaagcccctggtggagaagaagcggcgcgcgcggatcaacgagagcctgcaggagctgcggctgctgctggcgggcgccgaggtgcaggccaagctggagaacgccgaagtgctggagctgacgagcgcgagcagctgcaggcggaagcgagcgagcgcttcgctgccggctacatccagtgcatgcacgaggtgcacacgttcgtgtccacgtgccaggccatcgacgctaccgtcgctgccgagctcc

SEQ ID NO: 5932 - DNA, 690 bp, Homo sapiens
  source 1..690: mol_type = genomic DNA
atggtcacccgggatcgagctgagaatagggacggccccaagatgctcaagccgcttgtggagaagcggcgccgggaccgcatcaaccgcagcctggaagagctgaggctgctgctgctggagcggacccgggaccagaacctccggaacccgaagctggagaaagcggagatattggagttcgccgtgggctacttgagggagcgaagccgggtggagcccccggccgccgcggctccaggggttccccggtccccagtccaggacgccgaggcgctcgccagctgctacttgtccggtttccgcgagtgcctgcttcgcttggcggccttcgcgcacgacgccagcccggccgcccgcgcccagctcttctccgcgctgcacggctatctgcgccccaaaccgccccggcccaagccggtagatccgaggcctccagcgccgcgcccatccctggaccccgccgcaccggcccttggccctgcgctgcaccagcgccccccagtgcaccagggccaccctagcccgcgctgcgcatggtccccatccctctgctccccgcgcgccggggattctggcgcgccggcgcccctcaccggactgctgccgccgccaccgccgcctcacagacaagacggggcgcccaaggccccgctgcccccgccgcccgctttctggagaccttggccc

SEQ ID NO: 5933 - DNA, 675 bp, Homo sapiens
  source 1..675: mol_type = genomic DNA
atggtcacccgggatcgagctgagaatagggacggccccaagatgctcaagccgcttgtggagaagcggcgccgggaccgcatcaaccgcagcctggaagagctgaggctgctgctgctggagcggacccgggaccagaacctccggaacccgaagctggagaaagcggagatattggagttcgccgtgggctacttgagggagcgaagccgggtggagcccccgggggttccccggtccccagtccaggacgccgaggcgctcgccagctgctacttgtccggtttccgcgagtgcctgcttcgcttggcggccttcgcgcacgacgccagcccggccgcccgcgcccagctcttctccgcgctgcacggctatctgcgccccaaaccgccccggcccaagccggtagatccgaggcctccagcgccgcgcccatccctggaccccgccgcaccggcccttggccctgcgctgcaccagcgccccccagtgcaccagggccaccctagcccgcgctgcgcatggtccccatccctctgctccccgcgcgccggggattctggcgcgccggcgcccctcaccggactgctgccgccgccaccgccgcctcacagacaagacggggcgcccaaggccccgctgcccccgccgcccgctttctggagaccttggccc

SEQ ID NO: 5934 - DNA, 372 bp, Homo sapiens
  source 1..372: mol_type = genomic DNA
atggcagatgaggaagaagaccccacgtttgaggaagaaaatgaagaaattggaggaggtgcagaaggtggacagggtaaaagaaagagacttttttctaaagaattgcgatgtatgatgtatggctttggggatgaccagaatccttatactgagtcagtggatattcttgaagatcttgtcatagagtttatcactgaaatgactcacaaggcaatgtcaattggaagacaaggtcgagtacaagttgaagatatcgtcttcttgattcgaaaggacccaaggaagtttgccagggttaaagacttgcttactatgaatgaagaattgaaacgagctagaaaagcatttgatgaagcaaattatggatct

SEQ ID NO: 5935 - DNA, 633 bp, Homo sapiens
  source 1..633: mol_type = genomic DNA
atggacgatgcccacgagtcgccctccgacaaaggtggagagacaggggagtcggatgagacggccgctgtgcccggggacccgggggctaccgacaccgatggaatcccagaggaaactgacggagacgcagatgtggacttgaaagaagctgcagcggaggaaggcgagctcgagagtcaggatgtctcagatttaacaacagttgaaagggaagactcatcattacttaatcctgcagccaaaaaactgaaaatagataccaaagaaaagaaagagaaaaagcagaaagtagatgaagatgagattcagaagatgcaaatcctggtttcttctttttctgaggagcagctgaaccgttatgaaatgtatcgccgctcagctttccctaaggcagccatcaaaaggctgatccagtccatcactggcacctctgtgtctcagaatgttgttattgctatgtctggtatttccaaggttttcgtcggggaggtggtagaagaagcactggatgtgtgtgagaagtggggagaaatgccaccactacaacccaaacatatgagggaagccgttagaaggttaaagtcaaaaggacagatccctaactcgaagcacaaaaaaatcatcttcttc

SEQ ID NO: 5936 - DNA, 462 bp, Homo sapiens
  source 1..462: mol_type = genomic DNA
atggacgatgcccacgagtcgccctccgacaaaggtggagagacaggggagtcggatgagacggccgctgtgcccggggacccgggggctaccgacaccgatggaatcccagaggaaactgacggagacgcagatgtggacttgaaagaagctgcagcggaggaaggcgagctcgagagtcaggatgtctcagatttaacaacagttgaaagggaagactcatcattacttaatcctgcagccaaaaaactgaaaatagataccaaagaaaagaaagagaaaaagcagaaagtagatgaagatgagattcagaagatgcaaatcctggtttcttctttttctgaggagcagctgaaccgttatgaaatgtatcgccgctcagctttccctaaggcagccatcaaaaggcactggatgtgtgtgagaagtggggagaaatgccaccactacaacccaaacata

SEQ ID NO: 5937 - DNA, 654 bp, Homo sapiens
  source 1..654: mol_type = genomic DNA
atgagctgcagcggctccggcgcggaccccgaggcggcgccggcctccgccgcctcggccccgggccccgcgcccccggtctcggctcccgccgcgctgccctccagcaccgccgcggagaacaaggccagccccgcggggacagcggggggacctggggctggagcagctgctgggggcacgggacccttggcggcgcgggccggggagccagctgagcggcgtggggcggctccggtgtcggcgggtggcgcggcgcccccggagggggccatatctaacggggtttacgtactgccgagcgcggccaacggagacgtgaagcccgtggtgtccagcacgcctttggtggacttcttgatgcagctggaagattacacgcctacgatcccagatgcagtgactggttactacctgaaccgtgctggctttgaggcctcagacccacgcataattcggctcatctccttagctgcccagaaattcatctcagatattgccaatgatgccctacagcactgcaaaatgaagggcacggcctccggcagctcccggagcaagagcaaggaccgcaagtacactctaaccatggaggacttgacccctgccctcagcgagtatggcatcaatgtgaagaagccgcactacttcacc

SEQ ID NO: 5938 - DNA, 1602 bp, Homo sapiens
  source 1..1602: mol_type = genomic DNA
atgctgcagcagctcctgatcaccctgcccaccgaggccagcacctgggtgaagttgcgtcatccaaaggcggccacggagcgggtggccctgtgggaggatgtgactaagatgtttaaagcagaagctctgctgtctcaggatgctgatgagacccagggcgaaagtttagagagtagagtgacccttggatccctgacagcagaatcccaggaactgttaaccttcaaggacgtatctgtggacttcactcaggaggagtgggggcagctggcccctgctcaccggaatctgtaccgggaggtgatgctggagaactatgggaacctggtctcagtgggatgtcagctttccaaacctggcgtgatttcccagttggagaaaggagaagaaccatggctgatggagagagatatttcaggagttccaagttcagacttgaagagcaaaacaaaaaccaaagagtcagccttacagaatgatatttcgtgggaagaactacattgtggcctaatgatggaaagatttacaaaaggaagcagcatgtattccaccttgggaagaatctccaaatgtaataagctagaaagccaacaagagaaccaaagaatgggtaaggggcaaatccccctgatgtgcaagaaaacattcactcaggagagaggccaagagtctaatagatttgagaaaagaattaatgtgaagtcagaagttatgccaggaccaataggtcttccaagaaaaagagatcgtaaatatgacacacctggaaagagaagcagatacaacatagatttagttaatcattcaaggagttatacaaaaatgaaaacctttgagtgtaatatttgtgaaaaaatcttcaaacagcttattcaccttactgaacacatgagaattcataccggggagaaacctttcagatgtaaggaatgtggaaaagcctttagccaaagttcatctcttattccgcatcagagaattcatactggtgagaaaccctatgaatgtaaggagtgtgggaaaaccttcagacatccttcatcgcttactcaacatgttagaattcataccggggaaaagccctatgaatgtagggtatgtgagaaagccttcagccagagcattggactgatccagcatttgagaactcatgttagagagaaaccttttacatgcaaagactgtggaaaagcgtttttccagattagacaccttaggcaacatgagattattcatactggtgtgaaaccctatatttgtaatgtatgtagtaaaaccttcagccatagtacatacctaactcaacaccagagaactcatactggagaaagaccatataaatgtaaggaatgtgggaaagcctttagccagagaatacatctttctatccatcagagagtccatactggagtaaaaccttatgaatgcagtcattgtgggaaagcctttaggcatgattcatcctttgctaaacatcagagaattcatactggagaaaaaccttatgattgtaatgagtgtggaaaagccttcagctgtagttcatcccttattagacactgcaaaacacatttaagaaataccttcagcaatgttgtg

SEQ ID NO: 5939 - DNA, 2142 bp, Homo sapiens
  source 1..2142: mol_type = genomic DNA
atgctggacacgatggaggcgcccggccactccaggcagctgctgctgcagctcaacaaccagcgcaccaagggcttcttgtgcgacgtgatcatcgtggtgcagaacgccctcttccgcgcgcacaagaacgtgctggcggccagcagcgcctacctcaagtccctggtggtgcatgacaacctgctcaacctggaccatgacatggtgagcccggccgtgttccgcctggtgctggacttcatctacaccggccgcctggctgacggcgcagaggcggctgcggccgcggccgtggccccgggggctgagccgagcctgggcgccgtgctggccgccgccagctacctgcagatccccgacctcgtggcgctgtgcaagaaacgcctcaagcgccacggcaagtactgccacctgcggggcggcggcggcggcggcggcggctacgcgccctatggtcggccgggccggggcctgcgggccgccacgccggtcatccaggcctgctacccgtccccagtcgggcctccgccgccgcctgccgcggagccgccctcgggcccagaggccgcggtcaacacgcactgcgccgagctgtacgcgtcgggacccggcccggccgccgcactctgtgcctcggagcgccgctgctcccctctttgtggcctggacctgtccaagaagagcccgccgggctccgcggcgccagagcggccgctggctgagcgcgagctgcccccgcgcccggacagccctcccagcgccggccccgccgcctacaaggagccgcctctcgccctgccgtcgctgccgccgctgcccttccagaagctggaggaggccgcaccgccttccgacccatttcgcggcggcagcggcagcccgggacccgagccccccggccgccccgacgggcctagtctcctctatcgctggatgaagcacgagccgggcctgggtagctatggcgacgagctgggccgggagcgcggctcccccagcgagcgctgcgaagagcgtggtggggacgcggccgtctcgcccggggggcccccgctcggcctggcgccgccgccgcgctaccctggcagcctggacgggcccggcgcgggcggcgacggcgacgactacaagagcagcagcgaggagaccggtagcagcgaggaccccagcccgcctggcggccacctcgagggctacccatgcccgcacctggcctatggcgagcccgagagcttcggtgacaacctgtacgtgtgcattccgtgcggcaagggcttccccagctctgagcagctgaacgcgcacgtggaggctcacgtggaggaggaggaagcgctgtacggcagggccgaggcggccgaagtggccgctggggccgccggcctagggcccccttttggaggcggcggggacaaggtcgccggggctccgggtggcctgggagagctgctgcggccctaccgctgcgcgtcgtgcgacaagagctacaaggacccggccacgctgcggcagcacgagaagacgcactggctgacccggccctacccatgcaccatctgcgggaagaagttcacgcagcgtgggaccatgacgcgccacatgcgcagccacctgggcctcaagcccttcgcgtgcgacgcgtgcggcatgcggttcacgcgccagtaccgcctcacggagcacatgcgcatccactcgggcgagaagccctacgagtgccaggtgtgcggcggcaagttcgcacagcaacgcaacctcatcagccacatgaagatgcacgccgtggggggcgcggccggcgcggccggggcgctggcgggcttgggggggctccccggcgtccccggccccgacggcaagggcaagctcgacttccccgagggcgtctttgctgtggctcgcctcacggccgagcagctgagcctgaagcagcaggacaaggcggccgcggccgagctgctggcgcagaccacgcacttcctgcacgaccccaaggtggcgctggagagcctctacccgctggccaagttcacggccgagctgggcctcagccccgacaaggcggccgaggtgctgagccagggcgctcacctggcggccgggcccgacggccggaccatcgaccgtttctctcccacc

SEQ ID NO: 5940 - DNA, 2199 bp, Homo sapiens
  source 1..2199: mol_type = genomic DNA
atgacttttcctgaagcggacattttacttaaatcgggagagtgtgctgggcagacgatgctggacacgatggaggcgcccggccactccaggcagctgctgctgcagctcaacaaccagcgcaccaagggcttcttgtgcgacgtgatcatcgtggtgcagaacgccctcttccgcgcgcacaagaacgtgctggcggccagcagcgcctacctcaagtccctggtggtgcatgacaacctgctcaacctggaccatgacatggtgagcccggccgtgttccgcctggtgctggacttcatctacaccggccgcctggctgacggcgcagaggcggctgcggccgcggccgtggccccgggggctgagccgagcctgggcgccgtgctggccgccgccagctacctgcagatccccgacctcgtggcgctgtgcaagaaacgcctcaagcgccacggcaagtactgccacctgcggggcggcggcggcggcggcggcggctacgcgccctatggtcggccgggccggggcctgcgggccgccacgccggtcatccaggcctgctacccgtccccagtcgggcctccgccgccgcctgccgcggagccgccctcgggcccagaggccgcggtcaacacgcactgcgccgagctgtacgcgtcgggacccggcccggccgccgcactctgtgcctcggagcgccgctgctcccctctttgtggcctggacctgtccaagaagagcccgccgggctccgcggcgccagagcggccgctggctgagcgcgagctgcccccgcgcccggacagccctcccagcgccggccccgccgcctacaaggagccgcctctcgccctgccgtcgctgccgccgctgcccttccagaagctggaggaggccgcaccgccttccgacccatttcgcggcggcagcggcagcccgggacccgagccccccggccgccccgacgggcctagtctcctctatcgctggatgaagcacgagccgggcctgggtagctatggcgacgagctgggccgggagcgcggctcccccagcgagcgctgcgaagagcgtggtggggacgcggccgtctcgcccggggggcccccgctcggcctggcgccgccgccgcgctaccctggcagcctggacgggcccggcgcgggcggcgacggcgacgactacaagagcagcagcgaggagaccggtagcagcgaggaccccagcccgcctggcggccacctcgagggctacccatgcccgcacctggcctatggcgagcccgagagcttcggtgacaacctgtacgtgtgcattccgtgcggcaagggcttccccagctctgagcagctgaacgcgcacgtggaggctcacgtggaggaggaggaagcgctgtacggcagggccgaggcggccgaagtggccgctggggccgccggcctagggcccccttttggaggcggcggggacaaggtcgccggggctccgggtggcctgggagagctgctgcggccctaccgctgcgcgtcgtgcgacaagagctacaaggacccggccacgctgcggcagcacgagaagacgcactggctgacccggccctacccatgcaccatctgcgggaagaagttcacgcagcgtgggaccatgacgcgccacatgcgcagccacctgggcctcaagcccttcgcgtgcgacgcgtgcggcatgcggttcacgcgccagtaccgcctcacggagcacatgcgcatccactcgggcgagaagccctacgagtgccaggtgtgcggcggcaagttcgcacagcaacgcaacctcatcagccacatgaagatgcacgccgtggggggcgcggccggcgcggccggggcgctggcgggcttgggggggctccccggcgtccccggccccgacggcaagggcaagctcgacttccccgagggcgtctttgctgtggctcgcctcacggccgagcagctgagcctgaagcagcaggacaaggcggccgcggccgagctgctggcgcagaccacgcacttcctgcacgaccccaaggtggcgctggagagcctctacccgctggccaagttcacggccgagctgggcctcagccccgacaaggcggccgaggtgctgagccagggcgctcacctggcggccgggcccgacggccggaccatcgaccgtttctctcccacc

SEQ ID NO: 5941 - DNA, 1845 bp, Homo sapiens
  source 1..1845: mol_type = genomic DNA
atggtgtctgggcccttggcactccggtggtgcgcgtgggcagggcgcggggacatggggcccgacatggagctgcccagccactcgaagcagctcctgctgcagctgaaccagcagaggaccaagggcttcctgtgtgacgtcatcatcatggtggagaactccatcttccgggcccacaagaacgtcctagccgccagcagcatctatttcaagtccctggtcctgcacgacaacctcatcaacctggacacagacatggtcagctccacagtgttccagcagatcttggacttcatctacacaggcaagctgctgcccagcgaccagccagccgagcccaacttcagcaccctcctcactgccgccagctacctccagctgcccgagttggcagccctctgccgccgcaaactcaagcgagccggcaagccctttggctctgggagggcggggtccactggcatggggcggcccccccgcagccagcggctgtccacggcctctgtcatccaagctcggtatcaggggctcgtggatgggcgcaagggggcccacgccccccaggagctcccccaagccaaaggctcagacgatgaactctttcttggtggctctaaccaggatagcgtgcaaggtctgggccgggctgtctgcccagctggcggggaggcgggtctggggggctgcagcagcagcaccaacgggagcagcgggggctgcgagcaggagctgggcttggacctgtccaagaaaagcccacccttgccccctgccaccccaggtccccacctcactcccgatgacgcagcccagctgagcgacagccaacatggctcgccccctgcggcctctgctcctcccgttgccaacagtgcctcttattctgagctggggggcacccctgatgagcccatggatctggagggggccgaggacaaccacctgagcctgctggaggcgcctggtgggcagcctcggaagagcctccggcactccactcggaagaaggagtggggcaagaaggagcctgtggctggctccccctttgagcggagagaagcagggcccaagggtccctgcccgggagaggagggtgagggggtcggggacagggttcccaatggcatcctggctagtggggctggccctagcgggccctatggggagcccccctacccctgcaaggaggaggaggagaacggcaaggatgcaagtgaagacagtgcgcagagcgggagcgaggggggcagcggccatgccagcgcccactacatgtaccggcaggagggctacgagacggtgtcctacggggacaacttgtatgtgtgcattccctgcgccaagggcttccccagctctgagcagctcaatgcgcacgtggagactcacacggaggaagagctgttcatcaaggaagagggggcctacgagacaggcagtgggggtgccgaggaggaggccgaggacctgtcagcacccagtgcggcctacacggctgagccccggcccttcaagtgttcggtctgcgagaagacctacaaggacccagccacgctgcggcagcacgagaagacgcactggctgacacggcccttcccctgcaacatctgtggcaaaatgttcacgcagcgcggcaccatgacgcgtcacatgcggagccacctgggcctgaagcccttcgcctgcgatgagtgtggcatgcgcttcacccgtcagtaccgcctcacggagcacatgcgtgtgcactcgggcgagaaaccttacgagtgccagctgtgcgggggcaagttcacccagcagcgcaacctcatcagccacctgcgcatgcacacctccccctcc

SEQ ID NO: 5942 - DNA, 3390 bp, Homo sapiens
  source 1..3390: mol_type = genomic DNA
atgcgttgcctggctccacgccctgctgggtcctacctgtcagagccccaaggcagctcacagtgtgccaccatggagttggggcccctagaaggtggctacctggagcttcttaacagcgatgctgaccccctgtgcctctaccacttctatgaccagatggacctggctggagaagaagagattgagctctactcagaacccgacacagacaccatcaactgcgaccagttcagcaggctgttgtgtgacatggaaggtgatgaagagaccagggaggcttatgccaatatcgcggaactggaccagtatgtcttccaggactcccagctggagggcctgagcaaggacattttcaagcacataggaccagatgaagtgatcggtgagagtatggagatgccagcagaagttgggcagaaaagtcagaaaagacccttcccagaggagcttccggcagacctgaagcactggaagccagctgagccccccactgtggtgactggcagtctcctagtgggaccagtgagcgactgctccaccctgccctgcctgccactgcctgcgctgttcaaccaggagccagcctccggccagatgcgcctggagaaaaccgaccagattcccatgcctttctccagttcctcgttgagctgcctgaatctccctgagggacccatccagtttgtccccaccatctccactctgccccatgggctctggcaaatctctgaggctggaacaggggtctccagtatattcatctaccatggtgaggtgccccaggccagccaagtaccccctcccagtggattcactgtccacggcctcccaacatctccagaccggccaggctccaccagccccttcgctccatcagccactgacctgcccagcatgcctgaacctgccctgacctcccgagcaaacatgacagagcacaagacgtcccccacccaatgcccggcagctggagaggtctccaacaagcttccaaaatggcctgagccggtggagcagttctaccgctcactgcaggacacgtatggtgccgagcccgcaggcccggatggcatcctagtggaggtggatctggtgcaggccaggctggagaggagcagcagcaagagcctggagcgggaactggccaccccggactgggcagaacggcagctggcccaaggaggcctggctgaggtgctgttggctgccaaggagcaccggcggccgcgtgagacacgagtgattgctgtgctgggcaaagctggtcagggcaagagctattgggctggggcagtgagccgggcctgggcttgtggccggcttccccagtacgactttgtcttctctgtcccctgccattgcttgaaccgtccgggggatgcctatggcctgcaggatctgctcttctccctgggcccacagccactcgtggcggccgatgaggttttcagccacatcttgaagagacctgaccgcgttctgctcatcctagacggcttcgaggagctggaagcgcaagatggcttcctgcacagcacgtgcggaccggcaccggcggagccctgctccctccgggggctgctggccggccttttccagaagaagctgctccgaggttgcaccctcctcctcacagcccggccccggggccgcctggtccagagcctgagcaaggccgacgccctatttgagctgtccggcttctccatggagcaggcccaggcatacgtgatgcgctactttgagagctcagggatgacagagcaccaagacagagccctgacgctcctccgggaccggccacttcttctcagtcacagccacagccctactttgtgccgggcagtgtgccagctctcagaggccctgctggagcttggggaggacgccaagctgccctccacgctcacgggactctatgtcggcctgctgggccgtgcagccctcgacagcccccccggggccctggcagagctggccaagctggcctgggagctgggccgcagacatcaaagtaccctacaggaggaccagttcccatccgcagacgtgaggacctgggcgatggccaaaggcttagtccaacacccaccgcgggccgcagagtccgagctggccttccccagcttcctcctgcaatgcttcctgggggccctgtggctggctctgagtggcgaaatcaaggacaaggagctcccgcagtacctagcattgaccccaaggaagaagaggccctatgacaactggctggagggcgtgccacgctttctggctgggctgatcttccagcctcccgcccgctgcctgggagccctactcgggccatcggcggctgcctcggtggacaggaagcagaaggtgcttgcgaggtacctgaagcggctgcagccggggacactgcgggcgcggcagctgctggagctgctgcactgcgcccacgaggccgaggaggctggaatttggcagcacgtggtacaggagctccccggccgcctctcttttctgggcacccgcctcacgcctcctgatgcacatgtactgggcaaggccttggaggcggcgggccaagacttctccctggacctccgcagcactggcatttgcccctctggattggggagcctcgtgggactcagctgtgtcacccgtttcagggctgccttgagcgacacggtggcgctgtgggagtccctgcagcagcatggggagaccaagctacttcaggcagcagaggagaagttcaccatcgagcctttcaaagccaagtccctgaaggatgtggaagacctgggaaagcttgtgcagactcagaggacgagaagttcctcggaagacacagctggggagctccctgctgttcgggacctaaagaaactggagtttgcgctgggccctgtctcaggcccccaggctttccccaaactggtgcggatcctcacggccttttcctccctgcagcatctggacctggatgcgctgagtgagaacaagatcggggacgagggtgtctcgcagctctcagccaccttcccccagctgaagtccttggaaaccctcaatctgtcccagaacaacatcactgacctgggtgcctacaaactcgccgaggccctgccttcgctcgctgcatccctgctcaggctaagcttgtacaataactgcatctgcgacgtgggagccgagagcttggctcgtgtgcttccggacatggtgtccctccgggtgatggacgtccagtacaacaagttcacggctgccggggcccagcagctcgctgccagccttcggaggtgtcctcatgtggagacgctggcgatgtggacgcccaccatcccattcagtgtccaggaacacctgcaacaacaggattcacggatcagcctgaga

SEQ ID NO: 5943 - DNA, 1638 bp, Homo sapiens
  source 1..1638: mol_type = genomic DNA
atgcgttgcctggctccacgccctgctgggtcctacctgtcagagccccaaggcagctcacagtgtgccaccatggagttggggcccctagaaggtggctacctggagcttcttaacagcgatgctgaccccctgtgcctctaccacttctatgaccagatggacctggctggagaagaagagattgagctctactcagaacccgacacagacaccatcaactgcgaccagttcagcaggctgttgtgtgacatggaaggtgatgaagagaccagggaggcttatgccaatatcgcggaactggaccagtatgtcttccaggactcccagctggagggcctgagcaaggacattttcaagcacataggaccagatgaagtgatcggtgagagtatggagatgccagcagaagttgggcagaaaagtcagaaaagacccttcccagaggagcttccggcagacctgaagcactggaagccagtgcctttctccagttcctcgttgagctgcctgaatctccctgagggacccatccagtttgtccccaccatctccactctgccccatgggctctggcaaatctctgaggctggaacaggggtctccagtatattcatctaccatggtgaggtgccccaggccagccaagtaccccctcccagtggattcactgtccacggcctcccaacatctccagaccggccaggctccaccagccccttcgctccatcagccactgacctgcccagcatgcctgaacctgccctgacctcccgagcaaacatgacagagcacaagacgtcccccacccaatgcccggcagctggagaggtctccaacaagcttccaaaatggcctggtctagcctggtcaccgtgcctgggtctgaggccctccctccacagggctgccttgagcgacacggtggcgctgtgggagtccctgcagcagcatggggagaccaagctacttcaggcagcagaggagaagttcaccatcgagcctttcaaagccaagtccctgaaggatgtggaagacctgggaaagcttgtgcagactcagaggacgagaagttcctcggaagacacagctggggagctccctgctgttcgggacctaaagaaactggagtttgcgctgggccctgtctcaggcccccaggctttccccaaactggtgcggatcctcacggccttttcctccctgcagcatctggacctggatgcgctgagtgagaacaagatcggggacgagggtgtctcgcagctctcagccaccttcccccagctgaagtccttggaaaccctcaatctgtcccagaacaacatcactgacctgggtgcctacaaactcgccgaggccctgccttcgctcgctgcatccctgctcaggctaagcttgtacaataactgcatctgcgacgtgggagccgagagcttggctcgtgtgcttccggacatggtgtccctccgggtgatggacgtccagtacaacaagttcacggctgccggggcccagcagctcgctgccagccttcggaggtgtcctcatgtggagacgctggcgatgtggacgcccaccatcccattcagtgtccaggaacacctgcaacaacaggattcacggatcagcctgaga

SEQ ID NO: 5944 - DNA, 3393 bp, Homo sapiens
  source 1..3393: mol_type = genomic DNA
atgcgttgcctggctccacgccctgctgggtcctacctgtcagagccccaaggcagctcacagtgtgccaccatggagttggggcccctagaaggtggctacctggagcttcttaacagcgatgctgaccccctgtgcctctaccacttctatgaccagatggacctggctggagaagaagagattgagctctactcagaacccgacacagacaccatcaactgcgaccagttcagcaggctgttgtgtgacatggaaggtgatgaagagaccagggaggcttatgccaatatcgcggaactggaccagtatgtcttccaggactcccagctggagggcctgagcaaggacattttcatagagcacataggaccagatgaagtgatcggtgagagtatggagatgccagcagaagttgggcagaaaagtcagaaaagacccttcccagaggagcttccggcagacctgaagcactggaagccagctgagccccccactgtggtgactggcagtctcctagtgggaccagtgagcgactgctccaccctgccctgcctgccactgcctgcgctgttcaaccaggagccagcctccggccagatgcgcctggagaaaaccgaccagattcccatgcctttctccagttcctcgttgagctgcctgaatctccctgagggacccatccagtttgtccccaccatctccactctgccccatgggctctggcaaatctctgaggctggaacaggggtctccagtatattcatctaccatggtgaggtgccccaggccagccaagtaccccctcccagtggattcactgtccacggcctcccaacatctccagaccggccaggctccaccagccccttcgctccatcagccactgacctgcccagcatgcctgaacctgccctgacctcccgagcaaacatgacagagcacaagacgtcccccacccaatgcccggcagctggagaggtctccaacaagcttccaaaatggcctgagccggtggagcagttctaccgctcactgcaggacacgtatggtgccgagcccgcaggcccggatggcatcctagtggaggtggatctggtgcaggccaggctggagaggagcagcagcaagagcctggagcgggaactggccaccccggactgggcagaacggcagctggcccaaggaggcctggctgaggtgctgttggctgccaaggagcaccggcggccgcgtgagacacgagtgattgctgtgctgggcaaagctggtcagggcaagagctattgggctggggcagtgagccgggcctgggcttgtggccggcttccccagtacgactttgtcttctctgtcccctgccattgcttgaaccgtccgggggatgcctatggcctgcaggatctgctcttctccctgggcccacagccactcgtggcggccgatgaggttttcagccacatcttgaagagacctgaccgcgttctgctcatcctagacggcttcgaggagctggaagcgcaagatggcttcctgcacagcacgtgcggaccggcaccggcggagccctgctccctccgggggctgctggccggccttttccagaagaagctgctccgaggttgcaccctcctcctcacagcccggccccggggccgcctggtccagagcctgagcaaggccgacgccctatttgagctgtccggcttctccatggagcaggcccaggcatacgtgatgcgctactttgagagctcagggatgacagagcaccaagacagagccctgacgctcctccgggaccggccacttcttctcagtcacagccacagccctactttgtgccgggcagtgtgccagctctcagaggccctgctggagcttggggaggacgccaagctgccctccacgctcacgggactctatgtcggcctgctgggccgtgcagccctcgacagcccccccggggccctggcagagctggccaagctggcctgggagctgggccgcagacatcaaagtaccctacaggaggaccagttcccatccgcagacgtgaggacctgggcgatggccaaaggcttagtccaacacccaccgcgggccgcagagtccgagctggccttccccagcttcctcctgcaatgcttcctgggggccctgtggctggctctgagtggcgaaatcaaggacaaggagctcccgcagtacctagcattgaccccaaggaagaagaggccctatgacaactggctggagggcgtgccacgctttctggctgggctgatcttccagcctcccgcccgctgcctgggagccctactcgggccatcggcggctgcctcggtggacaggaagcagaaggtgcttgcgaggtacctgaagcggctgcagccggggacactgcgggcgcggcagctgctggagctgctgcactgcgcccacgaggccgaggaggctggaatttggcagcacgtggtacaggagctccccggccgcctctcttttctgggcacccgcctcacgcctcctgatgcacatgtactgggcaaggccttggaggcggcgggccaagacttctccctggacctccgcagcactggcatttgcccctctggattggggagcctcgtgggactcagctgtgtcacccgtttcagggctgccttgagcgacacggtggcgctgtgggagtccctgcagcagcatggggagaccaagctacttcaggcagcagaggagaagttcaccatcgagcctttcaaagccaagtccctgaaggatgtggaagacctgggaaagcttgtgcagactcagaggacgagaagttcctcggaagacacagctggggagctccctgctgttcgggacctaaagaaactggagtttgcgctgggccctgtctcaggcccccaggctttccccaaactggtgcggatcctcacggccttttcctccctgcagcatctggacctggatgcgctgagtgagaacaagatcggggacgagggtgtctcgcagctctcagccaccttcccccagctgaagtccttggaaaccctcaatctgtcccagaacaacatcactgacctgggtgcctacaaactcgccgaggccctgccttcgctcgctgcatccctgctcaggctaagcttgtacaataactgcatctgcgacgtgggagccgagagcttggctcgtgtgcttccggacatggtgtccctccgggtgatggacgtccagtacaacaagttcacggctgccggggcccagcagctcgctgccagccttcggaggtgtcctcatgtggagacgctggcgatgtggacgcccaccatcccattcagtgtccaggaacacctgcaacaacaggattcacggatcagcctgaga

SEQ ID NO: 5945 - DNA, 1122 bp, Homo sapiens
  source 1..1122: mol_type = genomic DNA
atgcttcaagatttaagtgcaagtgtcttctttccaccttgttcacaacacagaacgttagctcaggtacctgacaatgatgagcagtttgtaccagactatcaggctgaaagtttggcttttcatggcctgccactgaaaatcaagaaagaaccccacagtccatgttcagaaatcagctctgcctgcagtcaagaacagccctttaaattcagctatggagaaaagtgcctgtacaatgtcagatttcgccgccagctttctgaaccctgtaactcctttcctcctttgccgacgatgccaagggaaggacgtcctatgtaccaacgccagatgtctgagccaaacatccccttcccaccacaaggctttaagcaggagtaccacgacccagtgtatgaacacaacaccatggttggcagtgcggccagccaaagctttccccctcctctgatgattaaacaggaacccagagattttgcatatgactcagaagtgcctagctgccactccatttatatgaggcaagaaggcttcctggctcatcccagcagaacagaaggctgtatgtttgaaaagggccccaggcagttttatgatgacacctgtgttgtcccagaaaaattcgatggagacatcaaacaagagccaggaatgtatcgggaaggacccacataccaacggcgaggatcacttcagctctggcagtttttggtagctcttctggatgacccttcaaattctcattttattgcctggactggtcgaggcatggaatttaaactgattgagcctgaagaggtggcccgacgttggggcattcagaaaaacaggccagctatgaactatgataaacttagccgttcactccgctattactatgagaaaggaattatgcaaaaggtggctggagagagatatgtctacaagtttgtgtgtgatccagaagcccttttctccatggcctttccagataatcagcgtccactgctgaagacagacatggaacgtcacatcaacgaggaggacacagtgcctctttctcactttgatgagagcatggcctacatgccggaagggggctgctgcaacccccacccctacaacgaaggctacgtgtat

SEQ ID NO: 5946 - DNA, 1473 bp, Homo sapiens
  source 1..1473: mol_type = genomic DNA
atgagtggaagaggagatggagggcagcagcagctgctgcactcaaagtttttggctgggtttgtctgccacattgaaaagaatgaaagtcagcgtgggagaaattgtaacgagaaaccaacaaatgtcaggaaaagaaaattcattaacagagatctggctcatgattcagaagaactctttcaagatctaagtcaattacaggaaacatggcttgcagaagctcaggtacctgacaatgatgagcagtttgtaccagactatcaggctgaaagtttggcttttcatggcctgccactgaaaatcaagaaagaaccccacagtccatgttcagaaatcagctctgcctgcagtcaagaacagccctttaaattcagctatggagaaaagtgcctgtacaatgtcagtgcctatgatcagaagccacaagtgggaatgaggccctccaacccccccacaccatccagcacgccagtgtccccactgcatcatgcatctccaaactcaactcatacaccgaaacctgaccgggccttcccagctcacctccctccatcgcagtccataccagatagcagctaccccatggaccacagatttcgccgccagctttctgaaccctgtaactcctttcctcctttgccgacgatgccaagggaaggacgtcctatgtaccaacgccagatgtctgagccaaacatccccttcccaccacaaggctttaagcaggagtaccacgacccagtgtatgaacacaacaccatggttggcagtgcggccagccaaagctttccccctcctctgatgattaaacaggaacccagagattttgcatatgactcagaagtgcctagctgccactccatttatatgaggcaagaaggcttcctggctcatcccagcagaacagaaggctgtatgtttgaaaagggccccaggcagttttatgatgacacctgtgttgtcccagaaaaattcgatggagacatcaaacaagagccaggaatgtatcgggaaggacccacataccaacggcgaggatcacttcagctctggcagtttttggtagctcttctggatgacccttcaaattctcattttattgcctggactggtcgaggcatggaatttaaactgattgagcctgaagaggtggcccgacgttggggcattcagaaaaacaggccagctatgaactatgataaacttagccgttcactccgctattactatgagaaaggaattatgcaaaaggtggctggagagagatatgtctacaagtttgtgtgtgatccagaagcccttttctccatggcctttccagataatcagcgtccactgctgaagacagacatggaacgtcacatcaacgaggaggacacagtgcctctttctcactttgatgagagcatggcctacatgccggaagggggctgctgcaacccccacccctacaacgaaggctacgtgtat

SEQ ID NO: 5947 - DNA, 1362 bp, Homo sapiens
  source 1..1362: mol_type = genomic DNA
atggatggattttatgaccagcaagtgccttacatggtcaccaatagtcagcgtgggagaaattgtaacgagaaaccaacaaatgtcaggaaaagaaaattcattaacagagatctggctcatgattcagaagaactctttcaagatctaagtcaattacaggaaacatggcttgcagaagctcaggtacctgacaatgatgagcagtttgtaccagactatcaggctgaaagtttggcttttcatggcctgccactgaaaatcaagaaagaaccccacagtccatgttcagaaatcagctctgcctgcagtcaagaacagccctttaaattcagctatggagaaaagtgcctgtacaatgtcagtgcctatgatcagaagccacaagtgggaatgaggccctccaacccccccacaccatccagcacgccagtgtccccactgcatcatgcatctccaaactcaactcatacaccgaaacctgaccgggccttcccagctcacctccctccatcgcagtccataccagatagcagctaccccatggaccacagatttcgccgccagctttctgaaccctgtaactcctttcctcctttgccgacgatgccaagggaaggacgtcctatgtaccaacgccagatgtctgagccaaacatccccttcccaccacaaggctttaagcaggagtaccacgacccagtgtatgaacacaacaccatggttggcagtgcggccagccaaagctttccccctcctctgatgattaaacaggaacccagagattttgcatatgactcaggctgtatgtttgaaaagggccccaggcagttttatgatgacacctgtgttgtcccagaaaaattcgatggagacatcaaacaagagccaggaatgtatcgggaaggacccacataccaacggcgaggatcacttcagctctggcagtttttggtagctcttctggatgacccttcaaattctcattttattgcctggactggtcgaggcatggaatttaaactgattgagcctgaagaggtggcccgacgttggggcattcagaaaaacaggccagctatgaactatgataaacttagccgttcactccgctattactatgagaaaggaattatgcaaaaggtggctggagagagatatgtctacaagtttgtgtgtgatccagaagcccttttctccatggcctttccagataatcagcgtccactgctgaagacagacatggaacgtcacatcaacgaggaggacacagtgcctctttctcactttgatgagagcatggcctacatgccggaagggggctgctgcaacccccacccctacaacgaaggctacgtgtat

SEQ ID NO: 5948 - DNA, 1377 bp, Homo sapiens
  source 1..1377: mol_type = genomic DNA
atggatggattttatgaccagcaagtgccttacatggtcaccaatagtcagcgtgggagaaattgtaacgagaaaccaacaaatgtcaggaaaagaaaattcattaacagagatctggctcatgattcagaagaactctttcaagatctaagtcaattacaggaaacatggcttgcagaagtggcttttcatggcctgccactgaaaatcaagaaagaaccccacagtccatgttcagaaatcagctctgcctgcagtcaagaacagccctttaaattcagctatggagaaaagtgcctgtacaatgtcagtgcctatgatcagaagccacaagtgggaatgaggccctccaacccccccacaccatccagcacgccagtgtccccactgcatcatgcatctccaaactcaactcatacaccgaaacctgaccgggccttcccagctcacctccctccatcgcagtccataccagatagcagctaccccatggaccacagatttcgccgccagctttctgaaccctgtaactcctttcctcctttgccgacgatgccaagggaaggacgtcctatgtaccaacgccagatgtctgagccaaacatccccttcccaccacaaggctttaagcaggagtaccacgacccagtgtatgaacacaacaccatggttggcagtgcggccagccaaagctttccccctcctctgatgattaaacaggaacccagagattttgcatatgactcagaagtgcctagctgccactccatttatatgaggcaagaaggcttcctggctcatcccagcagaacagaaggctgtatgtttgaaaagggccccaggcagttttatgatgacacctgtgttgtcccagaaaaattcgatggagacatcaaacaagagccaggaatgtatcgggaaggacccacataccaacggcgaggatcacttcagctctggcagtttttggtagctcttctggatgacccttcaaattctcattttattgcctggactggtcgaggcatggaatttaaactgattgagcctgaagaggtggcccgacgttggggcattcagaaaaacaggccagctatgaactatgataaacttagccgttcactccgctattactatgagaaaggaattatgcaaaaggtggctggagagagatatgtctacaagtttgtgtgtgatccagaagcccttttctccatggcctttccagataatcagcgtccactgctgaagacagacatggaacgtcacatcaacgaggaggacacagtgcctctttctcactttgatgagagcatggcctacatgccggaagggggctgctgcaacccccacccctacaacgaaggctacgtgtat

SEQ ID NO: 5949 - DNA, 1257 bp, Homo sapiens
  source 1..1257: mol_type = genomic DNA
atgcttcaagatttaagtgcaagtgtcttctttccaccttgttcacaacacagaacgttagtggcttttcatggcctgccactgaaaatcaagaaagaaccccacagtccatgttcagaaatcagctctgcctgcagtcaagaacagccctttaaattcagctatggagaaaagtgcctgtacaatgtcagtgcctatgatcagaagccacaagtgggaatgaggccctccaacccccccacaccatccagcacgccagtgtccccactgcatcatgcatctccaaactcaactcatacaccgaaacctgaccgggccttcccagctcacctccctccatcgcagtccataccagatagcagctaccccatggaccacagatttcgccgccagctttctgaaccctgtaactcctttcctcctttgccgacgatgccaagggaaggacgtcctatgtaccaacgccagatgtctgagccaaacatccccttcccaccacaaggctttaagcaggagtaccacgacccagtgtatgaacacaacaccatggttggcagtgcggccagccaaagctttccccctcctctgatgattaaacaggaacccagagattttgcatatgactcagaagtgcctagctgccactccatttatatgaggcaagaaggcttcctggctcatcccagcagaacagaaggctgtatgtttgaaaagggccccaggcagttttatgatgacacctgtgttgtcccagaaaaattcgatggagacatcaaacaagagccaggaatgtatcgggaaggacccacataccaacggcgaggatcacttcagctctggcagtttttggtagctcttctggatgacccttcaaattctcattttattgcctggactggtcgaggcatggaatttaaactgattgagcctgaagaggtggcccgacgttggggcattcagaaaaacaggccagctatgaactatgataaacttagccgttcactccgctattactatgagaaaggaattatgcaaaaggtggctggagagagatatgtctacaagtttgtgtgtgatccagaagcccttttctccatggcctttccagataatcagcgtccactgctgaagacagacatggaacgtcacatcaacgaggaggacacagtgcctctttctcactttgatgagagcatggcctacatgccggaagggggctgctgcaacccccacccctacaacgaaggctacgtgtat

SEQ ID NO: 5950 - DNA, 1311 bp, Homo sapiens
  source 1..1311: mol_type = genomic DNA
atgcttcaagatttaagtgcaagtgtcttctttccaccttgttcacaacacagaacgttagctcaggtacctgacaatgatgagcagtttgtaccagactatcaggctgaaagtttggcttttcatggcctgccactgaaaatcaagaaagaaccccacagtccatgttcagaaatcagctctgcctgcagtcaagaacagccctttaaattcagctatggagaaaagtgcctgtacaatgtcagtgcctatgatcagaagccacaagtgggaatgaggccctccaacccccccacaccatccagcacgccagtgtccccactgcatcatgcatctccaaactcaactcatacaccgaaacctgaccgggccttcccagctcacctccctccatcgcagtccataccagatagcagctaccccatggaccacagatttcgccgccagctttctgaaccctgtaactcctttcctcctttgccgacgatgccaagggaaggacgtcctatgtaccaacgccagatgtctgagccaaacatccccttcccaccacaaggctttaagcaggagtaccacgacccagtgtatgaacacaacaccatggttggcagtgcggccagccaaagctttccccctcctctgatgattaaacaggaacccagagattttgcatatgactcagaagtgcctagctgccactccatttatatgaggcaagaaggcttcctggctcatcccagcagaacagaaggctgtatgtttgaaaagggccccaggcagttttatgatgacacctgtgttgtcccagaaaaattcgatggagacatcaaacaagagccaggaatgtatcgggaaggacccacataccaacggcgaggatcacttcagctctggcagtttttggtagctcttctggatgacccttcaaattctcattttattgcctggactggtcgaggcatggaatttaaactgattgagcctgaagaggtggcccgacgttggggcattcagaaaaacaggccagctatgaactatgataaacttagccgttcactccgctattactatgagaaaggaattatgcaaaaggtggctggagagagatatgtctacaagtttgtgtgtgatccagaagcccttttctccatggcctttccagataatcagcgtccactgctgaagacagacatggaacgtcacatcaacgaggaggacacagtgcctctttctcactttgatgagagcatggcctacatgccggaagggggctgctgcaacccccacccctacaacgaaggctacgtgtat

SEQ ID NO: 5951 - DNA, 1020 bp, Homo sapiens
  source 1..1020: mol_type = genomic DNA
atgaactacccatccaccagccccggatctctggttaaacacatctgtgccatctgtggagacagatcctcaggaaagcactacggggtatacagttgtgaaggctgcaaagggttcttcaagaggacgataaggaaggacctcatctacacgtgtcgggataataaagactgcctcattgacaagcgtcagcgcaaccgctgccagtactgtcgctatcagaagtgccttgtcatgggcatgaagagggaagctgtgcaagaagaaagacagaggagccgagagcgagctgagagtgaggcagaatgtgctaccagtggtcatgaagacatgcctgtggagaggattctagaagctgaacttgctgttgaaccaaagacagaatcctatggtgacatgaatatggagaactcgacaaatgaccctgttaccaacatatgtcatgctgctgacaagcagcttttcaccctcgttgaatgggccaagcgtattccccacttctctgacctcaccttggaggaccaggtcattttgcttcgggcagggtggaatgaattgctgattgcctctttctcccaccgctcagtttccgtgcaggatggcatccttctggccacgggtttacatgtccaccggagcagtgcccacagtgctggggtcggctccatctttgacagagtcctaactgagctggtttccaaaatgaaagacatgcagatggacaagtcggaactgggatgcctgcgagccattgtactctttaacccagatgccaagggcctgtccaacccctctgaggtggagactctgcgagagaaggtttatgccacccttgaggcctacaccaagcagaagtatccggaacagccaggcaggtttgccaagctgctgctgcgcctcccagctctgcgttccattggcttgaaatgcctggagcacctcttcttcttcaagctcatcggggacacccccattgacaccttcctcatggagatgttggagaccccgctgcagatcacc

SEQ ID NO: 5952 - DNA, 1536 bp, Homo sapiens
  source 1..1536: mol_type = genomic DNA
atgaaagccggctgtagcatcgtggaaaagccagaaggaggtggagggtatcagtttcctgactgggcctacaaaacagagtcatccccaggctcccggcagatccagctgtggcacttcatcctggagctgctgcagaaggaagagttccgccatgtcatcgcctggcagcagggagagtacggggaatttgtcatcaaggatccagatgaggtggcccgcctctggggccgcaggaaatgcaaaccacagatgaattatgacaagctgagccgggccctcagatactattacaacaagaggatccttcataaaacaaaagggaaaagatttacctataaatttaacttcaacaagctggtgatgcccaactacccattcatcaacattcggtcaagtggtgtggttcctcagagtgcaccaccagtgccaacagcctcttcccggttccatttcccacctctggacacccattctccaaccaatgatgtgcagccgggacggttctctgctagctccctaactgcttctggccaggagtccagtaatggtactgatagaaagactgagctttcagagctggaggatggctcagctgctgactggcgccggggtgtggatcccgtgtcctccaggaatgccattggtggaggagggattggccatcagaaacgcaagcctgacataatgcttcctctgtttgctaggccagggatgtaccctgacccccacagtcccttcgctgtctctccaatccctggccgcggaggtgtccttaatgtccccatttcaccagccctctccctgactcccaccatcttctcctatagcccatcaccaggcctgagccctttcaccagcagcagctgcttctccttcaaccctgaggaaatgaaacactaccttcattctcaagcttgttctgtgttcaactaccatctgagtcctcggacttttccccgttacccagggctcatggttccaccactgcagtgccaaatgcatcctgaggagtcaactcagttctccatcaagctgcagcccccaccagttgggcggaagaaccgggagagggttgagagcagcgaggagtcagcaccagtcaccacgcccaccatggcttctattcccccaagaatcaaggtggaacctgcctctgaaaaggatcctgagagcctcaggcagtcggcacgagagaaggaggagcacactcaagaagagggcactgtgccaagcaggaccattgaagaggaaaaaggcaccatctttgcccgtcctgctgcaccacccatctggccctctgtgcccattagcaccccaagtggagaacctctggaggtgactgaagacagtgaggataggcctggcaaagagcccagtgcacctgagaagaaagaagatgcactgatgccccccaagcttcggttgaagcggcgctggaatgatgaccctgaagcccgagagctgagcaagagtggcaagtttctctggaatgggtcaggaccccagggcttggcaacagcagctgctgatgct

SEQ ID NO: 5953 - DNA, 429 bp, Homo sapiens
  source 1..429: mol_type = genomic DNA
atgaaagccggctgtagcatcgtggaaaagccagaaggaggtggagggtatcagtttcctgactgggcctacaaaacagagtcatccccaggctcccggcagatccagctgtggcacttcatcctggagctgctgcagaaggaagagttccgccatgtcatcgcctggcagcagggagagtacggggaatttgtcatcaaggatccagatgaggtggcccgcctctggggccgcaggaaatgcaaaccacagatgaattatgacaagctgagccgggccctcagatactattacaacaagaggatccttcataaaacaaaagggaaaagatttacctataaatttaacttcaacaagctggtgatgcccaactacccattcatcaacattcggtcaagtggtaagatacaaactcttttggtagggaat

SEQ ID NO: 5954 - DNA, 1611 bp, Homo sapiens
  source 1..1611: mol_type = genomic DNA
atgtcttgggccgctcgcccgcccttcctccctcagcggcatgccgcagggcagtgtgggccggtgggggtgcgaaaagaaatgcattgtggggtcgcgtcccggtggcggcggcgacggccctggctggatcccgcagcggcggcggcggcggcggtggcaggcggagaacaacaaaccccggagccggagccaggggaggctggacgggacgggatgggcgacagcgggcgggactcccgaagcccagacagctcctccccaaatccccttccccagggagtccctcccccttctcctcctgggccacccctacccccttcaacagctccatcccttggaggctctggggccccacccccacccccgatgccaccacccccactgggctctccctttccagtcatcagttcttccatggggtcccctggtctgccccctccagctcccccaggattctccgggcctgtcagcagcccccagattaactcaacagtgtcactccctgggggtgggtctggcccccctgaagatgtgaagccaccagtcttaggggtccggggcctgcactgtccaccccctccaggtggccctggggctggcaaacggctatgtgcaatctgcggggacagaagctcaggcaaacactacggggtttacagctgtgagggttgcaagggcttcttcaaacgcaccatccgcaaagaccttacatactcttgccgggacaacaaagactgcacagtggacaagcgccagcggaaccgctgtcagtactgccgctatcagaagtgcctggccactggcatgaagagggaggcggtacaggaggagcgtcagcggggaaaggacaaggatggggatggggagggggctgggggagcccccgaggagatgcctgtggacaggatcctggaggcagagcttgctgtggaacagaagagtgaccagggcgttgagggtcctgggggaaccgggggtagcggcagcagcccaaatgaccctgtgactaacatctgtcaggcagctgacaaacagctattcacgcttgttgagtgggcgaagaggatcccacacttttcctccttgcctctggatgatcaggtcatattgctgcgggcaggctggaatgaactcctcattgcctccttctcacaccgatccattgatgttcgagatggcatcctccttgccacaggtcttcacgtgcaccgcaactcagcccattcagcaggagtaggagccatctttgatcggtccctctccagggtgctgacagagctagtgtccaaaatgcgtgacatgaggatggacaagacagagcttggctgcctgagggcaatcattctgtttaatccagatgccaagggcctctccaaccctagtgaggtggaggtcctgcgggagaaagtgtatgcatcactggagacctactgcaaacagaagtaccctgagcagcagggacggtttgccaagctgctgctacgtcttcctgccctccggtccattggccttaagtgtctagagcatctgtttttcttcaagctcattggtgacacccccatcgacaccttcctcatggagatgcttgaggctccccatcaactggcc

SEQ ID NO: 5955 - DNA, 1599 bp, Homo sapiens
  source 1..1599: mol_type = genomic DNA
atgtcttgggccgctcgcccgcccttcctccctcagcggcatgccgcagggcagtgtgggccggtgggggtgcgaaaagaaatgcattgtggggtcgcgtcccggtggcggcggcgacggccctggctggatcccgcagcggcggcggcggcggcggtggcaggcggagaacaacaaaccccggagccggagccaggggaggctggacgggacgggatgggcgacagcgggcgggactcccgaagcccagacagctcctccccaaatccccttccccagggagtccctcccccttctcctcctgggccacccctacccccttcaacagctccatcccttggaggctctggggccccacccccacccccgatgccaccacccccactgggctctccctttccagtcatcagttcttccatggggtcccctggtctgccccctccagctcccccaggattctccgggcctgtcagcagcccccagattaactcaacagtgtcactccctgggggtgggtctggcccccctgaagatgtgaagccaccagtcttaggggtccggggcctgcactgtccaccccctccaggtggccctggggctggcaaacggctatgtgcaatctgcggggacagaagctcaggcaaacactacggggtttacagctgtgagggttgcaagggcttcttcaaacgcaccatccgcaaagaccttacatactcttgccgggacaacaaagactgcacagtggacaagcgccagcggaaccgctgtcagtactgccgctatcagaagtgcctggccactggcatgaagagggaggcggtacaggaggagcgtcagcggggaaaggacaaggatggggatggggagggggctgggggagcccccgaggagatgcctgtggacaggatcctggaggcagagcttgctgtggaacagaagagtgaccagggcgttgagggtcctgggggaaccgggggtagcggcagcagcccaaatgaccctgtgactaacatctgtcaggcagctgacaaacagctattcacgcttgttgagtgggcgaagaggatcccacacttttcctccttgcctctggatgatcaggtcatattgctgcgggcaggctggaatgaactcctcattgcctccttctcacaccgatccattgatgttcgagatggcatcctccttgccacaggtcttcacgtgcaccgcaactcagcccattcagcaggagtaggagccatctttgatcgggtgctgacagagctagtgtccaaaatgcgtgacatgaggatggacaagacagagcttggctgcctgagggcaatcattctgtttaatccagatgccaagggcctctccaaccctagtgaggtggaggtcctgcgggagaaagtgtatgcatcactggagacctactgcaaacagaagtaccctgagcagcagggacggtttgccaagctgctgctacgtcttcctgccctccggtccattggccttaagtgtctagagcatctgtttttcttcaagctcattggtgacacccccatcgacaccttcctcatggagatgcttgaggctccccatcaactggcc

SEQ ID NO: 5956 - DNA, 1452 bp, Homo sapiens
  source 1..1452: mol_type = genomic DNA
atggagcggaggatgaaagccggatacttggaccagcaagtgccctacaccttcagcagcaaatcgcccggaaatgggagcttgcgcgaagcgctgatcggcccgctggggaagctcatggacccgggctccctgccgcccctcgactctgaagatctcttccaggatctaagtcacttccaggagacgtggctcgctgaagctcaggtaccagacagtgatgagcagtttgttcctgatttccattcagaaaacctagctttccacagccccaccaccaggatcaagaaggagccccagagtccccgcacagacccggccctgtcctgcagcaggaagccgccactcccctaccaccatggcgagcagtgcctttactccagtgcctatgacccccccagacaaatcgccatcaagtcccctgcccctggtgcccttggacagtcgcccctacagccctttccccgggcagagcaacggaatttcctgagatcctctggcacctcccagccccaccctggccatgggtacctcggggaacatagctccgtcttccagcagcccctggacatttgccactccttcacatctcagggagggggccgggaacccctcccagccccctaccaacaccagctgtcggagccctgcccaccctatccccagcagagctttaagcaagaataccatgatcccctgtatgaacaggcgggccagccagccgtggaccagggtggggtcaatgggcacaggtacccaggggcgggggtggtgatcaaacaggaacagacggacttcgcctacgactcagatgtcaccgggtgcgcatcaatgtacctccacacagagggcttctctgggccctctccaggtgacggggccatgggctatggctatgagaaacctctgcgaccattcccagatgatgtctgcgttgtccctgagaaatttgaaggagacatcaagcaggaaggggtcggtgcatttcgagaggggccgccctaccagcgccggggtgccctgcagctgtggcaatttctggtggccttgctggatgacccaacaaatgcccatttcattgcctggacgggccggggaatggagttcaagctcattgagcctgaggaggtcgccaggctctggggcatccagaagaaccggccagccatgaattacgacaagctgagccgctcgctccgatactattatgagaaaggcatcatgcagaaggtggctggtgagcgttacgtgtacaagtttgtgtgtgagcccgaggccctcttctctttggccttcccggacaatcagcgtccagctctcaaggctgagtttgaccggcctgtcagtgaggaggacacagtccctttgtcccacttggatgagagccccgcctacctcccagagctggctggccccgcccagccatttggccccaagggtggctactcttac

SEQ ID NO: 5957 - DNA, 1335 bp, Homo sapiens
  source 1..1335: mol_type = genomic DNA
atggacccgggctccctgccgcccctcgactctgaagatctcttccaggatctaagtcacttccaggagacgtggctcgctgaagctcaggtaccagacagtgatgagcagtttgttcctgatttccattcagaaaacctagctttccacagccccaccaccaggatcaagaaggagccccagagtccccgcacagacccggccctgtcctgcagcaggaagccgccactcccctaccaccatggcgagcagtgcctttactccagtgcctatgacccccccagacaaatcgccatcaagtcccctgcccctggtgcccttggacagtcgcccctacagccctttccccgggcagagcaacggaatttcctgagatcctctggcacctcccagccccaccctggccatgggtacctcggggaacatagctccgtcttccagcagcccctggacatttgccactccttcacatctcagggagggggccgggaacccctcccagccccctaccaacaccagctgtcggagccctgcccaccctatccccagcagagctttaagcaagaataccatgatcccctgtatgaacaggcgggccagccagccgtggaccagggtggggtcaatgggcacaggtacccaggggcgggggtggtgatcaaacaggaacagacggacttcgcctacgactcagatgtcaccgggtgcgcatcaatgtacctccacacagagggcttctctgggccctctccaggtgacggggccatgggctatggctatgagaaacctctgcgaccattcccagatgatgtctgcgttgtccctgagaaatttgaaggagacatcaagcaggaaggggtcggtgcatttcgagaggggccgccctaccagcgccggggtgccctgcagctgtggcaatttctggtggccttgctggatgacccaacaaatgcccatttcattgcctggacgggccggggaatggagttcaagctcattgagcctgaggaggtcgccaggctctggggcatccagaagaaccggccagccatgaattacgacaagctgagccgctcgctccgatactattatgagaaaggcatcatgcagaaggtggctggtgagcgttacgtgtacaagtttgtgtgtgagcccgaggccctcttctctttggccttcccggacaatcagcgtccagctctcaaggctgagtttgaccggcctgtcagtgaggaggacacagtccctttgtcccacttggatgagagccccgcctacctcccagagctggctggccccgcccagccatttggccccaagggtggctactcttac

SEQ ID NO: 5958 - DNA, 1755 bp, Homo sapiens
  source 1..1755: mol_type = genomic DNA
atggaactcttaacattcagggatgtggccatagaattctctccagaagagtggaaatgcctggaccctgcccagcagaatttgtatagagatgtgatgttggagaactacaggaacctgatctccctgggtgttgctatctctaacccagacctggtcatctatctggagcaaagaaaggagccctacaaagtgaagatacatgagacagtagccaaacacccagctgtgtgttctcatttcacccaagactttttgccagtgcaggggatagaagattcgttccacaaacttatattaagaagatatgagaaatgtggacatgagaatttagaattaagaaaaagctgtaaaaggaaggtgcagaaaggaggttataatgaatttaatcaatgcttgtcaactatccagagcaaaatatttcagtgtaatgtacatgtcaaagtatttagtacattttcaaattcaaaccaacgtaggataagacatactggagagaaacactttaaagaatgtggcaagtcatttcagaagttctcagacctaactcaacatcaaggaattcatgctggagagaaaccctacacatgtgaagaatgtggcaaagactttaaatggtatttaatctttaatgaatatgagataattcatactggagagaaacccttcacatgtgaagaatgtggcaacatctttaccacatcctcaaactttgctaaacataaagttcatactggagagaaatcttacaaatatgaagaatgtggcaaagcctttaataggtcctcaacccttactaagcataagagaattcatgctgaagagaaacccttcacatgtgaagaatgtggcaaaatcattacctcatcctcaaatgttgccaaacataagaaaattcataccggagagaaactctacaaatgtcaggaatgtggcaaagtctttaataggtccacaacccttactaaacataacagaattcatactggagagaaaccctacacatgtgaagaatgtggcaaagcctttagtaggtcctcagttctgaatgaacataagagaattcatactggagagaagccctacaaatgtgaacaatgtggcaaagcctttagacaatccgcaacccttaataaacataagagtattcatactggagagaaaccctacacatgtgaagaatgtggaaaagcctttagtcggttcacaacccttaatgaacataagagaattcatactggagagaggccccacaaatgtgaagagtgtggcaaagcctttggatggtccacagacctgaataaacataagataattcatactggagagaaaccttacaaatgtgaagagtgtggcaaagcctttggatggtctgcatacctgagtaaacataagaaaattcatactggagagaaaccttatagatgtgaagagtgtggcaaagcctttttatgttccagagccctgaataaacataagacaattcatactggagagaaaccttacgaatgtgaagagtgtggcaaagcctttggatggtccacatacctgagtaaacataagaaaattcatactggagagaaaccttatagatgtgaagagtgtggcaaagcatttagacgttccagagtcctgaataaatataagacaattcatactggagataaaacccccaaatgtaaaggatgtggcaaagcctttaagtggtcctcataccttaatcaacataataaaatttatactggagagaaactc

SEQ ID NO: 5959 - DNA, 1764 bp, Homo sapiens
  source 1..1764: mol_type = genomic DNA
atggacctcgaggaggcggaagagtttaaagaacgctgtactcagtgtgctgctgtctcatggggtcttactgatgaaggcaaatattattgcacttcttgccacaatgttacagagagatatcaggaagttacaaacactgatcttattcctaatacccaaataaaagccctcaaccgggggcttaaaaaaaaaaacaatactgaaaaaggctgggattggtatgtgtgtgaaggtttccagtatattctttatcaacaagcagaagccttaaagaaccttggagtaggcccagagttaaagaacgatgttttacataatttttggaagcgctaccttcagaagagcaagcaggcatattgtaagaacccagtttataccactggaaggaaacctacggtattagaagataatctaagtcattcagactgggctagtgagcctgagctgctaagtgatgtcagctgtcctccttttcttgaaagtggagcggagtctcagtctgacatccacactcgaaaacctttccccgtcagcaaagcatcacaatcagaaacgtctgtctgctctggatctctggatggagttgaatactcacaacgaaaggagaagggaatcgtgaagatgaccatgccacagacacttgccttctgttatctgtccttactttggcagagagaagcaataacactttcagatcttttgaggtttgttgaagaggaccatattccttacataaatgcttttcagcattttccagaacagatgaaattatatggacgtgacagaggaatctttggtatagagtcttggcctgactacgaggacatctacaaaaaaacagtagaagttggaacatttttagatttgcctcgttttccagacataactgaagactgctatcttcatcccaacatactgtgtatgaaatacttgatggaagtcaacctccctgatgaaatgcatagcttaacttgccacgtggtaaaaatgactggaatgggagaagtggattttctgacatttgatcctatagctaaaatggcaaaaactgttaagtacgatgtacaagctgtagctatcattgtggtggtattgaaactgctctttctattggatgacagtttcgagtggtctttgtctaatcttgctgaaaagcataatgaaaagaacaaaaaagataagccatggtttgatttcagaaagtggtaccaaattatgaagaaagcttttgatgagaaaaaacaaaaatgggaagaagcaagggccaagtacctgtggaaaagtgaaaagccactctactactcatttgtcgacaaaccagtagcatataaaaaaagagaaatggtggtgaatctacagaaacaatttagcacactggtcgagtcaacagcaactgctggaaaaaaaagcccttcaagttttcagttcaactggactgaagaggacactgatagaacgtgtttccatggacacagccttcagggagtcctgaaagagaaaggccaatcactgctgactaagaattcattatattggcttagtacacagaaattctgcagatgctattgtacacatgtgacaacctatgaagaatcaaattattctctgagttatcagtttatactaaatctcttctccttcctgctcagaataaagacttcccttctccatgaagaagtgagcttagttgagaagaaactttttgagaaaaaatacagtgtaaaaagaaagaaatcaagatccaagaaagtgagacgacat

SEQ ID NO: 5960 - DNA, 1350 bp, Homo sapiens
  source 1..1350: mol_type = genomic DNA
atgagtgatttcagtgaagaattaaaagggcctgtgacagatgatgaagaagtggaaacatctgtgctcagtggtgcaggaatgcattttccttggcttcaaacatacgtagaaactgtggccattggagggaaaaggaggaaggattttgctcagacaacaagtgcttgtttaagttttatccaagaagctctgctgaagcaccaatggcagcaagctgcagaatacatgtacagttattttcagaccttggaagattcagatagctacaaaaggcaggctgcacctgagattatttggaagctcggaagtgaaattctattttatcatcccaaaagcaacatggagagtttcaatacttttgctaaccggatgaaaaatattggcgtcatgaattatttaaagatctccttacaacatgcattataccttctgcatcatggaatgcttaaagatgctaagagaaatctgagtgaggcagagacatggagacatggtgaaaatacgtcttcccgggaaatattaatcaaccttattcaggcctataaagggcttttacagtattatacctggtctgaaaagaagatggaattgtcaaagcttgataaggatgattatgcttacaatgcagtagcccaggatgtgttcaaccacagctggaagacatctgcaaatatttctgcattgattaaaattcctggagtttgggacccttttgtgaagagttatgtagaaatgctggaattctatggggatcgagatggagcccaagaggtactcaccaattatgcatatgatgaaaagtttccatcaaatccaaatgcccatatctacttatacaactttctaaagagacagaaggcaccaagatcaaaattgataagtgtgcttaagattttgtatcagattgtaccatctcataaattgatgttggaattccatacattacttagaaaatcagaaaaagaagaacaccgtaaactggggttggaggtattatttggagtcttagattttgccggatgcactaagaatataactgcttggaaatacttggcaaaatatctgaaaaatatcttaatgggaaaccaccttgcgtgggttcaagaagagtggaactccaggaaaaactggtggccaggctttcatttcagctacttttgggcaaaaagtgattggaaggaagatacagctttggcctgtgagaaagcttttgtggctggtttactgttaggaaaaggttgtagatatttccggtatattttaaagcaagatcaccaaatcttagggaagaaaattaagcggatgaagagatctgtgaaaaaatacagtattgtaaatccaagactc

SEQ ID NO: 5961 - DNA, 1008 bp, Homo sapiens
  source 1..1008: mol_type = genomic DNA
atggagagtttcaatacttttgctaaccggatgaaaaatattggcgtcatgaattatttaaagatctccttacaacatgcattataccttctgcatcatggaatgcttaaagatgctaagagaaatctgagtgaggcagagacatggagacatggtgaaaatacgtcttcccgggaaatattaatcaaccttattcaggcctataaagggcttttacagtattatacctggtctgaaaagaagatggaattgtcaaagcttgataaggatgattatgcttacaatgcagtagcccaggatgtgttcaaccacagctggaagacatctgcaaatatttctgcattgattaaaattcctggagtttgggacccttttgtgaagagttatgtagaaatgctggaattctatggggatcgagatggagcccaagaggtactcaccaattatgcatatgatgaaaagtttccatcaaatccaaatgcccatatctacttatacaactttctaaagagacagaaggcaccaagatcaaaattgataagtgtgcttaagattttgtatcagattgtaccatctcataaattgatgttggaattccatacattacttagaaaatcagaaaaagaagaacaccgtaaactggggttggaggtattatttggagtcttagattttgccggatgcactaagaatataactgcttggaaatacttggcaaaatatctgaaaaatatcttaatgggaaaccaccttgcgtgggttcaagaagagtggaactccaggaaaaactggtggccaggctttcatttcagctacttttgggcaaaaagtgattggaaggaagatacagctttggcctgtgagaaagcttttgtggctggtttactgttaggaaaaggttgtagatatttccggtatattttaaagcaagatcaccaaatcttagggaagaaaattaagcggatgaagagatctgtgaaaaaatacagtattgtaaatccaagactc

SEQ ID NO: 5962 - DNA, 1281 bp, Homo sapiens
  source 1..1281: mol_type = genomic DNA
atgggagtgttgacattcagggatgtggctgtagaattctccccagaagagtgggaatgcctggactctgctcagcagcgtttgtatagggatgtgatgttagagaactatggaaacctggtctccttgggtcttgctatctttaagccagacttgatgacctgtctggagcaaagaaaagagccttggaaagtgaagagacaggaggcagtagccaaacacccagctggttcttttcattttactgcagagatattgccggatcatgacataaaagattcatttcaaaaagtgattctgagaaaatatggaagctgtgaccttaataatttacatttaaagaaagactaccaaagtgtgggtaattgcaaggggcagaaaagcagttataatggccttcatcaatgtttgtcagctacccatagcaaaacctgtcaatgtaataaatgtggcagaggttttcagttgtgctcaatcttcactgaacataaagacatttttagcagagagaaatgccacaaatgtgaagaatgtggcaaagactgtaggttgttctcagattttactagacataagaaaattcatactgtagagagatgctacaaatgtgaagaatgtggcaaagcgtttaaaaagttttcaaaccttactgaacataagagagttcatactggagagaaaccttacaaatgtgaaggatgtggcaaaacttttacctgctcctcaacccttgttaaacacaagagaaatcatactggagacagaccctacaaatgtgaagaatgtggcaaagcctttaagtgcttctcagaccttactaatcataagagaattcatactggagagaaaccctacaaatgtgaagaatgtaacaaagcctataggtggttctcagaccttgctaaacataagataattcatactggagacaaaccctacacatgtaatgaatgtggaaaagcttttaagtggttctcggcccttagtaaacataagagaattcatactggagagaaaccctacatctgtgaagaatgtggcaaagcctttacccgctcctcaaccctttttaaccacaagagaattcatatggaagagagaccttacaaatgtgaagaatgcagcaaaacctttaagtgcttctcagacctgactaatcataagagaattcacactggagagaaaccctacaaatgtgaagaatgtggcaaagcatcgagctggttctcacacctcatcagacataagagaattcatactagagagaagctccacaagtgt

SEQ ID NO: 5963 - DNA, 5616 bp, Homo sapiens
  source 1..5616: mol_type = genomic DNA
atgggacccggctgcgatttgctgctgcggacagcagctaccatcactgctgccgccatcatgtcagacacggacagcgacgaagattccgctggaggcggcccattttctttagcgggtttccttttcggcaacatcaatggagccgggcagctggagggggaaagcgtcttggatgatgaatgtaagaagcacttggcaggcttgggggctttggggctgggcagcctgatcactgaactcacggcaaatgaagaattgaccgggactgacggtgccttggtaaatgatgaagggtgggttaggagtacagaagatgctgtggactattcagacatcaatgaggtggcagaagatgaaagccgaagataccagcagacgatggggagcttgcagcccctttgccactcagattatgatgaagatgactatgatgctgattgtgaagacattgattgcaagttgatgcctcctccacctccacccccgggaccaatgaagaaggataaggaccaggattctattactggtgagaaagtggacttcagtagttcctctgactcagaatctgagatgggacctcaggaagcaacacaggcagaatctgaagatggaaagctgacccttccattggctgggattatgcagcatgatgccaccaagctgttgccaagtgtcacagaactttttccagaatttcgacctggaaaggtgttacgttttctacgtctttttggaccagggaagaatgtcccatctgtttggcggagtgctcggagaaagaggaagaagaagcaccgtgagctgatacaggaagagcagatccaggaggtggagtgctcagtagaatcagaagtcagccagaagtctttgtggaactacgactacgctccaccaccacctccagagcagtgtctctctgatgatgaaatcacgatgatggctcctgtggagtccaaattttcccaatcaactggagatatagataaagtgacagataccaaaccaagagtggctgagtggcgttatgggcctgcccgactgtggtatgatatgctgggtgtccctgaagatggcagtgggtttgactatggcttcaaactgagaaagacagaacatgaacctgtgataaaatctagaatgatagaggaatttaggaaacttgaggaaaacaatggcactgatcttctggctgatgaaaacttcctgatggtgacacagctgcattgggaggatgatatcatctgggatggggaggatgtcaaacacaaagggacaaaacctcagcgtgcaagcctggcaggctggcttccttctagcatgactaggaatgcgatggcttacaatgttcagcaaggttttgcagccactcttgatgatgacaaaccttggtactccatttttcccattgacaatgaggatctggtatatggacgctgggaggacaatatcatttgggatgctcaggccatgccccggctgttggaacctcctgttttgacacttgatcccaatgatgagaacctcattttggaaattcctgatgagaaggaagaggccacctctaactccccctccaaggagagtaagaaggaatcatctctgaagaagagtcgaattctcttagggaaaacaggagtcatcaaggaggaaccacagcagaacatgtctcagccagaagtgaaagatccatggaatctctccaatgatgagtattattatcccaagcaacagggtcttcgaggcacctttggagggaatattatccagcattcaattcctgctgtggaattacggcagcccttctttcccacccacatggggcccatcaaactccggcagttccatcgcccacctctgaaaaagtactcatttggtgcactttctcagccaggtccccactcagtccaacctttgctaaagcacatcaaaaaaaaggccaagatgagagaacaagagaggcaagcttcaggtggtggagagatgttttttatgcgcacacctcaggacctcacaggcaaagatggtgatcttattcttgcagaatatagtgaggaaaatggacccttaatgatgcaggttggcatggcaaccaagataaagaactattataaacggaaacctggaaaagatcctggagcaccagattgtaaatatggggaaactgtttactgccatacatctcctttcctgggttctctccatcctggccaattgctgcaagcatttgagaacaacctttttcgtgctccaatttatcttcataagatgccagaaactgatttcttgatcattcggacaagacagggttactatattcgggaattagtggatatttttgtggttggccagcagtgtcccttgtttgaagttcctgggcctaactccaaaagggccaatacgcatattcgagactttctacaggtttttatttaccgccttttctggaaaagtaaagatcggccacggaggatacgaatggaagatataaaaaaagcctttccttcccattcagaaagcagcatccggaagaggctaaagctctgcgctgacttcaaacgcacagggatggactcaaactggtgggtgcttaagtctgattttcgtttaccaacggaagaagagatcagagctatggtgtcaccagagcagtgctgtgcttattatagcatgatagctgcagagcaacgactgaaggatgctggctatggtgagaaatccttttttgctccagaagaagaaaatgaggaagatttccagatgaagattgatgatgaagttcgcactgccccttggaacaccacaagggccttcattgctgccatgaagggcaagtgtctgctagaggtgactggggtggcagatcccacggggtgtggtgaaggattctcctatgtgaagattccaaacaaaccaacacagcagaaggatgataaagaaccgcagccagtgaagaagacagtgacaggaacagatgcagaccttcgtcgcctttccctgaaaaatgccaagcaacttctacgtaaatttggtgtgcctgaggaagagattaaaaagttgtcccgctgggaagtgattgatgtggtgcgcacaatgtcaacagaacaggctcgttctggagaggggcccatgagtaaatttgcccgtggatcaaggttttctgtggctgagcatcaagagcgttacaaagaggaatgtcagcgcatctttgacctacagaacaaggttctgtcatcaactgaagtcttatcaactgacacagacagcagctcagctgaagatagtgactttgaagaaatgggaaagaacattgagaacatgttgcagaacaagaaaaccagctctcagctttcacgtgaacgggaggaacaggagcggaaggaactacagcgaatgctactggcagcaggctcagcagcatccggaaacaatcacagagatgatgacacagcttccgtgactagccttaactcttctgccactggacgctgtctcaagatttatcgcacgtttcgagatgaagaggggaaagagtatgttcgctgtgagacagtccgaaaaccagctgtcattgatgcctatgtgcgcatacggactacaaaagatgaggaattcattcgaaaatttgccctttttgatgaacaacatcgggaagagatgcgaaaagaacggcggaggattcaagagcaactgaggcggcttaagaggaaccaggaaaaggagaagcttaagggtcctcctgagaagaagcccaagaaaatgaaggagcgtcctgacctaaaactgaaatgtggggcatgtggtgccattggacacatgaggactaacaaattctgccccctctattatcaaacaaatgcgccaccttccaaccctgttgccatgacagaagaacaggaggaggagttggaaaagacagtcattcataatgataatgaagaacttatcaaggttgaagggaccaaaattgtcttggggaaacagctaattgagagtgcggatgaggttcgcagaaaatctctggttctcaagtttcctaaacagcagcttcctccaaagaagaaacggcgagttggaaccactgttcactgtgactatttgaatagacctcataagtccatccaccggcgccgcacagaccctatggtgacgctgtcgtccatcttggagtctatcatcaatgacatgagagatcttccaaatacataccctttccacactccagtcaatgcaaaggttgtaaaggactactacaaaatcatcactcggccaatggacctacaaacactccgcgaaaacgtgcgtaaacgcctctacccatctcgggaagagttcagagagcatctggagctaattgtgaaaaatagtgcaacctacaatgggccaaaacactcattgactcagatctctcaatccatgctggatctctgtgatgaaaaactcaaagagaaagaagacaaattagctcgcttagagaaagctatcaaccccttgctggatgatgatgaccaagtggcgttttctttcattctggacaacattgtcacccagaaaatgatggcagttccagattcttggccatttcatcacccagttaataagaaatttgttccagattattacaaagtgattgtcaatccaatggatttagagaccatacgtaagaacatctccaagcacaagtatcagagtcgggagagctttctggatgatgtaaaccttattctggccaacagtgttaagtataatggacctgagagtcagtatactaagactgcccaggagattgtgaacgtctgttaccagacattgactgagtatgatgaacatttgactcaacttgagaaggatatttgtactgctaaagaagcagctttggaggaagcagaattagaaagcctggacccaatgaccccagggccctacacgcctcagcctcctgatttgtatgataccaacacatccctcagtatgtctcgagatgcctctgtatttcaagatgagagcaatatgtctgtcttggatattcccagtgccactccagaaaagcaggtaacacaggaaggtgaagatggagatggtgatcttgcagatgaagaggaaggaactgtacaacagcctcaagccagtgtcctgtatgaggatttgcttatgtctgaaggagaagatgatgaggaagatgctgggagtgatgaagaaggagacaatcctttctctgctatccagctgagtgaaagtggaagtgactctgatgtgggatctggtggaataagacccaaacaaccccgcatgcttcaggagaacacaaggatggacatggaaaatgaagaaagcatgatgtcctatgagggagacggtggggaggcttcccatggtttggaggatagcaacatcagttatgggagctatgaggagcctgatcccaagtcgaacacccaagacacaagcttcagcagcatcggtgggtatgaggtatcagaggaggaagaagatgaggaggaggaagagcagcgctctgggccgagcgtactaagccaggtccacctgtcagaggacgaggaggacagtgaggatttccactccattgctggggacagtgacttggactctgatgaa

SEQ ID NO: 5964 - DNA, 5685 bp, Homo sapiens
  source 1..5685: mol_type = genomic DNA
atgggacccggctgcgatttgctgctgcggacagcagctaccatcactgctgccgccatcatgtcagacacggacagcgacgaagattccgctggaggcggcccattttctttagcgggtttccttttcggcaacatcaatggagccgggcagctggagggggaaagcgtcttggatgatgaatgtaagaagcacttggcaggcttgggggctttggggctgggcagcctgatcactgaactcacggcaaatgaagaattgaccgggactgacggtgccttggtaaatgatgaagggtgggttaggagtacagaagatgctgtggactattcagacatcaatgaggtggcagaagatgaaagccgaagataccagcagacgatggggagcttgcagcccctttgccactcagattatgatgaagatgactatgatgctgattgtgaagacattgattgcaagttgatgcctcctccacctccacccccgggaccaatgaagaaggataaggaccaggattctattactggtgtgtctgaaaatggagaaggcatcatcttgccctccatcattgccccttcctctttggcctcagagaaagtggacttcagtagttcctctgactcagaatctgagatgggacctcaggaagcaacacaggcagaatctgaagatggaaagctgacccttccattggctgggattatgcagcatgatgccaccaagctgttgccaagtgtcacagaactttttccagaatttcgacctggaaaggtgttacgttttctacgtctttttggaccagggaagaatgtcccatctgtttggcggagtgctcggagaaagaggaagaagaagcaccgtgagctgatacaggaagagcagatccaggaggtggagtgctcagtagaatcagaagtcagccagaagtctttgtggaactacgactacgctccaccaccacctccagagcagtgtctctctgatgatgaaatcacgatgatggctcctgtggagtccaaattttcccaatcaactggagatatagataaagtgacagataccaaaccaagagtggctgagtggcgttatgggcctgcccgactgtggtatgatatgctgggtgtccctgaagatggcagtgggtttgactatggcttcaaactgagaaagacagaacatgaacctgtgataaaatctagaatgatagaggaatttaggaaacttgaggaaaacaatggcactgatcttctggctgatgaaaacttcctgatggtgacacagctgcattgggaggatgatatcatctgggatggggaggatgtcaaacacaaagggacaaaacctcagcgtgcaagcctggcaggctggcttccttctagcatgactaggaatgcgatggcttacaatgttcagcaaggttttgcagccactcttgatgatgacaaaccttggtactccatttttcccattgacaatgaggatctggtatatggacgctgggaggacaatatcatttgggatgctcaggccatgccccggctgttggaacctcctgttttgacacttgatcccaatgatgagaacctcattttggaaattcctgatgagaaggaagaggccacctctaactccccctccaaggagagtaagaaggaatcatctctgaagaagagtcgaattctcttagggaaaacaggagtcatcaaggaggaaccacagcagaacatgtctcagccagaagtgaaagatccatggaatctctccaatgatgagtattattatcccaagcaacagggtcttcgaggcacctttggagggaatattatccagcattcaattcctgctgtggaattacggcagcccttctttcccacccacatggggcccatcaaactccggcagttccatcgcccacctctgaaaaagtactcatttggtgcactttctcagccaggtccccactcagtccaacctttgctaaagcacatcaaaaaaaaggccaagatgagagaacaagagaggcaagcttcaggtggtggagagatgttttttatgcgcacacctcaggacctcacaggcaaagatggtgatcttattcttgcagaatatagtgaggaaaatggacccttaatgatgcaggttggcatggcaaccaagataaagaactattataaacggaaacctggaaaagatcctggagcaccagattgtaaatatggggaaactgtttactgccatacatctcctttcctgggttctctccatcctggccaattgctgcaagcatttgagaacaacctttttcgtgctccaatttatcttcataagatgccagaaactgatttcttgatcattcggacaagacagggttactatattcgggaattagtggatatttttgtggttggccagcagtgtcccttgtttgaagttcctgggcctaactccaaaagggccaatacgcatattcgagactttctacaggtttttatttaccgccttttctggaaaagtaaagatcggccacggaggatacgaatggaagatataaaaaaagcctttccttcccattcagaaagcagcatccggaagaggctaaagctctgcgctgacttcaaacgcacagggatggactcaaactggtgggtgcttaagtctgattttcgtttaccaacggaagaagagatcagagctatggtgtcaccagagcagtgctgtgcttattatagcatgatagctgcagagcaacgactgaaggatgctggctatggtgagaaatccttttttgctccagaagaagaaaatgaggaagatttccagatgaagattgatgatgaagttcgcactgccccttggaacaccacaagggccttcattgctgccatgaagggcaagtgtctgctagaggtgactggggtggcagatcccacggggtgtggtgaaggattctcctatgtgaagattccaaacaaaccaacacagcagaaggatgataaagaaccgcagccagtgaagaagacagtgacaggaacagatgcagaccttcgtcgcctttccctgaaaaatgccaagcaacttctacgtaaatttggtgtgcctgaggaagagattaaaaagttgtcccgctgggaagtgattgatgtggtgcgcacaatgtcaacagaacaggctcgttctggagaggggcccatgagtaaatttgcccgtggatcaaggttttctgtggctgagcatcaagagcgttacaaagaggaatgtcagcgcatctttgacctacagaacaaggttctgtcatcaactgaagtcttatcaactgacacagacagcagctcagctgaagatagtgactttgaagaaatgggaaagaacattgagaacatgttgcagaacaagaaaaccagctctcagctttcacgtgaacgggaggaacaggagcggaaggaactacagcgaatgctactggcagcaggctcagcagcatccggaaacaatcacagagatgatgacacagcttccgtgactagccttaactcttctgccactggacgctgtctcaagatttatcgcacgtttcgagatgaagaggggaaagagtatgttcgctgtgagacagtccgaaaaccagctgtcattgatgcctatgtgcgcatacggactacaaaagatgaggaattcattcgaaaatttgccctttttgatgaacaacatcgggaagagatgcgaaaagaacggcggaggattcaagagcaactgaggcggcttaagaggaaccaggaaaaggagaagcttaagggtcctcctgagaagaagcccaagaaaatgaaggagcgtcctgacctaaaactgaaatgtggggcatgtggtgccattggacacatgaggactaacaaattctgccccctctattatcaaacaaatgcgccaccttccaaccctgttgccatgacagaagaacaggaggaggagttggaaaagacagtcattcataatgataatgaagaacttatcaaggttgaagggaccaaaattgtcttggggaaacagctaattgagagtgcggatgaggttcgcagaaaatctctggttctcaagtttcctaaacagcagcttcctccaaagaagaaacggcgagttggaaccactgttcactgtgactatttgaatagacctcataagtccatccaccggcgccgcacagaccctatggtgacgctgtcgtccatcttggagtctatcatcaatgacatgagagatcttccaaatacataccctttccacactccagtcaatgcaaaggttgtaaaggactactacaaaatcatcactcggccaatggacctacaaacactccgcgaaaacgtgcgtaaacgcctctacccatctcgggaagagttcagagagcatctggagctaattgtgaaaaatagtgcaacctacaatgggccaaaacactcattgactcagatctctcaatccatgctggatctctgtgatgaaaaactcaaagagaaagaagacaaattagctcgcttagagaaagctatcaaccccttgctggatgatgatgaccaagtggcgttttctttcattctggacaacattgtcacccagaaaatgatggcagttccagattcttggccatttcatcacccagttaataagaaatttgttccagattattacaaagtgattgtcaatccaatggatttagagaccatacgtaagaacatctccaagcacaagtatcagagtcgggagagctttctggatgatgtaaaccttattctggccaacagtgttaagtataatggacctgagagtcagtatactaagactgcccaggagattgtgaacgtctgttaccagacattgactgagtatgatgaacatttgactcaacttgagaaggatatttgtactgctaaagaagcagctttggaggaagcagaattagaaagcctggacccaatgaccccagggccctacacgcctcaggctaagcctcctgatttgtatgataccaacacatccctcagtatgtctcgagatgcctctgtatttcaagatgagagcaatatgtctgtcttggatattcccagtgccactccagaaaagcaggtaacacaggaaggtgaagatggagatggtgatcttgcagatgaagaggaaggaactgtacaacagcctcaagccagtgtcctgtatgaggatttgcttatgtctgaaggagaagatgatgaggaagatgctgggagtgatgaagaaggagacaatcctttctctgctatccagctgagtgaaagtggaagtgactctgatgtgggatctggtggaataagacccaaacaaccccgcatgcttcaggagaacacaaggatggacatggaaaatgaagaaagcatgatgtcctatgagggagacggtggggaggcttcccatggtttggaggatagcaacatcagttatgggagctatgaggagcctgatcccaagtcgaacacccaagacacaagcttcagcagcatcggtgggtatgaggtatcagaggaggaagaagatgaggaggaggaagagcagcgctctgggccgagcgtactaagccaggtccacctgtcagaggacgaggaggacagtgaggatttccactccattgctggggacagtgacttggactctgatgaa

SEQ ID NO: 5965 - DNA, 5679 bp, Homo sapiens
  source 1..5679: mol_type = genomic DNA
atgggacccggctgcgatttgctgctgcggacagcagctaccatcactgctgccgccatcatgtcagacacggacagcgacgaagattccgctggaggcggcccattttctttagcgggtttccttttcggcaacatcaatggagccgggcagctggagggggaaagcgtcttggatgatgaatgtaagaagcacttggcaggcttgggggctttggggctgggcagcctgatcactgaactcacggcaaatgaagaattgaccgggactgacggtgccttggtaaatgatgaagggtgggttaggagtacagaagatgctgtggactattcagacatcaatgaggtggcagaagatgaaagccgaagataccagcagacgatggggagcttgcagcccctttgccactcagattatgatgaagatgactatgatgctgattgtgaagacattgattgcaagttgatgcctcctccacctccacccccgggaccaatgaagaaggataaggaccaggattctattactggtgtgtctgaaaatggagaaggcatcatcttgccctccatcattgccccttcctctttggcctcagagaaagtggacttcagtagttcctctgactcagaatctgagatgggacctcaggaagcaacacaggcagaatctgaagatggaaagctgacccttccattggctgggattatgcagcatgatgccaccaagctgttgccaagtgtcacagaactttttccagaatttcgacctggaaaggtgttacgttttctacgtctttttggaccagggaagaatgtcccatctgtttggcggagtgctcggagaaagaggaagaagaagcaccgtgagctgatacaggaagagcagatccaggaggtggagtgctcagtagaatcagaagtcagccagaagtctttgtggaactacgactacgctccaccaccacctccagagcagtgtctctctgatgatgaaatcacgatgatggctcctgtggagtccaaattttcccaatcaactggagatatagataaagtgacagataccaaaccaagagtggctgagtggcgttatgggcctgcccgactgtggtatgatatgctgggtgtccctgaagatggcagtgggtttgactatggcttcaaactgagaaagacagaacatgaacctgtgataaaatctagaatgatagaggaatttaggaaacttgaggaaaacaatggcactgatcttctggctgatgaaaacttcctgatggtgacacagctgcattgggaggatgatatcatctgggatggggaggatgtcaaacacaaagggacaaaacctcagcgtgcaagcctggcaggctggcttccttctagcatgactaggaatgcgatggcttacaatgttcagcaaggttttgcagccactcttgatgatgacaaaccttggtactccatttttcccattgacaatgaggatctggtatatggacgctgggaggacaatatcatttgggatgctcaggccatgccccggctgttggaacctcctgttttgacacttgatcccaatgatgagaacctcattttggaaattcctgatgagaaggaagaggccacctctaactccccctccaaggagagtaagaaggaatcatctctgaagaagagtcgaattctcttagggaaaacaggagtcatcaaggaggaaccacagcagaacatgtctcagccagaagtgaaagatccatggaatctctccaatgatgagtattattatcccaagcaacagggtcttcgaggcacctttggagggaatattatccagcattcaattcctgctgtggaattacggcagcccttctttcccacccacatggggcccatcaaactccggcagttccatcgcccacctctgaaaaagtactcatttggtgcactttctcagccaggtccccactcagtccaacctttgctaaagcacatcaaaaaaaaggccaagatgagagaacaagagaggcaagcttcaggtggtggagagatgttttttatgcgcacacctcaggacctcacaggcaaagatggtgatcttattcttgcagaatatagtgaggaaaatggacccttaatgatgcaggttggcatggcaaccaagataaagaactattataaacggaaacctggaaaagatcctggagcaccagattgtaaatatggggaaactgtttactgccatacatctcctttcctgggttctctccatcctggccaattgctgcaagcatttgagaacaacctttttcgtgctccaatttatcttcataagatgccagaaactgatttcttgatcattcggacaagacagggttactatattcgggaattagtggatatttttgtggttggccagcagtgtcccttgtttgaagttcctgggcctaactccaaaagggccaatacgcatattcgagactttctacaggtttttatttaccgccttttctggaaaagtaaagatcggccacggaggatacgaatggaagatataaaaaaagcctttccttcccattcagaaagcagcatccggaagaggctaaagctctgcgctgacttcaaacgcacagggatggactcaaactggtgggtgcttaagtctgattttcgtttaccaacggaagaagagatcagagctatggtgtcaccagagcagtgctgtgcttattatagcatgatagctgcagagcaacgactgaaggatgctggctatggtgagaaatccttttttgctccagaagaagaaaatgaggaagatttccagatgaagattgatgatgaagttcgcactgccccttggaacaccacaagggccttcattgctgccatgaagggcaagtgtctgctagaggtgactggggtggcagatcccacggggtgtggtgaaggattctcctatgtgaagattccaaacaaaccaacacagcagaaggatgataaagaaccgcagccagtgaagaagacagtgacaggaacagatgcagaccttcgtcgcctttccctgaaaaatgccaagcaacttctacgtaaatttggtgtgcctgaggaagagattaaaaagttgtcccgctgggaagtgattgatgtggtgcgcacaatgtcaacagaacaggctcgttctggagaggggcccatgagtaaatttgcccgtggatcaaggttttctgtggctgagcatcaagagcgttacaaagaggaatgtcagcgcatctttgacctacagaacaaggttctgtcatcaactgaagtcttatcaactgacacagacagcagctcagctgaagatagtgactttgaagaaatgggaaagaacattgagaacatgttgcagaacaagaaaaccagctctcagctttcacgtgaacgggaggaacaggagcggaaggaactacagcgaatgctactggcagcaggctcagcagcatccggaaacaatcacagagatgatgacacagcttccgtgactagccttaactcttctgccactggacgctgtctcaagatttatcgcacgtttcgagatgaagaggggaaagagtatgttcgctgtgagacagtccgaaaaccagctgtcattgatgcctatgtgcgcatacggactacaaaagatgaggaattcattcgaaaatttgccctttttgatgaacaacatcgggaagagatgcgaaaagaacggcggaggattcaagagcaactgaggcggcttaagaggaaccaggaaaaggagaagcttaagggtcctcctgagaagaagcccaagaaaatgaaggagcgtcctgacctaaaactgaaatgtggggcatgtggtgccattggacacatgaggactaacaaattctgccccctctattatcaaacaaatgcgccaccttccaaccctgttgccatgacagaagaacaggaggaggagttggaaaagacagtcattcataatgataatgaagaacttatcaaggttgaagggaccaaaattgtcttggggaaacagctaattgagagtgcggatgaggttcgcagaaaatctctggttctcaagtttcctaaacagcagcttcctccaaagaagaaacggcgagttggaaccactgttcactgtgactatttgaatagacctcataagtccatccaccggcgccgcacagaccctatggtgacgctgtcgtccatcttggagtctatcatcaatgacatgagagatcttccaaatacataccctttccacactccagtcaatgcaaaggttgtaaaggactactacaaaatcatcactcggccaatggacctacaaacactccgcgaaaacgtgcgtaaacgcctctacccatctcgggaagagttcagagagcatctggagctaattgtgaaaaatagtgcaacctacaatgggccaaaacactcattgactcagatctctcaatccatgctggatctctgtgatgaaaaactcaaagagaaagaagacaaattagctcgcttagagaaagctatcaaccccttgctggatgatgatgaccaagtggcgttttctttcattctggacaacattgtcacccagaaaatgatggcagttccagattcttggccatttcatcacccagttaataagaaatttgttccagattattacaaagtgattgtcaatccaatggatttagagaccatacgtaagaacatctccaagcacaagtatcagagtcgggagagctttctggatgatgtaaaccttattctggccaacagtgttaagtataatggacctgagagtcagtatactaagactgcccaggagattgtgaacgtctgttaccagacattgactgagtatgatgaacatttgactcaacttgagaaggatatttgtactgctaaagaagcagctttggaggaagcagaattagaaagcctggacccaatgaccccagggccctacacgcctcagcctcctgatttgtatgataccaacacatccctcagtatgtctcgagatgcctctgtatttcaagatgagagcaatatgtctgtcttggatattcccagtgccactccagaaaagcaggtaacacaggaaggtgaagatggagatggtgatcttgcagatgaagaggaaggaactgtacaacagcctcaagccagtgtcctgtatgaggatttgcttatgtctgaaggagaagatgatgaggaagatgctgggagtgatgaagaaggagacaatcctttctctgctatccagctgagtgaaagtggaagtgactctgatgtgggatctggtggaataagacccaaacaaccccgcatgcttcaggagaacacaaggatggacatggaaaatgaagaaagcatgatgtcctatgagggagacggtggggaggcttcccatggtttggaggatagcaacatcagttatgggagctatgaggagcctgatcccaagtcgaacacccaagacacaagcttcagcagcatcggtgggtatgaggtatcagaggaggaagaagatgaggaggaggaagagcagcgctctgggccgagcgtactaagccaggtccacctgtcagaggacgaggaggacagtgaggatttccactccattgctggggacagtgacttggactctgatgaa

SEQ ID NO: 5966 - DNA, 1236 bp, Homo sapiens
  source 1..1236: mol_type = genomic DNA
atggctaaaagaccgggaccccctggaagccgagaaatgggactgttgacattcagagacatagctatagaattctctctggcggagtggcaatgcctggatcatgctcagcagaatttatatagagatgtgatgttagagaactacagaaacctgttctccctgggtatgactgtctctaagccagacttgatcgcctgtctggagcaaaataaagagccccagaatataaagagaaatgagatggcagccaaacacccagttacatgttctcatttcaaccaagaccttcagccagagcagagcataaaagattcactccaaaaagtaataccaagaacatatggaaaatgtggacatgagaatttacaattaaaaaaatgttgtaaaagagtagatgagtgtgaggtgcacaaaggaggttataatgaccttaaccaatgtttgtcaaatacccaaaacaaaatatttcagactcataaatgtgtcaaagtcttcagtaaattttcaaattccaatagacacaatgcaagatatactggaaagaaacatttgaaatgtaaaaaatatggcaaatcattttgcatgttttcacacctaaatcaacatcagataattcatactaaggagaagtcctacaaatgtgaagaatgtggcaaatcctttaaccactcctcaagcggtactacacataaaagaattcttactggagagaaaccctacagatgtgaggaatgtggcaaagcctttaggtggccctcaaaccttactagacataagagaattcacactggagagaaaccctacgcatgtgaagaatgtggccaagcctttaggcgctcctcaacacttactaaccacaagagaattcatactggagagagaccctacaaatgtgaagaatgtggcaaagcctttagcgtatcctcagccctcatttaccacaagagaattcatactggagagaaaccctacacatgtgaagaatgtggcaaagcctttaactgctcctcgactcttaagacacataagataattcatactggagagaaaccctacacatgtgaagaatgtggcagaacctttaactgctcctcaactgtaaaggcacataagagaattcatactggagagaaaccatacaaatgtgaagaatgtgacaaagcttttaagtggcattcaagtcttgctaaacataagataattcacactggagagaaaccctacaaatgtaaa

SEQ ID NO: 5967 - DNA, 2391 bp, Homo sapiens
  source 1..2391: mol_type = genomic DNA
atgccaccagccacgtatgacactgccggtctcaccatgcccacagcaacactgggtaacctccgaggctatggcatggcatccccaggcctcgcagcccccagcctcacacccccacaactggccactccaaatttgcaacagttctttccccaggccactcgccagtccttgctgggacctcctcctgttggggtccccatgaacccttcccagttcaacctttcaggacggaacccccagaaacaggcccggacctcctcctctaccacccccaatcgaaaggattcttcttctcagacaatgcctgtggaagacaagtcagaccccccagaggggtctgaggaagccgcagagccccggatggacacaccagaagaccaagatttaccgccctgcccagaggacatcgccaaggaaaaacgcactccagcacctgagcctgagccttgtgaggcgtccgagctgccagcaaagagattgaggagctcagaagagcccacagagaaggaacctccagggcagttacaggtgaaggcccagccgcaggcccggatgacagtaccgaaacagacacagacaccagacctgctgcctgaggccctggaagcccaagtgctgccacgattccagccacgggtcctgcaggtccaggcccaggtgcagtcacagactcagccgcggataccatccacagacacccaggtgcagccaaagctgcagaagcaggcgcaaacacagacctctccagagcacttagtgctgcaacagaagcaggtgcagccacagctgcagcaggaggcagagccacagaagcaggtgcagccacaggtacagccacaggcacattcacagggcccaaggcaggtgcagctgcagcaggaggcagagccgctgaagcaggtgcagccacaggtgcagccccaggcacattcacagcccccaaggcaggtgcagctgcagctgcagaagcaggtccagacacagacatatccacaggtccacacacaggcacagccaagcgtccagccacaggagcatcctccagcgcaggtgtcagtacagccaccagagcagacccatgagcagcctcacacccagccgcaggtgtcgttgctggctccagagcaaacaccagttgtggttcatgtctgcgggctggagatgccacctgatgcagtagaagctggtggaggcatggaaaagaccttgccagagcctgtgggcacccaagtcagcatggaagagattcagaatgagtcggcctgtggcctagatgtgggagaatgtgaaaacagagcgagagagatgccaggggtatggggcgccgggggctccctgaaggtcaccattctgcagagcagtgacagccgggcctttagcactgtacccctgacacctgtcccccgccccagtgactccgtctcctccacccctgcggctaccagcactccctctaagcaggccctccagttcttctgctacatctgcaaggccagctgctccagccagcaggagttccaggaccacatgtcggagcctcagcaccagcagcggctaggggagatccagcacatgagccaagcctgcctcctgtccctgctgcccgtgccccgggacgtcctggagacagaggatgaggagcctccaccaaggcgctggtgcaacacctgccagctctactacatgggggacctgatccaacaccgcaggacacaggaccacaagattgccaaacaatccttgcgacccttctgcaccgtttgcaaccgctacttcaaaacccctcgcaagtttgtggagcacgtgaagtcccaggggcataaggacaaagccaaggagctgaagtcgcttgagaaagaaattgctggccaagatgaggaccacttcattacagtggacgctgtgggttgcttcgagggtgatgaagaagaggaagaggatgatgaggatgaagaagagatcgaggttgaggaggaactctgcaagcaggtgaggtccagagatatatccagagaggagtggaagggctcggagacctacagccccaatactgcatatggtgtggacttcctggtgcccgtgatgggctatatctgccgcatctgccacaagttctatcacagcaactcaggggcacagctctcccactgcaagtccctgggccactttgagaacctgcagaaatacaaggcggccaagaaccccagccccaccacccgacctgtgagccgccggtgcgcaatcaacgcccggaacgctttgacagccctgttcacctccagcggccgcccaccctcccagcccaacacccaggacaaaacacccagcaaggtgacggctcgaccctcccagcccccactacctcggcgctcaacccgcctcaaaacc

SEQ ID NO: 5968 - DNA, 2526 bp, Homo sapiens
  source 1..2526: mol_type = genomic DNA
atgttcagccagcagcagcagcagcagctccagcaacagcagcagcagctccagcagttacagcagcagcagctccagcagcagcaattgcagcagcagcagttactgcagctccagcagctgctccagcagtccccaccacaggccccgttgcccatggctgtcagccgggggctccccccgcagcagccacagcagccgcttctgaatctccagggcaccaactcagcctccctcctcaacggctccatgctgcagagagctttgcttttacagcagttgcaaggactggaccagtttgcaatgccaccagccacgtatgacactgccggtctcaccatgcccacagcaacactgggtaacctccgaggctatggcatggcatccccaggcctcgcagcccccagcctcacacccccacaactggccactccaaatttgcaacagttctttccccaggccactcgccagtccttgctgggacctcctcctgttggggtccccatgaacccttcccagttcaacctttcaggacggaacccccagaaacaggcccggacctcctcctctaccacccccaatcgaaaggattcttcttctcagacaatgcctgtggaagacaagtcagaccccccagaggggtctgaggaagccgcagagccccggatggacacaccagaagaccaagatttaccgccctgcccagaggacatcgccaaggaaaaacgcactccagcacctgagcctgagccttgtgaggcgtccgagctgccagcaaagagattgaggagctcagaagagcccacagagaaggaacctccagggcagttacaggtgaaggcccagccgcaggcccggatgacagtaccgaaacagacacagacaccagacctgctgcctgaggccctggaagcccaagtgctgccacgattccagccacgggtcctgcaggtccaggcccaggtgcagtcacagactcagccgcggataccatccacagacacccaggtgcagccaaagctgcagaagcaggcgcaaacacagacctctccagagcacttagtgctgcaacagaagcaggtgcagccacagctgcagcaggaggcagagccacagaagcaggtgcagccacaggtccacacacaggcacagccaagcgtccagccacaggagcatcctccagcgcaggtgtcagtacagccaccagagcagacccatgagcagcctcacacccagccgcaggtgtcgttgctggctccagagcaaacaccagttgtggttcatgtctgcgggctggagatgccacctgatgcagtagaagctggtggaggcatggaaaagaccttgccagagcctgtgggcacccaagtcagcatggaagagattcagaatgagtcggcctgtggcctagatgtgggagaatgtgaaaacagagcgagagagatgccaggggtatggggcgccgggggctccctgaaggtcaccattctgcagagcagtgacagccgggcctttagcactgtacccctgacacctgtcccccgccccagtgactccgtctcctccacccctgcggctaccagcactccctctaagcaggccctccagttcttctgctacatctgcaaggccagctgctccagccagcaggagttccaggaccacatgtcggagcctcagcaccagcagcggctaggggagatccagcacatgagccaagcctgcctcctgtccctgctgcccgtgccccgggacgtcctggagacagaggatgaggagcctccaccaaggcgctggtgcaacacctgccagctctactacatgggggacctgatccaacaccgcaggacacaggaccacaagattgccaaacaatccttgcgacccttctgcaccgtttgcaaccgctacttcaaaacccctcgcaagtttgtggagcacgtgaagtcccaggggcataaggacaaagccaaggagctgaagtcgcttgagaaagaaattgctggccaagatgaggaccacttcattacagtggacgctgtgggttgcttcgagggtgatgaagaagaggaagaggatgatgaggatgaagaagagatcgaggttgaggaggaactctgcaagcaggtgaggtccagagatatatccagagaggagtggaagggctcggagacctacagccccaatactgcatatggtgtggacttcctggtgcccgtgatgggctatatctgccgcatctgccacaagttctatcacagcaactcaggggcacagctctcccactgcaagtccctgggccactttgagaacctgcagaaatacaaggcggccaagaaccccagccccaccacccgacctgtgagccgccggtgcgcaatcaacgcccggaacgctttgacagccctgttcacctccagcggccgcccaccctcccagcccaacacccaggacaaaacacccagcaaggtgacggctcgaccctcccagcccccactacctcggcgctcaacccgcctcaaaacc

SEQ ID NO: 5969 - DNA, 2694 bp, Homo sapiens
  source 1..2694: mol_type = genomic DNA
atgttcagccagcagcagcagcagcagctccagcaacagcagcagcagctccagcagttacagcagcagcagctccagcagcagcaattgcagcagcagcagttactgcagctccagcagctgctccagcagtccccaccacaggccccgttgcccatggctgtcagccgggggctccccccgcagcagccacagcagccgcttctgaatctccagggcaccaactcagcctccctcctcaacggctccatgctgcagagagctttgcttttacagcagttgcaaggactggaccagtttgcaatgccaccagccacgtatgacactgccggtctcaccatgcccacagcaacactgggtaacctccgaggctatggcatggcatccccaggcctcgcagcccccagcctcacacccccacaactggccactccaaatttgcaacagttctttccccaggccactcgccagtccttgctgggacctcctcctgttggggtccccatgaacccttcccagttcaacctttcaggacggaacccccagaaacaggcccggacctcctcctctaccacccccaatcgaaaggattcttcttctcagacaatgcctgtggaagacaagtcagaccccccagaggggtctgaggaagccgcagagccccggatggacacaccagaagaccaagatttaccgccctgcccagaggacatcgccaaggaaaaacgcactccagcacctgagcctgagccttgtgaggcgtccgagctgccagcaaagagattgaggagctcagaagagcccacagagaaggaacctccagggcagttacaggtgaaggcccagccgcaggcccggatgacagtaccgaaacagacacagacaccagacctgctgcctgaggccctggaagcccaagtgctgccacgattccagccacgggtcctgcaggtccaggcccaggtgcagtcacagactcagccgcggataccatccacagacacccaggtgcagccaaagctgcagaagcaggcgcaaacacagacctctccagagcacttagtgctgcaacagaagcaggtgcagccacagctgcagcaggaggcagagccacagaagcaggtgcagccacaggtacagccacaggcacattcacagggcccaaggcaggtgcagctgcagcaggaggcagagccgctgaagcaggtgcagccacaggtgcagccccaggcacattcacagcccccaaggcaggtgcagctgcagctgcagaagcaggtccagacacagacatatccacaggtccacacacaggcacagccaagcgtccagccacaggagcatcctccagcgcaggtgtcagtacagccaccagagcagacccatgagcagcctcacacccagccgcaggtgtcgttgctggctccagagcaaacaccagttgtggttcatgtctgcgggctggagatgccacctgatgcagtagaagctggtggaggcatggaaaagaccttgccagagcctgtgggcacccaagtcagcatggaagagattcagaatgagtcggcctgtggcctagatgtgggagaatgtgaaaacagagcgagagagatgccaggggtatggggcgccgggggctccctgaaggtcaccattctgcagagcagtgacagccgggcctttagcactgtacccctgacacctgtcccccgccccagtgactccgtctcctccacccctgcggctaccagcactccctctaagcaggccctccagttcttctgctacatctgcaaggccagctgctccagccagcaggagttccaggaccacatgtcggagcctcagcaccagcagcggctaggggagatccagcacatgagccaagcctgcctcctgtccctgctgcccgtgccccgggacgtcctggagacagaggatgaggagcctccaccaaggcgctggtgcaacacctgccagctctactacatgggggacctgatccaacaccgcaggacacaggaccacaagattgccaaacaatccttgcgacccttctgcaccgtttgcaaccgctacttcaaaacccctcgcaagtttgtggagcacgtgaagtcccaggggcataaggacaaagccaaggagctgaagtcgcttgagaaagaaattgctggccaagatgaggaccacttcattacagtggacgctgtgggttgcttcgagggtgatgaagaagaggaagaggatgatgaggatgaagaagagatcgaggttgaggaggaactctgcaagcaggtgaggtccagagatatatccagagaggagtggaagggctcggagacctacagccccaatactgcatatggtgtggacttcctggtgcccgtgatgggctatatctgccgcatctgccacaagttctatcacagcaactcaggggcacagctctcccactgcaagtccctgggccactttgagaacctgcagaaatacaaggcggccaagaaccccagccccaccacccgacctgtgagccgccggtgcgcaatcaacgcccggaacgctttgacagccctgttcacctccagcggccgcccaccctcccagcccaacacccaggacaaaacacccagcaaggtgacggctcgaccctcccagcccccactacctcggcgctcaacccgcctcaaaacc

SEQ ID NO: 5970 - DNA, 2454 bp, Homo sapiens
  source 1..2454: mol_type = genomic DNA
atgttcagccagcagcagcagcagcagctccagcaacagcagcagcagctccagcagttacagcagcagcagctccagcagcagcaattgcagcagcagcagttactgcagctccagcagctgctccagcagtccccaccacaggccccgttgcccatggctgtcagccgggggctccccccgcagcagccacagcagccgcttctgaatctccagggcaccaactcagcctccctcctcaacggctccatgctgcagagagctttgcttttacagcagttgcaaggtaacctccgaggctatggcatggcatccccaggcctcgcagcccccagcctcacacccccacaactggccactccaaatttgcaacagttctttccccaggccactcgccagtccttgctgggacctcctcctgttggggtccccatgaacccttcccagttcaacctttcaggacggaacccccagaaacaggcccggacctcctcctctaccacccccaatcgaaaggattcttcttctcagacaatgcctgtggaagacaagtcagaccccccagaggggtctgaggaagccgcagagccccggatggacacaccagaagaccaagatttaccgccctgcccagaggacatcgccaaggaaaaacgcactccagcacctgagcctgagccttgtgaggcgtccgagctgccagcaaagagattgaggagctcagaagagcccacagagaaggaacctccagggcagttacaggtgaaggcccagccgcaggcccggatgacagtaccgaaacagacacagacaccagacctgctgcctgaggccctggaagcccaagtgctgccacgattccagccacgggtcctgcaggtccaggcccaggtgcagtcacagactcagccgcggataccatccacagacacccaggtgcagccaaagctgcagaagcaggcgcaaacacagacctctccagagcacttagtgctgcaacagaagcaggtgcagccacagctgcagcaggaggcagagccacagaagcaggtgcagccacaggtccacacacaggcacagccaagcgtccagccacaggagcatcctccagcgcaggtgtcagtacagccaccagagcagacccatgagcagcctcacacccagccgcaggtgtcgttgctggctccagagcaaacaccagttgtggttcatgtctgcgggctggagatgccacctgatgcagtagaagctggtggaggcatggaaaagaccttgccagagcctgtgggcacccaagtcagcatggaagagattcagaatgagtcggcctgtggcctagatgtgggagaatgtgaaaacagagcgagagagatgccaggggtatggggcgccgggggctccctgaaggtcaccattctgcagagcagtgacagccgggcctttagcactgtacccctgacacctgtcccccgccccagtgactccgtctcctccacccctgcggctaccagcactccctctaagcaggccctccagttcttctgctacatctgcaaggccagctgctccagccagcaggagttccaggaccacatgtcggagcctcagcaccagcagcggctaggggagatccagcacatgagccaagcctgcctcctgtccctgctgcccgtgccccgggacgtcctggagacagaggatgaggagcctccaccaaggcgctggtgcaacacctgccagctctactacatgggggacctgatccaacaccgcaggacacaggaccacaagattgccaaacaatccttgcgacccttctgcaccgtttgcaaccgctacttcaaaacccctcgcaagtttgtggagcacgtgaagtcccaggggcataaggacaaagccaaggagctgaagtcgcttgagaaagaaattgctggccaagatgaggaccacttcattacagtggacgctgtgggttgcttcgagggtgatgaagaagaggaagaggatgatgaggatgaagaagagatcgaggttgaggaggaactctgcaagcaggtgaggtccagagatatatccagagaggagtggaagggctcggagacctacagccccaatactgcatatggtgtggacttcctggtgcccgtgatgggctatatctgccgcatctgccacaagttctatcacagcaactcaggggcacagctctcccactgcaagtccctgggccactttgagaacctgcagaaatacaaggcggccaagaaccccagccccaccacccgacctgtgagccgccggtgcgcaatcaacgcccggaacgctttgacagccctgttcacctccagcggccgcccaccctcccagcccaacacccaggacaaaacacccagcaaggtgacggctcgaccctcccagcccccactacctcggcgctcaacccgcctcaaaacc

SEQ ID NO: 5971 - DNA, 2862 bp, Homo sapiens
  source 1..2862: mol_type = genomic DNA
atgtacatccgccaactgcgcgccccctctcaccgcagccccgcgcggggccccaggatcgcaggaccgcggcggccgcagggagccaccatgttcagccagcagcagcagcagcagctccagcaacagcagcagcagctccagcagttacagcagcagcagctccagcagcagcaattgcagcagcagcagttactgcagctccagcagctgctccagcagtccccaccacaggccccgttgcccatggctgtcagccgggggctccccccgcagcagccacagcagccgcttctgaatctccagggcaccaactcagcctccctcctcaacggctccatgctgcagagagctttgcttttacagcagttgcaaggactggaccagtttgcaatgccaccagccacgtatgacactgccggtctcaccatgcccacagcaacactgggtaacctccgaggctatggcatggcatccccaggcctcgcagcccccagcctcacacccccacaactggccactccaaatttgcaacagttctttccccaggccactcgccagtccttgctgggacctcctcctgttggggtccccatgaacccttcccagttcaacctttcaggacggaacccccagaaacaggcccggacctcctcctctaccacccccaatcgaaaggattcttcttctcagacaatgcctgtggaagacaagtcagaccccccagaggggtctgaggaagccgcagagccccggatggacacaccagaagaccaagatttaccgccctgcccagaggacatcgccaaggaaaaacgcactccagcacctgagcctgagccttgtgaggcgtccgagctgccagcaaagagattgaggagctcagaagagcccacagagaaggaacctccagggcagttacaggtgaaggcccagccgcaggcccggatgacagtaccgaaacagacacagacaccagacctgctgcctgaggccctggaagcccaagtgctgccacgattccagccacgggtcctgcaggtccaggcccaggtgcagtcacagactcagccgcggataccatccacagacacccaggtgcagccaaagctgcagaagcaggcgcaaacacagacctctccagagcacttagtgctgcaacagaagcaggtgcagccacagctgcagcaggaggcagagccacagaagcaggtgcagccacaggtacagccacaggcacattcacagggcccaaggcaggtgcagctgcagcaggaggcagagccgctgaagcaggtgcagccacaggtgcagccccaggcacattcacagcccccaaggcaggtgcagctgcagctgcagaagcaggtccagacacagacatatccacaggtccacacacaggcacagccaagcgtccagccacaggagcatcctccagcgcaggtgtcagtacagccaccagagcagacccatgagcagcctcacacccagccgcaggtgtcgttgctggctccagagcaaacaccagttgtggttcatgtctgcgggctggagatgccacctgatgcagtagaagctggtggaggcatggaaaagaccttgccagagcctgtgggcacccaagtcagcatggaagagattcagaatgagtcggcctgtggcctagatgtgggagaatgtgaaaacagagcgagagagatgccaggggtatggggcgccgggggctccctgaaggtcaccattctgcagagcagtgacagccgggcctttagcactgtacccctgacacctgtcccccgccccagtgactccgtctcctccacccctgcggctaccagcactccctctaagcaggccctccagttcttctgctacatctgcaaggccagctgctccagccagcaggagttccaggaccacatgtcggagcctcagcaccagcagcggctaggggagatccagcacatgagccaagcctgcctcctgtccctgctgcccgtgccccgggacgtcctggagacagaggatgaggagcctccaccaaggcgctggtgcaacacctgccagctctactacatgggggacctgatccaacaccgcaggacacaggaccacaagccacccacaccacgaagagatgtgtttgcccacgttccagtgcaggggtggagcacagcccggcttgttacagatatgattgccaaacaatccttgcgacccttctgcaccgtttgcaaccgctacttcaaaacccctcgcaagtttgtggagcacgtgaagtcccaggggcataaggacaaagccaaggagctgaagtcgcttgagaaagaaattgctggccaagatgaggaccacttcattacagtggacgctgtgggttgcttcgagggtgatgaagaagaggaagaggatgatgaggatgaagaagagatcgaggttgaggaggaactctgcaagcaggtgaggtccagagatatatccagagaggagtggaagggctcggagacctacagccccaatactgcatatggtgtggacttcctggtgcccgtgatgggctatatctgccgcatctgccacaagttctatcacagcaactcaggggcacagctctcccactgcaagtccctgggccactttgagaacctgcagaaatacaaggcggccaagaaccccagccccaccacccgacctgtgagccgccggtgcgcaatcaacgcccggaacgctttgacagccctgttcacctccagcggccgcccaccctcccagcccaacacccaggacaaaacacccagcaaggtgacggctcgaccctcccagcccccactacctcggcgctcaacccgcctcaaaacc

SEQ ID NO: 5972 - DNA, 1593 bp, Homo sapiens
  source 1..1593: mol_type = genomic DNA
atgttagagaactacagaaacctggtcttcgtgggtattgctgcctctaagccagacctgatcacctgtctggagcaaggaaaagaaccttggaatgtgaagagacatgagatggtagctgaacccccagttgtatgttcttattttgcccgagacctttggccaaagcagggcaaaaaaaattatttccaaaaagtgatactgagaagatataaaaaatgtggatgtgaaaatttacagttaagaaaatactgtaaaagcatggatgagtgtaaggtgcacaaagaatgttacaatggacttaaccagtgtttgacgactacccagaacaaaatatttcaatgtgacaaatatgtgaaagtctttcataaattttcaaattcaaacagacatacgataagacatactggaaagaaatctttcaaatgtaaagaatgtgaaaagtcattttgcatgctttcacacttagctcaacataaaagaattcatagtggagagaaaccctacaaatgtaaagaatgtgggaaagcctataatgagacctcaaacctttctacacataaaagaattcatactggaaagaaaccctacaaatgcgaagagtgtggaaaagcctttaaccggctctcacaccttactacacataagataattcatactggaaagaaaccctacaaatgtgaggagtgtggcaaagcttttaaccaatctgcaaaccttactacacataagagaattcatactggagagaaaccctacaaatgtgaagaatgtggcagagcttttagccagtcctcaacccttactgcacataagataattcatgctggagagaaaccttacaaatgtgaagaatgtggcaaagcttttagccagtcctcaacccttactacacataagataattcatactggagagaaattctacaaatgtgaagaatgtggtaaggcctttagccagttatcccaccttactacacataagagaattcattctggagagaaaccctacaagtgtgaagaatgtggcaaagcttttaaacaatcctcaacccttactacacataagagaattcatgctggagagaaattctacaaatgtgaagtatgtagcaaagcctttagccggttctcacaccttactacacataagagaattcatactggagagaagccctacaaatgtgaagaatgtggcaaagcttttaacctatcgtcacaacttactacacataagataattcatactggagagaaaccctacaaatgtgaagaatgtggcaaagcttttaaccagtcctcaactctttctaaacataaggtaattcatactggagagaagccctacaaatatgaagaatgtggcaaagcttttaaccagtcctcacaccttactacacataagatgattcatactggagagaaaccctacaagtgtgaagaatgtggcaaagcctttaacaactcctctattcttaacagacataagatgattcatactggagagaaactctacaaacctgaaagttgtaacaatgcttgtgacaacattgcaaagatttccaaatataaaagaaattgtgctggtgagaaa

SEQ ID NO: 5973 - DNA, 1311 bp, Homo sapiens
  source 1..1311: mol_type = genomic DNA
atgggagagagactctttgagagtgcagaaggtagtcagtgtggagaaactttcacccaggttccggaagacatgctgaacaagaaaactcttcctggagtaaaatcatgtgaaagtggtacatgtggagaaatcttcatgggatattcatcctttaataggaacatcagaactgacactggacaccaaccacataagtgtcagaaatttttagagaagccatataaacataaacaacgtaggaaagccttgagccatagccactgctttcgaacacatgaaaggcctcacactagagagaaaccttttgattgtaaggaatgtgaaaaatctttcatttctcctgcaagcattcgaagatatatggtaacgcacagtggagatggaccttataaatgtaagttttgtgggaaagccttggattgtctcagtttataccttacccatgaacgaactcacactggagagaaacgatatgaatgtaaacaatgtggtaaagccttcagttggcacagttctgttcgaatccatgaaagaactcacactggggagaagccatatgaatgtaaggagtgtgggaaatcattcaatttttccagttcctttcgcagacatgaaaggacacacacaggagagaagccgtacaaatgtaaggaatgtgggaaagccttcaattgtcccagttcttttcacaggcatgaaaggactcacacaggagaaaaaccctatgaatgtaaactatatgggaaagcattatctcgccttataagctttcgaagacacatgagaatgcacactggagagaggcctcataaatgtaagatatgtgggaaagccttttactctcccagttcatttcaaaggcatgaaagaagtcacactggagagaaaccctacaaatgcaagcaatgtgggaaagccttcacttgttccacttcgtttcaatatcatgaaaggactcacactggagagaaacccgatgggtgtaagcaatgtgggaaagccttcagatctgccaagtacattcgaatacatggaaggactcacactggtgagaaaccctatgaatgtaagcaatgtgggaaagcatttcattgtgtcagctcctttcatagacatgaaaggactcacgctggagaaaaaccttatgaatgtaagcattgtgggaaagccttcacttgttccatatatattagaatacatgaaagaattcacactggagagaaaccttaccaatgtaaggaatgtgggaaagccttcattcgttccagttactgtcgaaaacatgaaagaactcacactattaatata

SEQ ID NO: 5974 - DNA, 2343 bp, Homo sapiens
  source 1..2343: mol_type = genomic DNA
atggctactcaagctgatttgatggagttggacatggccatggaaccagacagaaaagcggctgttagtcactggcagcaacagtcttacctggactctggaatccattctggtgccactaccacagctccttctctgagtggtaaaggcaatcctgaggaagaggatgtggatacctcccaagtcctgtatgagtgggaacagggattttctcagtccttcactcaagaacaagtagctgatattgatggacagtatgcaatgactcgagctcagagggtacgagctgctatgttccctgagacattagatgagggcatgcagatcccatctacacagtttgatgctgctcatcccactaatgtccagcgtttggctgaaccatcacagatgctgaaacatgcagttgtaaacttgattaactatcaagatgatgcagaacttgccacacgtgcaatccctgaactgacaaaactgctaaatgacgaggaccaggtggtggttaataaggctgcagttatggtccatcagctttctaaaaaggaagcttccagacacgctatcatgcgttctcctcagatggtgtctgctattgtacgtaccatgcagaatacaaatgatgtagaaacagctcgttgtaccgctgggaccttgcataacctttcccatcatcgtgagggcttactggccatctttaagtctggaggcattcctgccctggtgaaaatgcttggttcaccagtggattctgtgttgttttatgccattacaactctccacaaccttttattacatcaagaaggagctaaaatggcagtgcgtttagctggtgggctgcagaaaatggttgccttgctcaacaaaacaaatgttaaattcttggctattacgacagactgccttcaaattttagcttatggcaaccaagaaagcaagctcatcatactggctagtggtggaccccaagctttagtaaatataatgaggacctatacttacgaaaaactactgtggaccacaagcagagtgctgaaggtgctatctgtctgctctagtaataagccggctattgtagaagctggtggaatgcaagctttaggacttcacctgacagatccaagtcaacgtcttgttcagaactgtctttggactctcaggaatctttcagatgctgcaactaaacaggaagggatggaaggtctccttgggactcttgttcagcttctgggttcagatgatataaatgtggtcacctgtgcagctggaattctttctaacctcacttgcaataattataagaacaagatgatggtctgccaagtgggtggtatagaggctcttgtgcgtactgtccttcgggctggtgacagggaagacatcactgagcctgccatctgtgctcttcgtcatctgaccagccgacaccaagaagcagagatggcccagaatgcagttcgccttcactatggactaccagttgtggttaagctcttacacccaccatcccactggcctctgataaaggctactgttggattgattcgaaatcttgccctttgtcccgcaaatcatgcacctttgcgtgagcagggtgccattccacgactagttcagttgcttgttcgtgcacatcaggatacccagcgccgtacgtccatgggtgggacacagcagcaatttgtggagggggtccgcatggaagaaatagttgaaggttgtaccggagcccttcacatcctagctcgggatgttcacaaccgaattgttatcagaggactaaataccattccattgtttgtgcagctgctttattctcccattgaaaacatccaaagagtagctgcaggggtcctctgtgaacttgctcaggacaaggaagctgcagaagctattgaagctgagggagccacagctcctctgacagagttacttcactctaggaatgaaggtgtggcgacatatgcagctgctgttttgttccgaatgtctgaggacaagccacaagattacaagaaacggctttcagttgagctgaccagctctctcttcagaacagagccaatggcttggaatgagactgctgatcttggacttgatattggtgcccagggagaaccccttggatatcgccaggatgatcctagctatcgttcttttcactctggtggatatggccaggatgccttgggtatggaccccatgatggaacatgagatgggtggccaccaccctggtgctgactatccagttgatgggctgccagatctggggcatgcccaggacctcatggatgggctgcctccaggtgacagcaatcagctggcctggtttgatactgacctg

SEQ ID NO: 5975 - DNA, 2322 bp, Homo sapiens
  source 1..2322: mol_type = genomic DNA
atggagttggacatggccatggaaccagacagaaaagcggctgttagtcactggcagcaacagtcttacctggactctggaatccattctggtgccactaccacagctccttctctgagtggtaaaggcaatcctgaggaagaggatgtggatacctcccaagtcctgtatgagtgggaacagggattttctcagtccttcactcaagaacaagtagctgatattgatggacagtatgcaatgactcgagctcagagggtacgagctgctatgttccctgagacattagatgagggcatgcagatcccatctacacagtttgatgctgctcatcccactaatgtccagcgtttggctgaaccatcacagatgctgaaacatgcagttgtaaacttgattaactatcaagatgatgcagaacttgccacacgtgcaatccctgaactgacaaaactgctaaatgacgaggaccaggtggtggttaataaggctgcagttatggtccatcagctttctaaaaaggaagcttccagacacgctatcatgcgttctcctcagatggtgtctgctattgtacgtaccatgcagaatacaaatgatgtagaaacagctcgttgtaccgctgggaccttgcataacctttcccatcatcgtgagggcttactggccatctttaagtctggaggcattcctgccctggtgaaaatgcttggttcaccagtggattctgtgttgttttatgccattacaactctccacaaccttttattacatcaagaaggagctaaaatggcagtgcgtttagctggtgggctgcagaaaatggttgccttgctcaacaaaacaaatgttaaattcttggctattacgacagactgccttcaaattttagcttatggcaaccaagaaagcaagctcatcatactggctagtggtggaccccaagctttagtaaatataatgaggacctatacttacgaaaaactactgtggaccacaagcagagtgctgaaggtgctatctgtctgctctagtaataagccggctattgtagaagctggtggaatgcaagctttaggacttcacctgacagatccaagtcaacgtcttgttcagaactgtctttggactctcaggaatctttcagatgctgcaactaaacaggaagggatggaaggtctccttgggactcttgttcagcttctgggttcagatgatataaatgtggtcacctgtgcagctggaattctttctaacctcacttgcaataattataagaacaagatgatggtctgccaagtgggtggtatagaggctcttgtgcgtactgtccttcgggctggtgacagggaagacatcactgagcctgccatctgtgctcttcgtcatctgaccagccgacaccaagaagcagagatggcccagaatgcagttcgccttcactatggactaccagttgtggttaagctcttacacccaccatcccactggcctctgataaaggctactgttggattgattcgaaatcttgccctttgtcccgcaaatcatgcacctttgcgtgagcagggtgccattccacgactagttcagttgcttgttcgtgcacatcaggatacccagcgccgtacgtccatgggtgggacacagcagcaatttgtggagggggtccgcatggaagaaatagttgaaggttgtaccggagcccttcacatcctagctcgggatgttcacaaccgaattgttatcagaggactaaataccattccattgtttgtgcagctgctttattctcccattgaaaacatccaaagagtagctgcaggggtcctctgtgaacttgctcaggacaaggaagctgcagaagctattgaagctgagggagccacagctcctctgacagagttacttcactctaggaatgaaggtgtggcgacatatgcagctgctgttttgttccgaatgtctgaggacaagccacaagattacaagaaacggctttcagttgagctgaccagctctctcttcagaacagagccaatggcttggaatgagactgctgatcttggacttgatattggtgcccagggagaaccccttggatatcgccaggatgatcctagctatcgttcttttcactctggtggatatggccaggatgccttgggtatggaccccatgatggaacatgagatgggtggccaccaccctggtgctgactatccagttgatgggctgccagatctggggcatgcccaggacctcatggatgggctgcctccaggtgacagcaatcagctggcctggtttgatactgacctg

SEQ ID NO: 5976 - DNA, 1926 bp, Homo sapiens
  source 1..1926: mol_type = genomic DNA
atggactcagtctcctttgaggatgtggccgtgaacttcaccctggaggagtgggctttgctggattcttcacagaaaaagctctatgaagatgtgatgcaggagaccttcaaaaacctggtttgtctaggaaaaaagtgggaagaccaggacattgaagatgaccacagaaaccaggggaaaaatcgaagatgtcatatggttgagagactctgtgaaagtagaagaggtagcaaatgtggagaaaccactagccagatgccaaatgttaatatcaacaaggaaacttttactggagcaaaaccacatgaatgcagcttttgtggaagagacttcattcatcattcgtcccttaataggcacatgagatctcacactggacagaaaccaaatgagtatcaggaatatgaaaagcaaccatgtaaatgtaaagcagttgggaaaaccttcagttatcaccactgctttcgcaaacatgaaagaactcacactggagtgaagccctatgaatgtaaacagtgtgggaaagcctttatatattaccagccatttcaaagacatgaaaggactcatgctggacagaaaccctatgaatgtaagcaatgtggaaaaacctttatatattaccagtcttttcaaaaacatgctcatactggaaagaaaccctatgaatgtaaacagtgtgggaaagcctttatatgttaccaatcttttcaaagacacaaaaggactcacactggagagaaaccctatgaatgtaagcaatgtggtaaggctttcagttgtcccacatactttcgaactcatgaaagaactcacactggagaaaaaccctacaaatgtaaagaatgtggtaaagccttcagttttctcagttcttttcgaaggcataaaaggactcatagtggagagaaaccctatgaatgtaaagaatgtggaaaagccttcttttattctgcaagctttcgagcacatgtaataatacacactggggctcgaccttataaatgtaaagaatgtgggaaagccttcaactcttctaattcctgtcgagtgcatgaaagaactcatattggagaaaaaccatatgaatgtaaacgatgtggcaaatcattcagttggtccatttctcttcgattgcatgaaagaactcatactggagagaaaccttatgagtgtaaacagtgtcataaaaccttcagtttttcaagttcccttcgagaacacgaaacaactcacactggagagaaaccctatgaatgtaaacaatgtggtaaaaccttcagtttttcaagttcccttcaaagacatgaaaggactcacaatgcagagaaaccctatgaatgtaaacagtgtgggaaagccttcaggtgttcaagttattttcgaattcatgaaaggtcacacactggagagaaaccctatgaatgtaaacagtgtggaaaagttttcattcgttccagttcctttcgactgcatgaaagaacacacactggagagaaaccctatgaatgtaaactatgcggtaaaaccttcagtttttcaagttcccttcgagaacatgaaaaaattcacactggaaataagccttttgagtgtaagcaatgtggtaaggccttccttcgttccagtcaaattcgattgcatgaaaggactcacactggagagaaaccgtatcaatgtaaacaatgtggaaaagccttcatttcttccagtaaatttcgaatgcatgagagaactcacacgggagagaaaccctatcgatgtaaacaatgtgggaaagccttcagattttcaagttctgttcgaattcatgaaaggtctcacactggagagaaaccttatgaatgcaaacaatgtggaaaagccttcatttcttccagtcactttcgactgcatgaaaggactcatatgggagagaaagtc

SEQ ID NO: 5977 - DNA, 1644 bp, Homo sapiens
  source 1..1644: mol_type = genomic DNA
atgcccgttgacttggggcaggccctaggcctgctgccatcgctggcgaaggccgaggactcccagttctcagaatcagatgctgcccttcaagaggaactctccagccctgagaccgcacgccagcttttcaggcagttccgttaccaggtgatgtctgggcctcatgagaccttgaagcaacttcggaagctctgtttccagtggctacagccagaggttcacaccaaagagcagatcctagagatcctcatgttggagcagtttctgaccatcctgcctggggagatccagatgtgggtgcggaaacagtgtccaggaagtggagaagaggcagtgacccttgtggaaagcttgaagggggacccccagagactgtggcaatggatcagtatccaggttctaggacaggacatcttatcagagaagatggaatctccaagctgccaagtgggggaagtggagccccatcttgaagtggtgcctcaggagttgggacttgagaattcatcctcagggcctggggagcttctgagccacatcgtgaaagaggaatctgacacagaagcagaactagccctggctgcctcccagcctgcccgactggaggaaaggctgatcagagaccaggacctcggagcctcactgctcccagcagcacctcaggaacagtggagacaactggattccactcaaaaggagcaatactgggatctcatgctggagacctatgggaaaatggtctcaggaggcatttcccatcccaaatctgacctgactaattcaatagaatttggggaagagctggcaggaatataccttcatgtcaatgagaagatcccaagacccacctgcataggagatagacaagagaatgacaaggagaacctaaatttggagaatcacagggaccaggagctcctgcatgcttcctgtcaagcttcaggagaggttccttctcaggcttccttgaggggcttcttcactgaggatgagccaggatgctttggagaaggagagaatctccctgaggctctgcaaaacattcaggatgagggaacaggggaacagctgtctcctcaagaaaggatttctgagaaacaactaggtcagcatttgcctaatcctcattcaggagaaatgtccaccatgtggcttgaggagaagagagagacctcccagaaggggcagccaagagcccccatggcccagaagctccccacctgcagggagtgtgggaagaccttttataggaattctcagcttatttttcaccaaagaactcacaccggagagacatactttcagtgcaccatctgcaaaaaagcctttctgcggagttcagactttgtgaagcatcagagaactcacacgggagagaagccctgtaaatgtgattactgtgggaaaggctttagtgacttctcaggattgcgccaccacgagaaaatccacacaggagagaaaccctataaatgtcctatctgtgagaaaagtttcattcagagatcaaactttaatagacatcagagggttcacactggagagaaaccttataaatgttcgcactgtgggaaaagtttcagctggagctcgagccttgacaaacatcaaagatcccacttaggaaagaagccctttcaa

SEQ ID NO: 5978 - DNA, 1647 bp, Homo sapiens
  source 1..1647: mol_type = genomic DNA
atgcccgttgacttggggcaggccctaggcctgctgccatcgctggcgaaggccgaggactcccagttctcagaatcagatgctgcccttcaagaggaactctccagccctgagaccgcacgccagcttttcaggcagttccgttaccaggtgatgtctgggcctcatgagaccttgaagcaacttcggaagctctgtttccagtggctacagccagaggttcacaccaaagagcagatcctagagatcctcatgttggagcagtttctgaccatcctgcctggggagatccagatgtgggtgcggaaacagtgtccaggaagtggagaagaggcagtgacccttgtggaaagcttgaagggggacccccagagactgtggcaatggatcagtatccaggttctaggacaggacatcttatcagagaagatggaatctccaagctgccaagtgggggaagtggagccccatcttgaagtggtgcctcaggagttgggacttgagaattcatcctcagggcctggggagcttctgagccacatcgtgaaagaggaatctgacacagaagcagaactagccctggctgcctcccagcctgcccgactggaggaaaggctgatcagagaccaggacctcggagcctcactgctcccagcagcacctcaggaacagtggagacaactggattccactcaaaaggagcaatactgggatctcatgctggagacctatgggaaaatggtctcaggagcaggcatttcccatcccaaatctgacctgactaattcaatagaatttggggaagagctggcaggaatataccttcatgtcaatgagaagatcccaagacccacctgcataggagatagacaagagaatgacaaggagaacctaaatttggagaatcacagggaccaggagctcctgcatgcttcctgtcaagcttcaggagaggttccttctcaggcttccttgaggggcttcttcactgaggatgagccaggatgctttggagaaggagagaatctccctgaggctctgcaaaacattcaggatgagggaacaggggaacagctgtctcctcaagaaaggatttctgagaaacaactaggtcagcatttgcctaatcctcattcaggagaaatgtccaccatgtggcttgaggagaagagagagacctcccagaaggggcagccaagagcccccatggcccagaagctccccacctgcagggagtgtgggaagaccttttataggaattctcagcttatttttcaccaaagaactcacaccggagagacatactttcagtgcaccatctgcaaaaaagcctttctgcggagttcagactttgtgaagcatcagagaactcacacgggagagaagccctgtaaatgtgattactgtgggaaaggctttagtgacttctcaggattgcgccaccacgagaaaatccacacaggagagaaaccctataaatgtcctatctgtgagaaaagtttcattcagagatcaaactttaatagacatcagagggttcacactggagagaaaccttataaatgttcgcactgtgggaaaagtttcagctggagctcgagccttgacaaacatcaaagatcccacttaggaaagaagccctttcaa

SEQ ID NO: 5979 - DNA, 1374 bp, Homo sapiens
  source 1..1374: mol_type = genomic DNA
atggcagccatgcctctgaaagctcaataccaggagatggtgaccttcgaggatgtggctgtgcacttcaccaagacagaatggactggcctttctcctgcccagagggccctgtacagaagtgtgatgttggagaattttgggaacctgactgctttggggtacccagttcccaaacctgcactgatctcacttttggagagaggggacatggcttggggcctggaagcacaggatgatcccccagcagagaggaccaaaaacgtctgtaaagatgttgagaccaacattgacagtgagtccacattaatccagggaatttctgaagaaagagatgggatgatgtcacatggtcagctgaagagtgtccctcagagaactgacttcccagaaacacgtaatgtggaaaagcaccaggacatccccacagtgaaaaatatccaaggaaaggttccaagaatcccctgtgcaaggaaacctttcatatgtgaggagtgtgggaaatccttcagctacttttcttactatgctagacaccagagaatccacactggggagaaaccttttgagtgtagtgagtgtggaaaagcctttaatggtaattcttcgttaattcggcaccagaggattcacactggagagagaccctatcagtgtgaggagtgtgggcgagcctttaatgataatgcaaatctgatcaggcatcagagaatccacagtggggacagaccctattactgtacagagtgtgggaatagtttcacgagtagttccgagtttgttatacatcagagaatccacactggggagaaaccctatgagtgtaatgagtgtggcaaagcttttgttggtaattcacccctacttcggcatcagaaaatccacactggagagaaaccctatgagtgtaatgagtgtggcaaaagctttggaaggacttcccatctaagccaacatcagcgtattcacacaggggaaaagccttattcttgtaaagtatgtggacaagccttcaattttcatacaaaactaactcggcaccagagaattcacagtgaggagaaaccctttgactgtgtagattgtggaaaagccttcagtgctcaggaacaattaaaaaggcatctgagaattcatactcaggagtcttcctatgtatgtgatgagtgtggaaaagccttgactagcaaaagaaatcttcatcagcatcaaagaatccatactggagagaaaccctatgagtgtagcaagtatgagaaggcctttgggacttcttcccagctaggtcaccttgagcatgtctactctggagagaagcctgtgctggacatttgtcgttttggcctcccagaattttttacccccttttactgg

SEQ ID NO: 5980 - DNA, 1557 bp, Homo sapiens
  source 1..1557: mol_type = genomic DNA
atgggacaccttgaaaatacttcagtggttttcccacgagctattttctctctctgtgaaaaggaaaccaggaaattgactctgtgcctgttttcaagaagcagttccgccgagcatcctggggcctccaagcctccgataagctcctccagtatgacatcacgcatcttgctacgccagcaactcatgcgtgagcagatgcaggagcaggagcgcagggagcagcagcagaagctgcaggcggcccagttcatgcaacagagagtgcccgtgagtcagacaccagccataaacgtcagtgtgcccaccacccttccctctgccacgcaggtgccgatggaagtccttaaggtgcagacccacctcgaaaaccccaccaagtaccacatacagcaagcccaacggcagcaggtaaagcagtacctttctaccactttagcaaataaacatgccaaccaagtcctgagcttgccatgtccaaaccagcctggcgatcatgtcatgccaccggtgccggggagcagcgcacccaacagccccatggctatgcttacgcttaactccaactgtgaaaaagagggattttataagtttgaagagcaaaacagggcagagagcgagtgcccaggcatgaacacacattcacgagcgtcctgtatgcagatggatgatgtaatcgatgacatcattagcctagaatcaagttataatgaggaaatcttgggcttgatggatcctgctttgcaaatggcaaatacgttgcctgtctcgggaaacttgattgatctttatggaaaccaaggtctgcccccaccaggcctcaccatcagcaactcctgtccagccaaccttcccaacataaaaagggagctcacagagtctgaagcaagagcactggccaaagagaggcagaaaaaggacaatcacaacctgattgaacgaagaagaagatttaacataaatgaccgcattaaagaactaggtactttgattcccaagtcaaatgatccagacatgcgctggaacaagggaaccatcttaaaagcatccgtggactatatccgaaagttgcaacgagaacagcaacgcgcaaaagaacttgaaaaccgacagaagaaactggagcacgccaaccggcatttgttgctcagaatacaggaacttgaaatgcaggctcgagctcatggactttcccttattccatccacgggtctctgctctccagatttggtgaatcggatcatcaagcaagaacccgttcttgagaactgcagccaagacctccttcagcatcatgcagacctaacctgtacaacaactctcgatctcacggatggcaccatcaccttcaacaacaacctcggaactgggactgaggccaaccaagcctatagtgtccccacaaaaatgggatccaaactggaagacatcctgatggacgacaccctttctcccgtcggtgtcactgatccactcctttcctcagtgtcccccggagcttccaaaacaagcagccggaggagcagtatgagcatggaagagacggagcacacttgt

SEQ ID NO: 5981 - DNA, 1512 bp, Homo sapiens
  source 1..1512: mol_type = genomic DNA
atggaggcgcttagagttcagatgttcatgccatgctcctttgaaagcttgtatctcagttccgccgagcatcctggggcctccaagcctccgataagctcctccagtatgacatcacgcatcttgctacgccagcaactcatgcgtgagcagatgcaggagcaggagcgcagggagcagcagcagaagctgcaggcggcccagttcatgcaacagagagtgcccgtgagtcagacaccagccataaacgtcagtgtgcccaccacccttccctctgccacgcaggtgccgatggaagtccttaaggtgcagacccacctcgaaaaccccaccaagtaccacatacagcaagcccaacggcagcaggtaaagcagtacctttctaccactttagcaaataaacatgccaaccaagtcctgagcttgccatgtccaaaccagcctggcgatcatgtcatgccaccggtgccggggagcagcgcacccaacagccccatggctatgcttacgcttaactccaactgtgaaaaagagggattttataagtttgaagagcaaaacagggcagagagcgagtgcccaggcatgaacacacattcacgagcgtcctgtatgcagatggatgatgtaatcgatgacatcattagcctagaatcaagttataatgaggaaatcttgggcttgatggatcctgctttgcaaatggcaaatacgttgcctgtctcgggaaacttgattgatctttatggaaaccaaggtctgcccccaccaggcctcaccatcagcaactcctgtccagccaaccttcccaacataaaaagggagctcacagagtctgaagcaagagcactggccaaagagaggcagaaaaaggacaatcacaacctgattgaacgaagaagaagatttaacataaatgaccgcattaaagaactaggtactttgattcccaagtcaaatgatccagacatgcgctggaacaagggaaccatcttaaaagcatccgtggactatatccgaaagttgcaacgagaacagcaacgcgcaaaagaacttgaaaaccgacagaagaaactggagcacgccaaccggcatttgttgctcagaatacaggaacttgaaatgcaggctcgagctcatggactttcccttattccatccacgggtctctgctctccagatttggtgaatcggatcatcaagcaagaacccgttcttgagaactgcagccaagacctccttcagcatcatgcagacctaacctgtacaacaactctcgatctcacggatggcaccatcaccttcaacaacaacctcggaactgggactgaggccaaccaagcctatagtgtccccacaaaaatgggatccaaactggaagacatcctgatggacgacaccctttctcccgtcggtgtcactgatccactcctttcctcagtgtcccccggagcttccaaaacaagcagccggaggagcagtatgagcatggaagagacggagcacacttgt

SEQ ID NO: 5982 - DNA, 1560 bp, Homo sapiens
  source 1..1560: mol_type = genomic DNA
atgcagtccgaatcggggatcgtgccggatttcgaagtcggggaggagtttcatgaagagcccaaaacctattacgaactcaaaagtcaaccgctgaagagcagcagttccgccgagcatcctggggcctccaagcctccgataagctcctccagtatgacatcacgcatcttgctacgccagcaactcatgcgtgagcagatgcaggagcaggagcgcagggagcagcagcagaagctgcaggcggcccagttcatgcaacagagagtgcccgtgagtcagacaccagccataaacgtcagtgtgcccaccacccttccctctgccacgcaggtgccgatggaagtccttaaggtgcagacccacctcgaaaaccccaccaagtaccacatacagcaagcccaacggcagcaggtaaagcagtacctttctaccactttagcaaataaacatgccaaccaagtcctgagcttgccatgtccaaaccagcctggcgatcatgtcatgccaccggtgccggggagcagcgcacccaacagccccatggctatgcttacgcttaactccaactgtgaaaaagagggattttataagtttgaagagcaaaacagggcagagagcgagtgcccaggcatgaacacacattcacgagcgtcctgtatgcagatggatgatgtaatcgatgacatcattagcctagaatcaagttataatgaggaaatcttgggcttgatggatcctgctttgcaaatggcaaatacgttgcctgtctcgggaaacttgattgatctttatggaaaccaaggtctgcccccaccaggcctcaccatcagcaactcctgtccagccaaccttcccaacataaaaagggagctcacagagtctgaagcaagagcactggccaaagagaggcagaaaaaggacaatcacaacctgattgaacgaagaagaagatttaacataaatgaccgcattaaagaactaggtactttgattcccaagtcaaatgatccagacatgcgctggaacaagggaaccatcttaaaagcatccgtggactatatccgaaagttgcaacgagaacagcaacgcgcaaaagaacttgaaaaccgacagaagaaactggagcacgccaaccggcatttgttgctcagaatacaggaacttgaaatgcaggctcgagctcatggactttcccttattccatccacgggtctctgctctccagatttggtgaatcggatcatcaagcaagaacccgttcttgagaactgcagccaagacctccttcagcatcatgcagacctaacctgtacaacaactctcgatctcacggatggcaccatcaccttcaacaacaacctcggaactgggactgaggccaaccaagcctatagtgtccccacaaaaatgggatccaaactggaagacatcctgatggacgacaccctttctcccgtcggtgtcactgatccactcctttcctcagtgtcccccggagcttccaaaacaagcagccggaggagcagtatgagcatggaagagacggagcacacttgt

SEQ ID NO: 5983 - DNA, 1578 bp, Homo sapiens
  source 1..1578: mol_type = genomic DNA
atgcagtccgaatcggggatcgtgccggatttcgaagtcggggaggagtttcatgaagagcccaaaacctattacgaactcaaaagtcaaccgctgaagagcagcagttccgccgagcatcctggggcctccaagcctccgataagctcctccagtatgacatcacgcatcttgctacgccagcaactcatgcgtgagcagatgcaggagcaggagcgcagggagcagcagcagaagctgcaggcggcccagttcatgcaacagagagtgcccgtgagtcagacaccagccataaacgtcagtgtgcccaccacccttccctctgccacgcaggtgccgatggaagtccttaaggtgcagacccacctcgaaaaccccaccaagtaccacatacagcaagcccaacggcagcaggtaaagcagtacctttctaccactttagcaaataaacatgccaaccaagtcctgagcttgccatgtccaaaccagcctggcgatcatgtcatgccaccggtgccggggagcagcgcacccaacagccccatggctatgcttacgcttaactccaactgtgaaaaagagggattttataagtttgaagagcaaaacagggcagagagcgagtgcccaggcatgaacacacattcacgagcgtcctgtatgcagatggatgatgtaatcgatgacatcattagcctagaatcaagttataatgaggaaatcttgggcttgatggatcctgctttgcaaatggcaaatacgttgcctgtctcgggaaacttgattgatctttatggaaaccaaggtctgcccccaccaggcctcaccatcagcaactcctgtccagccaaccttcccaacataaaaagggagctcacagcgtgtatttttcccacagagtctgaagcaagagcactggccaaagagaggcagaaaaaggacaatcacaacctgattgaacgaagaagaagatttaacataaatgaccgcattaaagaactaggtactttgattcccaagtcaaatgatccagacatgcgctggaacaagggaaccatcttaaaagcatccgtggactatatccgaaagttgcaacgagaacagcaacgcgcaaaagaacttgaaaaccgacagaagaaactggagcacgccaaccggcatttgttgctcagaatacaggaacttgaaatgcaggctcgagctcatggactttcccttattccatccacgggtctctgctctccagatttggtgaatcggatcatcaagcaagaacccgttcttgagaactgcagccaagacctccttcagcatcatgcagacctaacctgtacaacaactctcgatctcacggatggcaccatcaccttcaacaacaacctcggaactgggactgaggccaaccaagcctatagtgtccccacaaaaatgggatccaaactggaagacatcctgatggacgacaccctttctcccgtcggtgtcactgatccactcctttcctcagtgtcccccggagcttccaaaacaagcagccggaggagcagtatgagcatggaagagacggagcacacttgt

SEQ ID NO: 5984 - DNA, 1071 bp, Homo sapiens
  source 1..1071: mol_type = genomic DNA
atgctggaaatgctagaatataatcactatcaggtgcagacccacctcgaaaaccccaccaagtaccacatacagcaagcccaacggcagcagggattttataagtttgaagagcaaaacagggcagagagcgagtgcccaggcatgaacacacattcacgagcgtcctgtatgcagatggatgatgtaatcgatgacatcattagcctagaatcaagttataatgaggaaatcttgggcttgatggatcctgctttgcaaatggcaaatacgttgcctgtctcgggaaacttgattgatctttatggaaaccaaggtctgcccccaccaggcctcaccatcagcaactcctgtccagccaaccttcccaacataaaaagggagctcacagagtctgaagcaagagcactggccaaagagaggcagaaaaaggacaatcacaacctgattgaacgaagaagaagatttaacataaatgaccgcattaaagaactaggtactttgattcccaagtcaaatgatccagacatgcgctggaacaagggaaccatcttaaaagcatccgtggactatatccgaaagttgcaacgagaacagcaacgcgcaaaagaacttgaaaaccgacagaagaaactggagcacgccaaccggcatttgttgctcagaatacaggaacttgaaatgcaggctcgagctcatggactttcccttattccatccacgggtctctgctctccagatttggtgaatcggatcatcaagcaagaacccgttcttgagaactgcagccaagacctccttcagcatcatgcagacctaacctgtacaacaactctcgatctcacggatggcaccatcaccttcaacaacaacctcggaactgggactgaggccaaccaagcctatagtgtccccacaaaaatgggatccaaactggaagacatcctgatggacgacaccctttctcccgtcggtgtcactgatccactcctttcctcagtgtcccccggagcttccaaaacaagcagccggaggagcagtatgagcatggaagagacggagcacacttgt

SEQ ID NO: 5985 - DNA, 1404 bp, Homo sapiens
  source 1..1404: mol_type = genomic DNA
atgacatcacgcatcttgctacgccagcaactcatgcgtgagcagatgcaggagcaggagcgcagggagcagcagcagaagctgcaggcggcccagttcatgcaacagagagtgcccgtgagtcagacaccagccataaacgtcagtgtgcccaccacccttccctctgccacgcaggtgccgatggaagtccttaaggtgcagacccacctcgaaaaccccaccaagtaccacatacagcaagcccaacggcagcaggtaaagcagtacctttctaccactttagcaaataaacatgccaaccaagtcctgagcttgccatgtccaaaccagcctggcgatcatgtcatgccaccggtgccggggagcagcgcacccaacagccccatggctatgcttacgcttaactccaactgtgaaaaagagggattttataagtttgaagagcaaaacagggcagagagcgagtgcccaggcatgaacacacattcacgagcgtcctgtatgcagatggatgatgtaatcgatgacatcattagcctagaatcaagttataatgaggaaatcttgggcttgatggatcctgctttgcaaatggcaaatacgttgcctgtctcgggaaacttgattgatctttatggaaaccaaggtctgcccccaccaggcctcaccatcagcaactcctgtccagccaaccttcccaacataaaaagggagctcacagagtctgaagcaagagcactggccaaagagaggcagaaaaaggacaatcacaacctgattgaacgaagaagaagatttaacataaatgaccgcattaaagaactaggtactttgattcccaagtcaaatgatccagacatgcgctggaacaagggaaccatcttaaaagcatccgtggactatatccgaaagttgcaacgagaacagcaacgcgcaaaagaacttgaaaaccgacagaagaaactggagcacgccaaccggcatttgttgctcagaatacaggaacttgaaatgcaggctcgagctcatggactttcccttattccatccacgggtctctgctctccagatttggtgaatcggatcatcaagcaagaacccgttcttgagaactgcagccaagacctccttcagcatcatgcagacctaacctgtacaacaactctcgatctcacggatggcaccatcaccttcaacaacaacctcggaactgggactgaggccaaccaagcctatagtgtccccacaaaaatgggatccaaactggaagacatcctgatggacgacaccctttctcccgtcggtgtcactgatccactcctttcctcagtgtcccccggagcttccaaaacaagcagccggaggagcagtatgagcatggaagagacggagcacacttgt

SEQ ID NO: 5986 - DNA, 1257 bp, Homo sapiens
  source 1..1257: mol_type = genomic DNA
atgctggaaatgctagaatataatcactatcaggtgcagacccacctcgaaaaccccaccaagtaccacatacagcaagcccaacggcagcaggtaaagcagtacctttctaccactttagcaaataaacatgccaaccaagtcctgagcttgccatgtccaaaccagcctggcgatcatgtcatgccaccggtgccggggagcagcgcacccaacagccccatggctatgcttacgcttaactccaactgtgaaaaagagggattttataagtttgaagagcaaaacagggcagagagcgagtgcccaggcatgaacacacattcacgagcgtcctgtatgcagatggatgatgtaatcgatgacatcattagcctagaatcaagttataatgaggaaatcttgggcttgatggatcctgctttgcaaatggcaaatacgttgcctgtctcgggaaacttgattgatctttatggaaaccaaggtctgcccccaccaggcctcaccatcagcaactcctgtccagccaaccttcccaacataaaaagggagctcacagcgtgtatttttcccacagagtctgaagcaagagcactggccaaagagaggcagaaaaaggacaatcacaacctgattgaacgaagaagaagatttaacataaatgaccgcattaaagaactaggtactttgattcccaagtcaaatgatccagacatgcgctggaacaagggaaccatcttaaaagcatccgtggactatatccgaaagttgcaacgagaacagcaacgcgcaaaagaacttgaaaaccgacagaagaaactggagcacgccaaccggcatttgttgctcagaatacaggaacttgaaatgcaggctcgagctcatggactttcccttattccatccacgggtctctgctctccagatttggtgaatcggatcatcaagcaagaacccgttcttgagaactgcagccaagacctccttcagcatcatgcagacctaacctgtacaacaactctcgatctcacggatggcaccatcaccttcaacaacaacctcggaactgggactgaggccaaccaagcctatagtgtccccacaaaaatgggatccaaactggaagacatcctgatggacgacaccctttctcccgtcggtgtcactgatccactcctttcctcagtgtcccccggagcttccaaaacaagcagccggaggagcagtatgagcatggaagagacggagcacacttgt

SEQ ID NO: 5987 - DNA, 867 bp, Homo sapiens
  source 1..867: mol_type = genomic DNA
atgagttcgtacttcgtgaacccgctgtactccaagtacaaggcggcggctgcggcggcggcggcggcgggcgaggccatcaatcccacttactacgactgtcacttcgcgcccgaggtcggcggccgtcacgccgccgccgcagcagccctgcagctctatggcaacagcgccgccggcttcccgcacgcgcccccgcaggcgcacgcgcacccgcacccgtccccgccgccctccgggactgggtgcggcggtagggaaggccggggccaggagtacttccaccccggcgggggcagcccggccgctgcctaccaggccgccccccctcctcctccgcatcctccgcctccgccgccacctcccccctgcggcgggattgcctgtcacggggagcccgcgaagttttacggatacgataacttacagagacagccgatttttacgacccagcaagaggccgagctggtacaatatcctgactgtaaatcgtccagtggtaatattggcgaggacccagaccacttaaatcagagctcgtctccttctcaaatgtttccgtggatgagaccacaagctcctggtagacgaagaggaagacaaacctacagtcgcttccaaactctagagttggaaaaggaatttctttttaacccctatctgaccaggaaaagaagaatcgaggtttcccacgccctagccctcaccgagagacaggtaaaaatctggttccagaacaggagaatgaaatggaaaaaggaaaacaacaaggacaaatttcccgtttcccggcaggaggtgaaggacggggaaacgaaaaaggaagcccaagagctggaggaagacagagccgaaggcctgacaaat

SEQ ID NO: 5988 - DNA, 318 bp, Homo sapiens
  source 1..318: mol_type = genomic DNA
atgtttccgtggatgagaccacaagcagctcctggtagacgaagaggaagacaaacctacagtcgcttccaaactctagagttggaaaaggaatttctttttaacccctatctgaccaggaaaagaagaatcgaggtttcccacgccctagccctcaccgagagacaggtaaaaatctggttccagaacaggagaatgaaatggaaaaaggaaaacaacaaggacaaatttcccgtttcccggcaggaggtgaaggacggggaaacgaaaaaggaagcccaagagctggaggaagacagagccgaaggcctgacaaat

SEQ ID NO: 5989 - DNA, 870 bp, Homo sapiens
  source 1..870: mol_type = genomic DNA
atgagttcgtacttcgtgaacccgctgtactccaagtacaaggcggcggctgcggcggcggcggcggcgggcgaggccatcaatcccacttactacgactgtcacttcgcgcccgaggtcggcggccgtcacgccgccgccgcagcagccctgcagctctatggcaacagcgccgccggcttcccgcacgcgcccccgcaggcgcacgcgcacccgcacccgtccccgccgccctccgggactgggtgcggcggtagggaaggccggggccaggagtacttccaccccggcgggggcagcccggccgctgcctaccaggccgccccccctcctcctccgcatcctccgcctccgccgccacctcccccctgcggcgggattgcctgtcacggggagcccgcgaagttttacggatacgataacttacagagacagccgatttttacgacccagcaagaggccgagctggtacaatatcctgactgtaaatcgtccagtggtaatattggcgaggacccagaccacttaaatcagagctcgtctccttctcaaatgtttccgtggatgagaccacaagcagctcctggtagacgaagaggaagacaaacctacagtcgcttccaaactctagagttggaaaaggaatttctttttaacccctatctgaccaggaaaagaagaatcgaggtttcccacgccctagccctcaccgagagacaggtaaaaatctggttccagaacaggagaatgaaatggaaaaaggaaaacaacaaggacaaatttcccgtttcccggcaggaggtgaaggacggggaaacgaaaaaggaagcccaagagctggaggaagacagagccgaaggcctgacaaat

SEQ ID NO: 5990 - DNA, 2046 bp, Homo sapiens
  source 1..2046: mol_type = genomic DNA
atgcccagcctcagaactcgccgtgaggaggcagagatggagctctcagttccaggaccatccccctggacccctgcagcccaggcccgtgtgagagatgctcctgctgtgacccaccctggatctgcagcctgtggtaccccctgctgtagtgatactgagctggaagccatctgccctcactatcagcagccagattgtgacaccaggactgaagacaaggagtttcttcacaaggaagacattcatgaagatttggaatcacaggcagaaatatcagaaaactatgctggtgatgtttcccaggtacccgagcttggagatctgtgtgatgatgtatcagaaagagactggggagtccccgaaggcaggaggctgccacagtccctctcccaggagggggacttcacaccagctgccatggggctccttaggggccccttaggggagaaagatctggactgtaatggttttgacagtcgcttcagtctgagcccaaacctgatggcatgtcaggaaatccctacagaagagaggccacatccatatgacatgggtggccagagtttccagcacagtgtggacctaactggtcatgagggggttcccacagctgaaagtccactcatatgtaatgagtgtgggaaaaccttccaaggaaatcctgaccttattcagcgtcaaatagtccacactggggaggcttcctttatgtgtgatgattgtgggaaaaccttcagccagaactcagttcttaaaaaccgtcatcgatctcatatgagtgagaaagcttaccagtgcagcgaatgtgggaaagccttccgagggcactcagacttttctaggcatcagagtcaccacagcagtgagaggccttatatgtgtaatgaatgtggaaaagccttcagccagaactcgagccttaaaaagcaccaaaagtctcacatgagtgagaagccctatgaatgcaatgaatgtgggaaggcttttaggcggagctcaaacctcatccaacatcaaagaatccattctggggagaaaccgtatgtgtgcagtgagtgtgggaaggccttcaggcgaagctcaaacctcatcaaacaccacaggactcacacaggagagaagccttttgagtgtggcgagtgtgggaaagccttcagccagagtgcacacctgaggaagcaccagagggtccacactggagagaagccttatgagtgtaatgattgtggcaagcccttcagtcgggtctccaacctcattaagcaccacagggttcacactggagagaagccctataagtgcagtgactgtgggaaagcatttagtcagagctccagccttattcagcatcggagaattcacactggagaaaagcctcacgtgtgtaatgtatgtggaaaagcctttagttatagctcagtgctccgaaagcaccagatcatccacacgggagagaagccgtacagatgcagtgtctgtgggaaggccttcagccacagctcagccctcattcagcaccagggcgtgcacacaggcgacaagccctacgcctgccacgagtgtgggaagacctttggtcgcagctccaacctcatccttcaccagcgagtccacactggagagaagccctatgaatgtactgaatgtggaaaaaccttcagccagagctcaaccctcattcagcatcagaggattcataatgggctgaagccccatgaatgtaaccagtgtggtaaagccttcaaccgaagctcaaatctcattcaccaccagaaagttcatactggggaaaaaccctacacctgtgttgaatgtggtaagggcttcagccagagctcacacctcattcagcatcagataatccacacgggcgagcgcccctacaaatgcagtgagtgtgggaaagccttcagtcagcgttcggtcctcatccagcaccagaggattcacactggggtgaagccctatgactgtgctgcttgtgggaaagccttcagccagcgatcaaagttgatcaaacaccagttgattcacaccagggaa

SEQ ID NO: 5991 - DNA, 1986 bp, Homo sapiens
  source 1..1986: mol_type = genomic DNA
atgaacctgactgaggattatatggtttttgaggacgtggccatacatttctcccaggaggagtggggaattcttaatgacgttcagagacacctgcacagcgatgtgatgctggagaactttgcacttttgtcctcagtaggttgttggcatggagccaaggatgaggaggcaccttccaagcaatgtgtttctgtaggagtgtcacaggtcacaactttaaagccagctttgtccacccagaaggcccagccctgtgagacatgtagctcacttctgaaggacattctacacctggctgagcatgacggaacacaccccaagcgtacagccaagctttacctgcaccaaaaggagcatcttagagagaagctcaccagaagtgatgaagggaggccttcgtttgtgaatgacagtgttcacctggcaaagaggaacctcacatgcatgcagggtggcaaggattttactggtgattcagatcttcaacaacaggctcttcacagtgggtggaagccacacagggacactcatggtgtggaggcctttcaaagtggacagaataattacagctgcacccaatgtgggaaagacttttgccaccaacatacactgtttgagcaccagaaaatccacacagaggaaaggccttatgagtgcagtgaatgtggcaaattgtttaggtacaactccgaccttattaaacatcagcgaaatcatactggagaaaggccttataagtgtagtgaatgtggaaaagccttcagcctcaaatacaatgttgttcaacaccagaaaattcacactggagaaaggccttatgagtgcagtgaatgtgggaaagcttttcttagaaagtctcacctacttcagcaccagaggattcacaccaggccaaggccttatgtgtgtagtgaatgtgggaaggccttccttacacaggctcaccttgttggtcaccagaaaattcatactggagaacggccttatggatgcaatgaatgtgggaaatactttatgtacagttcagcactcattagacatcagaaagttcacactggagaaaggcctttttattgctgtgaatgtgggaaattctttatggacagctgcacactcattattcaccagagagttcatactggagaaaaaccttatgaatgcaacgaatgtgggaaattctttagataccgttccacactcattagacatcagaaagttcacactggagaaaagccttatgagtgtagtgaatgtgggaagttctttatggacacttccacactcattattcatcagagagttcatactggagaaaagccttatgaatgcaacaaatgtgggaaattctttaggtattgcttcacactgaatagacatcagagagttcactctggagagaggccttatgaatgcagtgaatgtggcaaattctttgtggacagctgtacactgaagagtcatcagagagttcacactggagaaagaccttttgaatgcagcatttgtgggaaatcctttagatgtcgctccacacttgatacacatcagagaattcacactggtgaaaggccttatgagtgtagtgaatgtgggaaattctttaggcacaactcaaatcatattagacatcggagaaatcactttggagaaaggtcttttgagtgcactgagtgtgggagagtttttagccaaaattcccacctcattcggcaccaaaaagttcacactagggaaagaacttacaaatgcagcaaatgtgggaaattttttatggacagctccacactcattagtcatgagagagttcatactggagaaaagccttatgagtgcagtgaatgtgggaaagtctttagatacaactccagcctcattaaacatcggagaattcacactggagagagaccttatcagtgcagtgaatgtggaagagtctttaaccaaaattctcatctcattcagcaccagaaagttcacaccaga

SEQ ID NO: 5992 - DNA, 1992 bp, Homo sapiens
  source 1..1992: mol_type = genomic DNA
atgcttatggatgctggacaggattatatggtttttgaggacgtggccatacatttctcccaggaggagtggggaattcttaatgacgttcagagacacctgcacagcgatgtgatgctggagaactttgcacttttgtcctcagtaggttgttggcatggagccaaggatgaggaggcaccttccaagcaatgtgtttctgtaggagtgtcacaggtcacaactttaaagccagctttgtccacccagaaggcccagccctgtgagacatgtagctcacttctgaaggacattctacacctggctgagcatgacggaacacaccccaagcgtacagccaagctttacctgcaccaaaaggagcatcttagagagaagctcaccagaagtgatgaagggaggccttcgtttgtgaatgacagtgttcacctggcaaagaggaacctcacatgcatgcagggtggcaaggattttactggtgattcagatcttcaacaacaggctcttcacagtgggtggaagccacacagggacactcatggtgtggaggcctttcaaagtggacagaataattacagctgcacccaatgtgggaaagacttttgccaccaacatacactgtttgagcaccagaaaatccacacagaggaaaggccttatgagtgcagtgaatgtggcaaattgtttaggtacaactccgaccttattaaacatcagcgaaatcatactggagaaaggccttataagtgtagtgaatgtggaaaagccttcagcctcaaatacaatgttgttcaacaccagaaaattcacactggagaaaggccttatgagtgcagtgaatgtgggaaagcttttcttagaaagtctcacctacttcagcaccagaggattcacaccaggccaaggccttatgtgtgtagtgaatgtgggaaggccttccttacacaggctcaccttgttggtcaccagaaaattcatactggagaacggccttatggatgcaatgaatgtgggaaatactttatgtacagttcagcactcattagacatcagaaagttcacactggagaaaggcctttttattgctgtgaatgtgggaaattctttatggacagctgcacactcattattcaccagagagttcatactggagaaaaaccttatgaatgcaacgaatgtgggaaattctttagataccgttccacactcattagacatcagaaagttcacactggagaaaagccttatgagtgtagtgaatgtgggaagttctttatggacacttccacactcattattcatcagagagttcatactggagaaaagccttatgaatgcaacaaatgtgggaaattctttaggtattgcttcacactgaatagacatcagagagttcactctggagagaggccttatgaatgcagtgaatgtggcaaattctttgtggacagctgtacactgaagagtcatcagagagttcacactggagaaagaccttttgaatgcagcatttgtgggaaatcctttagatgtcgctccacacttgatacacatcagagaattcacactggtgaaaggccttatgagtgtagtgaatgtgggaaattctttaggcacaactcaaatcatattagacatcggagaaatcactttggagaaaggtcttttgagtgcactgagtgtgggagagtttttagccaaaattcccacctcattcggcaccaaaaagttcacactagggaaagaacttacaaatgcagcaaatgtgggaaattttttatggacagctccacactcattagtcatgagagagttcatactggagaaaagccttatgagtgcagtgaatgtgggaaagtctttagatacaactccagcctcattaaacatcggagaattcacactggagagagaccttatcagtgcagtgaatgtggaagagtctttaaccaaaattctcatctcattcagcaccagaaagttcacaccaga

SEQ ID NO: 5993 - DNA, 2091 bp, Homo sapiens
  source 1..2091: mol_type = genomic DNA
atgaataaatccctggggccagtgtcattcaaggacgtggctgtggacttcacccaggaggaatggcagcagctggatcctgagcagaagataacttacagggatgtgatgctggagaactacagcaatctagtttctgtggggtatcacattatcaaaccggatgttatcagcaagttggagcaaggagaagagccatggatagtagaaggagaattcctacttcagagctatccagatgaagtctggcaaactgatgacctaatagagagaatccaggaagaggaaaataaaccttcaaggcaaactgtgttcattgagaccctgattgaagagagaggtaatgttcctggtaaaacttttgatgtagaaacgaaccctgttccttcaagaaaaatagcctataaaaatagcctctgtgactcatgtgaaaagtgtttaacgtctgtttcagaatatattagtagtgatggaagctatgcaagaatgaaagctgatgaatgtagtggatgtgggaaatcactcctccatattaagcttgagaaaactcatccaggagatcaagcttatgaatttaatcaaaatggggaaccttatactctaaatgaagaaagtctttatcagaaaattcgtattttggagaaaccttttgaatatattgaatgccagaaagccttccaaaaggacactgtttttgttaatcacatggaagaaaagccctataagtggaatggatctgaaatagcctttctccagatgtcggacctcactgtacatcagacatctcatatggaaatgaagccctatgaatgcagtgaatgtgggaaatccttctgtaaaaagtcaaaatttattatacatcagaggactcacacaggagagaaaccttacgaatgtaatcagtgtgggaaatccttctgccagaagggaacccttactgtgcatcagagaacacacacaggggagaagccctatgaatgtaatgaatgtgggaagaacttttaccagaagttacacctcattcagcatcagagaactcactcaggagagaagccctatgaatgtagttattgtggaaaatccttttgccagaagacacacctcacacaacatcagagaacacattcaggagagagaccttatgtttgtcatgactgtgggaaaaccttctcgcagaagtcagcacttaatgaccatcagaaaattcacacaggtgtgaaactctacaagtgtagtgaatgtgggaaatgcttctgccgcaagtctactctcacgacccacctgaggacccacacaggagagaaaccgtatgaatgtaatgagtgtggaaaattcttctctcggttgtcatatctcactgtacattatagaactcattcaggagagaaaccctatgaatgtaatgaatgtggaaaaaccttctacctgaattcagccctcatgagacatcagagagtgcacacaggagagaaaccttacgaatgtaatgaatgtggaaagttattctcccagttgtcatacctcactatccatcatagaactcattcaggagtaaaaccctatgaatgtagtgaatgtgggaaaaccttctaccagaactcagccctttgtagacatcggagaatacacaaaggagagaagccctatgaatgctatatatgtggaaaattcttctctcagatgtcatacctcactatacatcatagaattcattcaggagagaagccctatgaatgtagtgaatgtgggaaaaccttctgccagaattcagcccttaatcgacatcagagaacacacacaggagagaaagcctacgaatgttatgaatgtgggaagtgcttctctcagatgtcctatctcactatacatcatcgaattcattcaggagagaaaccctttgaatgtaatgagtgtggaaaagccttctctcggatgtcatacctcactgtacattatagaactcattcaggagagaaaccctatgagtgtactgaatgtggaaaaaaattctaccacaaatcagcattcaacagccatcagagaattcataggagaggcaatatgaatgtaatagatgtgggaaggcttctc

SEQ ID NO: 5994 - DNA, 1977 bp, Homo sapiens
  source 1..1977: mol_type = genomic DNA
atgaataaatccctggggccagtgtcattcaaggacgtggctgtggacttcacccaggaggaatggcagcagctggatcctgagcagaagataacttacagggatgtgatgctggagaactacagcaatctagtttctgtggggtatcacattatcaaaccggatgttatcagcaagttggagcaaggagaagagccatggatagtagaaggagaattcctacttcagagctatccagatgaagtctggcaaactgatgacctaatagagagaatccaggaagaggaaaataaaccttcaaggcaaactgtgttcattgagaccctgattgaagagagagaatatattagtagtgatggaagctatgcaagaatgaaagctgatgaatgtagtggatgtgggaaatcactcctccatattaagcttgagaaaactcatccaggagatcaagcttatgaatttaatcaaaatggggaaccttatactctaaatgaagaaagtctttatcagaaaattcgtattttggagaaaccttttgaatatattgaatgccagaaagccttccaaaaggacactgtttttgttaatcacatggaagaaaagccctataagtggaatggatctgaaatagcctttctccagatgtcggacctcactgtacatcagacatctcatatggaaatgaagccctatgaatgcagtgaatgtgggaaatccttctgtaaaaagtcaaaatttattatacatcagaggactcacacaggagagaaaccttacgaatgtaatcagtgtgggaaatccttctgccagaagggaacccttactgtgcatcagagaacacacacaggggagaagccctatgaatgtaatgaatgtgggaagaacttttaccagaagttacacctcattcagcatcagagaactcactcaggagagaagccctatgaatgtagttattgtggaaaatccttttgccagaagacacacctcacacaacatcagagaacacattcaggagagagaccttatgtttgtcatgactgtgggaaaaccttctcgcagaagtcagcacttaatgaccatcagaaaattcacacaggtgtgaaactctacaagtgtagtgaatgtgggaaatgcttctgccgcaagtctactctcacgacccacctgaggacccacacaggagagaaaccgtatgaatgtaatgagtgtggaaaattcttctctcggttgtcatatctcactgtacattatagaactcattcaggagagaaaccctatgaatgtaatgaatgtggaaaaaccttctacctgaattcagccctcatgagacatcagagagtgcacacaggagagaaaccttacgaatgtaatgaatgtggaaagttattctcccagttgtcatacctcactatccatcatagaactcattcaggagtaaaaccctatgaatgtagtgaatgtgggaaaaccttctaccagaactcagccctttgtagacatcggagaatacacaaaggagagaagccctatgaatgctatatatgtggaaaattcttctctcagatgtcatacctcactatacatcatagaattcattcaggagagaagccctatgaatgtagtgaatgtgggaaaaccttctgccagaattcagcccttaatcgacatcagagaacacacacaggagagaaagcctacgaatgttatgaatgtgggaagtgcttctctcagatgtcctatctcactatacatcatcgaattcattcaggagagaaaccctttgaatgtaatgagtgtggaaaagccttctctcggatgtcatacctcactgtacattatagaactcattcaggagagaaaccctatgagtgtactgaatgtggaaaaaaattctaccacaaatcagcattcaacagccatcagagaattcataggagaggcaatatgaatgtaatagatgtgggaaggcttctc

SEQ ID NO: 5995 - DNA, 678 bp, Homo sapiens
  source 1..678: mol_type = genomic DNA
atggaagcagaaaggaggcgccaggctgagaagccaaagaaggggcgagtcggcagcaacctgttgcctgagagacacccggccactgggaccccgaccaccacggtggactcgagtgctccaccctgcagaaggctccctggtgcaggaggggggagatcaaggttctccccgcaaggaggacagaggggccgcccgcactcccggcgccgccaccgcaccaccttcagcccagtgcagttggaacagctggagtcagcctttgggaggaaccagtaccccgacatctgggcccgagagagtcttgcccgggacactggcctcagtgaggcccgaatccaggtctggttccagaaccgcagagctaagcaacggaagcaagagcgctcactgcttcagcctctggcccatctgtctcctgccgccttttccagcttcttgccagagtccactgcttgcccctattcttacgcagcaccaccaccaccagtgacctgcttccctcacccctacagccatgccctcccttcccagccctccacaggaggcgcctttgctttgtcacaccagtctgaggactggtaccctaccttgcacccagcccctgccggccatctgccctgccccccaccccctcccatgctccccctcagccttgagccatccaagtcctggaac

SEQ ID NO: 5996 - DNA, 1704 bp, Homo sapiens
  source 1..1704: mol_type = genomic DNA
atggcacaagtggactcccaggacaggtggggagaggcgtctcctctcagcagcttgactgaggaagctcatgacacccagatgctgagcatgaacttagagagtgacgatgaagatggtggggaggccgaaaaagagggcaccgctgacccggtggcctgtccaaggggcagctccccagtaacacacgaaaatcctgacttgccatggccccatccactgggcaaagaggaagagaaattctctgactcctccagtgctgggggcatggggcagaaaccagtggaaatgtctgggaaagccagttggagcagagatgtgacaaagatcaacgagacccagggttccccgggagcaagcagagctctgggttcccttcccagtggtctcgcacacaaattgttaggtcagatgcaacctcttggggaccgactacctgcgggtgatgatggatactcgggggcaaaccaggacgcagtcttggatgtcccacccagcttccccagcaatggaaagtatctctgtgcgcacaaaagtgtagacacgtccgcagggaactcttctctgttgtgtttccccaggccggggagcaactgggaccttcccacgcaagagacacatacaccagcccaggcgtcggccaccccagccagcctggctgccgcggtcctggcaaaagcgcggaacagcaggaaagtacagaaccaggcgggccggcgcgagggcggagaggctgaggcgcgtccctacaggtgcctgcggggcgggcgggcctttcagaagcccagcaagccgctgagccccgcggagacgcgcggcggcgccgccaagcgctacgcgtgcgagctatgcgggaaggcctactcccaccgcggcacactccagcagcacaggcgcctgcacacgggcgagcggccctaccagtgctccttctgcgacaaggcctacacctggtcctccgaccaccggaagcacatccgcacccacacaggcgagaaaccctacccgtgtccagactgcgggaaggccttcgtgcgctcttcggacctgcgcaaacaccagcgcaacatgcacagcaacaataagcccttcccgtgctccgagtgcggcctgaccttcaacaagccgctgtcgctgctgcgccaccagcgcacgcacctgggcgccaagcccttccgctgccccgcctgcgaccgggagttcgctgtggccagccgcatggtggagcaccagcgcgtgcactcgggcgagcggcccttcccctgccccacctgcggcaagtgcttcaccaagtcctccaatctgtccgagcaccagacgctgcacaccggccagaggcctttcaagtgcgctgactgcggcgtggccttcgcgcagccctcgcgcctcgtgcgccaccagcgcatccacactggcgagaggccctttccttgcacgcagtgtggccaggcctttgcccgctcttcgaccctgaagcggcaccaacagatccactccggggagaagggattcctctgtgccgagtgcggcagggccttccgcattgcctctgagttggcccagcacatacgaatgcacaacggagagaggccctaccagtgtgaggactgcggccaggccttcaccaggtccaatcacctccaacgacaccgagccaagcacggcacctgcaagaaggagcccatcccttcctcctctgacgag

SEQ ID NO: 5997 - DNA, 1515 bp, Homo sapiens
  source 1..1515: mol_type = genomic DNA
atgacaaaggcccaggaatcactgaccctggaggatgtggctgtggacttcacctgggaggagtggcagttcctgagccctgctcagaaggacctgtaccgggatgtgatgttggagaactacagcaaccttgtgtcagtggggtatcaagccggcaaacctgatgccctcaccaagttggaacaaggagaaccactatggacactagaagatgaaatccacagtccagcccacccagaaattgagaaagctgatgatcatctgcagcagcccttgcaaaaccaaaaaatactgaagaggacgggacaacgctatgaacacggaagaactttgaaatcatatttaggtttaaccaaccagagcagaagatacaacagaaaggagcctgctgagtttaatggagatggagcttttctccatgataatcatgaacaaatgcctacggaaattgaattccctgaaagtagaaaacccatcagcaccaagtcacaattccttaaacatcagcaaacacacaacatagagaaagcccatgaatgcactgactgtgggaaagctttcctcaagaagtctcagctcactgagcataagagaattcatacaggaaagaaaccccacgtgtgtagcttgtgtgggaaagccttctacaagaagtacaggctcactgaacacgagagagctcacagaggagagaaaccccacgggtgtagcttgtgtgggaaagccttctacaagaggtacaggctcactgaacacgagagagctcacaaaggagagaaaccatacgggtgcagtgaatgtgggaaagccttccccaggaaatctgagcttactgaacatcaaaggattcacacgggaattaagccccatcaatgcagcgaatgtgggagagctttctccagaaaatcactactcgttgtacatcagcgaactcatacaggagagaagcctcatacatgcagtgaatgtggaaaaggcttcattcagaagggcaatctcaacatacatcaacgaactcacactggagagaaaccttatggatgcattgactgtggcaaggccttcagccagaagtcttgccttgtagcacatcagagatatcatacaggaaagactccctttgtatgtcctgaatgtgggcaaccctgttcacagaagtcaggactcattagacatcagaaaattcactcaggagagaaaccctataaatgcagtgactgtgggaaagccttccttacaaagacaatgctcattgtacatcacagaactcacacgggagagagaccctatggctgtgatgagtgtgagaaagcttacttctatatgtcttgccttgttaaacataagagaatacactcaagggagaaacggggggattcagtgaaggtggaaaatccttccacagcaagtcacagcttaagtcctagtgaacatgtgcaggggaaaagccctgttaatatggtaactgtggcaatggtggcagggcagtgtgagtttgcccacatcctgcattca

SEQ ID NO: 5998 - DNA, 3981 bp, Homo sapiens
  source 1..3981: mol_type = genomic DNA
atgagatcgttcttgcagcaagatgttaataagacaaaatctagactaaatgtgttaaatgggcttgccaacaatatggatgatttgaagataaacaccgatattactggtgctaaagaagaactcctagatgacaacaattttatctcagacaaagagagcggagttcataagccaaaagattgtcaaacatcatttcagaaaaataatacgttgactctgcctgaagaactgtcaaaggacaaatctgaaaacgccttaagtggaggccagtctagtctatttatacatgctggtgctcctactgtttctagtgaaaactttatcttgcctaaaggagctgctgttaatggaccagtttcacactcctccttaactaagacttccaatatgaataaaggcagtgtttcattaaccactggacagcctgtggatcagccaacaacagaatcttgttcaactttgaaggtagcagctgatcttcagctgtctacaccacagaaagcaagtcaacaccaagttttatttttgttatcagatgtagcacatgctaagaatcccacccattccaataaaaaactacctacctctgcttcagttggttgtgacattcagaattcagtagggagtaatataaagtcagatggcactttaataaatcaagtagaggtgggtgaggatggtgaagatttattggtgaaagatgattgtgtcaatacagtaacgggaatttcctcaggtacagatggatttaggtcagaaaatgatacaaactgggatccccaaaaagagttcattcaatttcttatgactaatgaggaaacagtagataaagctccacctcattctaaaataggtctagaaaaaaaaagaaagcgaaaaatggatgtaagcaagataactcgttataccgaggattgctttagtgattctaattgtgtacccaataaatcaaaaatgcaagaagtagactttctagaacaaaatgaagagctacaagcagtagactcacagaaatatgcattatcaaaagtgaagcctgaatcaactgatgaagacttagaatctgtggatgccttccaacatctaatttataacccagataagtgtggagaagagagttcacctgttcatactagcacttttctttcaaataccttaaaaaagaaatgtgaagagagtgattctgagtcacctgctactttcagtaccgaagagccatcattctacccctgtacaaagtgcaatgtgaattttagggagaagaagcacctccacaggcatatgatgtatcatttagatgggaatagtcactttcgccatcttaatgtcccaaggccatatgcttgtagagaatgtggacggacatttcgagatcgcaattcacttctaaaacatatgattattcaccaggagagaagacagaagttgatggaggaaattcgtgaattgaaagaacttcaggatgaaggaagaagtgcacgattacagtgtcctcagtgtgtgtttggtaccaattgccctaaaacatttgtgcaacatgctaaaacccatgaaaaagataaaaggtactactgctgtgaagagtgtaacttcatggcagtgacagaaaatgaattggaatgccatcgaggcattgcacatggggcagtggtaaaatgccctatggtcacttctgatattgcccagagaaaaacacaaaaaaagactttcatgaaagactctgtagtaggatcatccaaaaaatcagctacctacatatgtaagatgtgtccttttactacttcagccaaaagtgttttaaaaaagcacacggagtacttgcattcatcatcatgtgttgattcatttggtagtcctcttggacttgataaaagaaaaaatgacatccttgaagaacctgtagatagtgatagcactaaaacattaactaaacaacagtcaaccacatttccaaagaactctgctttaaaacaagatgtgaagcgaacatttggatcaacctcacaatcaagtagtttttcaaaaattcataagcggccacacagaatacagaaagctcggaaaagcattgcccaatcaggtgtaaacatgtgcaatcaaaacagctctcctcataagaatgttacaattaaaagcagcgttgaccaaaaacctaagtatttccatcaagcagcaaaagaaaagtctaatgccaaggcaaatagccactatttgtatagacacaaatatgaaaactataggatgatcaaaaaatcaggtgaatcatatcctgtgcatttcaaaaaagaagaagctagttcattaaattctttacacctgttttcatcatcaagtaattctcacaacaattttatttcagaccctcataagcctgacgccaaaaggcctgaaagcttcaaagatcacagacgtgtagctgtaaagagagtaattaaggaatctaagaaggaaagttctgttggaggggaagacttggatagctatccagattttttgcataaaatgactgttgtcgttttgcaaaaacttaattctgctgaaaagaaagatagttatgaaacagaagatgaaagttcctgggataatgttgagttaggagactacactacacaggccatagaagatgaaacctatagtgatattaatcaagagcatgtaaatttattccctttatttaagagcaaagtggaaggtcaggagcctggagaaaatgctactcttagttatgaccaaaacgatggcttttattttgaatactatgaagatactggaagtaacaactttttgcatgagatacatgatcctcagcatttagaaactgcagatgcttcattgtcaaagcatagttctgtttttcattggactgatttgtctcttgagaagaaatcgtgtccttactgcccagcaacatttgaaacaggtgttgggttatcaaatcatgtcagggggcatcttcacagagcaggattaagctatgaagcccgtcatgttgtatcaccagaacaaatagccacaagtgacaaaatgcagcatttcaaaagaactggcacaggaacacctgttaaacgagttagaaaagctatagagaagtctgaaaccacttctgaacacacttgtcagctctgtggtggttggtttgatactaaaattggattatcaaatcatgttagaggccacttgaaaagacttggaaagacgaaatgggatgctcacaaatctccaatctgtgttctgaatgagatgatgcaaaatgaagaaaaatatgaaaaaatcttaaaggcattgaacagtcgtcgtattattcccagaccatttgtagctcaaaaacttgcatcaagtgatgactttatatctcaaaatgttatacctcttgaagcataccgtaatggcctaaagactgaagctctgtcagtgtctgcatcagaagaagaagggctgaatttcttaaatgaatatgatgaaacaaaaccagaactgcccagtgggaaaaagaatcagtctcttacactcatagaacttcttaaaaataaaaggatgggagaagaaaggaattctgctatttctcctcaaaagatccataatcagacagcaagaaagagattcgttcagaaatgcgttcttccattaaatgaggatagtccgttgatgtatcagccacaaaaaatggacttgactatgcactcagccttagattgtaagcaaaagaaatcaaggtcaagatctggaagcaagaagaaaatgctaacattacctcatggtgctgacgaggtttacattctccgatgcaggttttgtggcctagtctttcgaggacccttgtctgttcaggaagactggattaagcacttacaacgacatattgtaaacgctaatcttccacggactggagctggcatggtggaagtcacgtcactacttaaaaagcctgcctccattacagaaacttcattttctctactaatggccgaagcagcttca

SEQ ID NO: 5999 - DNA, 315 bp, Homo sapiens
  source 1..315: mol_type = genomic DNA
atgttaataagacaaaatctagccttagattgtaagcaaaagaaatcaaggtcaagatctggaagcaagaagaaaatgctaacattacctcatggtgctgacgaggtttacattctccgatgcaggttttgtggcctagtctttcgaggacccttgtctgttcaggaagactggattaagcacttacaacgacatattgtaaacgctaatcttccacggactggagctggcatggtggaagtcacgtcactacttaaaaagcctgcctccattacagaaacttcattttctctactaatggccgaagcagcttca

SEQ ID NO: 6000 - DNA, 1245 bp, Homo sapiens
  source 1..1245: mol_type = genomic DNA
atgctttcagaacagacagcagcgctggggacaggatgggaatcaatgaatgtacagctggatggagcagagccccaggtggaaaggggaagccaggaagagcggccatggagaacagtaccaggacctctggagcacctgtgctgtgaccttgaagaggagccacagtcccttcaggagaaggctcagtctgctccctgggttcctgcaattccccaggaggggaacactggagactgggagatggcagctgcacttcttgcggctggatcacaggtgagctctgcttcccttggcgtctcctgtggtcccatcactgctgcctttgtattgctttcgcatcagcccattgatgagttggctcacatgatcatcaatggatttccaattcccaaactggacatgctttctcaactagaaggaggagaagaacaatgggtccctgacccccaggacttagaggagagggacattctgagggtcacatatacaggagatggaagtgaacatgagggggatacccctgaactagaagcagaacctcccagaatgttatccagcgtgtctgaagatactgttctctggaacccggagcatgatgagagctgggattccatgcccagcagctccagaggaatgctcctggggcccccttttcttcaggaagatagtttctcaaacctgctgtgtagcacagagatggattccctgttaagaccccacacatgcccccagtgtgggaaacagtttgtatggggttcccaccttgccaggcatcaacaaacacacactggggagagaccctacagctgcctcaagtgtgagaagacctttgggcgaagacatcacctcatcaggcaccagaaaacccacctacatgacaagaccagcaggtgctctgagtgtggtaagaatttccgatgcaactcccatctggccagccaccagagagtgcatgcagaaggcaaatcctgcaaaggccaagaggttggagagagccctggcacaaggaaacggcagcgtgccccaccagtgccaaagtgtcacgtgtgcactgaatgtgggaagagctttggccgaaggcaccaccttgtgagacactggctgacccacactggggagaagcccttccagtgccctcgctgtgagaagagctttggccgaaaacatcacctggacaggcacctgctcacccaccagggacaaagtccccggaacagctgggacagaggaacatctgtcttt

SEQ ID NO: 6001 - DNA, 1314 bp, Homo sapiens
  source 1..1314: mol_type = genomic DNA
atgcaagctgaggacaggtcacaatttgggtctgcagcagaaatgctttcagaacagacagcagcgctggggacaggatgggaatcaatgaatgtacagctggatggagcagagccccaggtggaaaggggaagccaggaagagcggccatggagaacagtaccaggacctctggagcacctgtgctgtgaccttgaagaggagccacagtcccttcaggagaaggctcagtctgctccctgggttcctgcaattccccaggaggggaacactggagactgggagatggcagctgcacttcttgcggctggatcacagggcctggtaaccatcaaggatgtgtcactgtgcttctctcaggaggagtggcggagcctggacccctctcagacagacttttatggagaatatgtcatgcaggaaaactgtgggatagtagtctctctgagatttccaattcccaaactggacatgctttctcaactagaaggaggagaagaacaatgggtccctgacccccaggacttagaggagagggacattctgagggtcacatatacaggagatggaagtgaacatgagggggatacccctgaactagaagcagaacctcccagaatgttatccagcgtgtctgaagatactgttctctggaacccggagcatgatgagagctgggattccatgcccagcagctccagaggaatgctcctggggcccccttttcttcaggaagatagtttctcaaacctgctgtgtagcacagagatggattccctgttaagaccccacacatgcccccagtgtgggaaacagtttgtatggggttcccaccttgccaggcatcaacaaacacacactggggagagaccctacagctgcctcaagtgtgagaagacctttgggcgaagacatcacctcatcaggcaccagaaaacccacctacatgacaagaccagcaggtgctctgagtgtggtaagaatttccgatgcaactcccatctggccagccaccagagagtgcatgcagaaggcaaatcctgcaaaggccaagaggttggagagagccctggcacaaggaaacggcagcgtgccccaccagtgccaaagtgtcacgtgtgcactgaatgtgggaagagctttggccgaaggcaccaccttgtgagacactggctgacccacactggggagaagcccttccagtgccctcgctgtgagaagagctttggccgaaaacatcacctggacaggcacctgctcacccaccagggacaaagtccccggaacagctgggacagaggaacatctgtcttt

SEQ ID NO: 6002 - DNA, 1272 bp, Homo sapiens
  source 1..1272: mol_type = genomic DNA
atgctttcagaacagacagcagcgctggggacaggatgggaatcaatgaatgtacagctggatggagcagagccccaggtggaaaggggaagccaggaagagcggccatggagaacagtaccaggacctctggagcacctgtgctgtgaccttgaagaggagccacagtcccttcaggagaaggctcagtctgctccctgggttcctgcaattccccaggaggggaacactggagactgggagatggcagctgcacttcttgcggctggatcacagggcctggtaaccatcaaggatgtgtcactgtgcttctctcaggaggagtggcggagcctggacccctctcagacagacttttatggagaatatgtcatgcaggaaaactgtgggatagtagtctctctgagatttccaattcccaaactggacatgctttctcaactagaaggaggagaagaacaatgggtccctgacccccaggacttagaggagagggacattctgagggtcacatatacaggagatggaagtgaacatgagggggatacccctgaactagaagcagaacctcccagaatgttatccagcgtgtctgaagatactgttctctggaacccggagcatgatgagagctgggattccatgcccagcagctccagaggaatgctcctggggcccccttttcttcaggaagatagtttctcaaacctgctgtgtagcacagagatggattccctgttaagaccccacacatgcccccagtgtgggaaacagtttgtatggggttcccaccttgccaggcatcaacaaacacacactggggagagaccctacagctgcctcaagtgtgagaagacctttgggcgaagacatcacctcatcaggcaccagaaaacccacctacatgacaagaccagcaggtgctctgagtgtggtaagaatttccgatgcaactcccatctggccagccaccagagagtgcatgcagaaggcaaatcctgcaaaggccaagaggttggagagagccctggcacaaggaaacggcagcgtgccccaccagtgccaaagtgtcacgtgtgcactgaatgtgggaagagctttggccgaaggcaccaccttgtgagacactggctgacccacactggggagaagcccttccagtgccctcgctgtgagaagagctttggccgaaaacatcacctggacaggcacctgctcacccaccagggacaaagtccccggaacagctgggacagaggaacatctgtcttt

SEQ ID NO: 6003 - DNA, 4134 bp, Homo sapiens
  source 1..4134: mol_type = genomic DNA
atgagcctggagcgcgagcttcgccagctgagcaaggcgaaagccaaggcgcagagggccgggcagcggcgcgaagaggccgcgctgtgccaccagctgggggagctcctggccggccatggccgctacgccgaggctctggagcagcactggcaggagctgcagcttcgggagcgcgctgacgaccctctgggctgtgccgtggcccaccgcaagatcggagagcgcctggccgagatggaggactacccggctgccttgcagcaccagcaccagtacctggagctggcacattccctgcgcaaccacacggagctgcagagggcctgggccaccatcggccgcacccacctggacatctatgaccactgccagtcgagggatgctttgctgcaggcacaggctgcctttgagaagagcttggctattgtggatgaggagctggaggggacactggcccagggagagctgaatgagatgaggacccgcctctatctcaacctgggcctcacctttgagagcctgcagcagacagccctgtgcaacgattacttcaggaagagcatcttccttgcggagcagaaccacctttacgaggacctattccgcgcccgctacaacctgggcaccatccactggcgcgcgggccagcactcccaggctatgcgctgcttggagggtgcccgggagtgtgcgcacaccatgaggaagcggttcatggagagcgagtgctgcgtggttattgcacaggtcctccaagacctgggagactttttggctgccaagcgagccctgaagaaggcctacaggctgggctcccagaagcctgtgcagagggcagccatctgtcagaacctccagcatgtgctggcagtggtccggctgcagcaacagctggaagaggctgagggcagagaccctcagggtgccatggtcatctgtgagcagctaggggacctcttctccaaggcaggagactttcccagggcagctgaggcttaccagaagcagctgcgttttgctgagctgctggacagaccgggtgctgagcgggccatcatccacgtgtccctggccaccacactgggagacatgaaggaccaccatggggccgtgcgccactatgaggaggaactgaggctgcgcagcggcaacgtgctggaggaggccaagacctggctgaacattgcactgtcccgcgaggaggccggcgatgcctacgagctgctggccccgtgcttccagaaagcgctcagctgtgcccagcaggcccagcgtccccagctgcagaggcaggtcttgcagcatctccataccgtgcagctgaggctgcagccccaggaggcccctgagaccgaaaccagactacgggagctcagtgtagctgaagatgaagatgaggaggaggaggcggaggaggcggcagccacagcggagagcgaagccctggaggccggcgaggtggagctctcagagggcgaggacgacaccgatggcctgaccccgcagctggaggaggacgaggagcttcagggccacctgggccggcggaaggggagcaagtggaaccggcgaaacgacatgggggagaccctgctgcaccgagcctgcatcgagggccagctgcgccgcgtccaggaccttgtgaggcagggccacccccttaaccctcgggactactgtggctggacacctctgcacgaggcctgcaactacgggcatctagaaattgtccgcttcctgctggaccacggggccgcagtggacgacccaggtggccagggctgcgaaggcatcacccccctccacgatgccctcaactgtggccacttcgaggtggctgagctgctgcttgaacggggggcgtccgtcaccctccgcactcgaaagggcctcagcccgctggagacgctgcagcagtgggtgaagctgtaccgcagggacctggacctggagacgcggcagaaggccagggccatggagatgctgctccaggcggctgcctcgggccaagatccccacagctcccaggccttccacaccccaagcagccttctgtttgaccccgagacctctcctcctttgagcccctgcccagaacccccctctaatagcactagactcccagaggcctctcaggcccatgtcagggtctccccagggcaggcggcaccagccatggccaggcctcggaggagcaggcatgggccagccagcagcagcagcagctcagaaggcgaggacagcgcaggccccgcacggccgtcccagaagaggcctcggtgctcggccacagcacaacgggtggcagcctggacgcctggccccgccagcaacagggaagcagccacagccagcaccagccgggcagcctaccaggcagccatccggggtgtgggcagtgctcagagccggctggggcctggcccaccgcggggccacagcaaagcccttgccccccaggcagcgctcatcccggaggaggagtgcctggccggggactggctggagctggacatgcccctgacccgcagccgccggccccgcccccggggcactggagacaaccgcaggcccagtagtacctctgggtcggacagtgaggagagcaggccccgtgcccgagccaagcaggtccgcctgacctgcatgcagagttgcagtgcgccagttaacgcagggcccagcagcctggcttcagaacctccagggagccccagcacccccagggtctcagagcccagtggggacagctctgcggcaggccagcccttgggtccggccccgccccctcccatccgggttcgagttcaagttcaggatcatctcttcctcatccctgtcccacacagcagtgacacccactctgtggcctggctggccgagcaggcggcccagcgctactaccagacctgcgggctgctgcccaggctcaccctacggaaagagggggccctgctggccccacaggacctcatccctgatgtgctgcagagcaatgacgaggtgttggctgaggtgacttcgtgggacctgcccccgttgactgaccgctaccgcagggcctgccagagcctggggcaaggggagcaccaacaggtgctgcaggccgtggagctccagggcttgggcctctcgttcagcgcctgctccctggccctggaccaggcccagcttacacccctgctgcgggccctcaagctgcacacagcactccgggagctgcgcctggcagggaaccggctgggggacaagtgtgtggctgagctggtggctgccctgggcaccatgcccagcctggccctccttgacctctcctccaatcacctgggtcccgaaggcctgcgccagcttgccatggggctcccaggccaagccaccttgcagagtttggaggagctggacttaagcatgaaccccctgggggacggctgtggccagtccctggcctccctcctgcacgcctgccccttactcagcaccctgcgcctgcaggcgtgtggcttcggccccagcttctttctgagccaccagacagcactgggtagtgctttccaagatgctgagcacctgaagaccctgtccctgtcctacaacgccctgggagcccctgccctggccaggaccctgcagagcctgcccgccggcaccctcctgcacttagagctcagctccgtggcagccggcaagggtgattcggacctcatggagcctgtattccgatacctggccaaggaaggctgtgctctagcccacctgaccctgtctgcaaaccacctgggggacaaggctgttagagacctgtgcagatgtctctctctgtgcccctcactcatctcactggatctgtctgccaaccctgagatcagctgtgccagcttggaagagctcctgtccaccctccaaaagcggccccaaggccttagcttccttggcctgtcaggctgcgccgtccagggtcccctgggcctgggcctgtgggacaagatagccgcgcagctccgggaactgcagctgtgcagcagacgcctctgcgctgaggacagggacgccctgcgccagctgcagcccagtcggccgggccccggcgagtgcacgctggaccacggctccaagctcttctttcggcgcctc

SEQ ID NO: 6004 - DNA, 981 bp, Homo sapiens
  source 1..981: mol_type = genomic DNA
atgaccatggaatctggagccgagaaccagcagagtggagatgcagctgtaacagaagctgaaaaccaacaaatgacagttcaagcccagccacagattgccacattagcccaggtatctatgccagcagctcatgcaacatcatctgctcccaccgtaactctagtacagctgcccaatgggcagacagttcaagtccatggagtcattcaggcggcccagccatcagttattcagtctccacaagtccaaacagttcagatttcaactattgcagaaagtgaagattcacaggagtcagtggatagtgtaactgattcccaaaagcgaagggaaattctttcaaggaggccttcctacaggaaaattttgaatgacttatcttctgatgcaccaggagtgccaaggattgaagaagagaagtctgaagaggagacttcagcacctgccatcaccactgtaacggtgccaactccaatttaccaaactagcagtggacagtatattgccattacccagggaggagcaatacagctggctaacaatggtaccgatggggtacagggcctgcaaacattaaccatgaccaatgcagcagccactcagccgggtactaccattctacagtatgcacagaccactgatggacagcagatcttagtgcccagcaaccaagttgttgttcaagctgcctctggagacgtacaaacataccagattcgcacagcacccactagcactattgcccctggagttgttatggcatcctccccagcacttcctacacagcctgctgaagaagcagcacgaaagagagaggtccgtctaatgaagaacagggaagcagctcgagagtgtcgtagaaagaagaaagaatatgtgaaatgtttagaaaacagagtggcagtgcttgaaaatcaaaacaagacattgattgaggagctaaaagcacttaaggacctttactgccacaaatcagat

SEQ ID NO: 6005 - DNA, 1413 bp, Homo sapiens
  source 1..1413: mol_type = genomic DNA
atgaagggcaactacgagtctctcatctccatggattatgctataaatcaacctgatgtcttatctcagattcaaccagaaggggaacataatacagaggaccaggcagggccagaggaaagtgagattcccacagaccccagtgaagagcctggtatttcaacatcagatattctgtcttggattaaacaagaagaagagcctcaggttggggccccaccggagtccaaggagagtgacgtgtacaaaagcacttatgctgatgaagagcttgtcatcaaagctgaaggccttgctagatcctcgttgtgccctgaggttccagtccctttctcttctccaccagcagcagcaaaggatgctttttcagatgtggctttcaaaagccagcagtctacatccatgacaccttttggacgtccagccactgacctgcctgaagcctctgagggacaagtgacttttactcagttgggtagctatcccctcccacctccagttggcgagcaggtgttctcatgccaccactgtggcaagaatctcagccaagacatgttgctgacccaccaatgtagccatgctactgagcaccccttaccctgtgcccagtgccctaagcactttactccacaggcggacctcagcagcacctcccaggaccatgccagcgagacaccccccacctgcccacactgtgccaggacttttactcacccatcaagacttacctaccatcttcgggtccataacagcactgagcgtcctttcccctgtcctgattgccccaagcgctttgctgaccaggctcgactcaccagccaccggagagctcatgcaagcgaaaggcccttccgctgtgcccagtgcggcaggagcttcagcttgaaaatcagcctcctgctccaccagcggggtcatgcacaagagcgccctttctcctgccctcagtgtggcattgacttcaacggccactcggccctgatccgccaccagatgatccacacaggcgagcgtccttacccctgcactgactgcagtaagagcttcatgcgcaaggagcacctgctgaaccaccggcggctgcacacaggcgagcggcccttcagttgtcctcactgtggcaagagcttcatccgcaagcaccacctaatgaaacaccagcgcatccacaccggggagcggccctacccctgctcctactgtggcaggagcttccgctacaaacagacactcaaggaccacctccgttcaggccacaatggaggctgtgggggtgatagtgacccatcaggtcagccacccaacccaccaggtcccctcataactgggcttgaaacttctggcctgggtgtcaacactgaaggtctagagaccaaccagtggtatggggaagggagtggagggggagttttg

SEQ ID NO: 6006 - DNA, 1716 bp, Homo sapiens
  source 1..1716: mol_type = genomic DNA
atgggcacgactgggctggagagtctgagtctgggggaccgcggagctgcccccaccgtcacctctagtgagcgcctagtcccagacccgccgaatgacctccgcaaagaagatgttgctatggaattggaaagagtgggagaagatgaggaacaaatgatgataaaaagaagcagtgaatgtaatcccttgctacaagaacccatcgcttctgctcagtttggtgctactgcaggaacagaatgccgtaagtctgtcccatgtggatgggaaagagttgtgaagcaaaggttatttgggaagacagcaggaagatttgatgtgtactttatcagcccacaaggactgaagttcagatccaaaagttcacttgctaattatcttcacaaaaatggagagacttctcttaagccagaagattttgattttactgtactttctaaaaggggtatcaagtcaagatataaagactgcagcatggcagccctgacatcccatctacaaaaccaaagtaacaattcaaactggaacctcaggacccgaagcaagtgcaaaaaggatgtgtttatgccgccaagtagtagttcagagttgcaggagagcagaggactctctaactttacttccactcatttgcttttgaaagaagatgagggtgttgatgatgttaacttcagaaaggttagaaagcccaaaggaaaggtgactattttgaaaggaatcccaattaagaaaactaaaaaaggatgtaggaagagctgttcaggttttgttcaaagtgatagcaaaagagaatctgtgtgtaataaagcagatgctgaaagtgaacctgttgcacaaaaaagtcagcttgatagaactgtctgcatttctgatgctggagcatgtggtgagaccctcagtgtgaccagtgaagaaaacagccttgtaaaaaaaaaagaaagatcattgagttcaggatcaaatttttgttctgaacaaaaaacttctggcatcataaacaaattttgttcagccaaagactcagaacacaacgagaagtatgaggatacctttttagaatctgaagaaatcggaacaaaagtagaagttgtggaaaggaaagaacatttgcatactgacattttaaaacgtggctctgaaatggacaacaactgctcaccaaccaggaaagacttcactggtgagaaaatatttcaagaagataccatcccacgaacacagatagaaagaaggaaaacaagcctgtatttttccagcaaatataacaaagaagctcttagccccccacgacgtaaagcctttaagaaatggacacctcctcggtcaccttttaatctcgttcaagaaacactttttcatgatccatggaagcttctcatcgctactatatttctcaatcggacctcaggcaaaatggcaatacctgtgctttggaagtttctggagaagtatccttcagctgaggtagcaagaaccgcagactggagagatgtgtcagaacttcttaaacctcttggtctctacgatcttcgggcaaaaaccattgtcaagttctcagatgaatacctgacaaagcagtggaagtatccaattgagcttcatgggattggtaaatatggcaacgactcttaccgaattttttgtgtcaatgagtggaagcaggtgaggctcactcccatccataattcagcacatttggtctctgaggcaaaa

SEQ ID NO: 6007 - DNA, 1620 bp, Homo sapiens
  source 1..1620: mol_type = genomic DNA
atgggcacgactgggctggagagtctgagtctgggggaccgcggagctgcccccaccgtcacctctagtgagcgcctagtcccagacccgccgaatgacctccgcaaagaagatgttgctatggaattggaaagagtgggagaagatgaggaacaaatgatgataaaaagaagcagtgaatgtaatcccttgctacaagaacccatcgcttctgctcagtttggtgctactgcaggaacagaatgccgtaagtctgtcccatgtggatgggaaagagttgtgaagcaaaggttatttgggaagacagcaggaagatttgatgtgtactttatcagcccacaaggactgaagttcagatccaaaagttcacttgctaattatcttcacaaaaatggagagacttctcttaagccagaagattttgattttactgtactttctaaaaggggtatcaagtcaagatataaagactgcagcatggcagccctgacatcccatctacaaaaccaaagtaacaattcaaactggaacctcaggacccgaagcaagtgcaaaaaggatgtgtttatgccgccaagtagtagttcagagttgcaggagagcagaggactctctaactttacttccactcatttgcttttgaaagaagatgagggtgttgatgatgttaacttcagaaaggttagaaagcccaaaggaaaggtgactattttgaaaggaatcccaattaagaaaactaaaaaaggatgtaggaagagctgttcaggttttgttcaaagtgatagcaaaagagaatctgtgtgtaataaagcagatgctgaaagtgaacctgttgcacaaaaaagtcagcttgatagaactgtctgcatttctgatgctggagcatgtggtgagaccctcagtgtgaccagtgaagaaaacagccttgtaaaaaaaaaagaaagatcattgagttcaggatcaaatttttgttctgaacaaaaaacttctggcatcataaacaaattttgttcagccaaagactcagaacacaacgagaagtatgaggatacctttttagaatctgaagaaatcggaacaaaagtagaagttgtggaaaggaaagaacatttgcatactgacattttaaaacgtggctctgaaatggacaacaactgctcaccaaccaggaaagacttcactggtgagaaaatatttcaagaagataccatcccacgaacacagatagaaagaaggaaaacaagcctgtatttttccagcaaatataacaaagaagctcttagccccccacgacgtaaagcctttaagaaatggacacctcctcggtcaccttttaatctcgttcaagaaacactttttcatgatccatggaagcttctcatcgctactatatttctcaatcggacctcaggcaaaatggcaatacctgtgctttggaagtttctggagaagtatccttcagctgaggtagcaagaaccgcagactggagagatgtgtcagaacttcttaaacctcttggtctctacgatcttcgggcaaaaaccattgtcaagttctcagatgaatacctgacaaagcagtggaagtatccaattgagcttcatgggattggtgcaccc

SEQ ID NO: 6008 - DNA, 786 bp, Homo sapiens
  source 1..786: mol_type = genomic DNA
atgggcacgactgggctggagagtctgagtctgggggaccgcggagctgcccccaccgtcacctctagtgagcgcctagtcccagacccgccgaatgacctccgcaaagaagatgttgctatggaattggaaagagtgggagaagatgaggaacaaatgatgataaaaagaagcagtgaatgtaatcccttgctacaagaacccatcgcttctgctcagtttggtgctactgcaggaacagaatgccaagataccatcccacgaacacagatagaaagaaggaaaacaagcctgtatttttccagcaaatataacaaagaagctcttagccccccacgacgtaaagcctttaagaaatggacacctcctcggtcaccttttaatctcgttcaagaaacactttttcatgatccatggaagcttctcatcgctactatatttctcaatcggacctcaggcaaaatggcaatacctgtgctttggaagtttctggagaagtatccttcagctgaggtagcaagaaccgcagactggagagatgtgtcagaacttcttaaacctcttggtctctacgatcttcgggcaaaaaccattgtcaagttctcagatgaatacctgacaaagcagtggaagtatccaattgagcttcatgggattggtaaatatggcaacgactcttaccgaattttttgtgtcaatgagtggaagcaggtgcaccctgaagaccacaaattaaataaatatcatgactggctttgggaaaatcatgaaaaattaagtctatct

SEQ ID NO: 6009 - DNA, 1740 bp, Homo sapiens
  source 1..1740: mol_type = genomic DNA
atgggcacgactgggctggagagtctgagtctgggggaccgcggagctgcccccaccgtcacctctagtgagcgcctagtcccagacccgccgaatgacctccgcaaagaagatgttgctatggaattggaaagagtgggagaagatgaggaacaaatgatgataaaaagaagcagtgaatgtaatcccttgctacaagaacccatcgcttctgctcagtttggtgctactgcaggaacagaatgccgtaagtctgtcccatgtggatgggaaagagttgtgaagcaaaggttatttgggaagacagcaggaagatttgatgtgtactttatcagcccacaaggactgaagttcagatccaaaagttcacttgctaattatcttcacaaaaatggagagacttctcttaagccagaagattttgattttactgtactttctaaaaggggtatcaagtcaagatataaagactgcagcatggcagccctgacatcccatctacaaaaccaaagtaacaattcaaactggaacctcaggacccgaagcaagtgcaaaaaggatgtgtttatgccgccaagtagtagttcagagttgcaggagagcagaggactctctaactttacttccactcatttgcttttgaaagaagatgagggtgttgatgatgttaacttcagaaaggttagaaagcccaaaggaaaggtgactattttgaaaggaatcccaattaagaaaactaaaaaaggatgtaggaagagctgttcaggttttgttcaaagtgatagcaaaagagaatctgtgtgtaataaagcagatgctgaaagtgaacctgttgcacaaaaaagtcagcttgatagaactgtctgcatttctgatgctggagcatgtggtgagaccctcagtgtgaccagtgaagaaaacagccttgtaaaaaaaaaagaaagatcattgagttcaggatcaaatttttgttctgaacaaaaaacttctggcatcataaacaaattttgttcagccaaagactcagaacacaacgagaagtatgaggatacctttttagaatctgaagaaatcggaacaaaagtagaagttgtggaaaggaaagaacatttgcatactgacattttaaaacgtggctctgaaatggacaacaactgctcaccaaccaggaaagacttcactggtgagaaaatatttcaagaagataccatcccacgaacacagatagaaagaaggaaaacaagcctgtatttttccagcaaatataacaaagaagctcttagccccccacgacgtaaagcctttaagaaatggacacctcctcggtcaccttttaatctcgttcaagaaacactttttcatgatccatggaagcttctcatcgctactatatttctcaatcggacctcaggcaaaatggcaatacctgtgctttggaagtttctggagaagtatccttcagctgaggtagcaagaaccgcagactggagagatgtgtcagaacttcttaaacctcttggtctctacgatcttcgggcaaaaaccattgtcaagttctcagatgaatacctgacaaagcagtggaagtatccaattgagcttcatgggattggtaaatatggcaacgactcttaccgaattttttgtgtcaatgagtggaagcaggtgcaccctgaagaccacaaattaaataaatatcatgactggctttgggaaaatcatgaaaaattaagtctatct

SEQ ID NO: 6010 - DNA, 1722 bp, Homo sapiens
  source 1..1722: mol_type = genomic DNA
atgggcacgactgggctggagagtctgagtctgggggaccgcggagctgcccccaccgtcacctctagtgagcgcctagtcccagacccgccgaatgacctccgcaaagaagatgttgctatggaattggaaagagtgggagaagatgaggaacaaatgatgataaaaagaagcagtgaatgtaatcccttgctacaagaacccatcgcttctgctcagtttggtgctactgcaggaacagaatgccgtaagtctgtcccatgtggatgggaaagagttgtgaagcaaaggttatttgggaagacagcaggaagatttgatgtgtactttatcagcccacaaggactgaagttcagatccaaaagttcacttgctaattatcttcacaaaaatggagagacttctcttaagccagaagattttgattttactgtactttctaaaaggggtatcaagtcaagatataaagactgcagcatggcagccctgacatcccatctacaaaaccaaagtaacaattcaaactggaacctcaggacccgaagcaagtgcaaaaaggatgtgtttatgccgccaagtagtagttcagagttgcaggagagcagaggactctctaactttacttccactcatttgcttttgaaagaagatgagggtgttgatgatgttaacttcagaaaggttagaaagcccaaaggaaaggtgactattttgaaaggaatcccaattaagaaaactaaaaaaggatgtaggaagagctgttcaggttttgttcaaagtgatagcaaaagagaatctgtgtgtaataaagcagatgctgaaagtgaacctgttgcacaaaaaagtcagcttgatagaactgtctgcatttctgatgctggagcatgtggtgagaccctcagtgtgaccagtgaagaaaacagccttgtaaaaaaaaaagaaagatcattgagttcaggatcaaatttttgttctgaacaaaaaacttctggcatcataaacaaattttgttcagccaaagactcagaacacaacgagaagtatgaggatacctttttagaatctgaagaaatcggaacaaaagtagaagttgtggaaaggaaagaacatttgcatactgacattttaaaacgtggctctgaaatggacaacaactgctcaccaaccaggaaagacttcactgaagataccatcccacgaacacagatagaaagaaggaaaacaagcctgtatttttccagcaaatataacaaagaagctcttagccccccacgacgtaaagcctttaagaaatggacacctcctcggtcaccttttaatctcgttcaagaaacactttttcatgatccatggaagcttctcatcgctactatatttctcaatcggacctcaggcaaaatggcaatacctgtgctttggaagtttctggagaagtatccttcagctgaggtagcaagaaccgcagactggagagatgtgtcagaacttcttaaacctcttggtctctacgatcttcgggcaaaaaccattgtcaagttctcagatgaatacctgacaaagcagtggaagtatccaattgagcttcatgggattggtaaatatggcaacgactcttaccgaattttttgtgtcaatgagtggaagcaggtgcaccctgaagaccacaaattaaataaatatcatgactggctttgggaaaatcatgaaaaattaagtctatct

SEQ ID NO: 6011 - DNA, 1566 bp, Homo sapiens
  source 1..1566: mol_type = genomic DNA
atggctcttcctcagggtctattgacattcagggacgtggccatagaattctctcaggaggagtggaaatgcctggaccctgctcagaggactttatacagggacgtgatgctggagaattataggaacctcgtctccctggatatctcttccaaatgcatgttgaagacgttgtcgtcaacagggcaaggcaatacagaagtgatccacacagggacattgcacagacaagcaagtcatcacattggagaattttgtttccatgaaattgagaaagacattcatggcttcgagtttcagtggaaagaagatgaaacaaatggccatgcagcacccatgacagaaatcaaagagttggctggtagtacaggccaacatgatcaaaggcatgctggaaacaagcgtattaaagatcagcttggatcaagctttcatttgcatctgcctgaaccgcacatatttcagtctgaagggaaaattggtaatcaagttgagaagtctatcaacaatgcttcctcagtttcaacatcccaaagaatttgttgtaggcccaaaacccatatttctaataagtatggaaataattccctccattcttcattactcacacaaaaatgggaagtacacatgagagaaaaatcttttgaatgtatacagagcttcaaatcctttaattgcagctcactcttaaaaaaacatcagataattcacttagaagagaaacaatgtaaatgtgatgtatgtggcaaggtctttaatcagaagcgataccttgcctgccatcgtagatgtcacactggtgagaaaccttacaagtgtaatgagtgtggcaagacctttggtcataattcatccctcttcattcacaaagcgcttcatactggagagaaaccttatgaatgtgaagaatgtgacaaagttttcagtcgcaaatcacaccttgaaagacataagaggattcatactggagagaaaccatacaaatgtaaggtttgtgatgaggctttcgcatataattcatatctggcaaaacatactatacttcacactggagagaaaccttacacatgtaatgaatgtggcaaagtttttaatcgactatcaacccttgcacgccatcatagacttcatactggagagaaaccttacaaatgtgaagagtgtgacaaagttttcagtcgcaaatcacaccttgaaagacataggaggattcatagtggagagaaaccttacaaatgtgaagaatgttgcaaagttttcagtcgcaaatcaaacctggaaagacacaggaggattcatactggagagaaaccatacaaatgtaaggtttgtgacaaggctttccagagggattcacacctggcacaacatcagagagttcatactggagagaaaccttacaagtgtaatgagtgtggcaagaccttcggtcagacatcatcgcttataatccatcgtaggcttcatactggagagaaaccttacaagtgtaatgagtgtggcaagaccttcagtcagatgtcatcccttgtataccatcataggcttcatagtggagagaagcct

SEQ ID NO: 6012 - DNA, 381 bp, Homo sapiens
  source 1..381: mol_type = genomic DNA
atggctcttcctcagggtctattgacattcagggacgtggccatagaattctctcaggaggagtggaaatgcctggaccctgctcagaggactttatacagggacgtgatgctggagaattataggaacctcgtctccctggagttttggtctgtcatcccggctaaagtacagtggtgtcatctccgctcactgcaacctccacttcccaggttcaagcaattctcctgcctcagccttccaagtacctgggactacagatatctcttccaaatgcatgttgaagacgttgtcgtcaacagggcaaggcaatacagaagtgatccacacagggacattgcacagacaagcaagtcatcacattggagaattttgtttcca

SEQ ID NO: 6013 - DNA, 1509 bp, Homo sapiens
  source 1..1509: mol_type = genomic DNA
atggctgaggactggctggactgcccggccctgggccctggctggaagcgccgcgaagtctttcgcaagtcaggggccacctgtggacgctcagacacctattaccagagccccacaggagacaggatccgaagcaaagttgagctgactcgatacctgggccctgcgtgtgatctcaccctcttcgacttcaaacaaggcatcttgtgctatccagcccccaaggcccatcccgtggcggttgccagcaagaagcgaaagaagccttcaaggccagccaagactcggaaacgtcaggttggaccccagagtggtgaggtcaggaaggaggccccgagggatgagaccaaggctgacactgacacagccccagcttcattccctgctcctgggtgctgtgagaactgtggaatcagcttctcaggggatggcacccaaaggcagcggctcaaaacgttgtgcaaagactgtcgagcacagagaattgccttcaaccgggaacagagaatgtttaagcgtgtgggctgtggggagtgtgcagcctgccaggtaacagaagactgtggggcctgctccacctgcctcctgcagctgccccatgatgtggcatcggggctgttctgcaagtgtgaacggagacgctgcctccggattgtggaaaggagccgagggtgtggagtatgccggggctgtcagacccaagaggattgtggccattgccccatctgccttcgccctccccgccctggtctcaggcgccagtggaaatgtgtccagcgacgttgcctacggggtaaacatgcccgccgcaagggaggctgtgactccaagatggctgccaggcggcgccccggagcccagccactgcctccaccacccccatcacagtccccagagcccacagagccgcaccccagagccctggccccctcgccacctgccgagttcatctattactgtgtagacgaggacgagctaaagcggctgctgcccagtgtctggtcagagtctgaggatggggcaggatcgcccccaccttaccgtcgtcgaaagaggcccagctctgcccgacggcaccatcttggccctaccttgaagcccaccttggctacacgcacagcccaaccagaccatacccaggctccaacgaagcaggaagcaggtggtggctttgtgctgcccccgcctggcactgaccttgtgtttttacgggaaggcgcaagcagtcctgtgcaggtgccgggccctgttgcagcttccacagaagccctgttgcaggcagtagacccaggcctgccttctgtgaagcaagagccacctgacccagaggaggacaaggaggagaacaaggatgattctgcctccaaattggccccagaggaagaggcaggaggggctggcacacccgtgatcacggagattttcagcctgggtggaacccgcttccgagatacagcagtctggttgccaaggtccaaagaccttaaaaaacctggagctagaaagcag

SEQ ID NO: 6014 - DNA, 1965 bp, Homo sapiens
  source 1..1965: mol_type = genomic DNA
atggctgaggactggctggactgcccggccctgggccctggctggaagcgccgcgaagtctttcgcaagtcaggggccacctgtggacgctcagacacctattaccagagccccacaggagacaggatccgaagcaaagttgagctgactcgatacctgggccctgcgtgtgatctcaccctcttcgacttcaaacaaggcatcttgtgctatccagcccccaaggcccatcccgtggcggttgccagcaagaagcgaaagaagccttcaaggccagccaagactcggaaacgtcaggttggaccccagagtggtgaggtcaggaaggaggccccgagggatgagaccaaggctgacactgacacagccccagcttcattccctgctcctgggtgctgtgagaactgtggaatcagcttctcaggggatggcacccaaaggcagcggctcaaaacgttgtgcaaagactgtcgagcacagagaattgccttcaaccgggaacagagaatgtttaagcgtgtgggctgtggggagtgtgcagcctgccaggtaacagaagactgtggggcctgctccacctgcctcctgcagctgccccatgatgtggcatcggggctgttctgcaagtgtgaacggagacgctgcctccggattgtggaaaggagccgagggtgtggagtatgccggggctgtcagacccaagaggattgtggccattgccccatctgccttcgccctccccgccctggtctcaggcgccagtggaaatgtgtccagcgacgttgcctacggggtaaacatgcccgccgcaagggaggctgtgactccaagatggctgccaggcggcgccccggagcccagccactgcctccaccacccccatcacagtccccagagcccacagagccgcaccccagagccctggccccctcgccacctgccgagttcatctattactgtgtagacgaggacgagctacagccctacacgaaccgccggcagaaccgcaagtgcggggcctgtgcagcctgcctacggcggatggactgtggccgctgcgacttctgctgcgacaagcccaaattcgggggcagcaaccagaagcgccagaagtgtcgttggcgccaatgcctgcagtttgccatgaagcggctgctgcccagtgtctggtcagagtctgaggatggggcaggatcgcccccaccttaccgtcgtcgaaagaggcccagctctgcccgacggcaccatcttggccctaccttgaagcccaccttggctacacgcacagcccaaccagaccatacccaggctccaacgaagcaggaagcaggtggtggctttgtgctgcccccgcctggcactgaccttgtgtttttacgggaaggcgcaagcagtcctgtgcaggtgccgggccctgttgcagcttccacagaagccctgttgcaggaggcccagtgctctggcctgagttgggttgtggccttaccccaggtgaagcaagagaaggcggatacccaggacgagtggacaccaggcacagctgtcctgacttctcccgtattggtgcctggctgccctagcaaggcagtagacccaggcctgccttctgtgaagcaagagccacctgacccagaggaggacaaggaggagaacaaggatgattctgcctccaaattggccccagaggaagaggcaggaggggctggcacacccgtgatcacggagattttcagcctgggtggaacccgcttccgagatacagcagtctggttgccaagtctgcagggcaggcactcgggaagggaagatggatgtaaagtgtgggagaccgaggacacagtggagcccacgagcacgagctggaacccacgaggatggcctggaacccatgtcagtctctcaccacctccagcttcgatgatgtgggtgtcctgcagaagaagctggtgcccttcctcacagagt

SEQ ID NO: 6015 - DNA, 1608 bp, Homo sapiens
  source 1..1608: mol_type = genomic DNA
atggctgaggactggctggactgcccggccctgggccctggctggaagcgccgcgaagtctttcgcaagtcaggggccacctgtggacgctcagacacctattaccagagccccacaggagacaggatccgaagcaaagttgagctgactcgatacctgggccctgcgtgtgatctcaccctcttcgacttcaaacaaggcatcttgtgctatccagcccccaaggcccatcccgtggcggttgccagcaagaagcgaaagaagccttcaaggccagccaagactcggaaacgtcaggttggaccccagagtggtgaggtcaggaaggaggccccgagggatgagaccaaggctgacactgacacagccccagcttcattccctgctcctgggtgctgtgagaactgtggaatcagcttctcaggggatggcacccaaaggcagcggctcaaaacgttgtgcaaagactgtcgagcacagagaattgccttcaaccgggaacagagaatgtttaagcgtgtgggctgtggggagtgtgcagcctgccaggtaacagaagactgtggggcctgctccacctgcctcctgcagctgccccatgatgtggcatcggggctgttctgcaagtgtgaacggagacgctgcctccggattgtggaaaggagccgagggtgtggagtatgccggggctgtcagacccaagaggattgtggccattgccccatctgccttcgccctccccgccctggtctcaggcgccagtggaaatgtgtccagcgacgttgcctacggggtaaacatgcccgccgcaagggaggctgtgactccaagatggctgccaggcggcgccccggagcccagccactgcctccaccacccccatcacagtccccagagcccacagagccgcagccctacacgaaccgccggcagaaccgcaagtgcggggcctgtgcagcctgcctacggcggatggactgtggccgctgcgacttctgctgcgacaagcccaaattcgggggcagcaaccagaagcgccagaagtgtcgttggcgccaatgcctgcagtttgccatgaagcggctgctgcccagtgtctggtcagagtctgaggatggggcaggatcgcccccaccttaccgtcgtcgaaagaggcccagctctgcccgacggcaccatcttggccctaccttgaagcccaccttggctacacgcacagcccaaccagaccatacccaggctccaacgaagcaggaagcaggtggtggctttgtgctgcccccgcctggcactgaccttgtgtttttacgggaaggcgcaagcagtcctgtgcaggtgccgggccctgttgcagcttccacagaagccctgttgcaggcagtagacccaggcctgccttctgtgaagcaagagccacctgacccagaggaggacaaggaggagaacaaggatgattctgcctccaaattggccccagaggaagaggcaggaggggctggcacacccgtgatcacggagattttcagcctgggtggaacccgcttccgagatacagcagtctggttgccaaggtccaaagaccttaaaaaacctggagctagaaagcag

SEQ ID NO: 6016 - DNA, 1890 bp, Homo sapiens
  source 1..1890: mol_type = genomic DNA
atggctgaggactggctggactgcccggccctgggccctggctggaagcgccgcgaagtctttcgcaagtcaggggccacctgtggacgctcagacacctattaccagagccccacaggagacaggatccgaagcaaagttgagctgactcgatacctgggccctgcgtgtgatctcaccctcttcgacttcaaacaaggcatcttgtgctatccagcccccaaggcccatcccgtggcggttgccagcaagaagcgaaagaagccttcaaggccagccaagactcggaaacgtcaggttggaccccagagtggtgaggtcaggaaggaggccccgagggatgagaccaaggctgacactgacacagccccagcttcattccctgctcctgggtgctgtgagaactgtggaatcagcttctcaggggatggcacccaaaggcagcggctcaaaacgttgtgcaaagactgtcgagcacagagaattgccttcaaccgggaacagagaatgtttaagcgtgtgggctgtggggagtgtgcagcctgccaggtaacagaagactgtggggcctgctccacctgcctcctgcagctgccccatgatgtggcatcggggctgttctgcaagtgtgaacggagacgctgcctccggattgtggaaaggagccgagggtgtggagtatgccggggctgtcagacccaagaggattgtggccattgccccatctgccttcgccctccccgccctggtctcaggcgccagtggaaatgtgtccagcgacgttgcctacggcaccttgctcaccgcctgcgtcgccgtcatcagagatgtcagcgacgcactcccctggctgtggctcccccaactggtaaacatgcccgccgcaagggaggctgtgactccaagatggctgccaggcggcgccccggagcccagccactgcctccaccacccccatcacagtccccagagcccacagagccgcaccccagagccctggccccctcgccacctgccgagttcatctattactgtgtagacgaggacgagctacagccctacacgaaccgccggcagaaccgcaagtgcggggcctgtgcagcctgcctacggcggatggactgtggccgctgcgacttctgctgcgacaagcccaaattcgggggcagcaaccagaagcgccagaagtgtcgttggcgccaatgcctgcagtttgccatgaagcggctgctgcccagtgtctggtcagagtctgaggatggggcaggatcgcccccaccttaccgtcgtcgaaagaggcccagctctgcccgacggcaccatcttggccctaccttgaagcccaccttggctacacgcacagcccaaccagaccatacccaggctccaacgaagcaggaagcaggtggtggctttgtgctgcccccgcctggcactgaccttgtgtttttacgggaaggcgcaagcagtcctgtgcaggtgccgggccctgttgcagcttccacagaagccctgttgcaggaggcccagtgctctggcctgagttgggttgtggccttaccccaggtgaagcaagagaaggcggatacccaggacgagtggacaccaggcacagctgtcctgacttctcccgtattggtgcctggctgccctagcaaggcagtagacccaggcctgccttctgtgaagcaagagccacctgacccagaggaggacaaggaggagaacaaggatgattctgcctccaaattggccccagaggaagaggcaggaggggctggcacacccgtgatcacggagattttcagcctgggtggaacccgcttccgagatacagcagtctggttgccaaggtccaaagaccttaaaaaacctggagctagaaagcag

SEQ ID NO: 6017 - DNA, 1647 bp, Homo sapiens
  source 1..1647: mol_type = genomic DNA
atggctgaggactggctggactgcccggccctgggccctggctggaagcgccgcgaagtctttcgcaagtcaggggccacctgtggacgctcagacacctattaccagagccccacaggagacaggatccgaagcaaagttgagctgactcgatacctgggccctgcgtgtgatctcaccctcttcgacttcaaacaaggcatcttgtgctatccagcccccaaggcccatcccgtggcggttgccagcaagaagcgaaagaagccttcaaggccagccaagactcggaaacgtcaggttggaccccagagtggtgaggtcaggaaggaggccccgagggatgagaccaaggctgacactgacacagccccagcttcattccctgctcctgggtgctgtgagaactgtggaatcagcttctcaggggatggcacccaaaggcagcggctcaaaacgttgtgcaaagactgtcgagcacagagaattgccttcaaccgggaacagagaatgtttaagcgtgtgggctgtggggagtgtgcagcctgccaggtaacagaagactgtggggcctgctccacctgcctcctgcagctgccccatgatgtggcatcggggctgttctgcaagtgtgaacggagacgctgcctccggattgtggaaaggagccgagggtgtggagtatgccggggctgtcagacccaagaggattgtggccattgccccatctgccttcgccctccccgccctggtctcaggcgccagtggaaatgtgtccagcgacgttgcctacggggtaaacatgcccgccgcaagggaggctgtgactccaagatggctgccaggcggcgccccggagcccagccactgcctccaccacccccatcacagtccccagagcccacagagccgcaccccagagccctggccccctcgccacctgccgagttcatctattactgtgtagacgaggacgagctaaagcggctgctgcccagtgtctggtcagagtctgaggatggggcaggatcgcccccaccttaccgtcgtcgaaagaggcccagctctgcccgacggcaccatcttggccctaccttgaagcccaccttggctacacgcacagcccaaccagaccatacccaggctccaacgaagcaggaagcaggtggtggctttgtgctgcccccgcctggcactgaccttgtgtttttacgggaaggcgcaagcagtcctgtgcaggtgccgggccctgttgcagcttccacagaagccctgttgcaggaggcccagtgctctggcctgagttgggttgtggccttaccccaggtgaagcaagagaaggcggatacccaggacgagtggacaccaggcacagctgtcctgacttctcccgtattggtgcctggctgccctagcaaggcagtagacccaggcctgccttctgtgaagcaagagccacctgacccagaggaggacaaggaggagaacaaggatgattctgcctccaaattggccccagaggaagaggcaggaggggctggcacacccgtgatcacggagattttcagcctgggtggaacccgcttccgagatacagcagtctggttgccaaggtccaaagaccttaaaaaacctggagctagaaagcag

SEQ ID NO: 6018 - DNA, 1650 bp, Homo sapiens
  source 1..1650: mol_type = genomic DNA
atggctgaggactggctggactgcccggccctgggccctggctggaagcgccgcgaagtctttcgcaagtcaggggccacctgtggacgctcagacacctattaccagagccccacaggagacaggatccgaagcaaagttgagctgactcgatacctgggccctgcgtgtgatctcaccctcttcgacttcaaacaaggcatcttgtgctatccagcccccaaggcccatcccgtggcggttgccagcaagaagcgaaagaagccttcaaggccagccaagactcggaaacgtcaggttggaccccagagtggtgaggtcaggaaggaggccccgagggatgagaccaaggctgacactgacacagccccagcttcattccctgctcctgggtgctgtgagaactgtggaatcagcttctcaggggatggcacccaaaggcagcggctcaaaacgttgtgcaaagactgtcgagcacagagaattgccttcaaccgggaacagagaatgtttaagcgtgtgggctgtggggagtgtgcagcctgccaggtaacagaagactgtggggcctgctccacctgcctcctgcagctgccccatgatgtggcatcggggctgttctgcaagtgtgaacggagacgctgcctccggattgtggaaaggagccgagggtgtggagtatgccggggctgtcagacccaagaggattgtggccattgccccatctgccttcgccctccccgccctggtctcaggcgccagtggaaatgtgtccagcgacgttgcctacggggtaaacatgcccgccgcaagggaggctgtgactccaagatggctgccaggcggcgccccggagcccagccactgcctccaccacccccatcacagtccccagagcccacagagccgcaccccagagccctggccccctcgccacctgccgagttcatctattactgtgtagacgaggacgagctacagccctacacgaaccgccggcagaaccgcaagtgcggggcctgtgcagcctgcctacggcggatggactgtggccgctgcgacttctgctgcgacaagcccaaattcgggggcagcaaccagaagcgccagaagtgtcgttggcgccaatgcctgcagtttgccatgaagcggctgctgcccagtgtctggtcagagtctgaggatggggcaggatcgcccccaccttaccgtcgtcgaaagaggcccagctctgcccgacggcaccatcttggccctaccttgaagcccaccttggctacacgcacagcccaaccagaccatacccaggctccaacgaagcaggaagcaggtggtggctttgtgctgcccccgcctggcactgaccttgtgtttttacgggaaggcgcaagcagtcctgtgcaggtgccgggccctgttgcagcttccacagaagccctgttgcaggcagtagacccaggcctgccttctgtgaagcaagagccacctgacccagaggaggacaaggaggagaacaaggatgattctgcctccaaattggccccagaggaagaggcaggaggggctggcacacccgtggaaccaaccacccaaccccagtattctggtaattttgacaatgatctatatgaaatttatttgattgacatt

SEQ ID NO: 6019 - DNA, 1668 bp, Homo sapiens
  source 1..1668: mol_type = genomic DNA
atggctgaggactggctggactgcccggccctgggccctggctggaagcgccgcgaagtctttcgcaagtcaggggccacctgtggacgctcagacacctattaccagagccccacaggagacaggatccgaagcaaagttgagctgactcgatacctgggccctgcgtgtgatctcaccctcttcgacttcaaacaaggcatcttgtgctatccagcccccaaggcccatcccgtggcggttgccagcaagaagcgaaagaagccttcaaggccagccaagactcggaaacgtcaggttggaccccagagtggtgaggtcaggaaggaggccccgagggatgagaccaaggctgacactgacacagccccagcttcattccctgctcctgggtgctgtgagaactgtggaatcagcttctcaggggatggcacccaaaggcagcggctcaaaacgttgtgcaaagactgtcgagcacagagaattgccttcaaccgggaacagagaatgtttaagagccgagggtgtggagtatgccggggctgtcagacccaagaggattgtggccattgccccatctgccttcgccctccccgccctggtctcaggcgccagtggaaatgtgtccagcgacgttgcctacggggtaaacatgcccgccgcaagggaggctgtgactccaagatggctgccaggcggcgccccggagcccagccactgcctccaccacccccatcacagtccccagagcccacagagccgcaccccagagccctggccccctcgccacctgccgagttcatctattactgtgtagacgaggacgagctacagccctacacgaaccgccggcagaaccgcaagtgcggggcctgtgcagcctgcctacggcggatggactgtggccgctgcgacttctgctgcgacaagcccaaattcgggggcagcaaccagaagcgccagaagtgtcgttggcgccaatgcctgcagtttgccatgaagcggctgctgcccagtgtctggtcagagtctgaggatggggcaggatcgcccccaccttaccgtcgtcgaaagaggcccagctctgcccgacggcaccatcttggccctaccttgaagcccaccttggctacacgcacagcccaaccagaccatacccaggctccaacgaagcaggaagcaggtggtggctttgtgctgcccccgcctggcactgaccttgtgtttttacgggaaggcgcaagcagtcctgtgcaggtgccgggccctgttgcagcttccacagaagccctgttgcaggaggcccagtgctctggcctgagttgggttgtggccttaccccaggtgaagcaagagaaggcggatacccaggacgagtggacaccaggcacagctgtcctgacttctcccgtattggtgcctggctgccctagcaaggcagtagacccaggcctgccttctgtgaagcaagagccacctgacccagaggaggacaaggaggagaacaaggatgattctgcctccaaattggccccagaggaagaggcaggaggggctggcacacccgtgatcacggagattttcagcctgggtggaacccgcttccgagatacagcagtctggttgccaaggtccaaagaccttaaaaaacctggagctagaaagcag

SEQ ID NO: 6020 - DNA, 1605 bp, Homo sapiens
  source 1..1605: mol_type = genomic DNA
atggctgaggactggctggactgcccggccctgggccctggctggaagcgccgcgaagtctttcgcaagtcaggggccacctgtggacgctcagacacctattaccagagccccacaggagacaggatccgaagcaaagttgagctgactcgatacctgggccctgcgtgtgatctcaccctcttcgacttcaaacaaggcatcttgtgctatccagcccccaaggcccatcccgtggcggttgccagcaagaagcgaaagaagccttcaaggccagccaagactcggaaacgtcaggttggaccccagagtggtgaggtcaggaaggaggccccgagggatgagaccaaggctgacactgacacagccccagcttcattccctgctcctgggtgctgtgagaactgtggaatcagcttctcaggggatggcacccaaaggcagcggctcaaaacgttgtgcaaagactgtcgagcacagagaattgccttcaaccgggaacagagaatgtttaagcgtgtgggctgtggggagtgtgcagcctgccaggtaacagaagactgtggggcctgctccacctgcctcctgcagctgccccatgatgtggcatcggggctgttctgcaagtgtgaacggagacgctgcctccggattgtggaaaggagccgagggtgtggagtatgccggggctgtcagacccaagaggattgtggccattgccccatctgccttcgccctccccgccctggtctcaggcgccagtggaaatgtgtccagcgacgttgcctacggggtaaacatgcccgccgcaagggaggctgtgactccaagatggctgccaggcggcgccccggagcccagccactgcctccaccacccccatcacagtccccagagcccacagagccgcaccccagagccctggccccctcgccacctgccgagttcatctattactgtgtagacgaggacgagctaaagcggctgctgcccagtgtctggtcagagtctgaggatggggcaggatcgcccccaccttaccgtcgtcgaaagaggcccagctctgcccgacggcaccatcttggccctaccttgaagcccaccttggctacacgcacagcccaaccagaccatacccaggctccaacgaagcaggaagcaggtggtggctttgtgctgcccccgcctggcactgaccttgtgtttttacgggaaggcgcaagcagtcctgtgcaggtgccgggccctgttgcagcttccacagaagccctgttgcaggcagtagacccaggcctgccttctgtgaagcaagagccacctgacccagaggaggacaaggaggagaacaaggatgattctgcctccaaattggccccagaggaagaggcaggaggggctggcacacccgtgatcacggagattttcagcctgggtggaacccgcttccgagatacagcagtctggttgccaagggcaggcactcgggaagggaagatggatgtaaagtgtgggagaccgaggacacagtggagcccacgagcacgagctggaacccacgaggatggcctggaacccatgtcagtctctcaccacctccagcttcga

SEQ ID NO: 6021 - DNA, 1815 bp, Homo sapiens
  source 1..1815: mol_type = genomic DNA
atggctgaggactggctggactgcccggccctgggccctggctggaagcgccgcgaagtctttcgcaagtcaggggccacctgtggacgctcagacacctattaccagagccccacaggagacaggatccgaagcaaagttgagctgactcgatacctgggccctgcgtgtgatctcaccctcttcgacttcaaacaaggcatcttgtgctatccagcccccaaggcccatcccgtggcggttgccagcaagaagcgaaagaagccttcaaggccagccaagactcggaaacgtcaggttggaccccagagtggtgaggtcaggaaggaggccccgagggatgagaccaaggctgacactgacacagccccagcttcattccctgctcctgggtgctgtgagaactgtggaatcagcttctcaggggatggcacccaaaggcagcggctcaaaacgttgtgcaaagactgtcgagcacagagaattgccttcaaccgggaacagagaatgtttaagcgtgtgggctgtggggagtgtgcagcctgccaggtaacagaagactgtggggcctgctccacctgcctcctgcagctgccccatgatgtggcatcggggctgttctgcaagtgtgaacggagacgctgcctccggattgtggaaaggagccgagggtgtggagtatgccggggctgtcagacccaagaggattgtggccattgccccatctgccttcgccctccccgccctggtctcaggcgccagtggaaatgtgtccagcgacgttgcctacggggtaaacatgcccgccgcaagggaggctgtgactccaagatggctgccaggcggcgccccggagcccagccactgcctccaccacccccatcacagtccccagagcccacagagccgcaccccagagccctggccccctcgccacctgccgagttcatctattactgtgtagacgaggacgagctacagccctacacgaaccgccggcagaaccgcaagtgcggggcctgtgcagcctgcctacggcggatggactgtggccgctgcgacttctgctgcgacaagcccaaattcgggggcagcaaccagaagcgccagaagtgtcgttggcgccaatgcctgcagtttgccatgaagcggctgctgcccagtgtctggtcagagtctgaggatggggcaggatcgcccccaccttaccgtcgtcgaaagaggcccagctctgcccgacggcaccatcttggccctaccttgaagcccaccttggctacacgcacagcccaaccagaccatacccaggctccaacgaagcaggaagcaggtggtggctttgtgctgcccccgcctggcactgaccttgtgtttttacgggaaggcgcaagcagtcctgtgcaggtgccgggccctgttgcagcttccacagaagccctgttgcaggaggcccagtgctctggcctgagttgggttgtggccttaccccaggtgaagcaagagaaggcggatacccaggacgagtggacaccaggcacagctgtcctgacttctcccgtattggtgcctggctgccctagcaaggcagtagacccaggcctgccttctgtgaagcaagagccacctgacccagaggaggacaaggaggagaacaaggatgattctgcctccaaattggccccagaggaagaggcaggaggggctggcacacccgtgatcacggagattttcagcctgggtggaacccgcttccgagatacagcagtctggttgccaaggtccaaagaccttaaaaaacctggagctagaaagcag

SEQ ID NO: 6022 - DNA, 1758 bp, Homo sapiens
  source 1..1758: mol_type = genomic DNA
atggctgaggactggctggactgcccggccctgggccctggctggaagcgccgcgaagtctttcgcaagtcaggggccacctgtggacgctcagacacctattaccagagccccacaggagacaggatccgaagcaaagttgagctgactcgatacctgggccctgcgtgtgatctcaccctcttcgacttcaaacaaggcatcttgtgctatccagcccccaaggcccatcccgtggcggttgccagcaagaagcgaaagaagccttcaaggccagccaagactcggaaacgtcaggttggaccccagagtggtgaggtcaggaaggaggccccgagggatgagaccaaggctgacactgacacagccccagcttcattccctgctcctgggtgctgtgagaactgtggaatcagcttctcaggggatggcacccaaaggcagcggctcaaaacgttgtgcaaagactgtcgagcacagagaattgccttcaaccgggaacagagaatgtttaagcgtgtgggctgtggggagtgtgcagcctgccaggtaacagaagactgtggggcctgctccacctgcctcctgcagctgccccatgatgtggcatcggggctgttctgcaagtgtgaacggagacgctgcctccggattgtggaaaggagccgagggtgtggagtatgccggggctgtcagacccaagaggattgtggccattgccccatctgccttcgccctccccgccctggtctcaggcgccagtggaaatgtgtccagcgacgttgcctacggggtaaacatgcccgccgcaagggaggctgtgactccaagatggctgccaggcggcgccccggagcccagccactgcctccaccacccccatcacagtccccagagcccacagagccgcagccctacacgaaccgccggcagaaccgcaagtgcggggcctgtgcagcctgcctacggcggatggactgtggccgctgcgacttctgctgcgacaagcccaaattcgggggcagcaaccagaagcgccagaagtgtcgttggcgccaatgcctgcagtttgccatgaagcggctgctgcccagtgtctggtcagagtctgaggatggggcaggatcgcccccaccttaccgtcgtcgaaagaggcccagctctgcccgacggcaccatcttggccctaccttgaagcccaccttggctacacgcacagcccaaccagaccatacccaggctccaacgaagcaggaagcaggtggtggctttgtgctgcccccgcctggcactgaccttgtgtttttacgggaaggcgcaagcagtcctgtgcaggtgccgggccctgttgcagcttccacagaagccctgttgcaggcagtagacccaggcctgccttctgtgaagcaagagccacctgacccagaggaggacaaggaggagaacaaggatgattctgcctccaaattggccccagaggaagaggcaggaggggctggcacacccgtgatcacggagattttcagcctgggtggaacccgcttccgagatacagcagtctggttgccaagtctgcagggcaggcactcgggaagggaagatggatgtaaagtgtgggagaccgaggacacagtggagcccacgagcacgagctggaacccacgaggatggcctggaacccatgtcagtctctcaccacctccagcttcgatgatgtgggtgtcctgcagaagaagctggtgcccttcctcacagagt

SEQ ID NO: 6023 - DNA, 1701 bp, Homo sapiens
  source 1..1701: mol_type = genomic DNA
atggctgaggactggctggactgcccggccctgggccctggctggaagcgccgcgaagtctttcgcaagtcaggggccacctgtggacgctcagacacctattaccagagccccacaggagacaggatccgaagcaaagttgagctgactcgatacctgggccctgcgtgtgatctcaccctcttcgacttcaaacaaggcatcttgtgctatccagcccccaaggcccatcccgtggcggttgccagcaagaagcgaaagaagccttcaaggccagccaagactcggaaacgtcaggttggaccccagagtggtgaggtcaggaaggaggccccgagggatgagaccaaggctgacactgacacagccccagcttcattccctgctcctgggtgctgtgagaactgtggaatcagcttctcaggggatggcacccaaaggcagcggctcaaaacgttgtgcaaagactgtcgagcacagagaattgccttcaaccgggaacagagaatgtttaagagccgagggtgtggagtatgccggggctgtcagacccaagaggattgtggccattgccccatctgccttcgccctccccgccctggtctcaggcgccagtggaaatgtgtccagcgacgttgcctacggggtaaacatgcccgccgcaagggaggctgtgactccaagatggctgccaggcggcgccccggagcccagccactgcctccaccacccccatcacagtccccagagcccacagagccgcaccccagagccctggccccctcgccacctgccgagttcatctattactgtgtagacgaggacgagctaccctacacgaaccgccggcagaaccgcaagtgcggggcctgtgcagcctgcctacggcggatggactgtggccgctgcgacttctgctgcgacaagcccaaattcgggggcagcaaccagaagcgccagaagtgtcgttggcgccaatgcctgcagtttgccatgaagcggctgctgcccagtgtctggtcagagtctgaggatggggcaggatcgcccccaccttaccgtcgtcgaaagaggcccagctctgcccgacggcaccatcttggccctaccttgaagcccaccttggctacacgcacagcccaaccagaccatacccaggctccaacgaagcaggaagcaggtggtggctttgtgctgcccccgcctggcactgaccttgtgtttttacgggaaggcgcaagcagtcctgtgcaggtgccgggccctgttgcagcttccacagaagccctgttgcaggaggcccagtgctctggcctgagttgggttgtggccttaccccaggtgaagcaagagaaggcggatacccaggacgagtggacaccaggcacagctgtcctgacttctcccgtattggtgcctggctgccctagcaaggcagtagacccaggcctgccttctgtgaagcaagagccacctgacccagaggaggacaaggaggagaacaaggatgattctgcctccaaattggccccagaggaagaggcaggaggggctggcacacccgtgatcacggagattttcagcctgggtggaacccgcttccgagatacagcagtctggttgccaaggtattaccaccttgctcttgactggaaatgcaactgtggttaccacctgtgctgcaggtccgtcctggttccc

SEQ ID NO: 6024 - DNA, 777 bp, Homo sapiens
  source 1..777: mol_type = genomic DNA
atggagcggaagagcccgagcgggaagaagttccgcagcaagccgcagctggcgcgctacctgggcggctccatggacctgagcaccttcgacttccgcacgggcaagatgctgatgagcaagatgaacaagagccgccagcgcgtgcgctacgactcctccaaccaggtcaagggcaagcccgacctgaacacggcgctgcccgtgcgccagacggcgtccatcttcaagcagccggtgaccaagattaccaaccaccccagcaacaaggtcaagagcgacccgcagaaggcggtggaccagccgcgccagctcttctgggagaagaagctgagcggcctgaacgccttcgacattgctgaggagctggtcaagaccatggacctccccaagggcctgcagggggtgggacctggctgcacggatgagacgctgctgtcggccatcgccagcgccctgcacactagcaccatgcccatcacgggacagctctcggccgccgtggagaagaaccccggcgtatggctcaacaccacgcagcccctgtgcaaagccttcatggtgaccgacgaggacatcaggaagcaggaagagctggtgcagcaggtgcggaagcggctggaggaggcgctgatggccgacatgctggcgcacgtggaggagctggcccgtgacggggaggcgccgctggacaaggcctgcgctgaggacgacgacgaggaagacgaggaggaggaggaggaggagcccgacccggacccggagatggagcacgtc

SEQ ID NO: 6025 - DNA, 873 bp, Homo sapiens
  source 1..873: mol_type = genomic DNA
atggagcggaagaggtgggagtgcccggcgctcccgcagggctgggagagggaagaagtgcccagaaggtcggggctgtcggccggccacagggatgtcttttactatagcccgagcgggaagaagttccgcagcaagccgcagctggcgcgctacctgggcggctccatggacctgagcaccttcgacttccgcacgggcaagatgctgatgagcaagatgaacaagagccgccagcgcgtgcgctacgactcctccaaccaggtcaagggcaagcccgacctgaacacggcgctgcccgtgcgccagacggcgtccatcttcaagcagccggtgaccaagattaccaaccaccccagcaacaaggtcaagagcgacccgcagaaggcggtggaccagccgcgccagctcttctgggagaagaagctgagcggcctgaacgccttcgacattgctgaggagctggtcaagaccatggacctccccaagggcctgcagggggtgggacctggctgcacggatgagacgctgctgtcggccatcgccagcgccctgcacactagcaccatgcccatcacgggacagctctcggccgccgtggagaagaaccccggcgtatggctcaacaccacgcagcccctgtgcaaagccttcatggtgaccgacgaggacatcaggaagcaggaagagctggtgcagcaggtgcggaagcggctggaggaggcgctgatggccgacatgctggcgcacgtggaggagctggcccgtgacggggaggcgccgctggacaaggcctgcgctgaggacgacgacgaggaagacgaggaggaggaggaggaggagcccgacccggacccggagatggagcacgtc

SEQ ID NO: 6026 - DNA, 906 bp, Homo sapiens
  source 1..906: mol_type = genomic DNA
atgcgcgcgcacccggggggaggccgctgctgcccggagcaggaggagggggagagtgcggcgggcggcagcggcgctggcggcgactccgccatagagcaggggggccagggcagcgcgctcgccccgtccccggtgagcggcgtgcgcagggaaggcgctcggggcggcggccgtggccgggggcggtggaagcaggcgggccggggcggcggcgtctgtggccgtggccggggccggggccgtggccggggacggggacggggccggggccggggccgcggccgtcccccgagtggcggcagcggccttggcggcgacggcggcggctgcggcggcggcggcagcggtggcggcggcgccccccggcgggagccggtccctttcccgtcggggagcgcggggccggggcccaggggaccccgggccacggagagcgggaagaggatggattgcccggccctcccccccggatggaagaaggaggaagtgatccgaaaatctgggctaagtgctggcaagagcgatgtctactacttcagtccaagtggtaagaagttcagaagcaagcctcagttggcaaggtacctgggaaatactgttgatctcagcagttttgacttcagaactggaaagatgatgcctagtaaattacagaagaacaaacagagactgcgaaacgatcctctcaatcaaaataagctgcgctggaacactcatcgtcctgcaccatggcatgcgctttcaagactctgcttgctcatacgctgtttgctctgcttggaatgtgcttacccccttccccttcatctggtgaactcctactcatccaagacccagcttcattgtctccatctctgggaagcctgccctgcatactccaggcagaaccaatcctttcctcca

SEQ ID NO: 6027 - DNA, 1233 bp, Homo sapiens
  source 1..1233: mol_type = genomic DNA
atgcgcgcgcacccggggggaggccgctgctgcccggagcaggaggagggggagagtgcggcgggcggcagcggcgctggcggcgactccgccatagagcaggggggccagggcagcgcgctcgccccgtccccggtgagcggcgtgcgcagggaaggcgctcggggcggcggccgtggccgggggcggtggaagcaggcgggccggggcggcggcgtctgtggccgtggccggggccggggccgtggccggggacggggacggggccggggccggggccgcggccgtcccccgagtggcggcagcggccttggcggcgacggcggcggctgcggcggcggcggcagcggtggcggcggcgccccccggcgggagccggtccctttcccgtcggggagcgcggggccggggcccaggggaccccgggccacggagagcgggaagaggatggattgcccggccctcccccccggatggaagaaggaggaagtgatccgaaaatctgggctaagtgctggcaagagcgatgtctactacttcagtccaagtggtaagaagttcagaagcaagcctcagttggcaaggtacctgggaaatactgttgatctcagcagttttgacttcagaactggaaagatgatgcctagtaaattacagaagaacaaacagagactgcgaaacgatcctctcaatcaaaataagggtaaaccagacttgaatacaacattgccaattagacaaacagcatcaattttcaaacaaccggtaaccaaagtcacaaatcatcctagtaataaagtgaaatcagacccacaacgaatgaatgaacagccacgtcagcttttctgggagaagaggctacaaggacttagtgcatcagatgtaacagaacaaattataaaaaccatggaactacccaaaggtcttcaaggagttggtccaggtagcaatgatgagacccttttatctgctgttgccagtgctttgcacacaagctctgcgccaatcacagggcaagtctccgctgctgtggaaaagaaccctgctgtttggcttaacacatctcaacccctctgcaaagcttttattgtcacagatgaagacatcaggaaacaggaagagcgagtacagcaagtacgcaagaaattggaagaagcactgatggcagacatcttgtcgcgagctgctgatacagaagagatggatattgaaatggacagtggagatgaagcc

SEQ ID NO: 6028 - DNA, 7518 bp, Homo sapiens
  source 1..7518: mol_type = genomic DNA
atggaggtgcttcagtgtgatggctgtgatttccgagccccgtcttatgaagatctcaaggcacacattcaggatgtccacacggcatttctgcagccaactgatgttgctgaggacaatgtgaatgagctacgatgtgggtccgtgaatgccagtaatcagacagaggtggagttttcttctataaaggatgaatttgccattgcagaagatttatcaggtcaaaatgcaacttcattggggaccggaggttactatggccacagtccaggatattatggtcagcatattgccgctaatcccaaaccaacaaacaagttttttcaatgcaagttctgtgtacgctacttcaggtcaaaaaacctcctcatagaacacactagaaaggtccatggagctcaagctgaagggagttcatcaggaccccctgtcccgggatccttaaattataatatcatgatgcacgagggatttggaaaggtcttctcttgccagttttgcacatacaagtcaccaagaagggcaagaataattaagcatcagaagatgtatcacaaaaacaatttgaaggagaccactgctcccccacctgctcctgctccaatgccagaccctgtggttccgcccgtatcactgcaggacccctgcaaggaactgccagcagaggttgtggagcgcagcatcttagagtctatggtcaagcctttgaccaaatctcgaggcaacttttgttgtgagtggtgcagctaccagaccccccgccgagaacgctggtgtgaccacatgatgaagaaacaccgcagtatggtcaagatcctttccagtctcagacagcaacaagaaggaactaatctacctgatgtgccgaacaagagtgcccccagccccacttccaactccacctatctgaccatgaatgctgcaagccgggagatacccaatactaccgtctccaacttcaggggctccatgggcaactccatcatgagacccaattcttcagcttccaagttttcgcccatgtcttaccctcagatgaagccgaagtcacctcacaattctggtctagttaacttgacagagagatcccgttatggaatgactgacatgaccaattcttctgctgacctggaaactaacagcatgctaaatgactctagttctgatgaagagttaaatgaaatagacagtgagaatggtttaagtgctatggatcaccagacatcaggcctgtctgcagagcagctgatgggctcagatggcaacaaattattggagaccaaggggattccatttagaagattcatgaataggttccagtgccccttttgtcctttcctcaccatgcatcgacgtagcatctctcgtcacatagaaaacatccacttatctggaaagacagctgtctacaaatgtgacgaatgtccgtttacttgcaagagctcgttgaaacttggggctcacaaacagtgtcacacgggtacaacgtcagattgggatgctgtgaattcccagagtgaaagcatttcttcctcactgaatgaaggtgtggtgtcttatgagagctcaagcatcaatggtagaaagtcaggagtcatgttggatcccttgcagcagcaacagccaccgcagccaccaccaccgccgccgccaccaccaccatcacagccacagccactgcagcagccacagccaccacagctgcagccaccacatcaggtgccaccccagccacaaacacagccaccaccaacgcagcagccacagccacccacacaagccgcacctctgcacccatacaaatgcaccatgtgtaattactccaccacaactctgaaagggctaagagtccatcagcagcataaacattcattctgtgacaacttgccaaaattcgaggggcagccctcaagcctaccattggaaaatgagacagacagccacccctcttccagcaacactgtgaagaaaagtcagacctcaattcttgggttgtcctccaagaacaattttgtagctaaagcctctaggaagctcgccaatgactttcctctagatttgtcacccgtgaagaagagaaccaggattgacgagatagcaagcaaccttcagagcaaaattaaccaaaccaaacagcaggaagatgcagtgatcaatgttgaggatgatgaagaggaagaggaagacaacgaagtcgagatagaggttgagttggacagggaggaagaaccgacagaacccatcatagaggttcccacttccttttctgcccaacagatatgggtaagagataccagtgagccccagaaagagcccaacttcagaaacatcacccacgattacaatgccaccaatggggctgagattgagctcaccctttctgaagatgaagaggattattatggctcctcaacaaacttgaaagatcaccaagtttccaatactgctctgctgaatacccaaactcccatctatgggactgagcacaatagtgaaaacacagactttggtgactctggaaggctttactattgtaaacactgtgactttaacaacaaatctgcccggagtgttagcacccactaccaacgaatgcacccatacattaaattcagctttaggtacatcttggaccccaatgatcacagtgcagtgtacaggtgcctggaatgctacatcgattacaccaacttcgaagatctccagcagcattatggcgagcaccacccagaagccatgaatgtactcaactttgatcactcggacctgatctaccggtgtcggttttgttcatacacgagcccgaatgttagaagcctgatgccacattaccaaagaatgcatcccacggtgaagatcaacaacgcgatgatattttcaagctatgtcgtggagcagcaggaagggctgaatacagaatcccagaccctgagggagattctgaattcggctcccaagaacatggcgacttccacacctgtggctcgtggtggtggtttgccagctacgttcaacaaaaacactcctaagacctttactcctgaatgtgaaaatcagaaggaccctttggtcaacactgttgttgtttatgattgtgatgtttgttcgtttgcaagccccaacatgcattctgtcttggttcattatcagaagaaacaccccgaagaaaaggcttcctactttaggatccagaaaactatgcgaatggtgtctgtggacaggggctctgccctttctcaattatcatttgaggtgggtgctccaatgtctcccaaaatgtccaacatgggttccccaccccccccacaacccccgccaccagacctcagtactgagctttactactgcaaacactgttcctacagcaatcggtcagttgtgggagtgcttgtccactaccagaaaagacacccagaaataaaggttactgccaaatatatcagacaggctcctcccacagctgcaatgatgagaggggtcgaagggccccaaggctccccccggccacccgcccccatacaacagctgaaccgaagcagctctgagagagatggccctcctgtggagaatgagatgttcttttgccagcactgtgattatgggaaccggacggtcaaaggggtactcattcattatcagaagaagcaccgagacttcaaggccaatgcagatgtgatccggcagcatacggccaccattcgaagcctctgcgaccgaaatcagaagaagcctgccagctgcgtgcttgtctccccctctaatctggagcgggacaaaacgaaactccgagcactcaaatgtaggcagtgctcatatacctccccctacttctatgcactgaggaagcatatcaagaaagaccaccccgccctgaaagccacagtcacgtccatcatgcgatgggcatttctagatggcttgatagaagctggctaccactgcgagtggtgcatctactcccatacggagcccaacggtttgctcctgcattaccaacggaggcatccagaacactatgttgattacacctacatggctactaaactgtgggctgggccagacccatcccctccctctctcacaatgccagccgaagccaaaacctacagatgcagggactgtgttttcgaagctgtttccatctgggacatcactaatcactaccaagcattccacccctgggccatgaatggtgatgagtcagtgctactggacatcatcaaggagaaagatgctgtggagaagcccattctttcatccgaagagttggcaggccctgtgaattgtgaaaacagtatacccacccctttcccggagcaggaagctgaatgtccagaggatgcaagactgtcccctgagaaaagcctgcagctagcttcagccaaccccgccatatcctccaccccataccagtgcacggtatgccaatctgagtataacaacttgcacggccttctcactcattatgggaagaagcaccctggcatgaaagtgaaggctgctgactttgcccaggacattgacatcaacccaggtgccgtctacaaatgcaggcattgcccatacatcaacacccgcatccacggcgtactgacccactaccagaagcgacacccgtccatcaaggtgaccgctgaggactttgtgcacgacgtagagcagtctgctgacatatcccagaatgacgtggaggagacgagcaggatcttcaagcaagggtatggcgcctaccggtgcaaactgtgtccgtacacacacggcactttggagaaactaaaaatccactacgagaagtatcacaatcagcctgaatttgatgtcttttcccagtcgcccccgaagctgccagtccccctcgagcccgagatgaccactgaagtgagcccttcccaagtctccatcactgaggaggaggtgggagaggagcccgtgtccacttctcacttctctacctcccacctggtctcccacactgtgttccggtgccagctctgcaagtacttctgctccacgaggaaggggatcgccaggcactaccgcatcaagcacaataatgtccgagcccagccagaaggcaagaacaacctcttcaagtgtgccctgtgtgcctacaccaaccccatccgcaaaggtctggcagcccactaccagaagcgccacgacattgatgcgtattacactcactgcttggcagcctccaggaccatcagcgacaagcccaacaaagtgatcatcccatccccgcccaaggacgactcccctcagctgagcgaggaactccggcgggcagtggagaagaaaaagtgctccttgtgctctttccagtcgttcagcaagaagggcatcgtgtcccattacatgaaacgccacccaggggtgttcccaaagaagcagcacgccagcaagttggggggctacttcacggccgtctatgcagatgagcatgagaagcccacactgatggaagaagaggagagaggcaactttgagaaagccgaggtggagggtgaagctcaggaaatcgagtggctcccattccgctgcatcaaatgcttcaagctgtcctttagcactgcagagctgctgtgcatgcattacactgaccaccacagtcgggacctaaagagggacttcatcattctgggcaacggcccccgcttgcagaactccacctaccagtgtaagcactgtgatagcaaactgcaaagcacagccgagctgacctcacacttgaacattcacaatgaggaattccagaagcgtgccaaacgtcaggagaggaggaaacagcttttgagcaagcagaaatatgcagatggtgcttttgcagatttcaaacaagagaggccttttggtcacttagaagaggtgccaaagatcaaggagaggaaagtggtgggctacaaatgtaaattctgtgtggaagtgcacccaacgctccgagccatctgcaatcacctccgaaagcacgtccagtatggcaatgtcccagctgtgtcagctgctgtgaaggggctgcgttctcatgagaggagccacctggccctggccatgtttacccgcgaggacaagtacagctgccagtattgctcgtttgtttctgctttcaggcacaatttggatcgccatatgcaaacccaccacggacaccataaaccattccgatgcaaactctgctccttcaagtcctcctataacagccggctgaaaacacatatactcaaagctcatgctggtgagcatgcctacaagtgttcttggtgctcattctccaccatgacaatcagccagctgaaggaacactccctcaaggtccacggaaaagccctgaccctccccaggccacggatcgtcagtctcctctcctcacactcccaccactcctcccaaaaagctaccccggctgaagaagtggaagactccaatgactcatcatattcagagcccccagatgttcagcagcagttgaaccactatcagtcagctgccctggcaaggaacaacagccgtgttagccctgtgcctctttctggggctgctgctggcactgagcagaaaactgaagccgtgcttcactgcgaattctgtgaattctcctccggctacatccagagcatcaggcgtcattaccgggacaagcatggtgggaagaagcttttcaagtgcaaagactgctccttttacacaggctttaaatctgcttttactatgcacgtggaagctgggcactcagcagttcccgaggagggccccaaagatcttcgctgtcctctctgcctctatcacaccaaatacaagcgcaacatgattgaccacatcgtgctgcaccgagaagagcgtgttgtccccattgaagtttgccggtccaaactgtccaaatacttgcagggagtagttttccgctgtgataagtgtaccttcacctgctccagtgatgagagcctccagcaacatatagaaaagcacaatgaactgaaaccttacaaatgccagctctgctactatgagaccaagcacacggaggaactggacagccaccttcgggatgagcataaggtaagccgtaactttgagctggttggacgggttaacttggatcagctggaacagatgaaggagaaaatggagagctccagcagcgatgatgaggacaaggaagaagaaatgaacagcaaggctgaagacagagagctgatgagattttctgaccacggggctgctcttaacactgagaagcgttttccatgtgaattttgtggacgggcgttttcacagggctctgagtgggaaagacatgtgctgagacacggcatggcattgaatgacaccaagcaggtgagcagagaagaaatccacccaaaagagatcatggagaacagtgttaaaatgccctccatagaggaaaaggaagatgacgaggccattgggatagacttttccctaaagaatgaaacagtagccatctgtgtagtaactgccgacaaatctctcctggagaatgcagaggccaaaaaagaa

SEQ ID NO: 6029 - DNA, 1074 bp, Homo sapiens
  source 1..1074: mol_type = genomic DNA
atggaaagcctcagagggaatactgctcagggtcctacaaatgaagaagactataaaaacgaaggccaattatcaaggcaaacaaaatgtcctgcacagaagaaatcctcttttgagaacacagtggtcagaaaagtgtcagtgacactcaaagaaattttcacaggggaggaaggccctgaatccagtgaatttagtctaagcccaaaccttgacgcacaacagaaaattccaaagggacatggatccccaatatctaggaaaaactccaaagataattcagacttaattaaacaccaaagacttttctcacaaagaaaaccttgtaaatgcaatgaatgtgaaaaagcctttagttaccaatcagaccttcttgtacacagtagaattcatggtggagaaaagccttttgaatgcaacaaatgtgggaaatctttcagccgaagtacacaccttattgaacatcaaagaactcacactggagagaaaccttatgaatgcaatgaatgtggaaaagcttttagccggagcacacatcttagtctacatcagagaatccatactggagaaaaaccatatgaatgtagtgaatgtggaaaagcctttagccgaagcactaaccttagtcagcatcagcgaactcatactcaagaaaggccttacaaatgtaatgaatgtgggaaagccttcggtgaccgttcaaccataattcagcatcaacgaatacacactggagagaatccctatgaatgcagtaaatgtggaaaagctttcagttggatctcatcgcttactgaacatcagagaacacacactggggagaacccctatgagtgcagtgaatgtgggaaagtgttcagtcgaagctcgtctcttacagaacatcagagaatccacagtggagaaaagcctcacgagtgtagagtgtgtggaaagggcttcagtcgaagctcatcccttattattcatcagagaactcataccggggagaagccgtacaaatgtaatgactgtggaaaagccttctgtcagagttcaactctgatcagacatcagcaccttcatactaaagag

SEQ ID NO: 6030 - DNA, 1563 bp, Homo sapiens
  source 1..1563: mol_type = genomic DNA
atgctggagacctgtgggcttctggtcgcactgggtgacagcacaaaacctgagaccgtagagcctatcccttctcatctggccttgcctgaggaagtctcactccaggaacagctggcacagggagtcccaagatactcctatttggggcaggccatggatcaagatgggccatctgaaatgcaggaatactttttgagaccagggacagacccacagagtgagaaactccatgggaaaatgagccttgaacacgaaggtttggcgacagctgatggtatttgttcaatgatgatacagaaccaagtctcaccagaagatgctctctatggatttgactcatatggaccagttacagattccttgattcatgaaggggaaaattcctataaattcgaggaaatgtttaatgagaattgcttccttgttcagcatgagcagattctccctcgtgtgaagccctatgattgcccagaatgtgggaaagccttcggcaagagcaaacacctccttcagcatcacatcatccatactggggagaagccctataaatgcctggagtgtgggaaagacttcaaccgcaggtcacacctcacacggcaccagcggactcacaatggagataagccctttgtgtgcagtgaatgtggaaggaccttcaatcgcgggtcgcaccttacacggcaccagcgggttcacagtggagagaagccttttgtgtgcaatgaatgtggaaaggcctttacctaccgctccaattttgtcttgcataacaagagccacaatgagaagaaacccttcgcatgcagcgaatgtggaaaaggcttttatgagagtacagccctcattcaacacttcattatccatactggggagaggccctttaagtgccttgagtgtgggaaggccttcaactgcaggtcacacctcaagcagcatgagcggattcacactggtgagaagccctttgtgtgcagtcaatgtggaaaggccttcactcactattccacctatgtcctgcatgaaagagcccacactggagaaaagccttttgagtgcaaagaatgtgggaaagcctttagcattcgaaaagacctcattcgacacttcaacatccacactggagagaagccctatgagtgtttacagtgtggaaaggcttttacccgcatgtcagggctcacaaggcaccagtggattcatactggagagaagccgtatgtatgcatccaatgtgggaaagccttttgtcggaccacaaacctgattcgacactttagcatccacactggagagaagccctatgaatgcgtggagtgcgggaaggccttcaaccgcaggtcacccctcacaaggcaccagcggattcacactgcagagaagtcccacgaacccatccagagtgggaacgtttcttgtgagagcacagatctcattcaacactccatcatccacactgagagtagcccagtgagtgcagtgaatatggaaacgccttcaattgccgctcattcctcctcactcgacatcaacggattcatagtggaagaaaccctaccattg

SEQ ID NO: 6031 - DNA, 1620 bp, Homo sapiens
  source 1..1620: mol_type = genomic DNA
atggcccatgagttggtgatgttcagagatgtggctatagatgtctctcaggaggaatgggaatgcctgaacccagcgcagaggaatttgtacaaggaggtgatgttggagaattatagcaacttggtgtcacttggactttctgtttctaagccagccgtaatctcctcattggagcaagggaaggagccctggatggttgtgagggaagagacaggaagatggtgcccagacttggcatccagagatgagccccagaagttatctccaaaaagggatatttatgaaacagaattatcccagtgggttaacatggaagaatttaaaagccatagtcctgagagatcaattttcagcgctatctgggaaggcaactgtcattttgagcaacatcagggacaagaggagggttattttagacaacttatgattaaccatgaaaacatgcccatttttagccaacatactttactcactcaagaattttatgatagagagaaaatctctgaatgtaaaaagtgtagaaaaatcttcagttaccatttattttttagtcaccacaaaagaactcattctaaagaactttctgaatgtaaagaatgcacagaaattgttaatacaccatgcctttttaaacaacagacaattcaaaatggtgacaaatgcaatgagtgtaaagaatgttggaaggcctttgttcattgctcacaacttaaacatctaagaattcataatggtgaaaaacgctatgaatgtaacgaatgtgggaaggcctttaattatggctcagaacttactctacatcaaagaattcacactggtgagaaaccttatgaatgtaaagaatgtgggaaggcctttagacagcgatcacagcttactcaacatcagagacttcatactggtgaaaaaccctatgaatgtaagcaatgtgggaaggcttttattcgtggctttcaacttactgaacacctgcgactccatactggagagaaaccttatgaatgtaaagaatgtggaaagacttttaggcatcgctcacatcttactatacatcagagaattcatactggtgagaaaccctatgaatgtcgggaatgtgggaaggcctttagctatcactcaagcttctcacaccatcagaaaattcattctggcaagaaaccttatgaatgtcatgaatgtgggaaggctttttgtgatggcttacaactaaccctacatcagaggattcatactggtgagaaaccctatgagtgtaaggaatgtgggaagacttttagacagtgttcacacctcaaaagacatcagagaattcatactggtgagaaacctcatgaatgcatgatatgtggtaaggcctttagacttcattcacaccttattcaacatcaaagaattcatactggtgagaaaccctatgaatgtaaggaatgtgggaaggcctttagctatcattcaagcttctcacaccatcagagaattcattctggaaagaaaccttatcaatgcgggaaggcgtttaatcatagattacaacttaacttacatcagactcttcatactggcgagaagccagtcaggtttcctctcctccctccccatcctagtctagcatca

SEQ ID NO: 6032 - DNA, 1689 bp, Homo sapiens
  source 1..1689: mol_type = genomic DNA
atggcccatgagttggtgatgttcagagatgtggctatagatgtctctcaggaggaatgggaatgcctgaacccagcgcagaggaatttgtacaaggaggtgatgttggagaattatagcaacttggtgtcacttggactttctgtttctaagccagccgtaatctcctcattggagcaagggaaggagccctggatggttgtgagggaagagacaggaagatggtgcccaggtacatggaaaacttggggatttcacaataatttcttggacaataatgaggctacagacataaatgcagacttggcatccagagatgagccccagaagttatctccaaaaagggatatttatgaaacagaattatcccagtgggttaacatggaagaatttaaaagccatagtcctgagagatcaattttcagcgctatctgggaaggcaactgtcattttgagcaacatcagggacaagaggagggttattttagacaacttatgattaaccatgaaaacatgcccatttttagccaacatactttactcactcaagaattttatgatagagagaaaatctctgaatgtaaaaagtgtagaaaaatcttcagttaccatttattttttagtcaccacaaaagaactcattctaaagaactttctgaatgtaaagaatgcacagaaattgttaatacaccatgcctttttaaacaacagacaattcaaaatggtgacaaatgcaatgagtgtaaagaatgttggaaggcctttgttcattgctcacaacttaaacatctaagaattcataatggtgaaaaacgctatgaatgtaacgaatgtgggaaggcctttaattatggctcagaacttactctacatcaaagaattcacactggtgagaaaccttatgaatgtaaagaatgtgggaaggcctttagacagcgatcacagcttactcaacatcagagacttcatactggtgaaaaaccctatgaatgtaagcaatgtgggaaggcttttattcgtggctttcaacttactgaacacctgcgactccatactggagagaaaccttatgaatgtaaagaatgtggaaagacttttaggcatcgctcacatcttactatacatcagagaattcatactggtgagaaaccctatgaatgtcgggaatgtgggaaggcctttagctatcactcaagcttctcacaccatcagaaaattcattctggcaagaaaccttatgaatgtcatgaatgtgggaaggctttttgtgatggcttacaactaaccctacatcagaggattcatactggtgagaaaccctatgagtgtaaggaatgtgggaagacttttagacagtgttcacacctcaaaagacatcagagaattcatactggtgagaaacctcatgaatgcatgatatgtggtaaggcctttagacttcattcacaccttattcaacatcaaagaattcatactggtgagaaaccctatgaatgtaaggaatgtgggaaggcctttagctatcattcaagcttctcacaccatcagagaattcattctggaaagaaaccttatcaatgcgggaaggcgtttaatcatagattacaacttaacttacatcagactcttcatactggcgagaagccagtcaggtttcctctcctccctccccatcctagtctagcatca

SEQ ID NO: 6033 - DNA, 486 bp, Homo sapiens
  source 1..486: mol_type = genomic DNA
atgaattccagcttgaccgcccagaggcgcggcagtgacgccgagttgggaccctgggtgatggctgcgaggtccaaggacgcggcgccgtcccaacgcgacggacttttgcccgtgaaagtggaggaagactcacccggaagttgggagcccaactatcccgcggcttcgccggaccccgaaacttctcgactgcactttaggcagctgcgttaccaggaggtggctggaccggaagaggcgctgagccggctccgagaactctgtcgtcggtggctgagacccgagctgctctccaaggagcagatcctggagctgctggtgctggagcagttcctcaccatcctgcccgaggagcttcaagcctgggtgcgagagcactgcccagagagcggggaggaggcggtggccgtggtgcgggctctgcagcgagcgctcgatggaacctcatcccaggtttggaaagcagagtggagaacaaagagt

SEQ ID NO: 6034 - DNA, 630 bp, Homo sapiens
  source 1..630: mol_type = genomic DNA
atgtctgcaaaattgggaaagtcatcatcactcctaacacaaacttcagaggagtgtaatgggattctgacagagaagatggaagaggaagagcagacctgtgatccagactctagcctccactggagcagcagctacagcccagagaccttccgccagcaattcaggcagtttggctaccaggattcacctgggccccatgaggctctgagccggctctgggaactttgtcatctctggctgaggccggaagtgcacaccaaggagcagatcctggagctgctggtgctggagcagttcctggccatcctcccaaaagagcttcaggcctgggtgcagaagcatcatccagagaatggagaggaaactgtgactatgctggaggatgtggagagagagcttgatggaccaaagcagatcttttttggacgaaggaaggacatgattgcagagaagctagcaccttcagaaatcactgaggaattgccaagtagccagctcatgcccgtgaagaagcagctccagggagcatcatgggagcttcagtccttaagaccacatggtgagggggcaggattcagttcatgttggaaggtgtgggggccctctgctcaccacacacatctcagc

SEQ ID NO: 6035 - DNA, 1005 bp, Homo sapiens
  source 1..1005: mol_type = genomic DNA
atgtctgcaaaattgggaaagtcatcatcactcctaacacaaacttcagaggagtgtaatgggattctgacagagaagatggaagaggaagagcagacctgtgatccagactctagcctccactggagcagcagctacagcccagagaccttccgccagcaattcaggcagtttggctaccaggattcacctgggccccatgaggctctgagccggctctgggaactttgtcatctctggctgaggccggaagtgcacaccaaggagcagatcctggagctgctggtgctggagcagttcctggccatcctcccaaaagagcttcaggcctgggtgcagaagcatcatccagagaatggagaggaaactgtgactatgctggaggatgtggagagagagcttgatggaccaaagcagatcttttttggacgaaggaaggacatgattgcagagaagctagcaccttcagaaatcactgaggaattgccaagtagccagctcatgcccgtgaagaagcagctccagggagcatcatgggagcttcagtccttaagaccacatgatgaagacatcaaaactacaaatgtgaaatctgcttcaaggcaaaagacttctttaggcatagaactgcattgcaatgtttccaatatccttcatatgaatggctcccagagttccacatatagaggaacctatgaacaagatggtaggtttgaaaagagacaaggaaacccttcttggaaaaaacaacagaaatgtgatgaatgtggcaaaatctttagtcagagctcagcccttattttacatcagagaatccacagtggaaagaaaccttatgcatgtgacgagtgtgcaaaggcattcagccgaagcgcaattctgattcagcatcgacgaacccatactggtgagaagccctacaagtgtcatgactgtggcaaagcctttagtcagagctcaaatctttttagacataggaaaagacacattagaaaaaaagtccca

SEQ ID NO: 6036 - DNA, 999 bp, Homo sapiens
  source 1..999: mol_type = genomic DNA
atgtctgcaaaattgggaaagtcatcatcactcctaacacaaacttcagaggagtgtaatgggattctgacagagaagatggaagaggaagagcagacctgtgatccagactctagcctccactggagcagcagctacagcccagagaccttccgccagcaattcaggcagtttggctaccaggattcacctgggccccatgaggctctgagccggctctgggaactttgtcatctctggctgaggccggaagtgcacaccaaggagcagatcctggagctgctggtgctggagcagttcctggccatcctcccaaaagagcttcaggcctgggtgcagaagcatcatccagagaatggagaggaaactgtgactatgctggaggatgtggagagagagcttgatggaccaaagcagatcttttttggacgaaggaaggacatgattgcagagaagctagcaccttcagaaatcactgaggaattgccaagtagccagctcatgcccgtgaagaagcagctccagggagcatcatgggagcttcagtccttaagaccacatgatgaagacatcaaaactacaaatgtgaaatctgcttcaaggcaaaagacttctttaggcatagaactgcattgcaatgtttccaatatccttcatatgaatggctcccagagttccacatatagaggaacctatgaacaagatggtaggtttgaaaagagacaaggaaacccttcttggaaaaaacaacagaaatgtgatgaatgtggcaaaatctttagtcagagctcagcccttattttacatcagagaatccacagtggaaagaaaccttatgcatgtgacgagtgtgcaaaggcattcagccgaagcgcaattctgattcagcatcgacgaacccatactgattcaaaatatgaacatgcgattgcagaggcccaaaagaatatgtacttcaagactaggctgaagtgccccaggtcactttcaggaggcaga

SEQ ID NO: 6037 - DNA, 1602 bp, Homo sapiens
  source 1..1602: mol_type = genomic DNA
atggctgtggaatctggagtgatttcaaccctgatacctcaggatcctccggaacaagaactaatactagtgaaagtagaagataacttttcctgggatgagaaatttaagcagaatgggagtactcaatcctgccaagaattgtttcgtcagcaattcagaaaattttgctaccaggagacacctgggccccgggaggctctgagccgactccaggaactttgctatcagtggctaatgccagagttgcacacaaaggagcagatcttagaactgctggtactggagcagttcctgagcattctgcctgaggagctgcagatctgggttcagcaacataatccagaaagcggcgaggaagctgtgaccctgttggaggatttagagagggagtttgatgacccagggcagcaggtcccagctagtccacagggaccagcagtgccatggaaggatttaacatgtctcagagcatcccaagagtcaacagacatccacctccagcccttaaagacacagctgaaatcctggaaaccatgcctttcccctaaaagtgattgtgagaacagtgaaacagcaacaaaagagggcatctcagaagaaaaatcacagggactccctcaggaaccttcatttcgaggaattagtgagcatgaaagcaatttagtgtggaagcaaggaagtgctacaggggagaaactaagatctccttcccaagggggcagttttagtcaagtgatcttcacaaacaaatctctaggaaagagagacctttatgatgaggctgaaagatgcttgattctaactacagactctataatgtgtcagaaagttcctccagaagagagaccttatagatgtgatgtatgtgggcacagcttcaagcagcattcctctctaacacaacatcagagaatccatactggagaaaagccctataaatgtaaccagtgtgggaaggcctttagtttgaggtcctatcttattattcatcagagaattcatagtggtgagaaagcatatgaatgtagtgaatgtgggaaagctttcaatcagagctcagccctcattagacatcggaaaatccatactggtgagaaagcttgtaaatgtaatgagtgtggcaaagcattcagtcaaagttcatatctcattatacatcaaagaattcacactggtgagaaaccttatgagtgtaatgaatgtgggaaaacctttagccagagctcaaaactcattagacatcagcgaattcacacaggagagagaccctatgaatgtaatgaatgtggaaaagctttcaggcagagctcagagctgattactcatcagagaatacatagtggagagaaaccctatgaatgtagtgaatgtggaaaagctttcagtttgagctcaaaccttatcagacatcagagaattcatagtggggaggaaccttatcagtgtaatgaatgtggcaaaactttcaaaaggagctcagcccttgttcagcatcagagaattcattctggggatgaagcttatatatgtaatgaatgtgggaaggctttcaggcacagatcggtccttatgcgccatcaaagagtccacactataaag

SEQ ID NO: 6038 - DNA, 3453 bp, Homo sapiens
  source 1..3453: mol_type = genomic DNA
atgtcccggcgaaagcaaagcaaaccccggcagatcaaacggccgcttgaagatgccattgaagatgaggaagaagaatgtccatcagaggaaacagacatcatctccaaaggagactttccattggaggaaagcttttccacagaatttgggcctgaaaatctgagctgcgaagaagtggaatacttttgtaacaaaggtgatgatgaaggaatccaggagacagcagaatcagatggggacacacagtcagagaaaccggggcaacctggagttgagacagacgactgggatggaccaggagagctggaggtgtttcagaaagatggggaacgaaaaattcagagtcgacagcaacttccagtgggaacaacctgggggccgtttcctgggaagatggacttgaataataattctttgaagacaaaggctcaggtcccaatggtgctgactgctggtcccaagtggttgctggatgtgacttggcaaggagtggaagacaacaaaaacaactgcattgtgtacagcaaagggggtcagctttggtgtacaactacgaaggccatctctgagggtgaagagctaattgcctttgtggtggattttgactcaaggctacaagctgccagtcagatgactctcacagaagggatgtaccctgcacgcctgctggactcaattcagctgcttcctcagcaagctgccatggcttctattttgcccacagctattgtcaataaggatatattcccttgcaagtcctgtggcatctggtatcggagtgagcggaatctgcaggcccatttgatgtactactgcagtgggaggcaaagagaagctgctccggtgtcagaggaaaatgaagacagtgcccatcagatttccagcctgtgccccttcccacagtgcaccaagagcttttcaaatgctcgagctctagaaatgcacctgaattcacacagtggagtgaaaatggaagaattcctgccccctggtgctagtctaaaatgcaccgtctgtagctacactgctgattccgtgatcaactttcaccaacacctgttctcccatctcactcaagctgccttccgatgtaatcactgccatttcggcttccagactcagagggagttattgcagcaccaggagctccatgtccctagcggcaaacttcccagagaaagtgacatggaacactctccaagtgcaactgaagacagcttacagccagccacagacttattgaccagaagcgaacttccccagagccaaaaggccatgcagactaaagatgcgagctctgacacagagctggacaagtgtgagaaaaagactcagctctttctcacgaaccagagaccagagatacagcctacaacaaataaacaaagcttttcttacacaaaaataaagtctgagccctctagcccaagacttgcctcatctccagttcagcctaatattgggccttctttccctgtgggccctttcctatctcagttttctttcccccaagatatcaccatggtccctcaagcttcagagatcttagctaagatgtctgaactggtgcatcggcgactgaggcatggcagtagtagctaccctcccgtcatttacagccctttgatgcccaagggggctacttgttttgagtgtaacataacattcaataatttggataattatctagtgcacaaaaagcattattgcagcagccgatggcagcagatggctaagtccccagagttccctagtgtgtcagaaaagatgcctgaagctttgagtcccaacactggccaaacctccataaaccttctcaacccagctgctcattctgctgatcctgagaatccacttcttcaaacatcttgcatcaattcttccactgtcttagatttaattgggccaaatgggaagggccatgacaaggacttttccactcaaactaagaagctctccacctccagtaacaatgatgacaaaattaatggaaaacctgttgatgtgaaaaatcccagtgtccccttagtggatggggaaagtgacccaaataagactacctgtgaagcttgcaacattaccttcagccggcacgaaacatacatggtccacaaacagtattactgtgctacacgccacgaccctccactgaagaggtctgcttccaacaaagtgcctgccatgcagagaaccatgcgcacacgcaagcgcagaaagatgtatgagatgtgcctacctgagcaggaacaaaggcctccactggttcagcagagatttcttgacgtagccaacctcaataatccttgtacctccactcaagaacccacagaagggctaggagagtgctaccacccaagatgtgatatctttccaggaattgtctctaaacacttggaaacttctctgacgatcaacaagtgtgttccagtttccaaatgtgatactactcattccagtgtttcctgcctagagatggacgtgcccatagatctcagcaaaaagtgtttatctcagtctgagcggacgaccacgtctcccaaaaggctgctggactatcacgagtgcactgtgtgcaagatcagtttcaataaggtagaaaactatctggcccacaagcagaatttctgcccggttactgcacatcagcgtaatgacctgggtcaactggacggcaaagtgtttccgaatccagaaagcgaacgaaacagccctgatgtcagctacgaaagaagcataataaaatgtgagaaaaatgggaatttgaagcagccttcccccaatggaaacttattttcatcccacctagcaaccctgcaaggcttgaaggtctttagtgaagctgctcagctcattgctacaaaagaagaaaacagacatttgtttcttccacaatgcctttaccctggagcaataaagaaagcaaaaggagccgaccagctttctccatattatggaatcaagccaagtgattatatttctggttctcttgtcatccataacactgacatcgagcaaagcagaaatgcagaaaatgaatctcctaaaggccaggcttcctcaaatgggtgtgctgcgctgaagaaagattctctgccattgttgcccaaaaatcgaggaatggtaatagtgaatggtggactgaaacaagatgagagacctgctgccaacccacagcaagagaacatttcccagaatcctcagcacgaagacgaccacaaatctccctcgtggatctctgagaacccattagctgccaatgagaatgtctcaccaggaattccctcagcagaggaacagttgtctagtatagcaaaaggtgtgaatggttccagccaggctccaaccagtgggaaatattgccggctatgtgatatccagttcaacaacctttcaaactttataactcacaagaagttttattgctcatcacatgcagcagaacatgtcaaa

SEQ ID NO: 6039 - DNA, 3018 bp, Homo sapiens
  source 1..3018: mol_type = genomic DNA
atgtccaggcggaaacagagcaacccccggcagatcaagcgttccctcggagacatggaggccagagaggaggtgcagttggtgggtgccagccacatggagcaaaaggccacggcacctgaagccccgagccctcccagcgcagatgttaactcacccccaccgctgccgccccccacatccccaggaggccccaaggagctggaaggacaggaaccagaacccaggcccacggaggaagagccgggcagtccctggagcgggccagacgagctggagccggtggtgcaggatgggcagaggcgcatacgggcccgactcagcctcgccacgggcctgtcctggggcccgttccatgggagtgtccagaccagagcctcatcccccaggcaggcggagccgagcccagccctgaccctgctgctggtggacgaggcctgctggctgaggacgctgccccaggccctgactgaggccgaggccaacacagagatccacaggaaggatgacgcactctggtgcagggtcaccaagccggtgcctgcggggggactcctgagcgtgctcctcacggccgagccccacagcacccccggccaccctgtgaagaaggagccagcagagcccacgtgcccggcccctgcacacgacctccagctcctgccccagcaggccgggatggcctccatccttgccaccgcagtgatcaacaaagacgtcttcccctgcaaggactgtggcatctggtaccgcagcgagcgcaacctgcaggcgcacctgctctactactgcgccagccgccagggcaccggctccccggccgcagccgccacagacgagaagcccaaagagacctaccccaacgagcgcgtctgccccttcccccagtgccgcaagagctgccccagcgccagctccctggagatccacatgcgcagccacagcggagagcggcccttcgtgtgcctgatctgcctgtcggccttcaccaccaaggccaactgcgagcggcacctcaaggtgcacacggacacgctgagcggtgtctgccacagctgtggcttcatctccaccacaagggacatcctctacagccacttggtcaccaaccacatggtctgccagcctggctccaagggtgagatctactcgccaggggccggacacccagcaaccaagctgcccccagacagtctgggcagcttccagcagcagcacacggccctgcaaggccccctggcctccgcggacctgggcctggcgcccaccccatcgccaggactggacagaaaggccctggccgaggccaccaacggagaggccagagcggagcctctggcccagaatggaggcagcagcgagcccccggcggcccccaggagcatcaaggtggaggcggtggaggagccggaggcggcccccatcctgggccccggagagcctgggccccaggccccgtcgcggacgccgtcgccgcgcagccccgccccggccagggtcaaggccgagctgtccagccccacgccgggctccagcccggtgcccggcgagctgggcctggccggggccctgttccttccgcagtacgtgttcgggcccgacgcggcgccccccgcctcggagatcctggccaagatgtccgagctggtgcacagccggctgcagcagggcgcgggcgcgggcgccggcggcgcgcagaccgggctcttccccggggcccccaagggcgctacgtgcttcgagtgcgagatcaccttcagcaacgtcaacaactactacgtgcacaagcgcctctactgttcaggccgccgtgcgcccgaggacgcgcctgccgcgcgcaggcccaaggcgccccccggcccggcccgcgcgccccccggccagcccgccgaacccgacgcgccgcgctcgtccccgggccccggagcgcgcgaggagggggctgggggcgcggccacgcccgaggacggcgcgggcggccggggcagcgagggcagccagagcccgggtagctccgtggacgacgcggaggacgaccccagccgcacgctgtgcgaggcctgcaacatccgcttcagccgccacgagacctacaccgtgcacaagcggtactactgcgcctcgcgccacgacccgccgccgcgccgaccggccgcgcccccgggaccccctgggccggccgcgcccccggccccctctcccgccgcgcctgtgcgcacgcgcagacgccgcaagctctacgagctgcacgcggccggcgccccgccccccccgccgcccggccacgcccccgcgcccgagtcgccgcggcccggaagcggaagcggaagcggccccggcctcgcccctgcgcgctcgcccggccccgcggccgacggccccatcgacctgagcaagaagccgcggcgcccgctccccggagccccggcaccggcgctggccgactaccacgagtgcacggcctgccgcgtgagcttccacagcctcgaggcctacctggcgcacaagaagtactcgtgccccgctgcgccaccgcccggcgcgctcggcctgcccgccgccgcctgcccctactgccccccgaacggcccggtgcgcggggacctgctggagcatttccgcctggcgcacggcctgctgctcggcgcgcccctggccggcccgggggtcgaggcccggacgccggccgaccgcggcccctcgcccgctcccgcccccgccgcctccccgcagcccgggtcccgtggcccccgggacggcctcggcccggagccccaggagccgccgcccggcccgcccccgtccccggccgccgcgcccgaggccgtgccgcccccgccggcgcccccctcctactcggacaagggcgtccagactcccagcaagggcacgccggcgccgctgcccaacggcaaccaccggtactgccgtctttgcaacatcaagttcagcagcctgtccaccttcatcgcccacaagaagtattactgctcctcgcacgccgccgagcacgtgaag

SEQ ID NO: 6040 - DNA, 3663 bp, Homo sapiens
  source 1..3663: mol_type = genomic DNA
atgctacgctccactggcttcttccgggccattgactgcccctattggtctggggcgcccggggggccctgccggcggccctactgccacttccggcaccgcggggcccggggctccggcgcgcccggtgacggcggagaggcgccccccgcagcagggctgggttacgacccctacaaccctgagctgcccaagccccccgcgcagagggagaatggcaccctgggcctgggggaggagccgcgcccggatgtgctggagttggagctggtcaaccaggccatcgaggccgtgcgcagtgaggtggagctggagcagcggcgctaccgggagctgctggagacgacccgtgagcaccgctccgccgaggcccccgccctggcgccccgcggccccaacgccagccccactgtgggcccggacgaggatgccttcccactggccttcgactacagccccggcagccacggcctattaagccctgatgccggctaccagcccaccccactggccgcccctgccgagccgggcagcaagtactcgctggcgtccctggacaggggtcagggcagaggtggagggggtggcggtgccctggaatacgtccccaaggctgtgagccagccccggcggcacagccgccccgttcccagtggcaagtacgtggtggacaactccaggccacccacagacctggagtatgaccctctctccaactactcggcccggcacctcagcagggccagctcccgggatgagcgggccgccaagcggccccggggctcccgcggcagtgagccctacacacctgctcccaagaagctctgtgacccctttggcagttgcgatgcaaggttctcagactcagaagatgaggccgccacggtcccaggtaacgagcccaccacggccagcacccccaaagccagggccgaccctgagatcaaggccaccgggcagccaccctccaaagagggcctggaggccgaggggggcggcctgcgggagaccaaggagacggccgtgcagtgcgacgtgggggacctccagccgcccccagccaagcccgcctccccagcccaggtccagtcctcacaggatgggggctgccccaaggagggaaaacccaagaagaaaaaaaccggggccccacctgcccccagctgcaaagacggggcccaggggaaggacaagaccaaggacaagggccgagggcggcctgtggagaagccccgtgcggacaagaagggcccgcaggccagcagcccccggcgcaaggcagagcggccggaagggaccaagaagaagccatcttcggccactcctgtggccacctcagggaaagggaggcctgaccggccagcgcggcggccgagccccacaagcggggactcccgaccggcggccggcagaggcccaccccgccccctccagctgcccgacaggaagagcaccaaggccccgtcggggaagctagtggagcggaaagcccgctcactagacgagggcgcctcccaggacgcccccaagctgaagaagcgggccctgagccacgccgacctctttggggacgagagtgaggacgaggccgcagggccaggggtgccgagcgtgtggccctctgccctccccagcctcagctcggactcagactccgactcagactccagcctgggcttcccggaggcgcaggggccgcccaagcggctcaaggcctccccgcccccctcccccgccccatcctcctcctcctcctcctcctcctccacctccagcgcgggggcggatgtggactactcggccctggagaaggaggtggactttgactccgaccccatggaggagtgcctgcggatcttcaacgagtccaccagcgtcaagacggaggacagaggccggctggcccggcagccccccaaggaagagaagagtgaggagaaggggctttcgggtctgaccactctgttccccgggcagaagaggaggatctcccacctttccaagcaaggccaggaggtggagcccccgaggaggggtcccgcggtgcccccggcccggcccccgacggcgcaggaggtgtgctacctgcgggcccagcaggcgcagagggcatcggcgagcttgctgcaggcccccgccaggctggcagagaagtcgccctccgtccacatttccgcccctggcgagaagaggaggatcgcccacatccccaacccccgcctggctgcagcccccacaggtgccaagaggacccttgcggccagcggcagccagtcctccaacggccctgagccaggtggccagcagctgaaaacacgcacattgtcggggatggcgtccaagactaccaccaccatcatccctaagcgaatcgcccacagtccatccttacagagtttaaagaaacccattatccccaaagagtttgggggcaaagtccccaccgtcatccgccagcgctatctcaacctgttcatcgaggagtgtctcaagttctgtacctccaaccaggaggccatagagaaggcactgaacgaggagaaggtggcctatgaccgcagccccagcaagaacatctacctgaatgtggccgtgaacaccctcaagaagctcaggggcctggcccccagcgctgtgcccggcctcagcaaaaccagtggccgcagggttgtgtcccacgaggtggtgttggggggcaggttggccgccaagaccagcttctcgctcagccgtccaagcagcccccgggtggaggacctgaaaggggctgccctgtacagccgcctcagggagtacctgctcacccaggaccagctcaaggagaacggctaccccttcccgcacccagagcggcccgggggcgcaatcatcttcacagctgaggagaagaggcccaaggactcttcctgcaggacctgctgccgctgtggcaccgagtacctcgtgtcctcttcaggccgctgcatccgggacgaggagtgttattaccactggggacggctgcgccggaaccgggtggccggaggctgggagacccagtacatgtgctgctcggctgccgccggctctgtcggctgccaagtcgcaaagcaacacgtgcaggatggccggaaggagcgccttgagggcttcgtgaagacctttgagaaagagctctcaggagacacccacccggggatctacgccctggactgcgagatgtcctacaccacatatggcctggagctgacgcgcgtcacggtggtcgacacggacgtgcacgtggtttatgacaccttcgtgaagcctgacaacgagatcgtggactacaacaccaggttttcgggggtgacggaggctgaccttgccgacacaagtgtcacgctgcgtgacgtccaggccgttctgctgagcatgttcagcgctgacaccatcctcatcggacacagcctggagagcgacctcctggccctgaaggtcatccacagcaccgtggtggacacgtctgtgctcttcccccaccgcctgggcctcccctacaagcggtccctgcggaacctcatggccgactacctcagacagatcatccaggacaatgtggatgggcacagctccagcgaggacgccggcgcctgcatgcacctggtgatctggaaggttcgagaagacgccaagaccaagcga

SEQ ID NO: 6041 - DNA, 2082 bp, Homo sapiens
  source 1..2082: mol_type = genomic DNA
atgaagcacctgaagcggtggtggtcggccggcggcggcctcctgcacctcaccctcctgctgagcttggcggggctccgcgtagacctagatctttacctgctgctgccgccgcccaccctgctgcaggacgagctgctgttcctgggcggcccggccagctccgcctacgcgctcagccccttctcggcctcgggagggtgggggcgcgcgggccacttgcaccccaagggccgggagctggaccctgccgcgccgcccgagggccagctgctccgggaggtgcgcgcgctcggggtccccttcgtccctcgcaccagcgtggatgcatggctggtgcacagcgtggctgccgggagcgcggacgaggcccacgggctgctcggcgccgccgccgcctcgtccaccggaggagccggcgccagcgtggacggcggcagccaggctgtgcaggggggcggcggggacccccgagcggctcggagtggccccttggacgccggggaagaggagaaggcacccgcggaaccgacggctcaggtgccggacgctggcggatgtgcgagcgaggagaatggggtactaagagaaaagcacgaagctgtggatcatagttcccagcatgaggaaaatgaagaaagggtgtcagcccagaaggagaactcacttcagcagaatgatgatgatgaaaacaaaatagcagagaaacctgactgggaggcagaaaagaccactgaatctagaaatgagagacatctgaatgggacagatacttctttctctctggaagacttattccagttgctttcatcacagcctgaaaattcactggagggcatctcattgggagatattcctcttccaggcagtatcagtgatggcatgaattcttcagcacattatcatgtaaacttcagccaggctataagtcaggatgtgaatcttcatgaggccatcttgctttgtcccaacaatacatttagaagagatccaacagcaaggacttcacagtcacaagaaccatttctgcagttaaattctcataccaccaatcctgagcaaacccttcctggaactaatttgacaggatttctttcaccggttgacaatcatatgaggaatctaacaagccaagacctactgtatgaccttgacataaatatatttgatgagataaacttaatgtcattggccacagaagacaactttgatccaatcgatgtttctcagctttttgatgaaccagattctgattctggcctttctttagattcaagtcacaataatacctctgtcatcaagtctaattcctctcactctgtgtgtgatgaaggtgctataggttattgcactgaccatgaatctagttcccatcatgacttagaaggtgctgtaggtggctactacccagaacccagtaagctttgtcacttggatcaaagtgattctgatttccatggagatcttacatttcaacacgtatttcataaccacacttaccacttacagccaactgcaccagaatctacttctgaaccttttccgtggcctgggaagtcacagaagataaggagtagataccttgaagacacagatagaaacttgagccgtgatgaacagcgtgctaaagctttgcatatccctttttctgtagatgaaattgtcggcatgcctgttgattctttcaatagcatgttaagtagatattatctgacagacctacaagtctcacttatccgtgacatcagacgaagagggaaaaataaagttgctgcgcagaactgtcgtaaacgcaaattggacataattttgaatttagaagatgatgtatgtaacttgcaagcaaagaaggaaactcttaagagagagcaagcacaatgtaacaaagctattaacataatgaaacagaaactgcatgacctttatcatgatatttttagtagattaagagatgaccaaggtaggccagtcaatcccaaccactatgctctccagtgtacccatgatggaagtatcttgatagtacccaaagaactggtggcctcaggccacaaaaaggaaacccaaaagggaaagagaaag

SEQ ID NO: 6042 - DNA, 1746 bp, Homo sapiens
  source 1..1746: mol_type = genomic DNA
atggatttgattgacatactttggaggcaagatatagatcttggagtaagtcgagaagtatttgacttcagtcagcgacggaaagagtatgagctggaaaaacagaaaaaacttgaaaaggaaagacaagaacaactccaaaaggagcaagagaaagcctttttcgctcagttacaactagatgaagagacaggtgaatttctcccaattcagccagcccagcacatccagtcagaaaccagtggatctgccaactactcccaggttgcccacattcccaaatcagatgctttgtactttgatgactgcatgcagcttttggcgcagacattcccgtttgtagatgacaatgagtcacttgttcctgatattcccggtcacatcgagagcccagtcttcattgctactaatcaggctcagtcacctgaaacttctgttgctcaggtagcccctgttgatttagacggtatgcaacaggacattgagcaagtttgggaggagctattatccattcctgagttacagtgtcttaatattgaaaatgacaagctggttgagactaccatggttccaagtccagaagccaaactgacagaagttgacaattatcatttttactcatctataccctcaatggaaaaagaagtaggtaactgtagtccacattttcttaatgcttttgaggattccttcagcagcatcctctccacagaagaccccaaccagttgacagtgaactcattaaattcagatgccacagtcaacacagattttggtgatgaattttattctgctttcatagctgagcccagtatcagcaacagcatgccctcacctgctactttaagccattcactctctgaacttctaaatgggcccattgatgtttctgatctatcactttgcaaagctttcaaccaaaaccaccctgaaagcacagcagaattcaatgattctgactccggcatttcactaaacacaagtcccagtgtggcatcaccagaacactcagtggaatcttccagctatggagacacactacttggcctcagtgattctgaagtggaagagctagatagtgcccctggaagtgtcaaacagaatggtcctaaaacaccagtacattcttctggggatatggtacaacccttgtcaccatctcaggggcagagcactcacgtgcatgatgcccaatgtgagaacacaccagagaaagaattgcctgtaagtcctggtcatcggaaaaccccattcacaaaagacaaacattcaagccgcttggaggctcatctcacaagagatgaacttagggcaaaagctctccatatcccattccctgtagaaaaaatcattaacctccctgttgttgacttcaacgaaatgatgtccaaagagcagttcaatgaagctcaacttgcattaattcgggatatacgtaggaggggtaagaataaagtggctgctcagaattgcagaaaaagaaaactggaaaatatagtagaactagagcaagatttagatcatttgaaagatgaaaaagaaaaattgctcaaagaaaaaggagaaaatgacaaaagccttcacctactgaaaaaacaactcagcaccttatatctcgaagttttcagcatgctacgtgatgaagatggaaaaccttattctcctagtgaatactccctgcagcaaacaagagatggcaatgttttccttgttcccaaaagtaagaagccagatgttaagaaaaac

SEQ ID NO: 6043 - DNA, 1767 bp, Homo sapiens
  source 1..1767: mol_type = genomic DNA
atggatttgattgacatactttggaggcaagatatagatcttggagtaagtcgagaagtatttgacttcagtcagcgacggaaagagtatgagctggaaaaacagaaaaaacttgaaaaggaaagacaagaacaactccaaaaggagcaagagaaagcctttttcgctcagttacaactagatgaagagacaggtgaatttctcccaattcagccagcccagcacatccagtcagaaaccagtggatctgccaactactcccaggttgcccacattcccaaatcagatgctttgtactttgatgactgcatgcagcttttggcgcagacattcccgtttgtagatgacaatgaggtttcttcggctacgtttcagtcacttgttcctgatattcccggtcacatcgagagcccagtcttcattgctactaatcaggctcagtcacctgaaacttctgttgctcaggtagcccctgttgatttagacggtatgcaacaggacattgagcaagtttgggaggagctattatccattcctgagttacagtgtcttaatattgaaaatgacaagctggttgagactaccatggttccaagtccagaagccaaactgacagaagttgacaattatcatttttactcatctataccctcaatggaaaaagaagtaggtaactgtagtccacattttcttaatgcttttgaggattccttcagcagcatcctctccacagaagaccccaaccagttgacagtgaactcattaaattcagatgccacagtcaacacagattttggtgatgaattttattctgctttcatagctgagcccagtatcagcaacagcatgccctcacctgctactttaagccattcactctctgaacttctaaatgggcccattgatgtttctgatctatcactttgcaaagctttcaaccaaaaccaccctgaaagcacagcagaattcaatgattctgactccggcatttcactaaacacaagtcccagtgtggcatcaccagaacactcagtggaatcttccagctatggagacacactacttggcctcagtgattctgaagtggaagagctagatagtgcccctggaagtgtcaaacagaatggtcctaaaacaccagtacattcttctggggatatggtacaacccttgtcaccatctcaggggcagagcactcacgtgcatgatgcccaatgtgagaacacaccagagaaagaattgcctgtaagtcctggtcatcggaaaaccccattcacaaaagacaaacattcaagccgcttggaggctcatctcacaagagatgaacttagggcaaaagctctccatatcccattccctgtagaaaaaatcattaacctccctgttgttgacttcaacgaaatgatgtccaaagagcagttcaatgaagctcaacttgcattaattcgggatatacgtaggaggggtaagaataaagtggctgctcagaattgcagaaaaagaaaactggaaaatatagtagaactagagcaagatttagatcatttgaaagatgaaaaagaaaaattgctcaaagaaaaaggagaaaatgacaaaagccttcacctactgaaaaaacaactcagcaccttatatctcgaagttttcagcatgctacgtgatgaagatggaaaaccttattctcctagtgaatactccctgcagcaaacaagagatggcaatgttttccttgttcccaaaagtaagaagccagatgttaagaaaaac

SEQ ID NO: 6044 - DNA, 2226 bp, Homo sapiens
  source 1..2226: mol_type = genomic DNA
atgctttctctgaagaaatacttaacggaaggacttctccagttcaccattctgctgagtttgattggggtacgggtggacgtggatacttacctgacctcacagcttcccccactccgggagatcatcctggggcccagttctgcctatactcagacccagttccacaacctgaggaataccttggatggctatggtatccaccccaagagcatagacctggacaattacttcactgcccggcggctcctcagtcaggtgagggccctggacaggttccaggtgccaaccactgaggtaaatgcctggctggttcaccgagacccagaggggtctgtctctggcagtcagcccaactcaggcctcgccctcgagagttccagtggcctccaagatgtgacaggcccagacaacggggtgcgagaaagcgaaacggagcagggattcggtgaagatttggaggatttgggggctgtagcccccccagtcagtggagacttaaccaaagaggacatagatctgattgacatcctttggcgacaggatattgatctgggggctgggcgtgaggtttttgactatagtcaccgccagaaggagcaggatgtggagaaggagctgcgagatggaggcgagcaggacacctgggcaggcgagggcgcggaagctctggcacggaacctgctagtggatggagagactggggagagcttccctgcacagtttccagcagacatttccagcataacagaagcagtgcctagtgagagtgagccccctgctcttcaaaacaacctcttgtctcctcttctgaccgggacagagtcaccatttgatttggaacagcagtggcaagatctcatgtccatcatggaaatgcaggccatggaagtgaacacatcagcaagtgaaatcctgtacagtgcccctcctggagacccactgagcaccaactacagccttgcccccaacactcccatcaatcagaatgtcagcctgcatcaggcgtccctggggggctgcagccaggacttcttactcttcagccccgaggtggaaagcctgcctgtggccagtagctccacgctgctcccgttggcccccagcaattctaccagcctcaactccaccttcggctccaccaacctgacagggctcttctttccaccccagctcaatggcacagccaatgacacagcaggcccagagctgcctgaccctttggggggtctgttagatgaagctatgttggatgagatcagccttatggacctggccattgaagaaggctttaaccctgtgcaggcctcccagctggaggaggaatttgactctgactcaggcctttccttagactcgagccatagcccttcttccctaagcagctctgaaggcagttcttcctcttcttcctcctcctcttcctcttcttcctctgcttcttcctctgcctcttcctccttttctgaggaaggtgcggttggctacagctctgactctgagaccctggatctggaagaggccgagggtgctgtgggctaccagcctgagtattccaagttctgccgcatgagctaccaggatccagctcagctctcatgcctgccctacctggagcacgtgggccacaaccacacatacaacatggcacccagtgccctggactcagccgacctgccaccacccagtgccctcaagaaaggcagcaaggagaagcaggctgacttcctggacaagcagatgagccgggatgagcaccgagcccgagccatgaagatccctttcaccaatgacaaaatcatcaacctgcctgtggaggagttcaatgaactgctgtccaaataccagttgagtgaagcccagctgagcctcatccgagacatccggcgccggggcaagaacaagatggcggcgcagaactgccgcaagcgcaagctggacaccatcctgaatctggagcgtgatgtggaggacctgcagcgtgacaaagcccggctgctgcgggagaaagtggagttcctgcgctccctgcgacagatgaagcagaaggtccagagcctgtaccaggaggtgtttgggcggctgcgagatgagaacggacgaccctactcgcccagtcagtatgcgctccagtacgccggggacggcagtgtcctcctcatcccccgcacgatggccgaccagcaggcccggcggcaggagaggaagccaaaggaccggagaaag

SEQ ID NO: 6045 - DNA, 2283 bp, Homo sapiens
  source 1..2283: mol_type = genomic DNA
atgctttctctgaagaaatacttaacggaaggacttctccagttcaccattctgctgagtttgattggggtacgggtggacgtggatacttacctgacctcacagcttcccccactccgggagatcatcctggggcccagttctgcctatactcagacccagttccacaacctgaggaataccttggatggctatggtatccaccccaagagcatagacctggacaattacttcactgcccggcggctcctcagtcaggtgagggccctggacaggttccaggtgccaaccactgaggtaaatgcctggctggttcaccgagacccagaggggtctgtctctggcagtcagcccaactcaggcctcgccctcgagagttccagtggcctccaagatgtgacaggcccagacaacggggtgcgagaaagcgaaacggagcagggattcggtgaagatttggaggatttgggggctgtagcccccccagtcagtggagacttaaccaaagaggatattgatctgggggctgggcgtgaggtttttgactatagtcaccgccagaaggagcaggatgtggagaaggagctgcgagatggaggcgagcaggacacctgggcaggcgagggcgcggaagctctggcacggaacctgctagtggatggagagactggggagagcttccctgcacaggtgcctagtggggaggaccagacggccctgtccctggaagagtgccttaggctgctggaagccacctgcccctttggggagaatgctgagtttccagcagacatttccagcataacagaagcagtgcctagtgagagtgagccccctgctcttcaaaacaacctcttgtctcctcttctgaccgggacagagtcaccatttgatttggaacagcagtggcaagatctcatgtccatcatggaaatgcaggccatggaagtgaacacatcagcaagtgaaatcctgtacagtgcccctcctggagacccactgagcaccaactacagccttgcccccaacactcccatcaatcagaatgtcagcctgcatcaggcgtccctggggggctgcagccaggacttcttactcttcagccccgaggtggaaagcctgcctgtggccagtagctccacgctgctcccgttggcccccagcaattctaccagcctcaactccaccttcggctccaccaacctgacagggctcttctttccaccccagctcaatggcacagccaatgacacagcaggcccagagctgcctgaccctttggggggtctgttagatgaagctatgttggatgagatcagccttatggacctggccattgaagaaggctttaaccctgtgcaggcctcccagctggaggaggaatttgactctgactcaggcctttccttagactcgagccatagcccttcttccctaagcagctctgaaggcagttcttcctcttcttcctcctcctcttcctcttcttcctctgcttcttcctctgcctcttcctccttttctgaggaaggtgcggttggctacagctctgactctgagaccctggatctggaagaggccgagggtgctgtgggctaccagcctgagtattccaagttctgccgcatgagctaccaggatccagctcagctctcatgcctgccctacctggagcacgtgggccacaaccacacatacaacatggcacccagtgccctggactcagccgacctgccaccacccagtgccctcaagaaaggcagcaaggagaagcaggctgacttcctggacaagcagatgagccgggatgagcaccgagcccgagccatgaagatccctttcaccaatgacaaaatcatcaacctgcctgtggaggagttcaatgaactgctgtccaaataccagttgagtgaagcccagctgagcctcatccgagacatccggcgccggggcaagaacaagatggcggcgcagaactgccgcaagcgcaagctggacaccatcctgaatctggagcgtgatgtggaggacctgcagcgtgacaaagcccggctgctgcgggagaaagtggagttcctgcgctccctgcgacagatgaagcagaaggtccagagcctgtaccaggaggtgtttgggcggctgcgagatgagaacggacgaccctactcgcccagtcagtatgcgctccagtacgccggggacggcagtgtcctcctcatcccccgcacgatggccgaccagcaggcccggcggcaggagaggaagccaaaggaccggagaaag

SEQ ID NO: 6046 - DNA, 2316 bp, Homo sapiens
  source 1..2316: mol_type = genomic DNA
atgctttctctgaagaaatacttaacggaaggacttctccagttcaccattctgctgagtttgattggggtacgggtggacgtggatacttacctgacctcacagcttcccccactccgggagatcatcctggggcccagttctgcctatactcagacccagttccacaacctgaggaataccttggatggctatggtatccaccccaagagcatagacctggacaattacttcactgcccggcggctcctcagtcaggtgagggccctggacaggttccaggtgccaaccactgaggtaaatgcctggctggttcaccgagacccagaggggtctgtctctggcagtcagcccaactcaggcctcgccctcgagagttccagtggcctccaagatgtgacaggcccagacaacggggtgcgagaaagcgaaacggagcagggattcggtgaagatttggaggatttgggggctgtagcccccccagtcagtggagacttaaccaaagaggacatagatctgattgacatcctttggcgacaggatattgatctgggggctgggcgtgaggtttttgactatagtcaccgccagaaggagcaggatgtggagaaggagctgcgagatggaggcgagcaggacacctgggcaggcgagggcgcggaagctctggcacggaacctgctagtggatggagagactggggagagcttccctgcacaggtgcctagtggggaggaccagacggccctgtccctggaagagtgccttaggctgctggaagccacctgcccctttggggagaatgctgagtttccagcagacatttccagcataacagaagcagtgcctagtgagagtgagccccctgctcttcaaaacaacctcttgtctcctcttctgaccgggacagagtcaccatttgatttggaacagcagtggcaagatctcatgtccatcatggaaatgcaggccatggaagtgaacacatcagcaagtgaaatcctgtacagtgcccctcctggagacccactgagcaccaactacagccttgcccccaacactcccatcaatcagaatgtcagcctgcatcaggcgtccctggggggctgcagccaggacttcttactcttcagccccgaggtggaaagcctgcctgtggccagtagctccacgctgctcccgttggcccccagcaattctaccagcctcaactccaccttcggctccaccaacctgacagggctcttctttccaccccagctcaatggcacagccaatgacacagcaggcccagagctgcctgaccctttggggggtctgttagatgaagctatgttggatgagatcagccttatggacctggccattgaagaaggctttaaccctgtgcaggcctcccagctggaggaggaatttgactctgactcaggcctttccttagactcgagccatagcccttcttccctaagcagctctgaaggcagttcttcctcttcttcctcctcctcttcctcttcttcctctgcttcttcctctgcctcttcctccttttctgaggaaggtgcggttggctacagctctgactctgagaccctggatctggaagaggccgagggtgctgtgggctaccagcctgagtattccaagttctgccgcatgagctaccaggatccagctcagctctcatgcctgccctacctggagcacgtgggccacaaccacacatacaacatggcacccagtgccctggactcagccgacctgccaccacccagtgccctcaagaaaggcagcaaggagaagcaggctgacttcctggacaagcagatgagccgggatgagcaccgagcccgagccatgaagatccctttcaccaatgacaaaatcatcaacctgcctgtggaggagttcaatgaactgctgtccaaataccagttgagtgaagcccagctgagcctcatccgagacatccggcgccggggcaagaacaagatggcggcgcagaactgccgcaagcgcaagctggacaccatcctgaatctggagcgtgatgtggaggacctgcagcgtgacaaagcccggctgctgcgggagaaagtggagttcctgcgctccctgcgacagatgaagcagaaggtccagagcctgtaccaggaggtgtttgggcggctgcgagatgagaacggacgaccctactcgcccagtcagtatgcgctccagtacgccggggacggcagtgtcctcctcatcccccgcacgatggccgaccagcaggcccggcggcaggagaggaagccaaaggaccggagaaag

SEQ ID NO: 6047 - DNA, 1881 bp, Homo sapiens
  source 1..1881: mol_type = genomic DNA
atggcggcagcggtgctgacggaccgggcccaggtgtctgtgacctttgatgatgtggctgtgactttcaccaaggaggagtgggggcagctggacctagctcagcggaccctgtaccaggaggtgatgctggaaaactgtgggctcctggtgtctctggggtgtcctgttcccaaagctgagctgatctgccacctagagcatgggcaggagccatggaccaggaaggaagacctctcccaagacacctgtccaggcgacaaaggaaaacctaagaccacagaacctaccacttgtgagccagccttgtcagagggaatctcacttcagggacaagtgacacaaggaaactcagtggactcacagttggggcaagccgaggatcaggatgggctatcagaaatgcaggaaggacacttcagaccaggaatagatccccaggagaagtctcctgggaagatgagccctgaatgtgatggtttagggacagctgatggtgtgtgttcaaggattggacaggagcaagtctctccaggagatagagtccgtagccataactcatgtgagtcaggtaaagatcccatgattcaggaagaggaaaataactttaaatgcagtgaatgtggaaaagtatttaacaagaaacacctccttgctggacatgagaaaattcactctggagttaagccctatgaatgcacagaatgtgggaaaacctttattaagagcacacatctcctgcaacatcacatgatccacactggggagaggccctatgagtgcatggagtgtggaaaggccttcaaccgcaagtcataccttacccagcaccagcggattcacagtggagagaagccttacaagtgcaatgaatgcggaaaggccttcacccaccgctccaattttgtcttgcataacaggagacacactggagaaaaatcctttgtgtgcacagaatgtggccaagtctttcgacataggccaggctttctccggcactatgttgtccacagtggtgagaatccctatgagtgcttggagtgtggcaaggtcttcaaacacaggtcatatctcatgtggcaccagcagactcataccggggagaagccctatgagtgcagtgaatgtgggaaggtcttcttggagagtgcagccctgattcaccactatgtcatccacactggagagaagccctttgagtgcctcgagtgtgggaaggctttcaaccaccgatcctacctcaagaggcaccagcggattcacactggggagaagcccttcgtgtgcagtgaatgtggaaaggccttcacccactgctctacttttatcttgcataaaagggcccacactggagaaaagcctttcgagtgcaaagagtgtgggaaagcctttagcaatcggaaggacctcattcgccacttcagcatccacactggagagaagccctatgagtgcgtggagtgtggaaaggccttcacccgcatgtcgggcctcacgaggcacaagcggattcatagtggagagaagccctatgaatgtgttgagtgtgggaaatcgttttgctggagcacaaacctcattcgacatgccattatccacactggagagaagccctataaatgtagtgaatgtggaaaggccttcagtcgcagctcgtccctcactcagcatcaaaggatgcatactgggaaaaatcccatcagtgtaacagatgtgggaagaccttttacaagtggacaaacctcagttacccttcgagaacttcttttagggaaggactttttgaatgtaaccactgaggcaaatattttgccagaggaaacatcttcctctgcatctgatcaaccataccaaagagaaaccccacaagtgtcttcactg

SEQ ID NO: 6048 - DNA, 1137 bp, Homo sapiens
  source 1..1137: mol_type = genomic DNA
atgtcttcggcgcccgagaagcagcagccaccgcacggcggcggcggcggcggcggcgggggaggcggcgcggccatggaccccgcgtcgtccggcccgtccaaggccaagaagaccaacgccggcatccggcgcccggagaagccgccctattcctacatcgcgctcatcgtcatggccatccagagttcacccaccaagcgcctgacgctgagcgagatctaccagttcctgcagagccgcttccccttcttccggggctcctaccagggctggaagaactccgtgcgccacaacctctcgctcaacgagtgcttcatcaagctacccaagggccttgggcggcccggcaagggccactactggaccatcgacccggccagcgagttcatgttcgaggagggctcctttcggcggcggccgcgcggcttccgaaggaaatgccaggcgctcaagcccatgtacagcatgatgaacgggctcggcttcaaccacctcccggacacctacggcttccagggctcggccggcggcctctcgtgcccgcccaacagcctggcgctggagggcggcctgggcatgatgaacggccacttgccgggcaacgtggacggcatggccctgcccagccactcggtgccccacctgccttccaacggcggccactcgtacatgggcggctgcggcggcgcggcggccggcgagtacccgcaccacgacagctcggtgcccgcctccccgctgctgcccaccggcgccggtggggtcatggagccgcacgccgtctactcgggctcggcggcggcctggccgccctcggcgtccgcggcgctcaacagcggcgcctcttatatcaagcagcagcccctgtccccctgtaaccccgcggccaaccccctgtccggcagcctctccacgcactccctggagcagccgtatctgcaccagaacagccacaacgccccagccgagctgcaaggcatcccgcggtatcactcgcagtcgcccagcatgtgtgaccgaaaggagtttgtcttctctttcaacgccatggcgtcctcttccatgcactcggccggcgggggctcctactaccaccagcaggtcacctaccaagacatcaagccttgcgtgatg

SEQ ID NO: 6049 - DNA, 1332 bp, Homo sapiens
  source 1..1332: mol_type = genomic DNA
atgaccaccgagggcgggccgccgccggccccgctccgccgcgcgtgcagcccggtccccggcgcgctccaggccgccctgatgagcccgccgcccgccgccgccgccgccgccgccgccgccccggagaccacctcctcctcctcgtcgtcgtcctccgcctcctgcgcctcgtcctcgtcctcctccaattcggccagcgccccctcggctgcctgcaagagcgcgggcggcggcggcgcgggcgccgggagcgggggcgccaagaaggcgagctcggggctgcggcggcccgagaagccgccctactcgtacatcgcgctcatcgtcatggccatccagagctcgcccagcaagcgcctgacgctcagcgagatctaccagttcctgcaggcgcgcttccccttcttccgcggcgcctaccagggctggaagaactcggtgcgccacaatctctcgctcaacgagtgcttcatcaagctgcctaagggcctcgggcggcccggcaagggccactactggaccatcgacccggccagcgagttcatgttcgaggagggctcgttccgccgccggccgcgcggcttcaggcggaagtgccaggcgctcaagcccatgtaccaccgcgtggtgagcggcttgggcttcggggcgtcgctgctgccccagggcttcgacttccaggcgcccccgtcggcgccgctcggctgccacagccagggcggctacggcggcctcgacatgatgcccgcgggctacgacgccggcgcgggcgcccccagccacgcgcaccctcaccaccaccaccaccaccacgtcccgcacatgtcgcccaacccgggttccacctacatggccagctgcccggtgcccgcgggacccgggggcgtcggtgcggccgggggcggcggcggcggcgactacgggccggacagcagcagcagcccggtaccctcgtccccggccatggcgagcgccatcgaatgccactcgccctacacgagccctgcggcgcactggagctcgcctggcgcctcgccttacctcaagcagccgcctgccctgacgcccagcagcaaccccgccgcctcggcaggcctgcactccagcatgtcctcctactcgctggagcagagctacttgcaccagaacgctcgcgaggacctctcagtgggactgccccgttaccagcatcactctactccagtgtgtgacagaaaagatttcgtcctcaacttcaatgggatttcttctttccatccctcagctagcgggtcgtattatcaccatcaccaccagagcgtctgtcaggatattaagccctgcgtcatg

SEQ ID NO: 6050 - DNA, 900 bp, Homo sapiens
  source 1..900: mol_type = genomic DNA
atgcattcactaaagaaactgacttttgaagatgtagctattgacttcacccaggaagagtgggccatgatggacacatccaagagaaagctgtacagagatgtgatgctggaaaatatcagtcacctggtgtccctcgggtaccagataagcaaatcctatataattttgcagctggagcaaggaaaagagctgtggagggaaggaagagtatttcttcaagaccagaatccaaacagggaaagtgcccttaagaaaacacacatgatatccatgcatcctatcaccagaaaagacgcatccaccagtatgacaatggagaactctctcattctggaggatccttttgaatgtaatgattcgggagaagattgcactcgcagttccacaataactcagtgtttgttaactcatagtggaaagaaaccctatgtcagcaaacagtgtggaaaatcccttcgtaatcttttgtccactgaaccacataaacaaattcatactaaaggtaaatcatatcagtgtaatctatgtgaaaaggcctatactaattgctttcaccttagacggcacaagatgactcacactggagagaggccatatgcatgtcatctatgtagaaaagccttcactcagtgttctcaccttagaagacacgagaaaactcacacgggacagagaccatataagtgtcatcaatatgggaaagtctttattcaatcctttaaccttcaaagacatgagagaactcaccttggaaaaaagtgttatgaatgtgataaaagtgggaaagcctttagtcaaagctctggctttagaggaaacaaaataattcacactggagagaaaccacatgcttgtcttctatgtgggaaggccttcagtctgtcttccaaccttaga

SEQ ID NO: 6051 - DNA, 1035 bp, Homo sapiens
  source 1..1035: mol_type = genomic DNA
atgctcatgtttgacccagttcctgtcaagcaagaggccatggaccctgtctcagtgtcatacccatctaattacatggaatccatgaagcctaacaagtatggggtcatctactccacaccattgcctgagaagttctttcagaccccagaaggtctgtcgcacggaatacagatggagccagtggacctcacggtgaacaagcggagttcacccccttcggctgggaattcgccctcctctctgaagttcccgtcctcacaccggagagcctcgcctgggttgagcatgccttcttccagcccaccgataaaaaaatactcacccccttctccaggcgtgcagcccttcggcgtgccgctgtccatgccaccagtgatggcagctgccctctcgcggcatggaatacggagcccggggatcctgcccgtcatccagccggtggtggtgcagcccgtcccctttatgtacacaagtcacctccagcagcctctcatggtctccttatcggaggagatggaaaattccagtagtagcatgcaagtacctgtaattgaatcatatgagaagcctatatcacagaaaaaaattaaaatagaacctgggatcgaaccacagaggacagattattatcctgaagaaatgtcaccccccttaatgaactcagtgtcccccccgcaagcattgttgcaagagaatcacccttcggtcatcgtgcagcctgggaagagacctttacctgtggaatccccggatactcaaaggaagcggaggatacacagatgtgattatgatggatgcaacaaagtgtacactaaaagctcccacttgaaagcacacagaagaacacacacaggagaaaaaccctacaaatgtacatgggaagggtgcacatggaagtttgctcggtctgatgaactaacaagacatttccgaaaacatactggaatcaaacctttccagtgcccggactgtgaccgcagcttctcccgttctgaccatcttgccctccataggaaacgccacatgctagtc

SEQ ID NO: 6052 - DNA, 900 bp, Homo sapiens
  source 1..900: mol_type = genomic DNA
atgcattcactagagaaagtgacttttgaagatgtagctattgacttcacccaggaagagtgggacatgatggacacatccaagagaaagctgtacagagatgtgatgctggaaaatatcagtcacctggtgtccctcgggtaccagataagcaaatcctatataattttgcagctggagcaaggaaaagagctgtggcgggaaggaagagtatttcttcaagaccagaatccagacagggaaagtgcccttaagaaaaaacacatgatatccatgcatcctatcatcagaaaagacgcatccaccagtatgacaatggagaactctctcattctggaggatccttttgaatataatgattcgggagaagattgcactcacagttccacaataactcagtgtttgttaactcacagtggaaagaaaccctgtgtcagcaaacagtgtggaaaatcccttcgtaatcttttgtcccctaaaccacgtaaacaaattcatactaaaggtaaatcatatcaatgtaatctatgtgaaaaggcctatactaattgcttttaccttagacggcacaagatgactcacactggagagaggccatatgcatgtcatctatgtggaaaagccttcactcagtgttctcaccttagaagacatgagaaaactcacacgggagagagaccatataagtgtcatcaatgtgggaaagcctttattcaatcctttaaccttcgaagacatgagagaactcaccttggacaaaagtgttatgaatgtgataaaagtgggaaagcctttagtcaaagctctggctttagaggaaacaaaataattcacattggagagaaaccacatgcttgtcttctatgtgggaaggccttcagtctgtcctccgaccttaga

SEQ ID NO: 6053 - DNA, 378 bp, Homo sapiens
  source 1..378: mol_type = genomic DNA
atggccaccagggtccggacagcttctatttggggacctttgtcattcatggatgtgtttgtggattttacctgggaggagtggcagctgctagacccagcacagaagtgcctgtacaggagtgtgatgttggagaactatagcaacctggtgtccctagggtaccaacacaccaaacctgatatcatcttcaagttggaacaaggagaagagctgtgtatggtgcaggcccaagttccaaatcagacctgtccaattttgaaggctggaaagtccaaagccaaggtgctggcaggtttggtgtctggtgagggcctgctctgtgcttccaagatgacgccttgttgctgcatcctctggagacacagtctggaaaat

SEQ ID NO: 6054 - DNA, 579 bp, Homo sapiens
  source 1..579: mol_type = genomic DNA
atggccaccagggtccggacagcttctatttgggtcccacctctccaagaacgaaacagttcatgggataggatcagaaagctccaaggtcaggaatccatcttgggccaagggactcctggtctgcaacctctccctggaacacccaggcagaagcagaagagtcgcagaatagagaaagtcctagagtggctgtttatttcccaagagcagccaaaaatcaccaagtcctggggacctttgtcattcatggatgtgtttgtggattttacctgggaggagtggcagctgctagacccagcacagaagtgcctgtacaggagtgtgatgttggagaactatagcaacctggtgtccctagggtaccaacacaccaaacctgatatcatcttcaagttggaacaaggagaagagctgtgtatggtgcaggcccaagttccaaatcagacctgtccaattttgaaggctggaaagtccaaagccaaggtgctggcaggtttggtgtctggtgagggcctgctctgtgcttccaagatgacgccttgttgctgcatcctctggagacacagtctggaaaat

SEQ ID NO: 6055 - DNA, 204 bp, Homo sapiens
  source 1..204: mol_type = genomic DNA
atggccaccagggtccggacagcttctatttggacacagtctggaaaattgatgatcttatggattggcatcaggaaaataaagacaagctgggaagtacggcaaaaagctttgaatgcactacatttggaaaactatgtcttcttagtacaaagtatctttcaagacaaaaacctcataaatgtggcacgcatggaaagagtt

SEQ ID NO: 6056 - DNA, 2841 bp, Homo sapiens
  source 1..2841: mol_type = genomic DNA
atggccaccagggtccggacagcttctatttgggtcccacctctccaagaacgaaacagttcatgggataggatcagaaagctccaaggtcaggaatccatcttgggccaagggactcctggtctgcaacctctccctggaacacccaggcagaagcagaagagtcgcagaatagagaaagtcctagagtggctgtttatttcccaagagcagccaaaaatcaccaagtcctggggacctttgtcattcatggatgtgtttgtggattttacctgggaggagtggcagctgctagacccagcacagaagtgcctgtacaggagtgtgatgttggagaactatagcaacctggtgtccctagggtaccaacacaccaaacctgatatcatcttcaagttggaacaaggagaagagctgtgtatggtgcaggcccaagttccaaatcagacctgtccaaacacagtctggaaaattgatgatcttatggattggcatcaggaaaataaagacaagctgggaagtacggcaaaaagctttgaatgcactacatttggaaaactatgtcttcttagtacaaagtatctttcaagacaaaaacctcataaatgtggcacgcatggaaagagtttgaaatatatagatttcactagtgattatgctagaaataatcctaatgggtttcaggtacatggaaaatcattcttccattctaaacatgagcaaactgttattggaataaaatactgtgaaagtattgaatctggaaaaaccgtcaataagaaatcgcaacttatgtgccaacaaatgtatatgggcgaaaaaccctttggatgcagctgttgtgagaaagccttcagcagcaagtcataccttctagtgcatcagcaaactcatgccgaagagaaaccctatggttgtaatgaatgtgggaaagacttcagtagtaaatcatacctcattgtacatcagagaattcatacaggagagaaactacatgaatgcagtgaatgcaggaaaacattcagtttccattcacagcttgttatacatcagagaattcacacaggtgagaatccctatgagtgctgtgaatgtgggaaagtcttcagtaggaaagaccagcttgtttcacaccagaaaactcattcaggacagaaaccatatgtgtgtaatgaatgtgggaaagcttttggtttaaaatcacagctcattatacatgaaagaattcatacaggagagaaaccatatgaatgcaatgaatgtcagaaagcctttaatacaaagtcaaaccttatggtacatcagagaacccatacaggggagaaaccttatgtttgtagtgattgtggaaaagcctttacattcaagtcacagctcattgtacatcaggggattcacacaggagtaaagccctatgggtgtattcagtgtggtaaaggattcagtttgaaatcacagctcattgtacatcagagaagtcacacaggaatgaaaccttatgtatgcaatgaatgtggcaaagccttcaggagcaagtcataccttattatacatacaaggactcatacaggagaaaaactccatgaatgcaacaattgtgggaaagccttcagttttaaatcacagctcattatacatcagaggattcatacaggagagaacccctatgaatgccatgaatgtgggaaagccttcagtcggaaataccagcttatttcacaccagagaactcatgcaggagagaagccttatgaatgcaccgactgtggaaaggcttttggtttaaagtcacagcttattatacaccagagaactcatacaggggagaaaccatttgaatgtagtgagtgtcagaaagcctttaatacaaagtcaaacctgattgtacatcagagaactcatacaggagagaaaccctatagttgtaatgaatgtggaaaagcctttacgttcaaatcacagctcattgtacataaaggagtgcacactggagtaaaaccctatggatgcagtcaatgtgcaaaaacctttagtttgaagtcccagctcattgtacatcagagaagtcacacaggagtaaaaccatatggatgcagtgagtgtgggaaagccttcaggagcaagtcataccttattatacatatgagaactcatacaggagagaaaccacatgagtgcagggaatgcgggaaatcctttagtttcaattcacaactcattgtgcatcagagaattcacacaggagaaaatccctatgaatgcagtgaatgtgggaaagcctttaataggaaagaccagctcatttcacatcagcgaactcatgcaggggaaaagccttatgggtgcagtgaatgtgggaaagcttttagcagcaagtcatacctaattatacacatgagaactcattcaggtgaaaaaccatatgaatgtaatgaatgtgggaaagccttcatttggaaatcactactcattgtacatgagcgaactcatgcaggggtcaacccttataaatgcagtcaatgtgagaaatccttcagtgggaaattacgccttcttgtacaccagagaatgcacacaagagagaaaccatatgaatgcagtgagtgtggaaaagccttcattaggaattctcaactcattgtacatcaaagaactcattcaggagagaaaccctatgggtgcaatgaatgtgggaaaaccttctctcaaaaatcaattctcagtgcacatcagagaacacatacaggagagaagccttgtaagtgcactgaatgtgggaaagccttttgttggaagtcacagctcattatgcatcagagaactcatgtagatgacaaacat

SEQ ID NO: 6057 - DNA, 501 bp, Homo sapiens
  source 1..501: mol_type = genomic DNA
atggccaccagggtccggacagcttctatttgggtcccacctctccaagaacgaaacagttcatgggataggatcagaaagctccaaggtcaggaatccatcttgggccaagggactcctggtctgcaacctctccctggaacacccaggcagaagcagaagagtcgcagaatagagaaagtcctagagtggctgtttatttcccaagagcagccaaaaatcaccaagtcctggggtaccaacacaccaaacctgatatcatcttcaagttggaacaaggagaagagctgtgtatggtgcaggcccaagttccaaatcagacctgtccaaacacagtctggaaaattgatgatcttatggattggcatcaggaaaataaagacaagctgggaagtacggcaaaaagctttgaatgcactacatttggaaaactatgtcttcttagtacaaagtatctttcaagacaaaaacctcataaatgtggcacgcatggaaagagtt

SEQ ID NO: 6058 - DNA, 405 bp, Homo sapiens
  source 1..405: mol_type = genomic DNA
atggccaccagggtccggacagcttctatttgggtcccacctctccaagaacgaaacagttcatgggataggatcagaaagctccaaggtcaggaatccatcttgggccaagggactcctggtctgcaacctctccctggaacacccaggcagaagcagaagagtcgcagaatagagaaagtcctagagtggctgtttatttcccaagagcagccaaaaatcaccaagtcctggacacagtctggaaaattgatgatcttatggattggcatcaggaaaataaagacaagctgggaagtacggcaaaaagctttgaatgcactacatttggaaaactatgtcttcttagtacaaagtatctttcaagacaaaaacctcataaatgtggcacgcatggaaagagtt

SEQ ID NO: 6059 - DNA, 300 bp, Homo sapiens
  source 1..300: mol_type = genomic DNA
atggccaccagggtccggacagcttctatttggggtaccaacacaccaaacctgatatcatcttcaagttggaacaaggagaagagctgtgtatggtgcaggcccaagttccaaatcagacctgtccaaacacagtctggaaaattgatgatcttatggattggcatcaggaaaataaagacaagctgggaagtacggcaaaaagctttgaatgcactacatttggaaaactatgtcttcttagtacaaagtatctttcaagacaaaaacctcataaatgtggcacgcatggaaagagtt

SEQ ID NO: 6060 - DNA, 900 bp, Homo sapiens
  source 1..900: mol_type = genomic DNA
atgcattcactagagaaagtgacttttgaagatgtagctattgacttcacccaggaagagtgggacatgatggacacatccaaaagaaagctgtacagagatgtgatgctggaaaatatcagtcacctggtgtccctcgggtaccagataagcaaatcctatataattttgcagctggagcaaggaaaagagctgtggtgggaaggaagagtatttcttcaagaccagaatccagacagggaaagtgcccttaagaaaaaacacatgatatccatgcatcctatcatcagaaaagacacatccaccagtatgacaatggagaactctctcattctggaggatccttttgaatataatgattcgggagaagattgcactcacagttccacaataactcagtgtttgttaactcacagtggaaagaaaccctgtgtcagcaaacagtgtggaaaatcccttcgtaatcttttgtcccctaaaccacgtaaacaaattcatactaaaggtaaatcatatcaatgtaatctatgtgaaaaggcctatactaattgcttttaccttagacggcacaagatgactcacactggagagaggccatatgcatgtcatctatgtggaaaagccttcactcagtgttctcaccttagaagacatgagaaaactcacacgggagagagaccatataagtgtcatcaatgtgggaaagcctttattcaatcctttaaccttcgaagacatgagagaactcaccttggacaaaagtgttatgaatgtgataaaagtgggaaagcctttagtcaaagctctggctttagaggaaacaaaataattcacattggagagaaaccacctgcttgtcttctatgtgggaaggccttcagtctgtcctccgaccttaga

SEQ ID NO: 6061 - DNA, 1038 bp, Homo sapiens
  source 1..1038: mol_type = genomic DNA
atgcacctgccgggctgcgcgccagccatggccgacgggagcttctcgcttgccggccacctgctccgcagcccgggcgggagcacctcgcgacttcacagcatcgaggccatcctggggtttaccaaggacgacgggatcctcggcaccttcccggcggagcggggcgcccggggcgcgaaggagcgggataggaggctgggcgcgcggcccgcctgccccaaggcgcccgaggaaggctccgagccctccccgccgccagccccggcgcccgcccccgagtacgaagcccctcgaccctactgccccaaggagcccggggaggcacggccgagcccagggctgcccgtcgggccagccaccggcgaagcgaaactgtcagaggaggaacagcccaagaaaaagcatcggcggaaccgcacgactttcaccacgtaccagctgcatgagctggagcgcgcgttcgagaagtcccactacccggacgtgtacagccgcgaggagctggccggcaaggtcaacctaccagaggtccgggtccaggtgtggttccagaaccgacgggctaagtggcggcggcaggagaagctggaagtgtcctccatgaagctgcaggactcgcccctcctctccttcagccgctccccgccctccgcgacgctgtcgcccctcggggcgggcccgggcagcggtggcgggccggctgggggcgcgctgccgctggagtcctggctcgggccgccgctgccgggcgggggcgccacggcgctgcagagcctgccgggcttcgggccgccggcgcagagcctgcctgccagctacacgccaccgccgccgcctccgcccttcctgaactccccgccgttgggccccggcctgcaacctctcgcgccgccgccgccctcctacccgtgcgggcccggcttcggggacaagttcccgctggacgaggcggacccgcgcaacagcagcatcgcggcgctgcgtctgaaagccaaggagcacatccaggccatcgggaagccgtggcaggccctc

SEQ ID NO: 6062 - DNA, 1548 bp, Homo sapiens
  source 1..1548: mol_type = genomic DNA
atggaccccgcaggggcagcagacccctcagtgcctcccaatcctttgactcacctgagcctgcaggacagatcagagatgcagctgcagagcgaagccgacaggcggagcctcccgggcacttggaccaggtcatccccagagcacaccaccattctgaggggaggcgtgcgcaggtgcctgcagcaacagtgtgaacagactgtgcggatcctgcatgccaaggtggcccagaaatcatacggaaatgagaagcggttcttctgccccccgccctgtgtctacctctcggggcctggctggagggtgaagccagggcaggatcaagctcaccaggcgggggaaacggggcccacggtctgcggttacatgggactggacagcgcgtccggcagcgccactgagacgcagaagctgaatttcgagcagcagccggactccagggaattcggctgcgccaagaccctgtacatctcagatgcagacaagaggaagcactttcggctggtgctgcggctggtgctgcgcgggggccgggagctgggtaccttccacagccgccttatcaaggtcatctcgaagccctcgcagaagaagcagtcgctgaaaaacaccgatctgtgcatatcctccggctcaaaggtctccctcttcaaccgcctgcgctctcagacggtctccacacgctacctctctgtggaggatggggcctttgtggccagtgcacgacagtgggctgccttcacgctccacctggctgatgggcactctgcccaaggagacttcccaccgcgagagggctacgttcgctatggctccctggtgcagctcgtctgcacggtcaccggcatcacactacctcccatgatcatccgtaaagtagcaaaacagtgtgcgctccttgatgtggatgagcccatctcccagctgcacaagtgtgcattccagtttccaggcagtcccccaggagggggtggcacctacttatgccttgccacagagaaggtggtgcaatttcaggcctctccctgccccaaggaggcgaacagggctctgcttaacgacagctcttgctggaccatcatcggcaccgagtcggtggaattttccttcagcaccagcctggcgtgtaccctggagccggtcactccggtgcctctcatcagcaccctagagctgagcggcgggggcgacgtggccacgctggagctccacggagagaacttccacgcggggctcaaggtgtggtttggggacgtggaggcagaaaccatgtacagcccgcggtccctggtgtgcgtggtgccggacgtggcggccttctgcagcgactggcgctggctgcgcgctcccatcacaatccccatgagcctggtgcgcgccgacgggctcttctaccctagtgccttctccttcacctacaccccggaatacagcgtgcggccgggtcaccccggcgtccccgagcccgccaccgacgccgacgcgctcctggagagcatccatcaggagttcacgcgcaccaacttccacctcttcatccagact

SEQ ID NO: 6063 - DNA, 1413 bp, Homo sapiens
  source 1..1413: mol_type = genomic DNA
atggaccccgcaggggcagcagacccctcagtgcctcccaatcctttgactcacctgagcctgcaggacagatcagagatgcagctgcagagcgaagccgacaggcggagcctcccgggcacttggaccaggtcatccccagagcacaccaccattctgaggggaggcgtgcgcaggtgcctgcagcaacagtgtgaacagactgtgcggatcctgcatgccaaggtggcccagaaatcatacggaaatgagaagcggttcttctgccccccgccctgtgtctacctctcggggcctggctggagggtgaagccagggcaggatcaagctcaccaggcgggggaaacggggcccacggtctgcggttacatgggactggacagcgcgtccggcagcgccactgagacgcagaagctgaatttcgagcagcagccggactccagggaattcggctgcgccaagaccctgtacatctcagatgcagacaagaggaagcactttcggctggtgctgcggctggtgctgcgcgggggccgggagctgggtaccttccacagccgccttatcaaggtcatctcgaagccctcgcagaagaagcagtcgctgaaaaacaccgatctgtgcatatcctccggctcaaaggtctccctcttcaaccgcctgcgctctcagacggtctccacacgctacctctctgtggaggatggggcctttgtggccagtgcacgacagtgggctgccttcacgctccacctggctgatgggcactctgcccaaggagacttcccaccgcgagagggctacgttcgctatggctccctggtgcagctcgtctgcacggtcaccggcatcacactacctcccatgatcatccgtaaagtagcaaaacagtgtgcgctccttgatgtggatgagcccatctcccagctgcacaagtgtgcattccagtttccaggcagtcccccaggagggggtggcacctacttatgccttgccacagagaaggtggtgcaatttcaggcctctccctgccccaaggaggcgaacagggctctgcttaacgacagctcttgctggaccatcatcggcaccgagtcggtggaattttccttcagcaccagcctggcgtgtaccctggagccggtcactccggtgcctctcatcagcaccctagagctgagcggcgggggcgacgtggccacgctggagctccacggagagaacttccacgcggggctcaaggtgtggtttggggacgtggaggcagaaaccatgtacaggtacggggtggagcccgcggtccctggtgtgcgtggtgccggacgtggcggccttctgcagcgactggcgctggctgcgcgctcccatcacaatccccatgagcctggtgcgcgccgacgggctcttctaccc

SEQ ID NO: 6064 - DNA, 1551 bp, Homo sapiens
  source 1..1551: mol_type = genomic DNA
atggaccccgcaggggcagcagacccctcagtgcctcccaatcctttgactcacctgagcctgcaggacagatcagagatgcagctgcagagcgaagccgacaggcggagcctcccgggcacttggaccaggtcatccccagagcacaccaccattctgaggggaggcgtgcgcaggtgcctgcagcaacagtgtgaacagactgtgcggatcctgcatgccaaggtggcccagaaatcatacggaaatgagaagcggttcttctgccccccgccctgtgtctacctctcggggcctggctggagggtgaagccagggcaggatcaagctcaccaggcgggggaaacggggcccacggtctgcggttacatgggactggacagcgcgtccggcagcgccactgagacgcagaagctgaatttcgagcagcagccggactccagggaattcggctgcgccaagaccctgtacatctcagatgcagacaagaggaagcactttcggctggtgctgcggctggtgctgcgcgggggccgggagctgggtaccttccacagccgccttatcaaggtcatctcgaagccctcgcagaagaagcagtcgctgaaaaacaccgatctgtgcatatcctccggctcaaaggtctccctcttcaaccgcctgcgctctcagacggtctccacacgctacctctctgtggaggatggggcctttgtggccagtgcacgacagtgggctgccttcacgctccacctggctgatgggcactctgcccaaggagacttcccaccgcgagagggctacgttcgctatggctccctggtgcagctcgtctgcacggtcaccggcatcacactacctcccatgatcatccgtaaagtagcaaaacagtgtgcgctccttgatgtggatgagcccatctcccagctgcacaagtgtgcattccagtttccaggcagtcccccaggagggggtggcacctacttatgccttgccacagagaaggtggtgcaatttcaggcctctccctgccccaaggaggcgaacagggctctgcttaacgacagctcttgctggaccatcatcggcaccgagtcggtggaattttccttcagcaccagcctggcgtgtaccctggagccggtcactccggtgcctctcatcagcaccctagagctgagcggcgggggcgacgtggccacgctggagctccacggagagaacttccacgcggggctcaaggtgtggtttggggacgtggaggcagaaaccatgtacaggagcccgcggtccctggtgtgcgtggtgccggacgtggcggccttctgcagcgactggcgctggctgcgcgctcccatcacaatccccatgagcctggtgcgcgccgacgggctcttctaccctagtgccttctccttcacctacaccccggaatacagcgtgcggccgggtcaccccggcgtccccgagcccgccaccgacgccgacgcgctcctggagagcatccatcaggagttcacgcgcaccaacttccacctcttcatccagact

SEQ ID NO: 6065 - DNA, 5496 bp, Homo sapiens
  source 1..5496: mol_type = genomic DNA
atggaggacacacccccctcactcagctgctccgactgtcagcgccactttcccagcctcccagagctctctcggcaccgagaactgctccatccatctcccaaccaggacagtgaggaggctgacagcatccctcggccctaccgttgtcagcagtgtgggcggggctaccgtcaccccgggagcctggttaaccatcgtcggacccacgagactggccttttcccctgtaccacctgtggcaaggacttctccaatcccatggctctcaagagccatatgaggacacatgctcctgagggccgccgcaggcacaggcccccacgccccaaggaagccactccacacctccagggtgagacggtgtccactgactcctggggccaaaggcttggctctagtgaaggctgggaaaaccagacaaaacatacagaagagacacctgactgtgaatctgtacctgaccccagggcagcttcgggtacgtgggaagatctgcccaccagacaaagagaaggcttggcaagccacccaggtcctgaggatggtgcagacggctggggaccctccactaactctgccagagcccctcctctccccatcccagccagcagccttcttagcaacttggaacagtatctggctgaatcagtagtgaacttcacagggggccaggagcccacccagtcccctcctgctgaggaggagcggcggtacaaatgtagtcagtgtggcaagacctacaagcacgccgggagcctcaccaaccaccgccagagccacacgctgggcatctacccctgtgccatctgtttcaaggagttctctaacctcatggctctgaagaaccactctcgactgcatgcccagtatcggccttaccactgtccccactgcccccgtgtcttccggctcccccgggagctgctggaacaccagcagtcccatgagggtgaaaggcaggagccacgctgggaggagaaagggatgcccaccaccaatgggcacacagatgagagcagccaggaccagctccccagtgcacagatgctgaatggctctgcggagctcagcacctctggggagctggaggacagtggcctggaggaataccggcctttccgctgtggggactgtggccgtacttaccgccatgctgggagcctcatcaaccatcgaaagagccaccagacaggtgtctacccctgctcactctgttctaagcagctgttcaatgcggctgccctcaaaaaccatgtgcgggctcatcacaggcccaggcaaggagttggggaaaatgggcagccatcagtcccaccagctcccctgctgctggctgagaccacccacaaagaggaagaggaccccaccaccaccctggaccatcggccctataagtgcagtgagtgtggtcgtgcttaccgccaccgggggagcctggtgaaccatcgccacagccatcggactggagagtaccagtgctcactctgtccccgcaagtaccccaatctcatggccctgcgcaaccacgtgcgggtacattgcaaggctgctcgccgaagtgcagacatcggggctgagggtgcccccagccacctcaaggtagaactcccgcctgacccagtggaggcagaggcagccccgcacacagatcaggaccatgtgtgcaaacatgaagaagaggccacggacatcaccccagcagcagacaagacagcagcacatatctgtagcatctgtgggctgctctttgaagacgctgagagccttgaacgtcatggcctgactcatggggcaggggaaaaggaaaatagcagaacagagaccacaatgtcacctcctagggcctttgcctgccgagactgtggaaagagctatcgccactcaggcagccttatcaaccacaggcagacccaccagacaggagacttcagttgtggggcctgtgccaagcacttccacaccatggctgccatgaagaaccacttgcgccggcacagtcggcggcggagcaggcggcatcggaagcgggctggcggtgccagcggtgggagagaagccaaactcctggcagcggagagctggacccgggagctagaagacaatgaaggcctggagtctccccaagacccttcaggggaaagtcctcatggggctgaaggcaacctggaaagtgatggggactgtttgcaggctgaatctgaaggggacaaatgtgggcttgagagggatgagacccatttccagggtgataaagagagcggaggcactggggaaggactggaaaggaaggatgccagtttacttgacaacttggacatcccaggtgaggaaggtggtggcactcacttctgcgatagcctcactggggtggatgaagaccagaagccagccactggccaacccaactcctcttcccactctgccaatgctgtcactggctggcaggctggggccgctcacacatgctctgactgtgggcattctttcccccatgccactggcctgctgagccacaggccctgccacccaccaggcatctatcagtgctccctctgcccgaaggagtttgactctctgcctgccctccgcagccacttccagaaccataggcctggggaggcgacctcagcacagcctttcctctgctgcctctgtggcatgatcttccctgggcgggctggctacaggcttcaccggcgccaggcccacagctcctctggcatgactgagggctcagaggaggagggggaagaggaaggagtggcagaggcagcccctgcacgcagtccaccactgcagctctcggaagcagagctgctgaatcagctgcagcgggaggtggaagcgctggacagtgcagggtatgggcacatctgtggctgctgtggtcagacctacgatgacctggggagcctggagcgtcaccaccaaagtcagagttctgggactactgcagacaaggctcccagccccttgggagtggcaggtgatgccatggagatggtcgtggacagtgtcttggaggacatagtgaattctgtctctggagagggtggagatgccaagtctcaagagggagcaggcacccccttgggagacagcctctgcatccagggtggggaaagtttgttggaggctcagccccgccccttccgctgcaaccagtgtggcaagacctatcgccatgggggcagcctggtgaaccaccgcaagatccaccagactggagactttctctgccctgtctgctcccgctgctaccccaacctggctgcctaccgtaatcatctgcggaaccaccctcgctgcaaaggctctgagccccaggttgggcccatcccagaggcagcaggtagcagtgagctgcaggttgggcccatcccagaaggaggcagcaacaagccccagcacatggcagaggaggggccggggcaagcagaagtcgagaagctccaggaagaacttaaagtggagcccctggaggaagtggccagggtgaaagaagaggtgtgggaggagaccactgtgaagggggaggagatagagcccaggctggagactgccgagaagggctgccagactgaagccagctctgagcggcccttcagctgcgaggtgtgtggccgatcctacaagcacgccggcagcctcatcaaccaccggcagagccaccagaccggccactttggctgtcaggcctgctccaagggcttctcaaacctcatgtccctcaagaaccaccggcgcatccatgcagatccccgacgtttccgctgcagcgagtgtgggaaggccttccgcctgcggaaacagctggccagccaccagcgggtccacatggaacggcgtgggggtgggggcacccgaaaggcgactcgggaagatcggcccttccgctgtgggcagtgcgggcggacctatcgccacgccggcagcctcctgaaccaccggcgcagccacgagacgggccagtacagctgccccacctgccccaagacctactccaaccgcatggccctgaaggaccaccagaggctgcactcagagaatcggcggcgacgggctggacggtccaggcgcacagctgtgcgttgcgccctctgtggccgcagcttccctggccggggatctttggagcggcacctgcgggagcatgaggagacagaaagggagccagccaatggccagggaggcctggatggcacagcggccagtgaggcgaacctgactggcagccagggactagagacccaattgggtggtgctgagccagtaccccacttggaggatggagtcccaaggccaggggagcgcagtcagagccccatcagggcagcaagctcagaagccccagagccactgtcctggggtgcagggaaggcaggtgggtggccggtaggtgggggactggggaatcatagtggaggctgggttcctcagttcctaactaggtcagaggagccagaggacagtgtccacaggagtccttgccacgctggtgactgccagctcaatggacctactctgagtcacatggatagctgggacaacagagacaacagctctcagctgcagccagggagccactcctcttgcagccagtgtggcaagacttactgccagtcaggcagcctcttgaaccacaacaccaacaagacagaccgacactattgcctgctctgctccaaggagttcttaaatcctgtggccacaaagagccacagccacaaccacatagacgcccagacctttgcctgtcctgactgtggcaaagcctttgagtcccaccaggaactggccagccacctgcaggctcatgcccggggccacagccaggtgccagcccagatggaggaggccagagatcccaaagccgggactggggaggaccaggtggttctccctggtcaagggaaagcccaggaggccccatcagaaacccccagaggcccaggagagagtgtggagagagccaggggaggacaagcggtgacgtccatggcggctgaggacaaggagcggcccttccgctgcacccagtgcgggcgctcctaccgccatgctggcagcctgctgaaccaccagaaggcccacaccacagggttgtacccgtgctccctctgtcccaaacttctccctaacctgctgtctcttaagaaccacagcaggacccacacggaccccaagcgccactgctgcagcatctgtggcaaggcctttcggacagctgcccggctggagggccacgggcgggtccatgcaccccgggaggggcctttcacctgcccccattgtccccgccacttccgccgccgaatcagcttcgtgcagcaccagcagcagcaccaggaggagtggacggtggccggctccggagccccagtggcaccagtgacgggcagaggggacttgccattgccccctccacccacccccacgaccccactcctggatccttcaccccagtggcctgcagacctcagcttctccctc

SEQ ID NO: 6066 - DNA, 2772 bp, Homo sapiens
  source 1..2772: mol_type = genomic DNA
atggctcttcctcagggatctttgacattcagggatgtggctgtagaattctctcaggaggagtggaaatgcctggaccctgttcagaaagctttgtacagggacgtgatgttggagaactacaggaacctcggcttcctgggactctgtcttcctgacctgaatattatctccatgttggagcaagggaaagagccctggactgtggtgagccaagtgaaaatagcgaggaacccaaactgtggggaatgcatgaaaggcgtgatcaccggtatctctcctaaatgtgtgatcaaggaattaccaccaatacagaacagtaacacaggagaaaaattccaagcagtgatgttggaaggacatgaaagctatgacactgaaaatttttacttcagggaaatccggaaaaatctacaggaagttgactttcaatggaaagatggtgaaataaattataaagaagggccgatgacccataaaaacaatcttactggtcaaagagttcgacatagtcaaggggacgtagaaaacaagcatatggaaaatcagcttatattaaggtttcagtccggtctgggtgaattgcagaaatttcaaactgcagagaaaatttatggatgtaatcaaattgagaggacagttaataattgttttttagcttcaccacttcaaagaatttttcctggtgtccaaaccaacatttctaggaaatatgggaatgattttttgcaactttcgttacctacacaagacgagaaaacacatattagggaaaaaccttacataggtaatgagtgtggcaaagccttcagagtgtcttcaagtcttattaatcatcagatgatacatactacagagaaaccttacagatgcaatgagtctggtaaagcctttcatcggggctcactactaacagtacatcagatagtccatacaagagggaaaccataccaatgtgatgtatgtggcaggatcttcagacaaaattcagatcttgtaaatcaccggagaagtcacactggagacaaaccctacatatgtaatgaatgtggcaagtcctttagtaaaagttcccaccttgcagttcatcagagaattcatactggagagaaaccttacaaatgtaatcgatgtgggaagtgctttagtcaaagttcctctcttgcaactcatcagacagttcatactggagacaaaccctacaaatgtaatgaatgtggcaaaacctttaaacggaactcaagcctcactgcacatcatataatccatgcaggaaagaaaccatatacatgtgatgtatgtggcaaggtcttttatcagaattcacaacttgtaaggcaccagataattcatactggagagacaccttacaaatgtaatgaatgtggcaaggtcttctttcaacgttcacgtcttgcagggcaccggagaattcatactggagagaaaccctacaaatgtaatgaatgtggcaaggtcttcagtcaacattcacatcttgcagtgcatcagagagttcatactggagagaaaccttacaaatgtaatgaatgtggcaaagcctttaattggggctcattactaactgtacatcagagaattcataccggagagaaaccttacaaatgtaatgtgtgtggcaaggtctttaattacggtggatacctttcggttcatatgagatgtcatactggagagaaacctctccattgtaataaatgtggcatggtcttcacttactattcatgcctagcacgtcatcaaagaatgcataccggagagaaaccttacaaatgtaatgtgtgtggcaaggtcttcattgacagtggaaacctttcaattcataggcgaagtcataccggagagaaacctttccagtgtaacgaatgcggcaaggtcttcagttactactcatgcctagcacgtcatcggaaaattcataccggagagaaaccttataaatgtaatgattgtggcaaagcctatactcagcgttcaagcctcactaaacatctggtaattcatactggagagaacccttaccactgtaatgaatttggtgaggcttttatccaaagttcaaaacttgcaagatatcacagaaatcctactggggagaaaccacacaaatgtagtgaatgtggtagaacttttagtcataaaacaagtctggtgtaccatcagagaagacatactggagagatgccatacaaatgtattgaatgtgggaaagtctttaactccactacaaccctggcaaggcatcggagaattcatactggagagaaaccttacaaatgtaatgaatgtggcaaggtcttccgttatcgctcaggcctcgcacgtcattggagtattcatactggagagaaaccttacaaatgtaatgagtgtggcaaagcctttagagtacgttcaattctgcttaatcatcagatgatgcatactggagagaaaccttataaatgtaatgaatgtggtaaagcttttatcgaaaggtcaaacttggtttaccatcagagaaaccatactggagagaagccatacaaatgtatggaatgtggcaaggcgtttgggcggcggtcttgcctcactaaacaccaacgaattcattctagtgaaaaaccttataaatgtaatgagtgtggcaaatcttacattagtcgctcaggcctcactaaacatcagataaaacatgctggagagaaccttacaactaaactcaatgtggaaaggccgttagatgttgtcctaacctctgggatccccaaa

SEQ ID NO: 6067 - DNA, 2424 bp, Homo sapiens
  source 1..2424: mol_type = genomic DNA
atgttggaaggacatgaaagctatgacactgaaaatttttacttcagggaaatccggaaaaatctacaggaagttgactttcaatggaaagatggtgaaataaattataaagaagggccgatgacccataaaaacaatcttactggtcaaagagttcgacatagtcaaggggacgtagaaaacaagcatatggaaaatcagcttatattaaggtttcagtccggtctgggtgaattgcagaaatttcaaactgcagagaaaatttatggatgtaatcaaattgagaggacagttaataattgttttttagcttcaccacttcaaagaatttttcctggtgtccaaaccaacatttctaggaaatatgggaatgattttttgcaactttcgttacctacacaagacgagaaaacacatattagggaaaaaccttacataggtaatgagtgtggcaaagccttcagagtgtcttcaagtcttattaatcatcagatgatacatactacagagaaaccttacagatgcaatgagtctggtaaagcctttcatcggggctcactactaacagtacatcagatagtccatacaagagggaaaccataccaatgtgatgtatgtggcaggatcttcagacaaaattcagatcttgtaaatcaccggagaagtcacactggagacaaaccctacatatgtaatgaatgtggcaagtcctttagtaaaagttcccaccttgcagttcatcagagaattcatactggagagaaaccttacaaatgtaatcgatgtgggaagtgctttagtcaaagttcctctcttgcaactcatcagacagttcatactggagacaaaccctacaaatgtaatgaatgtggcaaaacctttaaacggaactcaagcctcactgcacatcatataatccatgcaggaaagaaaccatatacatgtgatgtatgtggcaaggtcttttatcagaattcacaacttgtaaggcaccagataattcatactggagagacaccttacaaatgtaatgaatgtggcaaggtcttctttcaacgttcacgtcttgcagggcaccggagaattcatactggagagaaaccctacaaatgtaatgaatgtggcaaggtcttcagtcaacattcacatcttgcagtgcatcagagagttcatactggagagaaaccttacaaatgtaatgaatgtggcaaagcctttaattggggctcattactaactgtacatcagagaattcataccggagagaaaccttacaaatgtaatgtgtgtggcaaggtctttaattacggtggatacctttcggttcatatgagatgtcatactggagagaaacctctccattgtaataaatgtggcatggtcttcacttactattcatgcctagcacgtcatcaaagaatgcataccggagagaaaccttacaaatgtaatgtgtgtggcaaggtcttcattgacagtggaaacctttcaattcataggcgaagtcataccggagagaaacctttccagtgtaacgaatgcggcaaggtcttcagttactactcatgcctagcacgtcatcggaaaattcataccggagagaaaccttataaatgtaatgattgtggcaaagcctatactcagcgttcaagcctcactaaacatctggtaattcatactggagagaacccttaccactgtaatgaatttggtgaggcttttatccaaagttcaaaacttgcaagatatcacagaaatcctactggggagaaaccacacaaatgtagtgaatgtggtagaacttttagtcataaaacaagtctggtgtaccatcagagaagacatactggagagatgccatacaaatgtattgaatgtgggaaagtctttaactccactacaaccctggcaaggcatcggagaattcatactggagagaaaccttacaaatgtaatgaatgtggcaaggtcttccgttatcgctcaggcctcgcacgtcattggagtattcatactggagagaaaccttacaaatgtaatgagtgtggcaaagcctttagagtacgttcaattctgcttaatcatcagatgatgcatactggagagaaaccttataaatgtaatgaatgtggtaaagcttttatcgaaaggtcaaacttggtttaccatcagagaaaccatactggagagaagccatacaaatgtatggaatgtggcaaggcgtttgggcggcggtcttgcctcactaaacaccaacgaattcattctagtgaaaaaccttataaatgtaatgagtgtggcaaatcttacattagtcgctcaggcctcactaaacatcagataaaacatgctggagagaaccttacaactaaactcaatgtggaaaggccgttagatgttgtcctaacctctgggatccccaaa

SEQ ID NO: 6068 - DNA, 6867 bp, Homo sapiens
  source 1..6867: mol_type = genomic DNA
atggcccataacgcgggcgccgcggccgccgccggcacccacagcgccaagagcggcggctccgaggcggctctcaaggagggtggaagcgccgccgcgctgtcctcctcctcctcctcctccgcggcggcagcggcggcatcctcttcctcctcgtcgggcccgggctcggccatggagacggggctgctccccaaccacaaactgaaaaccgttggcgaagcccccgccgcgccgccccaccagcagcaccaccaccaccaccatgcccaccaccaccaccaccatgcccaccacctccaccaccaccacgcactacagcagcagctaaaccagttccagcagcagcagcagcagcagcaacagcagcagcagcagcagcagcaacagcaacatcccatttccaacaacaacagcttgggcggcgcgggcggcggcgcgcctcagcccggccccgacatggagcagccgcaacatggaggcgccaaggacagtgctgcgggcggccaggccgaccccccgggcccgccgctgctgagcaagccgggcgacgaggacgacgcgccgcccaagatgggggagccggcgggcggccgctacgagcacccgggcttgggcgccctgggcacgcagcagccgccggtcgccgtgcccgggggcggcggcggcccggcggccgtcccggagtttaataattactatggcagcgctgcccctgcgagcggcggccccggcggccgcgctgggccttgctttgatcaacatggcggacaacaaagccccgggatggggatgatgcactccgcctccgccgccgccgccggggcccccggcagcatggaccccctgcagaactcccacgaagggtaccccaacagccagtgcaaccattatccgggctacagccggcccggcgcgggcggcggcggcggcggcggcggcggaggaggaggaggcagcggaggaggaggaggaggaggaggagcaggagcaggaggagcaggagcgggagctgtggcggcggcggccgcggcggcggcggcagcagcaggaggcggcggcggcggcggctatgggggctcgtccgcggggtacggggtgctgagctccccccggcagcagggcggcggcatgatgatgggccccgggggcggcggggccgcgagcctcagcaaggcggccgccggctcggcggcggggggcttccagcgcttcgccggccagaaccagcacccgtcgggggccaccccgaccctcaatcagctgctcacctcgcccagccccatgatgcggagctacggcggcagctaccccgagtacagcagccccagcgcgccgccgccgccgccgtcgcagccccagtcccaggcggcggcggcgggggcggcggcgggcggccagcaggcggccgcgggcatgggcttgggcaaggacatgggcgcccagtacgccgctgccagcccggcctgggcggccgcgcaacaaaggagtcacccggcgatgagccccggcacccccggaccgaccatgggcagatcccagggcagcccaatggatccaatggtgatgaagagacctcagttgtatggcatgggcagtaaccctcattctcagcctcagcagagcagtccgtacccaggaggttcctatggccctccaggcccacagcggtatccaattggcatccagggtcggactcccggggccatggccggaatgcagtaccctcagcagcagatgccacctcagtatggacagcaaggtgtgagtggttactgccagcagggccaacagccatattacagccagcagccgcagcccccgcacctcccaccccaggcgcagtatctgccgtcccagtcccagcagaggtaccagccgcagcaggacatgtctcaggaaggctatggaactagatctcaacctcctctggcccccggaaaacctaaccatgaagacttgaacttaatacagcaagaaagaccatcaagtttaccagatctgtctggctccattgatgacctccccacgggaacggaagcaactttgagctcagcagtcagtgcatccgggtccacgagcagccaaggggatcagagcaacccggcgcagtcgcctttctccccacatgcgtcccctcatctctccagcatcccggggggcccatctccctctcctgttggctctcctgtaggaagcaaccagtctcgatctggcccaatctctcctgcaagtatcccaggtagtcagatgcctccgcagccacccgggagccagtcagaatccagttcccatcccgccttgagccagtcaccaatgccacaggaaagaggttttatggcaggcacacaaagaaaccctcagatggctcagtatggacctcaacagacaggaccatccatgtcgcctcatccttctcctgggggccagatgcatgctggaatcagtagctttcagcagagtaactcaagtgggacttacggtccacagatgagccagtatggaccacaaggtaactactccagacccccagcgtatagtggggtgcccagtgcaagctacagcggcccagggcccggtatgggtatcagtgccaacaaccagatgcatggacaagggccaagccagccatgtggtgctgtgcccctgggacgaatgccatcagctgggatgcagaacagaccatttcctggaaatatgagcagcatgacccccagttctcctggcatgtctcagcagggagggccaggaatggggccgccaatgccaactgtgaaccgtaaggcacaggaggcagccgcagcagtgatgcaggctgctgcgaactcagcacaaagcaggcaaggcagtttccccggcatgaaccagagtggacttatggcttccagctctccctacagccagcccatgaacaacagctctagcctgatgaacacgcaggcgccgccctacagcatggcgcccgccatggtgaacagctcggcagcatctgtgggtcttgcagatatgatgtctcctggtgaatccaaactgcccctgcctctcaaagcagacggcaaagaagaaggcactccacagcccgagagcaagtcaaaggatagctacagctctcagggtatttctcagcccccaaccccaggcaacctgccagtcccttccccaatgtcccccagctctgctagcatctcctcatttcatggagatgaaagtgatagcattagcagcccaggctggccaaagactccatcaagccctaagtccagctcctccaccactactggggagaagatcacgaaggtgtacgagctggggaatgagccagagagaaagctctgggtcgaccgatacctcaccttcatggaagagagaggctctcctgtctcaagtctgcctgccgtgggcaagaagcccctggacctgttccgactctacgtctgcgtcaaagagatcgggggtttggcccaggttaataaaaacaagaagtggcgtgagctggcaaccaacctaaacgttggcacctcaagcagtgcagcgagctccctgaaaaagcagtatattcagtacctgtttgcctttgagtgcaagatcgaacgtggggaggagcccccgccggaagtcttcagcaccggggacaccaaaaagcagcccaagctccagccgccatctcctgctaactcgggatccttgcaaggcccacagaccccccagtcaactggcagcaattccatggcagaggttccaggtgacctgaagccacctaccccagcctccacccctcacggccagatgactccaatgcaaggtggaagaagcagtacaatcagtgtgcacgacccattctcagatgtgagtgattcatccttcccgaaacggaactccatgactccaaacgccccctaccagcagggcatgagcatgcccgatgtgatgggcaggatgccctatgagcccaacaaggacccctttgggggaatgagaaaagtgcctggaagcagcgagccctttatgacgcaaggacagatgcccaacagcagcatgcaggacatgtacaaccaaagtccctccggagcaatgtctaacctgggcatggggcagcgccagcagtttccctatggagccagttacgaccgaaggcatgaaccttatgggcagcagtatccaggccaaggccctccctcgggacagccgccgtatggagggcaccagcccggcctgtacccacagcagccgaattacaaacgccatatggacggcatgtacgggcccccagccaagcgccacgagggcgacatgtacaacatgcagtacagcagccagcagcaggagatgtacaaccagtatggaggctcctactcgggcccggaccgcaggcccatccagggccagtacccgtatccctacagcagggagaggatgcagggcccggggcagatccagacacacggaatcccgcctcagatgatgggcggcccgctgcagtcgtcctccagtgaggggcctcagcagaatatgtgggcagcacgcaatgatatgccttatccctaccagaacaggcagggccctggcggccctacacaggcgcccccttacccaggcatgaaccgcacagacgatatgatggtacccgatcagaggataaatcatgagagccagtggccttctcacgtcagccagcgtcagccttatatgtcgtcctcagcctccatgcagcccatcacacgcccaccacagccgtcctaccagacgccaccgtcactgccaaatcacatctccagggcgcccagcccagcgtccttccagcgctccctggagaaccgcatgtctccaagcaagtctccttttctgccgtctatgaagatgcagaaggtcatgcccacggtccccacatcccaggtcaccgggccaccaccccaaccacccccaatcagaagggagatcacctttcctcctggctcagtagaagcatcacaaccagtcttgaaacaaaggcgaaagattacctccaaagatatcgttactcctgaggcgtggcgtgtgatgatgtcccttaaatcaggtcttttggctgagagtacgtgggctttggacactattaatattcttctgtatgatgacagcactgttgctactttcaatctctcccagttgtctggatttctcgaacttttagtcgagtactttagaaaatgcctgattgacatttttggaattcttatggaatatgaagtgggagaccccagccaaaaagcacttgatcacaacgcagcaaggaaggatgacagccagtccttggcagacgattctgggaaagaggaggaagatgctgaatgtattgatgacgacgaggaagacgaggaggatgaggaggaagacagcgagaagacagaaagcgatgaaaagagcagcatcgctctgactgccccggacgccgctgcagacccaaaggagaagcccaagcaagccagtaagttcgacaagctgccaataaagatagtcaaaaagaacaacctgtttgttgttgaccgatctgacaagttggggcgtgtgcaggagttcaatagtggccttctgcactggcagctcggcgggggtgacaccaccgagcacattcagactcactttgagagcaagatggaaattcctcctcgcaggcgcccacctccccccttaagctccgcaggtagaaagaaagagcaagaaggcaaaggcgactctgaagagcagcaagagaaaagcatcatagcaaccatcgatgacgtcctctctgctcggccaggggcattgcctgaagacgcaaaccctgggccccagaccgaaagcagtaagtttccctttggtatccagcaagccaaaagtcaccggaacatcaagctgctggaggacgagcccaggagccgagacgagactcctctgtgtaccatcgcgcactggcaggactcgctggctaagcgatgcatctgtgtgtccaatattgtccgtagcttgtcattcgtgcctggcaatgatgccgaaatgtccaaacatccaggcctggtgctgatcctggggaagctgattcttcttcaccacgagcatccagagagaaagcgagcaccgcagacctatgagaaagaggaggatgaggacaagggggtggcctgcagcaaagatgagtggtggtgggactgcctcgaggtcttgagggataacacgttggtcacgttggccaacatttccgggcagctagacttgtctgcttacacggaaagcatctgcttgccaattttggatggcttgctgcactggatggtgtgcccgtctgcagaggcacaagatccctttccaactgtgggacccaactcggtcctgtcgcctcagagacttgtgctggagaccctctgtaaactcagtatccaggacaataatgtggacctgatcttggccactcctccatttagtcgtcaggagaaattctatgctacattagttaggtacgttggggatcgcaaaaacccagtctgtcgagaaatgtccatggcgcttttatcgaaccttgcccaaggggacgcactagcagcaagggccatagctgtgcagaaaggaagcattggaaacttgataagcttcctagaggatggggtcacgatggcccagtaccagcagagccagcacaacctcatgcacatgcagcccccgcccctggaaccacctagcgtagacatgatgtgcagggcggccaaggctttgctagccatggccagagtggacgaaaaccgctcggaattccttttgcacgagggccggttgctggatatctcgatatcagctgtcctgaactctctggttgcatctgtcatctgtgatgtactgtttcagattgggcagtta

SEQ ID NO: 6069 - DNA, 6708 bp, Homo sapiens
  source 1..6708: mol_type = genomic DNA
atggcccataacgcgggcgccgcggccgccgccggcacccacagcgccaagagcggcggctccgaggcggctctcaaggagggtggaagcgccgccgcgctgtcctcctcctcctcctcctccgcggcggcagcggcggcatcctcttcctcctcgtcgggcccgggctcggccatggagacggggctgctccccaaccacaaactgaaaaccgttggcgaagcccccgccgcgccgccccaccagcagcaccaccaccaccaccatgcccaccaccaccaccaccatgcccaccacctccaccaccaccacgcactacagcagcagctaaaccagttccagcagcagcagcagcagcagcaacagcagcagcagcagcagcagcaacagcaacatcccatttccaacaacaacagcttgggcggcgcgggcggcggcgcgcctcagcccggccccgacatggagcagccgcaacatggaggcgccaaggacagtgctgcgggcggccaggccgaccccccgggcccgccgctgctgagcaagccgggcgacgaggacgacgcgccgcccaagatgggggagccggcgggcggccgctacgagcacccgggcttgggcgccctgggcacgcagcagccgccggtcgccgtgcccgggggcggcggcggcccggcggccgtcccggagtttaataattactatggcagcgctgcccctgcgagcggcggccccggcggccgcgctgggccttgctttgatcaacatggcggacaacaaagccccgggatggggatgatgcactccgcctccgccgccgccgccggggcccccggcagcatggaccccctgcagaactcccacgaagggtaccccaacagccagtgcaaccattatccgggctacagccggcccggcgcgggcggcggcggcggcggcggcggcggaggaggaggaggcagcggaggaggaggaggaggaggaggagcaggagcaggaggagcaggagcgggagctgtggcggcggcggccgcggcggcggcggcagcagcaggaggcggcggcggcggcggctatgggggctcgtccgcggggtacggggtgctgagctccccccggcagcagggcggcggcatgatgatgggccccgggggcggcggggccgcgagcctcagcaaggcggccgccggctcggcggcggggggcttccagcgcttcgccggccagaaccagcacccgtcgggggccaccccgaccctcaatcagctgctcacctcgcccagccccatgatgcggagctacggcggcagctaccccgagtacagcagccccagcgcgccgccgccgccgccgtcgcagccccagtcccaggcggcggcggcgggggcggcggcgggcggccagcaggcggccgcgggcatgggcttgggcaaggacatgggcgcccagtacgccgctgccagcccggcctgggcggccgcgcaacaaaggagtcacccggcgatgagccccggcacccccggaccgaccatgggcagatcccagggcagcccaatggatccaatggtgatgaagagacctcagttgtatggcatgggcagtaaccctcattctcagcctcagcagagcagtccgtacccaggaggttcctatggccctccaggcccacagcggtatccaattggcatccagggtcggactcccggggccatggccggaatgcagtaccctcagcagcagatgccacctcagtatggacagcaaggtgtgagtggttactgccagcagggccaacagccatattacagccagcagccgcagcccccgcacctcccaccccaggcgcagtatctgccgtcccagtcccagcagaggtaccagccgcagcaggacatgtctcaggaaggctatggaactagatctcaacctcctctggcccccggaaaacctaaccatgaagacttgaacttaatacagcaagaaagaccatcaagtttaccagatctgtctggctccattgatgacctccccacgggaacggaagcaactttgagctcagcagtcagtgcatccgggtccacgagcagccaaggggatcagagcaacccggcgcagtcgcctttctccccacatgcgtcccctcatctctccagcatcccggggggcccatctccctctcctgttggctctcctgtaggaagcaaccagtctcgatctggcccaatctctcctgcaagtatcccaggtagtcagatgcctccgcagccacccgggagccagtcagaatccagttcccatcccgccttgagccagtcaccaatgccacaggaaagaggttttatggcaggcacacaaagaaaccctcagatggctcagtatggacctcaacagacaggaccatccatgtcgcctcatccttctcctgggggccagatgcatgctggaatcagtagctttcagcagagtaactcaagtgggacttacggtccacagatgagccagtatggaccacaaggtaactactccagacccccagcgtatagtggggtgcccagtgcaagctacagcggcccagggcccggtatgggtatcagtgccaacaaccagatgcatggacaagggccaagccagccatgtggtgctgtgcccctgggacgaatgccatcagctgggatgcagaacagaccatttcctggaaatatgagcagcatgacccccagttctcctggcatgtctcagcagggagggccaggaatggggccgccaatgccaactgtgaaccgtaaggcacaggaggcagccgcagcagtgatgcaggctgctgcgaactcagcacaaagcaggcaaggcagtttccccggcatgaaccagagtggacttatggcttccagctctccctacagccagcccatgaacaacagctctagcctgatgaacacgcaggcgccgccctacagcatggcgcccgccatggtgaacagctcggcagcatctgtgggtcttgcagatatgatgtctcctggtgaatccaaactgcccctgcctctcaaagcagacggcaaagaagaaggcactccacagcccgagagcaagtcaaagaagtccagctcctccaccactactggggagaagatcacgaaggtgtacgagctggggaatgagccagagagaaagctctgggtcgaccgatacctcaccttcatggaagagagaggctctcctgtctcaagtctgcctgccgtgggcaagaagcccctggacctgttccgactctacgtctgcgtcaaagagatcgggggtttggcccaggttaataaaaacaagaagtggcgtgagctggcaaccaacctaaacgttggcacctcaagcagtgcagcgagctccctgaaaaagcagtatattcagtacctgtttgcctttgagtgcaagatcgaacgtggggaggagcccccgccggaagtcttcagcaccggggacaccaaaaagcagcccaagctccagccgccatctcctgctaactcgggatccttgcaaggcccacagaccccccagtcaactggcagcaattccatggcagaggttccaggtgacctgaagccacctaccccagcctccacccctcacggccagatgactccaatgcaaggtggaagaagcagtacaatcagtgtgcacgacccattctcagatgtgagtgattcatccttcccgaaacggaactccatgactccaaacgccccctaccagcagggcatgagcatgcccgatgtgatgggcaggatgccctatgagcccaacaaggacccctttgggggaatgagaaaagtgcctggaagcagcgagccctttatgacgcaaggacagatgcccaacagcagcatgcaggacatgtacaaccaaagtccctccggagcaatgtctaacctgggcatggggcagcgccagcagtttccctatggagccagttacgaccgaaggcatgaaccttatgggcagcagtatccaggccaaggccctccctcgggacagccgccgtatggagggcaccagcccggcctgtacccacagcagccgaattacaaacgccatatggacggcatgtacgggcccccagccaagcgccacgagggcgacatgtacaacatgcagtacagcagccagcagcaggagatgtacaaccagtatggaggctcctactcgggcccggaccgcaggcccatccagggccagtacccgtatccctacagcagggagaggatgcagggcccggggcagatccagacacacggaatcccgcctcagatgatgggcggcccgctgcagtcgtcctccagtgaggggcctcagcagaatatgtgggcagcacgcaatgatatgccttatccctaccagaacaggcagggccctggcggccctacacaggcgcccccttacccaggcatgaaccgcacagacgatatgatggtacccgatcagaggataaatcatgagagccagtggccttctcacgtcagccagcgtcagccttatatgtcgtcctcagcctccatgcagcccatcacacgcccaccacagccgtcctaccagacgccaccgtcactgccaaatcacatctccagggcgcccagcccagcgtccttccagcgctccctggagaaccgcatgtctccaagcaagtctccttttctgccgtctatgaagatgcagaaggtcatgcccacggtccccacatcccaggtcaccgggccaccaccccaaccacccccaatcagaagggagatcacctttcctcctggctcagtagaagcatcacaaccagtcttgaaacaaaggcgaaagattacctccaaagatatcgttactcctgaggcgtggcgtgtgatgatgtcccttaaatcaggtcttttggctgagagtacgtgggctttggacactattaatattcttctgtatgatgacagcactgttgctactttcaatctctcccagttgtctggatttctcgaacttttagtcgagtactttagaaaatgcctgattgacatttttggaattcttatggaatatgaagtgggagaccccagccaaaaagcacttgatcacaacgcagcaaggaaggatgacagccagtccttggcagacgattctgggaaagaggaggaagatgctgaatgtattgatgacgacgaggaagacgaggaggatgaggaggaagacagcgagaagacagaaagcgatgaaaagagcagcatcgctctgactgccccggacgccgctgcagacccaaaggagaagcccaagcaagccagtaagttcgacaagctgccaataaagatagtcaaaaagaacaacctgtttgttgttgaccgatctgacaagttggggcgtgtgcaggagttcaatagtggccttctgcactggcagctcggcgggggtgacaccaccgagcacattcagactcactttgagagcaagatggaaattcctcctcgcaggcgcccacctccccccttaagctccgcaggtagaaagaaagagcaagaaggcaaaggcgactctgaagagcagcaagagaaaagcatcatagcaaccatcgatgacgtcctctctgctcggccaggggcattgcctgaagacgcaaaccctgggccccagaccgaaagcagtaagtttccctttggtatccagcaagccaaaagtcaccggaacatcaagctgctggaggacgagcccaggagccgagacgagactcctctgtgtaccatcgcgcactggcaggactcgctggctaagcgatgcatctgtgtgtccaatattgtccgtagcttgtcattcgtgcctggcaatgatgccgaaatgtccaaacatccaggcctggtgctgatcctggggaagctgattcttcttcaccacgagcatccagagagaaagcgagcaccgcagacctatgagaaagaggaggatgaggacaagggggtggcctgcagcaaagatgagtggtggtgggactgcctcgaggtcttgagggataacacgttggtcacgttggccaacatttccgggcagctagacttgtctgcttacacggaaagcatctgcttgccaattttggatggcttgctgcactggatggtgtgcccgtctgcagaggcacaagatccctttccaactgtgggacccaactcggtcctgtcgcctcagagacttgtgctggagaccctctgtaaactcagtatccaggacaataatgtggacctgatcttggccactcctccatttagtcgtcaggagaaattctatgctacattagttaggtacgttggggatcgcaaaaacccagtctgtcgagaaatgtccatggcgcttttatcgaaccttgcccaaggggacgcactagcagcaagggccatagctgtgcagaaaggaagcattggaaacttgataagcttcctagaggatggggtcacgatggcccagtaccagcagagccagcacaacctcatgcacatgcagcccccgcccctggaaccacctagcgtagacatgatgtgcagggcggccaaggctttgctagccatggccagagtggacgaaaaccgctcggaattccttttgcacgagggccggttgctggatatctcgatatcagctgtcctgaactctctggttgcatctgtcatctgtgatgtactgtttcagattgggcagtta

SEQ ID NO: 6070 - DNA, 6747 bp, Homo sapiens
  source 1..6747: mol_type = genomic DNA
atggcccataacgcgggcgccgcggccgccgccggcacccacagcgccaagagcggcggctccgaggcggctctcaaggagggtggaagcgccgccgcgctgtcctcctcctcctcctcctccgcggcggcagcggcggcatcctcttcctcctcgtcgggcccgggctcggccatggagacggggctgctccccaaccacaaactgaaaaccgttggcgaagcccccgccgcgccgccccaccagcagcaccaccaccaccaccatgcccaccaccaccaccaccatgcccaccacctccaccaccaccacgcactacagcagcagctaaaccagttccagcagcagcagcagcagcagcaacagcagcagcagcagcagcagcaacagcaacatcccatttccaacaacaacagcttgggcggcgcgggcggcggcgcgcctcagcccggccccgacatggagcagccgcaacatggaggcgccaaggacagtgctgcgggcggccaggccgaccccccgggcccgccgctgctgagcaagccgggcgacgaggacgacgcgccgcccaagatgggggagccggcgggcggccgctacgagcacccgggcttgggcgccctgggcacgcagcagccgccggtcgccgtgcccgggggcggcggcggcccggcggccgtcccggagtttaataattactatggcagcgctgcccctgcgagcggcggccccggcggccgcgctgggccttgctttgatcaacatggcggacaacaaagccccgggatggggatgatgcactccgcctccgccgccgccgccggggcccccggcagcatggaccccctgcagaactcccacgaagggtaccccaacagccagtgcaaccattatccgggctacagccggcccggcgcgggcggcggcggcggcggcggcggcggaggaggaggaggcagcggaggaggaggaggaggaggaggagcaggagcaggaggagcaggagcgggagctgtggcggcggcggccgcggcggcggcggcagcagcaggaggcggcggcggcggcggctatgggggctcgtccgcggggtacggggtgctgagctccccccggcagcagggcggcggcatgatgatgggccccgggggcggcggggccgcgagcctcagcaaggcggccgccggctcggcggcggggggcttccagcgcttcgccggccagaaccagcacccgtcgggggccaccccgaccctcaatcagctgctcacctcgcccagccccatgatgcggagctacggcggcagctaccccgagtacagcagccccagcgcgccgccgccgccgccgtcgcagccccagtcccaggcggcggcggcgggggcggcggcgggcggccagcaggcggccgcgggcatgggcttgggcaaggacatgggcgcccagtacgccgctgccagcccggcctgggcggccgcgcaacaaaggagtcacccggcgatgagccccggcacccccggaccgaccatgggcagatcccagggcagcccaatggatccaatggtgatgaagagacctcagttgtatggcatgggcagtaaccctcattctcagcctcagcagagcagtccgtacccaggaggttcctatggccctccaggcccacagcggtatccaattggcatccagggtcggactcccggggccatggccggaatgcagtaccctcagcagcaggactctggagatgccacatggaaagaaacattctggttgatgccacctcagtatggacagcaaggtgtgagtggttactgccagcagggccaacagccatattacagccagcagccgcagcccccgcacctcccaccccaggcgcagtatctgccgtcccagtcccagcagaggtaccagccgcagcaggacatgtctcaggaaggctatggaactagatctcaacctcctctggcccccggaaaacctaaccatgaagacttgaacttaatacagcaagaaagaccatcaagtttaccagatctgtctggctccattgatgacctccccacgggaacggaagcaactttgagctcagcagtcagtgcatccgggtccacgagcagccaaggggatcagagcaacccggcgcagtcgcctttctccccacatgcgtcccctcatctctccagcatcccggggggcccatctccctctcctgttggctctcctgtaggaagcaaccagtctcgatctggcccaatctctcctgcaagtatcccaggtagtcagatgcctccgcagccacccgggagccagtcagaatccagttcccatcccgccttgagccagtcaccaatgccacaggaaagaggttttatggcaggcacacaaagaaaccctcagatggctcagtatggacctcaacagacaggaccatccatgtcgcctcatccttctcctgggggccagatgcatgctggaatcagtagctttcagcagagtaactcaagtgggacttacggtccacagatgagccagtatggaccacaaggtaactactccagacccccagcgtatagtggggtgcccagtgcaagctacagcggcccagggcccggtatgggtatcagtgccaacaaccagatgcatggacaagggccaagccagccatgtggtgctgtgcccctgggacgaatgccatcagctgggatgcagaacagaccatttcctggaaatatgagcagcatgacccccagttctcctggcatgtctcagcagggagggccaggaatggggccgccaatgccaactgtgaaccgtaaggcacaggaggcagccgcagcagtgatgcaggctgctgcgaactcagcacaaagcaggcaaggcagtttccccggcatgaaccagagtggacttatggcttccagctctccctacagccagcccatgaacaacagctctagcctgatgaacacgcaggcgccgccctacagcatggcgcccgccatggtgaacagctcggcagcatctgtgggtcttgcagatatgatgtctcctggtgaatccaaactgcccctgcctctcaaagcagacggcaaagaagaaggcactccacagcccgagagcaagtcaaagaagtccagctcctccaccactactggggagaagatcacgaaggtgtacgagctggggaatgagccagagagaaagctctgggtcgaccgatacctcaccttcatggaagagagaggctctcctgtctcaagtctgcctgccgtgggcaagaagcccctggacctgttccgactctacgtctgcgtcaaagagatcgggggtttggcccaggttaataaaaacaagaagtggcgtgagctggcaaccaacctaaacgttggcacctcaagcagtgcagcgagctccctgaaaaagcagtatattcagtacctgtttgcctttgagtgcaagatcgaacgtggggaggagcccccgccggaagtcttcagcaccggggacaccaaaaagcagcccaagctccagccgccatctcctgctaactcgggatccttgcaaggcccacagaccccccagtcaactggcagcaattccatggcagaggttccaggtgacctgaagccacctaccccagcctccacccctcacggccagatgactccaatgcaaggtggaagaagcagtacaatcagtgtgcacgacccattctcagatgtgagtgattcatccttcccgaaacggaactccatgactccaaacgccccctaccagcagggcatgagcatgcccgatgtgatgggcaggatgccctatgagcccaacaaggacccctttgggggaatgagaaaagtgcctggaagcagcgagccctttatgacgcaaggacagatgcccaacagcagcatgcaggacatgtacaaccaaagtccctccggagcaatgtctaacctgggcatggggcagcgccagcagtttccctatggagccagttacgaccgaaggcatgaaccttatgggcagcagtatccaggccaaggccctccctcgggacagccgccgtatggagggcaccagcccggcctgtacccacagcagccgaattacaaacgccatatggacggcatgtacgggcccccagccaagcgccacgagggcgacatgtacaacatgcagtacagcagccagcagcaggagatgtacaaccagtatggaggctcctactcgggcccggaccgcaggcccatccagggccagtacccgtatccctacagcagggagaggatgcagggcccggggcagatccagacacacggaatcccgcctcagatgatgggcggcccgctgcagtcgtcctccagtgaggggcctcagcagaatatgtgggcagcacgcaatgatatgccttatccctaccagaacaggcagggccctggcggccctacacaggcgcccccttacccaggcatgaaccgcacagacgatatgatggtacccgatcagaggataaatcatgagagccagtggccttctcacgtcagccagcgtcagccttatatgtcgtcctcagcctccatgcagcccatcacacgcccaccacagccgtcctaccagacgccaccgtcactgccaaatcacatctccagggcgcccagcccagcgtccttccagcgctccctggagaaccgcatgtctccaagcaagtctccttttctgccgtctatgaagatgcagaaggtcatgcccacggtccccacatcccaggtcaccgggccaccaccccaaccacccccaatcagaagggagatcacctttcctcctggctcagtagaagcatcacaaccagtcttgaaacaaaggcgaaagattacctccaaagatatcgttactcctgaggcgtggcgtgtgatgatgtcccttaaatcaggtcttttggctgagagtacgtgggctttggacactattaatattcttctgtatgatgacagcactgttgctactttcaatctctcccagttgtctggatttctcgaacttttagtcgagtactttagaaaatgcctgattgacatttttggaattcttatggaatatgaagtgggagaccccagccaaaaagcacttgatcacaacgcagcaaggaaggatgacagccagtccttggcagacgattctgggaaagaggaggaagatgctgaatgtattgatgacgacgaggaagacgaggaggatgaggaggaagacagcgagaagacagaaagcgatgaaaagagcagcatcgctctgactgccccggacgccgctgcagacccaaaggagaagcccaagcaagccagtaagttcgacaagctgccaataaagatagtcaaaaagaacaacctgtttgttgttgaccgatctgacaagttggggcgtgtgcaggagttcaatagtggccttctgcactggcagctcggcgggggtgacaccaccgagcacattcagactcactttgagagcaagatggaaattcctcctcgcaggcgcccacctccccccttaagctccgcaggtagaaagaaagagcaagaaggcaaaggcgactctgaagagcagcaagagaaaagcatcatagcaaccatcgatgacgtcctctctgctcggccaggggcattgcctgaagacgcaaaccctgggccccagaccgaaagcagtaagtttccctttggtatccagcaagccaaaagtcaccggaacatcaagctgctggaggacgagcccaggagccgagacgagactcctctgtgtaccatcgcgcactggcaggactcgctggctaagcgatgcatctgtgtgtccaatattgtccgtagcttgtcattcgtgcctggcaatgatgccgaaatgtccaaacatccaggcctggtgctgatcctggggaagctgattcttcttcaccacgagcatccagagagaaagcgagcaccgcagacctatgagaaagaggaggatgaggacaagggggtggcctgcagcaaagatgagtggtggtgggactgcctcgaggtcttgagggataacacgttggtcacgttggccaacatttccgggcagctagacttgtctgcttacacggaaagcatctgcttgccaattttggatggcttgctgcactggatggtgtgcccgtctgcagaggcacaagatccctttccaactgtgggacccaactcggtcctgtcgcctcagagacttgtgctggagaccctctgtaaactcagtatccaggacaataatgtggacctgatcttggccactcctccatttagtcgtcaggagaaattctatgctacattagttaggtacgttggggatcgcaaaaacccagtctgtcgagaaatgtccatggcgcttttatcgaaccttgcccaaggggacgcactagcagcaagggccatagctgtgcagaaaggaagcattggaaacttgataagcttcctagaggatggggtcacgatggcccagtaccagcagagccagcacaacctcatgcacatgcagcccccgcccctggaaccacctagcgtagacatgatgtgcagggcggccaaggctttgctagccatggccagagtggacgaaaaccgctcggaattccttttgcacgagggccggttgctggatatctcgatatcagctgtcctgaactctctggttgcatctgtcatctgtgatgtactgtttcagattgggcagtta

SEQ ID NO: 6071 - DNA, 4617 bp, Homo sapiens
  source 1..4617: mol_type = genomic DNA
atgcctccgcagccacccgggagccagtcagaatccagttcccatcccgccttgagccagtcaccaatgccacaggaaagaggttttatggcaggcacacaaagaaaccctcagatggctcagtatggacctcaacagacaggaccatccatgtcgcctcatccttctcctgggggccagatgcatgctggaatcagtagctttcagcagagtaactcaagtgggacttacggtccacagatgagccagtatggaccacaaggtaactactccagacccccagcgtatagtggggtgcccagtgcaagctacagcggcccagggcccggtatgggtatcagtgccaacaaccagatgcatggacaagggccaagccagccatgtggtgctgtgcccctgggacgaatgccatcagctgggatgcagaacagaccatttcctggaaatatgagcagcatgacccccagttctcctggcatgtctcagcagggagggccaggaatggggccgccaatgccaactgtgaaccgtaaggcacaggaggcagccgcagcagtgatgcaggctgctgcgaactcagcacaaagcaggcaaggcagtttccccggcatgaaccagagtggacttatggcttccagctctccctacagccagcccatgaacaacagctctagcctgatgaacacgcaggcgccgccctacagcatggcgcccgccatggtgaacagctcggcagcatctgtgggtcttgcagatatgatgtctcctggtgaatccaaactgcccctgcctctcaaagcagacggcaaagaagaaggcactccacagcccgagagcaagtcaaaggatagctacagctctcagggtatttctcagcccccaaccccaggcaacctgccagtcccttccccaatgtcccccagctctgctagcatctcctcatttcatggagatgaaagtgatagcattagcagcccaggctggccaaagactccatcaagccctaagtccagctcctccaccactactggggagaagatcacgaaggtgtacgagctggggaatgagccagagagaaagctctgggtcgaccgatacctcaccttcatggaagagagaggctctcctgtctcaagtctgcctgccgtgggcaagaagcccctggacctgttccgactctacgtctgcgtcaaagagatcgggggtttggcccaggttaataaaaacaagaagtggcgtgagctggcaaccaacctaaacgttggcacctcaagcagtgcagcgagctccctgaaaaagcagtatattcagtacctgtttgcctttgagtgcaagatcgaacgtggggaggagcccccgccggaagtcttcagcaccggggacaccaaaaagcagcccaagctccagccgccatctcctgctaactcgggatccttgcaaggcccacagaccccccagtcaactggcagcaattccatggcagaggttccaggtgacctgaagccacctaccccagcctccacccctcacggccagatgactccaatgcaaggtggaagaagcagtacaatcagtgtgcacgacccattctcagatgtgagtgattcatccttcccgaaacggaactccatgactccaaacgccccctaccagcagggcatgagcatgcccgatgtgatgggcaggatgccctatgagcccaacaaggacccctttgggggaatgagaaaagtgcctggaagcagcgagccctttatgacgcaaggacagatgcccaacagcagcatgcaggacatgtacaaccaaagtccctccggagcaatgtctaacctgggcatggggcagcgccagcagtttccctatggagccagttacgaccgaaggcatgaaccttatgggcagcagtatccaggccaaggccctccctcgggacagccgccgtatggagggcaccagcccggcctgtacccacagcagccgaattacaaacgccatatggacggcatgtacgggcccccagccaagcgccacgagggcgacatgtacaacatgcagtacagcagccagcagcaggagatgtacaaccagtatggaggctcctactcgggcccggaccgcaggcccatccagggccagtacccgtatccctacagcagggagaggatgcagggcccggggcagatccagacacacggaatcccgcctcagatgatgggcggcccgctgcagtcgtcctccagtgaggggcctcagcagaatatgtgggcagcacgcaatgatatgccttatccctaccagaacaggcagggccctggcggccctacacaggcgcccccttacccaggcatgaaccgcacagacgatatgatggtacccgatcagaggataaatcatgagagccagtggccttctcacgtcagccagcgtcagccttatatgtcgtcctcagcctccatgcagcccatcacacgcccaccacagccgtcctaccagacgccaccgtcactgccaaatcacatctccagggcgcccagcccagcgtccttccagcgctccctggagaaccgcatgtctccaagcaagtctccttttctgccgtctatgaagatgcagaaggtcatgcccacggtccccacatcccaggtcaccgggccaccaccccaaccacccccaatcagaagggagatcacctttcctcctggctcagtagaagcatcacaaccagtcttgaaacaaaggcgaaagattacctccaaagatatcgttactcctgaggcgtggcgtgtgatgatgtcccttaaatcaggtcttttggctgagagtacgtgggctttggacactattaatattcttctgtatgatgacagcactgttgctactttcaatctctcccagttgtctggatttctcgaacttttagtcgagtactttagaaaatgcctgattgacatttttggaattcttatggaatatgaagtgggagaccccagccaaaaagcacttgatcacaacgcagcaaggaaggatgacagccagtccttggcagacgattctgggaaagaggaggaagatgctgaatgtattgatgacgacgaggaagacgaggaggatgaggaggaagacagcgagaagacagaaagcgatgaaaagagcagcatcgctctgactgccccggacgccgctgcagacccaaaggagaagcccaagcaagccagtaagttcgacaagctgccaataaagatagtcaaaaagaacaacctgtttgttgttgaccgatctgacaagttggggcgtgtgcaggagttcaatagtggccttctgcactggcagctcggcgggggtgacaccaccgagcacattcagactcactttgagagcaagatggaaattcctcctcgcaggcgcccacctccccccttaagctccgcaggtagaaagaaagagcaagaaggcaaaggcgactctgaagagcagcaagagaaaagcatcatagcaaccatcgatgacgtcctctctgctcggccaggggcattgcctgaagacgcaaaccctgggccccagaccgaaagcagtaagtttccctttggtatccagcaagccaaaagtcaccggaacatcaagctgctggaggacgagcccaggagccgagacgagactcctctgtgtaccatcgcgcactggcaggactcgctggctaagcgatgcatctgtgtgtccaatattgtccgtagcttgtcattcgtgcctggcaatgatgccgaaatgtccaaacatccaggcctggtgctgatcctggggaagctgattcttcttcaccacgagcatccagagagaaagcgagcaccgcagacctatgagaaagaggaggatgaggacaagggggtggcctgcagcaaagatgagtggtggtgggactgcctcgaggtcttgagggataacacgttggtcacgttggccaacatttccgggcagctagacttgtctgcttacacggaaagcatctgcttgccaattttggatggcttgctgcactggatggtgtgcccgtctgcagaggcacaagatccctttccaactgtgggacccaactcggtcctgtcgcctcagagacttgtgctggagaccctctgtaaactcagtatccaggacaataatgtggacctgatcttggccactcctccatttagtcgtcaggagaaattctatgctacattagttaggtacgttggggatcgcaaaaacccagtctgtcgagaaatgtccatggcgcttttatcgaaccttgcccaaggggacgcactagcagcaagggccatagctgtgcagaaaggaagcattggaaacttgataagcttcctagaggatggggtcacgatggcccagtaccagcagagccagcacaacctcatgcacatgcagcccccgcccctggaaccacctagcgtagacatgatgtgcagggcggccaaggctttgctagccatggccagagtggacgaaaaccgctcggaattccttttgcacgagggccggttgctggatatctcgatatcagctgtcctgaactctctggttgcatctgtcatctgtgatgtactgtttcagattgggcagtta

SEQ ID NO: 6072 - DNA, 6855 bp, Homo sapiens
  source 1..6855: mol_type = genomic DNA
atggccgcgcaggtcgcccccgccgccgccagcagcctgggcaacccgccgccgccgccgccctcggagctgaagaaagccgagcagcagcagcgggaggaggcggggggcgaggcggcggcggcggcagcggccgagcgcggggaaatgaaggcagccgccgggcaggaaagcgagggccccgccgtggggccgccgcagccgctgggaaaggagctgcaggacggggccgagagcaatgggggtggcggcggcggcggagccggcagcggcggcgggcccggcgcggagccggacctgaagaactcgaacgggaacgcgggccctaggcccgccctgaacaataacctcacggagccgcccggcggcggcggtggcggcagcagcgatggggtgggggcgcctcctcactcagccgcggccgccttgccgcccccagcctacggcttcgggcaaccctacggccggagcccgtctgccgtcgccgccgccgcggccgccgtcttccaccaacaacatggcggacaacaaagccctggcctggcagcgctgcagagcggcggcggcgggggcctggagccctacgcggggccccagcagaactctcacgaccacggcttccccaaccaccagtacaactcctactaccccaaccgcagcgcctaccccccgcccgccccggcctacgcgctgagctccccgagaggtggcactccgggctccggcgcggcggcggctgccggctccaagccgcctccctcctccagcgcctccgcctcctcgtcgtcttcgtccttcgctcagcagcgcttcggggccatggggggaggcggcccctccgcggccggcgggggaactccccagcccaccgccacccccaccctcaaccaactgctcacgtcgcccagctcggcccggggctaccagggctaccccgggggcgactacagtggcgggccccaggacgggggcgccggcaagggcccggcggacatggcctcgcagtgttggggggctgcggcggcggcagctgcggcggcggccgcctcgggaggggcccaacaaaggagccaccacgcgcccatgagccccgggagcagcggcggcggggggcagccgctcgcccggacccctcagccatccagtccaatggatcagatgggcaagatgagacctcagccatatggcgggactaacccatactcgcagcaacagggacctccgtcaggaccgcagcaaggacatgggtacccagggcagccatacgggtcccagaccccgcagcggtacccgatgaccatgcagggccgggcgcagagtgccatgggcggcctctcttatacacagcagattcctccttatggacaacaaggccccagcgggtatggtcaacagggccagactccatattacaaccagcaaagtcctcaccctcagcagcagcagccaccctactcccagcaaccaccgtcccagacccctcatgcccaaccttcgtatcagcagcagccacagtctcaaccaccacagctccagtcctctcagcctccatactcccagcagccatcccagcctccacatcagcagtccccggctccatacccctcccagcagtcgacgacacagcagcacccccagagccagcccccctactcacagccacaggctcagtctccttaccagcagcagcaacctcagcagccagcaccctcgacgctctcccagcaggctgcgtatcctcagccccagtctcagcagtcccagcaaactgcctattcccagcagcgcttccctccaccgcaggagctatctcaagattcatttgggtctcaggcatcctcagccccctcaatgacctccagtaagggagggcaagaagatatgaacctgagccttcagtcaagaccctccagcttgcctgatctatctggttcaatagatgacctccccatggggacagaaggagctctgagtcctggagtgagcacatcagggatttccagcagccaaggagagcagagtaatccagctcagtctcctttctctcctcatacctcccctcacctgcctggcatccgaggcccttccccgtcccctgttggctctcccgccagtgttgctcagtctcgctcaggaccactctcgcctgctgcagtgccaggcaaccagatgccacctcggccacccagtggccagtcggacagcatcatgcatccttccatgaaccaatcaagcattgcccaagatcgaggttatatgcagaggaacccccagatgccccagtacagttccccccagcccggctcagccttatctccgcgtcagccttccggaggacagatacacacaggcatgggctcctaccagcagaactccatggggagctatggtccccaggggggtcagtatggcccacaaggtggctaccccaggcagccaaactataatgccttgcccaatgccaactaccccagtgcaggcatggctggaggcataaaccccatgggtgccggaggtcaaatgcatggacagcctggcatcccaccttatggcacactccctccagggaggatgagtcacgcctccatgggcaaccggccttatggccctaacatggccaatatgccacctcaggttgggtcagggatgtgtcccccaccagggggcatgaaccggaaaacccaagaaactgctgtcgccatgcatgttgctgccaactctatccaaaacaggccgccaggctaccccaatatgaatcaagggggcatgatgggaactggacctccttatggacaagggattaatagtatggctggcatgatcaaccctcagggacccccatattccatgggtggaaccatggccaacaattctgcagggatggcagccagcccagagatgatgggccttggggatgtaaagttaactccagccaccaaaatgaacaacaaggcagatgggacacccaagacagaatccaaatccaagaaatccagttcttctactacaaccaatgagaagatcaccaagttgtatgagctgggtggtgagcctgagaggaagatgtgggtggaccgttatctggccttcactgaggagaaggccatgggcatgacaaatctgcctgctgtgggtaggaaacctctggacctctatcgcctctatgtgtctgtgaaggagattggtggattgactcaggtcaacaagaacaaaaaatggcgggaacttgcaaccaacctcaatgtgggcacatcaagcagtgctgccagctccttgaaaaagcagtatatccagtgtctctatgcctttgaatgcaagattgaacggggagaagaccctcccccagacatctttgcagctgctgattccaagaagtcccagcccaagatccagcctccctctcctgcgggatcaggatctatgcaggggccccagactccccagtcaaccagcagttccatggcagaaggaggagacttaaagccaccaactccagcatccacaccacacagtcagatccccccattgccaggcatgagcaggagcaattcagttgggatccaggatgcctttaatgatggaagtgactccacattccagaagcggaattccatgactccaaaccctgggtatcagcccagtatgaatacctctgacatgatggggcgcatgtcctatgagccaaataaggatccttatggcagcatgaggaaagctccagggagtgatcccttcatgtcctcagggcagggccccaacggcgggatgggtgacccctacagtcgtgctgccggccctgggctaggaaatgtggcgatgggaccacgacagcactatccctatggaggtccttatgacagagtgaggacggagcctggaatagggcctgagggaaacatgagcactggggccccacagccgaatctcatgccttccaacccagactcggggatgtattctcctagccgctaccccccgcagcagcagcagcagcagcagcaacgacatgattcctatggcaatcagttctccacccaaggcaccccttctggcagccccttccccagccagcagactacaatgtatcaacagcaacagcagaattacaagcggccaatggatggcacatatggccctcctgccaagcggcacgaaggggagatgtacagcgtgccatacagcactgggcaggggcagcctcagcagcagcagttgcccccagcccagccccagcctgccagccagcaacaagctgcccagccttcccctcagcaagatgtatacaaccagtatggcaatgcctatcctgccactgccacagctgctactgagcgccgaccagcaggcggcccccagaaccaatttccattccagtttggccgagaccgtgtctctgcaccccctggcaccaatgcccagcaaaacatgccaccacaaatgatgggcggccccatacaggcatcagctgaggttgctcagcaaggcaccatgtggcaggggcgtaatgacatgacctataattatgccaacaggcagagcacgggctctgccccccagggccccgcctatcatggcgtgaaccgaacagatgaaatgctgcacacagatcagagggccaaccacgaaggctcgtggccttcccatggcacacgccagcccccatatggtccctctgcccctgtgccccccatgacaaggccccctccatctaactaccagcccccaccaagcatgcagaatcacattcctcaggtatccagccctgctcccctgccccggccaatggagaaccgcacctctcctagcaagtctccattcctgcactctgggatgaaaatgcagaaggcaggtcccccagtacctgcctcgcacatagcacctgcccctgtgcagccccccatgattcggcgggatatcaccttcccacctggctctgttgaagccacacagcctgtgttgaagcagaggaggcggctcacaatgaaagacattggaaccccggaggcatggcgggtaatgatgtccctcaagtctggtctcctggcagagagcacatgggcattagataccatcaacatcctgctgtatgatgacaacagcatcatgaccttcaacctcagtcagctcccagggttgctagagctccttgtagaatatttccgacgatgcctgattgagatctttggcattttaaaggagtatgaggtgggtgacccaggacagagaacgctactggatcctgggaggttcagcaaggtgtctagtccagctcccatggagggtggggaagaagaagaagaacttctaggtcctaaactagaagaggaagaagaagaggaagtagttgaaaatgatgaggagatagccttttcaggcaaggacaagccagcttcagagaatagtgaggagaagctgatcagtaagtttgacaagcttccagtaaagatcgtacagaagaatgatccatttgtggtggactgctcagataagcttgggcgtgtgcaggagtttgacagtggcctgctgcactggcggattggtgggggggacaccactgagcatatccagacccacttcgagagcaagacagagctgctgccttcccggcctcacgcaccctgcccaccagcccctcggaagcatgtgacaacagcagagggtacaccagggacaacagaccaggaggggcccccacctgatggacctccagaaaaacggatcacagccactatggatgacatgttgtctactcggtctagcaccttgaccgaggatggagctaagagttcagaggccatcaaggagagcagcaagtttccatttggcattagcccagcacagagccaccggaacatcaagatcctagaggacgaaccccacagtaaggatgagaccccactgtgtacccttctggactggcaggattctcttgccaagcgctgcgtctgtgtgtccaataccattcgaagcctgtcatttgtgccaggcaatgactttgagatgtccaaacacccagggctgctgctcatcctgggcaagctgatcctgctgcaccacaagcacccagaacggaagcaggcaccactaacttatgaaaaggaggaggaacaggaccaaggggtgagctgcaacaaagtggagtggtggtgggactgcttggagatgctccgggaaaacaccttggttacactcgccaacatctcggggcagttggacctatctccataccccgagagcatttgcctgcctgtcctggacggactcctacactgggcagtttgcccttcagctgaagcccaggaccccttttccaccctgggccccaatgccgtcctttccccgcagagactggtcttggaaaccctcagcaaactcagcatccaggacaacaatgtggacctgattctggccacaccccccttcagccgcctggagaagttgtatagcactatggtgcgcttcctcagtgaccgaaagaacccggtgtgccgggagatggctgtggtactgctggccaacctggctcagggggacagcctggcagctcgtgccattgcagtgcagaagggcagtatcggcaacctcctgggcttcctagaggacagccttgccgccacacagttccagcagagccaggccagcctcctccacatgcagaacccaccctttgagccaactagtgtggacatgatgcggcgggctgcccgcgcgctgcttgccttggccaaggtggacgagaaccactcagagtttactctgtacgaatcacggctgttggacatctcggtatcaccgttgatgaactcattggtttcacaagtcatttgtgatgtactgtttttgattggccagtca

SEQ ID NO: 6073 - DNA, 6204 bp, Homo sapiens
  source 1..6204: mol_type = genomic DNA
atggccgcgcaggtcgcccccgccgccgccagcagcctgggcaacccgccgccgccgccgccctcggagctgaagaaagccgagcagcagcagcgggaggaggcggggggcgaggcggcggcggcggcagcggccgagcgcggggaaatgaaggcagccgccgggcaggaaagcgagggccccgccgtggggccgccgcagccgctgggaaaggagctgcaggacggggccgagagcaatgggggtggcggcggcggcggagccggcagcggcggcgggcccggcgcggagccggacctgaagaactcgaacgggaacgcgggccctaggcccgccctgaacaataacctcacggagccgcccggcggcggcggtggcggcagcagcgatggggtgggggcgcctcctcactcagccgcggccgccttgccgcccccagcctacggcttcgggcaaccctacggccggagcccgtctgccgtcgccgccgccgcggccgccgtcttccaccaacaacatggcggacaacaaagccctggcctggcagcgctgcagagcggcggcggcgggggcctggagccctacgcggggccccagcagaactctcacgaccacggcttccccaaccaccagtacaactcctactaccccaaccgcagcgcctaccccccgcccgccccggcctacgcgctgagctccccgagaggtggcactccgggctccggcgcggcggcggctgccggctccaagccgcctccctcctccagcgcctccgcctcctcgtcgtcttcgtccttcgctcagcagcgcttcggggccatggggggaggcggcccctccgcggccggcgggggaactccccagcccaccgccacccccaccctcaaccaactgctcacgtcgcccagctcggcccggggctaccagggctaccccgggggcgactacagtggcgggccccaggacgggggcgccggcaagggcccggcggacatggcctcgcagtgttggggggctgcggcggcggcagctgcggcggcggccgcctcgggaggggcccaacaaaggagccaccacgcgcccatgagccccgggagcagcggcggcggggggcagccgctcgcccggacccctcagccatccagtccaatggatcagatgggcaagatgagacctcagccatatggcgggactaacccatactcgcagcaacagggacctccgtcaggaccgcagcaaggacatgggtacccagggcagccatacgggtcccagaccccgcagcggtacccgatgaccatgcagggccgggcgcagagtgccatgggcggcctctcttatacacagcagattcctccttatggacaacaaggccccagcgggtatggtcaacagggccagactccatattacaaccagcaaagtcctcaccctcagcagcagcagccaccctactcccagcaaccaccgtcccagacccctcatgcccaaccttcgtatcagcagcagccacagtctcaaccaccacagctccagtcctctcagcctccatactcccagcagccatcccagcctccacatcagcagtccccggctccatacccctcccagcagtcgacgacacagcagcacccccagagccagcccccctactcacagccacaggctcagtctccttaccagcagcagcaacctcagcagccagcaccctcgacgctctcccagcaggctgcgtatcctcagccccagtctcagcagtcccagcaaactgcctattcccagcagcgcttccctccaccgcaggagctatctcaagattcatttgggtctcaggcatcctcagccccctcaatgacctccagtaagggagggcaagaagatatgaacctgagccttcagtcaagaccctccagcttgcctgatctatctggttcaatagatgacctccccatggggacagaaggagctctgagtcctggagtgagcacatcagggatttccagcagccaaggagagcagagtaatccagctcagtctcctttctctcctcatacctcccctcacctgcctggcatccgaggcccttccccgtcccctgttggctctcccgccagtgttgctcagtctcgctcaggaccactctcgcctgctgcagtgccaggcaaccagatgccacctcggccacccagtggccagtcggacagcatcatgcatccttccatgaaccaatcaagcattgcccaagatcgaggttatatgcagaggaacccccagatgccccagtacagttccccccagcccggctcagccttatctccgcgtcagccttccggaggacagatacacacaggcatgggctcctaccagcagaactccatggggagctatggtccccaggggggtcagtatggcccacaaggtggctaccccaggcagccaaactataatgccttgcccaatgccaactaccccagtgcaggcatggctggaggcataaaccccatgggtgccggaggtcaaatgcatggacagcctggcatcccaccttatggcacactccctccagggaggatgagtcacgcctccatgggcaaccggccttatggccctaacatggccaatatgccacctcaggttgggtcagggatgtgtcccccaccagggggcatgaaccggaaaacccaagaaactgctgtcgccatgcatgttgctgccaactctatccaaaacaggccgccaggctaccccaatatgaatcaagggggcatgatgggaactggacctccttatggacaagggattaatagtatggctggcatgatcaaccctcagggacccccatattccatgggtggaaccatggccaacaattctgcagggatggcagccagcccagagatgatgggccttggggatgtaaagttaactccagccaccaaaatgaacaacaaggcagatgggacacccaagacagaatccaaatccaagaaatccagttcttctactacaaccaatgagaagatcaccaagttgtatgagctgggtggtgagcctgagaggaagatgtgggtggaccgttatctggccttcactgaggagaaggccatgggcatgacaaatctgcctgctgtgggtaggaaacctctggacctctatcgcctctatgtgtctgtgaaggagattggtggattgactcaggtcaacaagaacaaaaaatggcgggaacttgcaaccaacctcaatgtgggcacatcaagcagtgctgccagctccttgaaaaagcagtatatccagtgtctctatgcctttgaatgcaagattgaacggggagaagaccctcccccagacatctttgcagctgctgattccaagaagtcccagcccaagatccagcctccctctcctgcgggatcaggatctatgcaggggccccagactccccagtcaaccagcagttccatggcagaaggaggagacttaaagccaccaactccagcatccacaccacacagtcagatccccccattgccaggcatgagcaggagcaattcagttgggatccaggatgcctttaatgatggaagtgactccacattccagaagcggaattccatgactccaaaccctgggtatcagcccagtatgaatacctctgacatgatggggcgcatgtcctatgagccaaataaggatccttatggcagcatgaggaaagctccagggagtgatcccttcatgtcctcagggcagggccccaacggcgggatgggtgacccctacagtcgtgctgccggccctgggctaggaaatgtggcgatgggaccacgacagcactatccctatggaggtccttatgacagagtgaggacggagcctggaatagggcctgagggaaacatgagcactggggccccacagccgaatctcatgccttccaacccagactcggggatgtattctcctagccgctaccccccgcagcagcagcagcagcagcagcaacgacatgattcctatggcaatcagttctccacccaaggcaccccttctggcagccccttccccagccagcagactacaatgtatcaacagcaacagcaggtatccagccctgctcccctgccccggccaatggagaaccgcacctctcctagcaagtctccattcctgcactctgggatgaaaatgcagaaggcaggtcccccagtacctgcctcgcacatagcacctgcccctgtgcagccccccatgattcggcgggatatcaccttcccacctggctctgttgaagccacacagcctgtgttgaagcagaggaggcggctcacaatgaaagacattggaaccccggaggcatggcgggtaatgatgtccctcaagtctggtctcctggcagagagcacatgggcattagataccatcaacatcctgctgtatgatgacaacagcatcatgaccttcaacctcagtcagctcccagggttgctagagctccttgtagaatatttccgacgatgcctgattgagatctttggcattttaaaggagtatgaggtgggtgacccaggacagagaacgctactggatcctgggaggttcagcaaggtgtctagtccagctcccatggagggtggggaagaagaagaagaacttctaggtcctaaactagaagaggaagaagaagaggaagtagttgaaaatgatgaggagatagccttttcaggcaaggacaagccagcttcagagaatagtgaggagaagctgatcagtaagtttgacaagcttccagtaaagatcgtacagaagaatgatccatttgtggtggactgctcagataagcttgggcgtgtgcaggagtttgacagtggcctgctgcactggcggattggtgggggggacaccactgagcatatccagacccacttcgagagcaagacagagctgctgccttcccggcctcacgcaccctgcccaccagcccctcggaagcatgtgacaacagcagagggtacaccagggacaacagaccaggaggggcccccacctgatggacctccagaaaaacggatcacagccactatggatgacatgttgtctactcggtctagcaccttgaccgaggatggagctaagagttcagaggccatcaaggagagcagcaagtttccatttggcattagcccagcacagagccaccggaacatcaagatcctagaggacgaaccccacagtaaggatgagaccccactgtgtacccttctggactggcaggattctcttgccaagcgctgcgtctgtgtgtccaataccattcgaagcctgtcatttgtgccaggcaatgactttgagatgtccaaacacccagggctgctgctcatcctgggcaagctgatcctgctgcaccacaagcacccagaacggaagcaggcaccactaacttatgaaaaggaggaggaacaggaccaaggggtgagctgcaacaaagtggagtggtggtgggactgcttggagatgctccgggaaaacaccttggttacactcgccaacatctcggggcagttggacctatctccataccccgagagcatttgcctgcctgtcctggacggactcctacactgggcagtttgcccttcagctgaagcccaggaccccttttccaccctgggccccaatgccgtcctttccccgcagagactggtcttggaaaccctcagcaaactcagcatccaggacaacaatgtggacctgattctggccacaccccccttcagccgcctggagaagttgtatagcactatggtgcgcttcctcagtgaccgaaagaacccggtgtgccgggagatggctgtggtactgctggccaacctggctcagggggacagcctggcagctcgtgccattgcagtgcagaagggcagtatcggcaacctcctgggcttcctagaggacagccttgccgccacacagttccagcagagccaggccagcctcctccacatgcagaacccaccctttgagccaactagtgtggacatgatgcggcgggctgcccgcgcgctgcttgccttggccaaggtggacgagaaccactcagagtttactctgtacgaatcacggctgttggacatctcggtatcaccgttgatgaactcattggtttcacaagtcatttgtgatgtactgtttttgattggccagtca

SEQ ID NO: 6074 - DNA, 474 bp, Homo sapiens
  source 1..474: mol_type = genomic DNA
atgggcgacaacccttttcaaccaaaaagtaattcaaaaatggcagaactgtttatggaatgtgaagaagaggagctggaaccatggcagaagaaagtaaaagaagttgaggatgacgatgatgatgagccaatctttgttggcgagatatcaagttcaaaaccagcaatttcaaatattttgaacagagttaaccccagctcatattcaaggggactaaagaatggtgcactcagtcgaggtattactgctgcattcaagcctacaagtcaacactacacgaatccaacatcaaatccagtgcctgcctcaccaataaattttcatcctgagtctagatcttcagatagttctgttattgttcagcctttttctaaacctgtaagtgtttctaaaactatacggccagctcagggatccattggatgttgtttatcaatatcaacagtacccagttacaattctggactgtca

SEQ ID NO: 6075 - DNA, 2898 bp, Homo sapiens
  source 1..2898: mol_type = genomic DNA
atggcagaactgtttatggaatgtgaagaagaggagctggaaccatggcagaagaaagtaaaagaagttgaggatgacgatgatgatgagccaatctttgttggcgagatatcaagttcaaaaccagcaatttcaaatattttgaacagagttaaccccagctcatattcaaggggactaaagaatggtgcactcagtcgaggtattactgctgcattcaagcctacaagtcaacactacacgaatccaacatcaaatccagtgcctgcctcaccaataaattttcatcctgagtctagatcttcagatagttctgttattgttcagcctttttctaaacctggttatataacaaactcatcacgagttgtgtctaataagtcatcagagttactgtttgacttgacccaggatacaggattatcacattaccaagggggaccaacactttctatggcaggtatgagtgaaagttcatttttatcaaaacgtccttctacttctgaagtaaataatgttaatccaaagaagcctaaacccagcgaaagtgtttctggagcaaattcctcagctgtattaccttcagttaaatctccttcagtgacttcttcccaggctatgctagcaaaaggtacaaatacctcatcaaatcagtctaaaaatggaacaccttttccaagagcttgtccaaagtgcaacattcatttcaatcttttggatcctttgaaaaatcacatgaagtattgttgtccagacatgataaataactttttgggactggctaaaacagaattttcaagtacagtaaataaaaacacaactattgattcagagaaaggaaaattgatcatgttagttaatgacttttattatggaaaacatgaaggagatgtccaggaggaacagaagactcacacaacctttaaatgcttcagttgcttgaaaattctaaaaaataacattaggtttatgaaccacatgaaacaccatttggaacttgagaagcagagcagtgagagctgggaaaaccataccacctgccagcactgctaccgtcagtttcccacaccatttcagttgcagtgtcacatcgaaagtacacatacgccccatgaattttctactatttgtaaaatctgtgaattgtcatttgaaacagaacatgttcttttacaacatatgaaggacaatcataaacctggtgaaatgccatatgtctgccaggtttgtaattatagatcatcatcattttctgatgtagaaactcattttagaacatcccatgaaaacactaagaacttgctatgcccgttttgcctcaaagttattaaaattgcaacaccatatatgcatcattatatgaagcatcagaaaaaaggaatacatcgttgtacaaaatgcaggctgcagtttttgacatgcaaggagaaaatggatcataagactcaacaccatcgaacatttataaaacctaaacaactagaaggattgcctcctggaacaaaagttactattcgagcttcagttggacctctgcaatcaggagcttcacctacaccttccattagtgcaagtgcttctacccttcagctctcacctccaaggactaaaaatataactgctaaaaatcctgcaaaatctaatacaagtaaacctaatacagtcaaatccaacgcaagtaaacctaatacaagtaagcctaatggaagtaaatctaaatacaaaccaaaaatctctaatatgcaaaagaaacaaagcacattggctagtagcaataaaaaaagtaaagtcaatacagcattgaggaatttaaggtatcgtcggggcattcacaaatgcattgagtgttgttccgaaataaaagattttgcaaaccactttcctacgtacgtccactgtagtttttgcagatacaacactagctgtagcaaagcctatgtaaatcatatgatgagctttcatagtaaccgtccaagcaaaaggttttgtatttttaagaagcattcagaaaatctccggggcattactctagtgtgccttaattgtgatttcctaagtgatgtttctggcttagataatatggctacacacttaagtcaacataaaactcatacttgccaagttgtaatgcagaaagtttctgtttgtatcccaacttctgagcacctttctgaattaaaaaaagaagctcccgcaaaggaacaagaacctgtgtctaaggaaattgcaagacctaacatggctgaaagagaaacagaaacatcaaattctgaaagtaaacaagataaagctgcttcttcaaaagaaaaaaatggatgtaatgcaaattcatttgaaggctcatcaacaacaaaaagtgaagaaagcataacagtttcagataaggaaaatgaaacctgtcttgcagaccaggaaactggctcaaaaaacatcgtcagttgtgattcaaatattggtgcagataaagtggaaaagaaaaaacaaatacaacacgtttgtcaggaaatggagttgaagatgtgccaaagttcagaaaacataatcttatctgatcagattaaagatcacaactccagtgaagccagattttcttcaaagaatattaaggatttgcgattagcatcagataatgtaagcattgatcagtttttgagaaaaagacatgaacctgaatctgttagttctgatgttagcgagcaaggcagtattcatttggaacctctgactccatccgaggtacttgagtatgaagccacagagattcttcagaaaggtagtggtgatccttcagccaagactgatgaagtagtgtctgatcaaacagatgacattcctggaggaaataaccctagcacaacagaggcaacagtagacctggaagacgaaaaagaaagaagt

SEQ ID NO: 6076 - DNA, 2241 bp, Homo sapiens
  source 1..2241: mol_type = genomic DNA
atggcagaactgtttatggaatgtgaagaagaggagctggaaccatggcagaagaaagtaaaagaagttgaggatgacgatgatgatgagccaatctttgttggcgagatatcaagttcaaaaccagcaatttcaaatattttgaacagagttaaccccagctcatattcaaggggactaaagaatggtgcactcagtcgaggtattactgctgcattcaagcctacaagtcaacactacacgaatccaacatcaaatccagtgcctgcctcaccaataaattttcatcctgagtctagatcttcagatagttctgttattgttcagcctttttctaaacctggttatataacaaactcatcacgagttgtgtctaataagtcatcagagttactgtttgacttgacccaggatacaggattatcacattaccaagggggaccaacactttctatggcaggtatgagtgaaagttcatttttatcaaaacgtccttctacttctgaagtaaataatgttaatccaaagaagcctaaacccagcgaaagtgtttctggagcaaattcctcagctgtattaccttcagttaaatctccttcagtgacttcttcccaggctatgctagcaaaaggtacaaatacctcatcaaatcagtctaaaaatggaacaccttttccaagagcttgtccaaagtgcaacattcatttcaatcttttggatcctttgaaaaatcacatgaagtattgttgtccagacatgataaataactttttgggactggctaaaacagaattttcaagtacagtaaataaaaacacaactattgattcagagaaaggaaaattgatcatgttagttaatgacttttattatggaaaacatgaaggagatgtccaggaggaacagaagactcacacaacctttaaatgcttcagttgcttgaaaattctaaaaaataacattaggtttatgaaccacatgaaacaccatttggaacttgagaagcagagcagtgagagctgggaaaaccataccacctgccagcactgctaccgtcagtttcccacaccatttcagttgcagtgtcacatcgaaagtacacatacgccccatgaattttctactatttgtaaaatctgtgaattgtcatttgaaacagaacatgttcttttacaacatatgaaggacaatcataaacctggtgaaatgccatatgtctgccaggtttgtaattatagatcatcatcattttctgatgtagaaactcattttagaacatcccatgaaaacactaagaacttgctatgcccgttttgcctcaaagttattaaaattgcaacaccatatatgcatcattatatgaagcatcagaaaaaaggaatacatcgttgtacaaaatgcaggctgcagtttttgacatgcaaggagaaaatggatcataagactcaacaccatcgaacatttataaaacctaaacaactagaaggattgcctcctggaacaaaagttactattcgagcttcagttggacctctgcaatcaggagcttcacctacaccttccattagtgcaagtgcttctacccttcagctctcacctccaaggactaaaaatataactgctaaaaatcctgcaaaatctaatacaagtaaacctaatacagtcaaatccaacgcaagtaaacctaatacaagtaagcctaatggaagtaaatctaaatacaaaccaaaaatctctaatatgcaaaagaaacaaagcacattggctagtagcaataaaaaaagtaaagtcaatacagcattgaggaatttaaggtatcgtcggggcattcacaaatgcattgagtgttgttccgaaataaaagattttgcaaaccactttcctacgtacgtccactgtagtttttgcagatacaacactagctgtagcaaagcctatgtaaatcatatgatgagctttcatagtaaccgtccaagcaaaaggttttgtatttttaagaagcattcagaaaatctccggggcattactctagtgtgccttaattgtgatttcctaagtgatgtttctggcttagataatatggctacacacttaagtcaacataaaactcatacttgccaagttgtaatgcagaaagatgcagaagcagcccagagatttcaaaaaatatccagggtatacctggacagtgtcccccttcgatggacacaactgatgcctgttctctctttccaaggaatg

SEQ ID NO: 6077 - DNA, 2937 bp, Homo sapiens
  source 1..2937: mol_type = genomic DNA
atgggcgacaacccttttcaaccaaaaagtaattcaaaaatggcagaactgtttatggaatgtgaagaagaggagctggaaccatggcagaagaaagtaaaagaagttgaggatgacgatgatgatgagccaatctttgttggcgagatatcaagttcaaaaccagcaatttcaaatattttgaacagagttaaccccagctcatattcaaggggactaaagaatggtgcactcagtcgaggtattactgctgcattcaagcctacaagtcaacactacacgaatccaacatcaaatccagtgcctgcctcaccaataaattttcatcctgagtctagatcttcagatagttctgttattgttcagcctttttctaaacctggttatataacaaactcatcacgagttgtgtctaataagtcatcagagttactgtttgacttgacccaggatacaggattatcacattaccaagggggaccaacactttctatggcaggtatgagtgaaagttcatttttatcaaaacgtccttctacttctgaagtaaataatgttaatccaaagaagcctaaacccagcgaaagtgtttctggagcaaattcctcagctgtattaccttcagttaaatctccttcagtgacttcttcccaggctatgctagcaaaaggtacaaatacctcatcaaatcagtctaaaaatggaacaccttttccaagagcttgtccaaagtgcaacattcatttcaatcttttggatcctttgaaaaatcacatgaagtattgttgtccagacatgataaataactttttgggactggctaaaacagaattttcaagtacagtaaataaaaacacaactattgattcagagaaaggaaaattgatcatgttagttaatgacttttattatggaaaacatgaaggagatgtccaggaggaacagaagactcacacaacctttaaatgcttcagttgcttgaaaattctaaaaaataacattaggtttatgaaccacatgaaacaccatttggaacttgagaagcagagcagtgagagctgggaaaaccataccacctgccagcactgctaccgtcagtttcccacaccatttcagttgcagtgtcacatcgaaagtacacatacgccccatgaattttctactatttgtaaaatctgtgaattgtcatttgaaacagaacatgttcttttacaacatatgaaggacaatcataaacctggtgaaatgccatatgtctgccaggtttgtaattatagatcatcatcattttctgatgtagaaactcattttagaacatcccatgaaaacactaagaacttgctatgcccgttttgcctcaaagttattaaaattgcaacaccatatatgcatcattatatgaagcatcagaaaaaaggaatacatcgttgtacaaaatgcaggctgcagtttttgacatgcaaggagaaaatggatcataagactcaacaccatcgaacatttataaaacctaaacaactagaaggattgcctcctggaacaaaagttactattcgagcttcagttggacctctgcaatcaggagcttcacctacaccttccattagtgcaagtgcttctacccttcagctctcacctccaaggactaaaaatataactgctaaaaatcctgcaaaatctaatacaagtaaacctaatacagtcaaatccaacgcaagtaaacctaatacaagtaagcctaatggaagtaaatctaaatacaaaccaaaaatctctaatatgcaaaagaaacaaagcacattggctagtagcaataaaaaaagtaaagtcaatacagcattgaggaatttaaggtatcgtcggggcattcacaaatgcattgagtgttgttccgaaataaaagattttgcaaaccactttcctacgtacgtccactgtagtttttgcagatacaacactagctgtagcaaagcctatgtaaatcatatgatgagctttcatagtaaccgtccaagcaaaaggttttgtatttttaagaagcattcagaaaatctccggggcattactctagtgtgccttaattgtgatttcctaagtgatgtttctggcttagataatatggctacacacttaagtcaacataaaactcatacttgccaagttgtaatgcagaaagtttctgtttgtatcccaacttctgagcacctttctgaattaaaaaaagaagctcccgcaaaggaacaagaacctgtgtctaaggaaattgcaagacctaacatggctgaaagagaaacagaaacatcaaattctgaaagtaaacaagataaagctgcttcttcaaaagaaaaaaatggatgtaatgcaaattcatttgaaggctcatcaacaacaaaaagtgaagaaagcataacagtttcagataaggaaaatgaaacctgtcttgcagaccaggaaactggctcaaaaaacatcgtcagttgtgattcaaatattggtgcagataaagtggaaaagaaaaaacaaatacaacacgtttgtcaggaaatggagttgaagatgtgccaaagttcagaaaacataatcttatctgatcagattaaagatcacaactccagtgaagccagattttcttcaaagaatattaaggatttgcgattagcatcagataatgtaagcattgatcagtttttgagaaaaagacatgaacctgaatctgttagttctgatgttagcgagcaaggcagtattcatttggaacctctgactccatccgaggtacttgagtatgaagccacagagattcttcagaaaggtagtggtgatccttcagccaagactgatgaagtagtgtctgatcaaacagatgacattcctggaggaaataaccctagcacaacagaggcaacagtagacctggaagacgaaaaagaaagaagt

SEQ ID NO: 6078 - DNA, 1629 bp, Homo sapiens
  source 1..1629: mol_type = genomic DNA
atggaacaatcatgtgaggaagagaaagagcctgaaccacagaagaacatacaagaaaccaaacaagtagatgacgaagatgctgagctcatctttgttggtgtggaacatgtaaatgaagatgctgagctaatctttgttggggtgacttcaaattcaaaaccagtcgtttcaaacattttgaacagagtcaccccgggttcatggtcaaggagaaaaaagtatgatcaccttagaaaagatactgctcgcaaattgcagcctaaaagtcatgagaccgttacatcagaagcagtgaccgtcctgccagcttcccaacttgaatcgagatcaacagatagtcctattattattgagcctttgtctaaacctgattatagaaatagttcaccacaagttgtgcctaataactcttcagaattaccttctcctttgattacattcacagattcattgcatcatccagtaagtacagcactttcagtaggaggtataaatgaaagtcctcgtgtatcaaagcaactttccactttcgaagtaaacagcataaatcccaaaagggctaaactcagggatggaattatagaaggaaattcttcagcttcattcccttcagatacctttcatacaatgaatactcagcaaagtacaccctcaaataatgttcatacctcattaagccatgttcagaatggagcaccttttccagcagcttttccaaaggacaatatccatttcaagcctataaatacaaatcttgatagggcaaatgaattggcaaaaacagacattttgagtctaacaagtcaaaacaagacctttgatcccaagaaagaaaatcccattgtgttacttagtgacttttactatggacagcataaaggagaagggcagccggaacagaagactcacaccacctttaaatgcctcagctgcgtgaaagttctaaaaaatgttaagtttatgaatcacgtgaagcatcatttggaatttgagaagcagaggaacgacagctgggaaaaccacaccacctgccagcactgccaccggcagtttcccactcccttccagctacagtgtcacatcgaaaatgtccacactgcccaggagccctctactgtctgtaaaatctgtgaattgtcatttgaaacagatcaggtcctcttacaacacatgaaggaccatcataagcctggcgaaatgccctatgtgtgccaggtttgccattatagatcgtcggtctttgctgatgtagaaacacattttagaacgtgccatgaaaacacaaagaatttgctttgtcccttttgtctcaaaattttcaaaacagcaacaccatacatgtgtcattataggggccactggggaaagagtgcacaccagtgttccaagtgccggctacagtttttaactttcaaggagaaaatggagcacaagacccagtgtcatcaaatgtttaagaagcctaagcaactagaaggattacctcctgaaacaaaagttactattcaagtgtcgctggaacctcttcagccaggatcagtggatgtagcatccataactgtgagcacatctgactctgaaccatcactccccaggtctaaaagcaaaatttcaaaaaagtcccat

SEQ ID NO: 6079 - DNA, 519 bp, Homo sapiens
  source 1..519: mol_type = genomic DNA
atgttcaagagaatggccgaatttgggcctgactccggcgggagagtaaagggtgttactatcgttaaaccaatagtttacggtaatgttgctcggtattttggaaagaaaagagaagaagatgggcacactcatcagtggacagtatatgtgaaaccatatagaaatgaggtaaccctgtatcatttgctaaagctgtttcaatcagacaccaatgcaatgctggggaaaaagacagtggtttcagagttctatgatgaaatgatatttcaagacccaacagcaatgatgcaacaattattgacaacatctcgtcagctaacattaggagcctataagcatgaaacagaatttgcagagcttgaagtgaaaaccagagaaaaattagaagctgctaagaaaaaaacaagctttgagattgcagagcttaaggagagattaaaagcaagtcgtgaaactataaattgtttaaaaaatgaaatcagaaaacttgaagaagatgaccaagcaaaagacata

SEQ ID NO: 6080 - DNA, 1575 bp, Homo sapiens
  source 1..1575: mol_type = genomic DNA
atggcctcaaacgattatacccaacaagcaacccaaagctatggggcctaccccacccagcccgggcagggctattcccagcagagcagtcagccctacggacagcagagttacagtggttatagccagtccacggacacttcaggctatggccagagcagctattcttcttatggccagagccagaacagctatggaactcagtcaactccccagggatatggctcgactggcggctatggcagtagccagagctcccaatcgtcttacgggcagcagtcctcctaccctggctatggccagcagccagctcccagcagcacctcgggaagttacggtagcagttctcagagcagcagctatgggcagccccagagtgggagctacagccagcagcctagctatggtggacagcagcaaagctatggacagcagcaaagctataatccccctcagggctatggacagcagaaccagtacaacagcagcagtggtggtggaggtggaggtggaggtggaggtaactatggccaagatcaatcctccatgagtagtggtggtggcagtggtggcggttatggcaatcaagaccagagtggtggaggtggcagcggtggctatggacagcaggaccgtggaggccgcggcaggggtggcagtggtggcggcggcggcggcggcggtggtggttacaaccgcagcagtggtggctatgaacccagaggtcgtggaggtggccgtggaggcagaggtggcatgggcggaagtgaccgtggtggcttcaataaatttggtggccctcgggaccaaggatcacgtcatgactccgaacaggataattcagacaacaacaccatctttgtgcaaggcctgggtgagaatgttacaattgagtctgtggctgattacttcaagcagattggtattattaagacaaacaagaaaacgggacagcccatgattaatttgtacacagacagggaaactggcaagctgaagggagaggcaacggtctcttttgatgacccaccttcagctaaagcagctattgactggtttgatggtaaagaattctccggaaatcctatcaaggtctcatttgctactcgccgggcagactttaatcggggtggtggcaatggtcgtggaggccgagggcgaggaggacccatgggccgtggaggctatggaggtggtggcagtggtggtggtggccgaggaggatttcccagtggaggtggtggcggtggaggacagcagcgagctggtgactggaagtgtcctaatcccacctgtgagaatatgaacttctcttggaggaatgaatgcaaccagtgtaaggcccctaaaccagatggcccaggagggggaccaggtggctctcacatggggggtaactacggggatgatcgtcgtggtggcagaggaggctatgatcgaggcggctaccggggccgcggcggggaccgtggaggcttccgagggggccggggtggtggggacagaggtggctttggccctggcaagatggattccaggggtgagcacagacaggatcgcagggagaggccgtat

SEQ ID NO: 6081 - DNA, 1578 bp, Homo sapiens
  source 1..1578: mol_type = genomic DNA
atggcctcaaacgattatacccaacaagcaacccaaagctatggggcctaccccacccagcccgggcagggctattcccagcagagcagtcagccctacggacagcagagttacagtggttatagccagtccacggacacttcaggctatggccagagcagctattcttcttatggccagagccagaacacaggctatggaactcagtcaactccccagggatatggctcgactggcggctatggcagtagccagagctcccaatcgtcttacgggcagcagtcctcctaccctggctatggccagcagccagctcccagcagcacctcgggaagttacggtagcagttctcagagcagcagctatgggcagccccagagtgggagctacagccagcagcctagctatggtggacagcagcaaagctatggacagcagcaaagctataatccccctcagggctatggacagcagaaccagtacaacagcagcagtggtggtggaggtggaggtggaggtggaggtaactatggccaagatcaatcctccatgagtagtggtggtggcagtggtggcggttatggcaatcaagaccagagtggtggaggtggcagcggtggctatggacagcaggaccgtggaggccgcggcaggggtggcagtggtggcggcggcggcggcggcggtggtggttacaaccgcagcagtggtggctatgaacccagaggtcgtggaggtggccgtggaggcagaggtggcatgggcggaagtgaccgtggtggcttcaataaatttggtggccctcgggaccaaggatcacgtcatgactccgaacaggataattcagacaacaacaccatctttgtgcaaggcctgggtgagaatgttacaattgagtctgtggctgattacttcaagcagattggtattattaagacaaacaagaaaacgggacagcccatgattaatttgtacacagacagggaaactggcaagctgaagggagaggcaacggtctcttttgatgacccaccttcagctaaagcagctattgactggtttgatggtaaagaattctccggaaatcctatcaaggtctcatttgctactcgccgggcagactttaatcggggtggtggcaatggtcgtggaggccgagggcgaggaggacccatgggccgtggaggctatggaggtggtggcagtggtggtggtggccgaggaggatttcccagtggaggtggtggcggtggaggacagcagcgagctggtgactggaagtgtcctaatcccacctgtgagaatatgaacttctcttggaggaatgaatgcaaccagtgtaaggcccctaaaccagatggcccaggagggggaccaggtggctctcacatggggggtaactacggggatgatcgtcgtggtggcagaggaggctatgatcgaggcggctaccggggccgcggcggggaccgtggaggcttccgagggggccggggtggtggggacagaggtggctttggccctggcaagatggattccaggggtgagcacagacaggatcgcagggagaggccgtat

SEQ ID NO: 6082 - DNA, 3390 bp, Homo sapiens
  source 1..3390: mol_type = genomic DNA
atgttggagatctgcctgaagctggtgggctgcaaatccaagaaggggctgtcctcgtcctccagctgttatctggaagaagcccttcagcggccagtagcatctgactttgagcctcagggtctgagtgaagccgctcgttggaactccaaggaaaaccttctcgctggacccagtgaaaatgaccccaaccttttcgttgcactgtatgattttgtggccagtggagataacactctaagcataactaaaggtgaaaagctccgggtcttaggctataatcacaatggggaatggtgtgaagcccaaaccaaaaatggccaaggctgggtcccaagcaactacatcacgccagtcaacagtctggagaaacactcctggtaccatgggcctgtgtcccgcaatgccgctgagtatctgctgagcagcgggatcaatggcagcttcttggtgcgtgagagtgagagcagtcctggccagaggtccatctcgctgagatacgaagggagggtgtaccattacaggatcaacactgcttctgatggcaagctctacgtctcctccgagagccgcttcaacaccctggccgagttggttcatcatcattcaacggtggccgacgggctcatcaccacgctccattatccagccccaaagcgcaacaagcccactgtctatggtgtgtcccccaactacgacaagtgggagatggaacgcacggacatcaccatgaagcacaagctgggcgggggccagtacggggaggtgtacgagggcgtgtggaagaaatacagcctgacggtggccgtgaagaccttgaaggaggacaccatggaggtggaagagttcttgaaagaagctgcagtcatgaaagagatcaaacaccctaacctggtgcagctccttggggtctgcacccgggagcccccgttctatatcatcactgagttcatgacctacgggaacctcctggactacctgagggagtgcaaccggcaggaggtgaacgccgtggtgctgctgtacatggccactcagatctcgtcagccatggagtacctggagaagaaaaacttcatccacagagatcttgctgcccgaaactgcctggtaggggagaaccacttggtgaaggtagctgattttggcctgagcaggttgatgacaggggacacctacacagcccatgctggagccaagttccccatcaaatggactgcacccgagagcctggcctacaacaagttctccatcaagtccgacgtctgggcatttggagtattgctttgggaaattgctacctatggcatgtccccttacccgggaattgacctgtcccaggtgtatgagctgctagagaaggactaccgcatggagcgcccagaaggctgcccagagaaggtctatgaactcatgcgagcatgttggcagtggaatccctctgaccggccctcctttgctgaaatccaccaagcctttgaaacaatgttccaggaatccagtatctcagacgaagtggaaaaggagctggggaaacaaggcgtccgtggggctgtgagtaccttgctgcaggccccagagctgcccaccaagacgaggacctccaggagagctgcagagcacagagacaccactgacgtgcctgagatgcctcactccaagggccagggagagagcgatcctctggaccatgagcctgccgtgtctccattgctccctcgaaaagagcgaggtcccccggagggcggcctgaatgaagatgagcgccttctccccaaagacaaaaagaccaacttgttcagcgccttgatcaagaagaagaagaagacagccccaacccctcccaaacgcagcagctccttccgggagatggacggccagccggagcgcagaggggccggcgaggaagagggccgagacatcagcaacggggcactggctttcacccccttggacacagctgacccagccaagtccccaaagcccagcaatggggctggggtccccaatggagccctccgggagtccgggggctcaggcttccggtctccccacctgtggaagaagtccagcacgctgaccagcagccgcctagccaccggcgaggaggagggcggtggcagctccagcaagcgcttcctgcgctcttgctccgcctcctgcgttccccatggggccaaggacacggagtggaggtcagtcacgctgcctcgggacttgcagtccacgggaagacagtttgactcgtccacatttggagggcacaaaagtgagaagccggctctgcctcggaagagggcaggggagaacaggtctgaccaggtgacccgaggcacagtaacgcctccccccaggctggtgaaaaagaatgaggaagctgctgatgaggtcttcaaagacatcatggagtccagcccgggctccagcccgcccaacctgactccaaaacccctccggcggcaggtcaccgtggcccctgcctcgggcctcccccacaaggaagaagctggaaagggcagtgccttagggacccctgctgcagctgagccagtgacccccaccagcaaagcaggctcaggtgcaccagggggcaccagcaagggccccgccgaggagtccagagtgaggaggcacaagcactcctctgagtcgccagggagggacaaggggaaattgtccaggctcaaacctgccccgccgcccccaccagcagcctctgcagggaaggctggaggaaagccctcgcagagcccgagccaggaggcggccggggaggcagtcctgggcgcaaagacaaaagccacgagtctggttgatgctgtgaacagtgacgctgccaagcccagccagccgggagagggcctcaaaaagcccgtgctcccggccactccaaagccacagtccgccaagccgtcggggacccccatcagcccagcccccgttccctccacgttgccatcagcatcctcggccctggcaggggaccagccgtcttccaccgccttcatccctctcatatcaacccgagtgtctcttcggaaaacccgccagcctccagagcggatcgccagcggcgccatcaccaagggcgtggtcctggacagcaccgaggcgctgtgcctcgccatctctaggaactccgagcagatggccagccacagcgcagtgctggaggccggcaaaaacctctacacgttctgcgtgagctatgtggattccatccagcaaatgaggaacaagtttgccttccgagaggccatcaacaaactggagaataatctccgggagcttcagatctgcccggcgacagcaggcagtggtccagcggccactcaggacttcagcaagctcctcagttcggtgaaggaaatcagtgacatagtgcagagg

SEQ ID NO: 6083 - DNA, 3447 bp, Homo sapiens
  source 1..3447: mol_type = genomic DNA
atggggcagcagcctggaaaagtacttggggaccaaagaaggccaagcttgcctgccctgcattttatcaaaggagcagggaagaaggaatcatcgaggcatgggggtccacactgcaatgtttttgtggaacatgaagcccttcagcggccagtagcatctgactttgagcctcagggtctgagtgaagccgctcgttggaactccaaggaaaaccttctcgctggacccagtgaaaatgaccccaaccttttcgttgcactgtatgattttgtggccagtggagataacactctaagcataactaaaggtgaaaagctccgggtcttaggctataatcacaatggggaatggtgtgaagcccaaaccaaaaatggccaaggctgggtcccaagcaactacatcacgccagtcaacagtctggagaaacactcctggtaccatgggcctgtgtcccgcaatgccgctgagtatctgctgagcagcgggatcaatggcagcttcttggtgcgtgagagtgagagcagtcctggccagaggtccatctcgctgagatacgaagggagggtgtaccattacaggatcaacactgcttctgatggcaagctctacgtctcctccgagagccgcttcaacaccctggccgagttggttcatcatcattcaacggtggccgacgggctcatcaccacgctccattatccagccccaaagcgcaacaagcccactgtctatggtgtgtcccccaactacgacaagtgggagatggaacgcacggacatcaccatgaagcacaagctgggcgggggccagtacggggaggtgtacgagggcgtgtggaagaaatacagcctgacggtggccgtgaagaccttgaaggaggacaccatggaggtggaagagttcttgaaagaagctgcagtcatgaaagagatcaaacaccctaacctggtgcagctccttggggtctgcacccgggagcccccgttctatatcatcactgagttcatgacctacgggaacctcctggactacctgagggagtgcaaccggcaggaggtgaacgccgtggtgctgctgtacatggccactcagatctcgtcagccatggagtacctggagaagaaaaacttcatccacagagatcttgctgcccgaaactgcctggtaggggagaaccacttggtgaaggtagctgattttggcctgagcaggttgatgacaggggacacctacacagcccatgctggagccaagttccccatcaaatggactgcacccgagagcctggcctacaacaagttctccatcaagtccgacgtctgggcatttggagtattgctttgggaaattgctacctatggcatgtccccttacccgggaattgacctgtcccaggtgtatgagctgctagagaaggactaccgcatggagcgcccagaaggctgcccagagaaggtctatgaactcatgcgagcatgttggcagtggaatccctctgaccggccctcctttgctgaaatccaccaagcctttgaaacaatgttccaggaatccagtatctcagacgaagtggaaaaggagctggggaaacaaggcgtccgtggggctgtgagtaccttgctgcaggccccagagctgcccaccaagacgaggacctccaggagagctgcagagcacagagacaccactgacgtgcctgagatgcctcactccaagggccagggagagagcgatcctctggaccatgagcctgccgtgtctccattgctccctcgaaaagagcgaggtcccccggagggcggcctgaatgaagatgagcgccttctccccaaagacaaaaagaccaacttgttcagcgccttgatcaagaagaagaagaagacagccccaacccctcccaaacgcagcagctccttccgggagatggacggccagccggagcgcagaggggccggcgaggaagagggccgagacatcagcaacggggcactggctttcacccccttggacacagctgacccagccaagtccccaaagcccagcaatggggctggggtccccaatggagccctccgggagtccgggggctcaggcttccggtctccccacctgtggaagaagtccagcacgctgaccagcagccgcctagccaccggcgaggaggagggcggtggcagctccagcaagcgcttcctgcgctcttgctccgcctcctgcgttccccatggggccaaggacacggagtggaggtcagtcacgctgcctcgggacttgcagtccacgggaagacagtttgactcgtccacatttggagggcacaaaagtgagaagccggctctgcctcggaagagggcaggggagaacaggtctgaccaggtgacccgaggcacagtaacgcctccccccaggctggtgaaaaagaatgaggaagctgctgatgaggtcttcaaagacatcatggagtccagcccgggctccagcccgcccaacctgactccaaaacccctccggcggcaggtcaccgtggcccctgcctcgggcctcccccacaaggaagaagctggaaagggcagtgccttagggacccctgctgcagctgagccagtgacccccaccagcaaagcaggctcaggtgcaccagggggcaccagcaagggccccgccgaggagtccagagtgaggaggcacaagcactcctctgagtcgccagggagggacaaggggaaattgtccaggctcaaacctgccccgccgcccccaccagcagcctctgcagggaaggctggaggaaagccctcgcagagcccgagccaggaggcggccggggaggcagtcctgggcgcaaagacaaaagccacgagtctggttgatgctgtgaacagtgacgctgccaagcccagccagccgggagagggcctcaaaaagcccgtgctcccggccactccaaagccacagtccgccaagccgtcggggacccccatcagcccagcccccgttccctccacgttgccatcagcatcctcggccctggcaggggaccagccgtcttccaccgccttcatccctctcatatcaacccgagtgtctcttcggaaaacccgccagcctccagagcggatcgccagcggcgccatcaccaagggcgtggtcctggacagcaccgaggcgctgtgcctcgccatctctaggaactccgagcagatggccagccacagcgcagtgctggaggccggcaaaaacctctacacgttctgcgtgagctatgtggattccatccagcaaatgaggaacaagtttgccttccgagaggccatcaacaaactggagaataatctccgggagcttcagatctgcccggcgacagcaggcagtggtccagcggccactcaggacttcagcaagctcctcagttcggtgaaggaaatcagtgacatagtgcagagg

SEQ ID NO: 6084 - DNA, 1233 bp, Homo sapiens
  source 1..1233: mol_type = genomic DNA
atgtcaaaaagaccatcttatgccccacctcccaccccagctcctgcaacacaaatgcccagcacaccagggtttgtgggatacaatccatacagtcatctcgcctacaacaactacaggctgggagggaacccgggcaccaacagccgggtcacggcatcctctggtatcacgattccaaaacccccaaagccaccagataagccgctgatgccctacatgaggtacagcagaaaggtctgggaccaagtaaaggcttccaaccctgacctaaagttgtgggagattggcaagattattggtggcatgtggcgagatctcactgatgaagaaaaacaagaatatttaaacgaatacgaagcagaaaagatagagtacaatgaatctatgaaggcctatcataattcccccgcgtaccttgcttacataaatgcaaaaagtcgtgcagaagctgctttagaggaagaaagtcgacagagacaatctcgcatggagaaaggagaaccgtacatgagcattcagcctgctgaagatccagatgattatgatgatggcttttcaatgaagcatacagccaccgcccgtttccagagaaaccaccgcctcatcagtgaaattcttagtgagagtgtggtgccagacgttcggtcagttgtcacaacagctagaatgcaggtcctcaaacggcaggtccagtccttaatggttcatcagcgaaaactagaagctgaacttcttcaaatagaggaacgacaccaggagaagaagaggaaattcctggaaagcacagattcatttaacaatgaacttaaaaggttgtgcggtctgaaagtagaagtggatatggagaaaattgcagctgagattgcacaggcagaggaacaggcccgcaaaaggcaggaggaaagggagaaggaggccgcagagcaagctgagcgcagtcagagcagcatcgttcctgaggaagaacaagcagctaacaaaggcgaggagaagaaagacgacgagaacattccgatggagacagaggagacacaccttgaagaaacaacagagagccaacagaatggtgaagaaggcacgtctactcctgaggacaaggagagtgggcaggagggggtcgacagtatggcagaggaaggaaccagtgatagtaacactggctcggagagcaacagtgcaacagtggaggagccaccaacagatcccataccagaagatgagaaaaaagaa

SEQ ID NO: 6085 - DNA, 1461 bp, Homo sapiens
  source 1..1461: mol_type = genomic DNA
atggctgcggccgcgctgagggccccgactcaggttactgtgtctccagaaacacatatggacctcacaaagggctgtgtgacctttgaggacatcgccatttacttctcacaggacgagtggggacttcttgatgaggctcagagactcctgtaccttgaagtgatgctggagaactttgcccttgtagcctcactgggttgtggccatggaacagaggatgaagagacaccttctgaccagaatgtttctgtaggagtgtcacagtcaaaggcaggttcatccacacagaagactcaatcctgtgagatgtgtgtcccagtcctgaaagatattttgcatctagctgatctccctgggcagaaaccatacttggttggagaatgtacaaaccatcaccagcaccagaagcatcacagtgcaaagaaatccttgaagagggacatggacagagcctcatatgtgaagtgctgcctattctgtatgtcattgaagccctttcgcaaatgggaggttggaaaggaccttccagccatgttgcggcttctgaggtccctggtctttcctggaggcaagaaacccggcacaattactgaatgtggggaggacattcgcagtcaaaaaagtcattacaagtcaggtgaatgtgggaaggcttccaggcacaaacacactcctgtttaccatccaagagtctacactggaaaaaagctttatgagtgtagcaaatgtgggaaagccttccgtggcaagtactcacttgttcagcaccagagagtccatactggagaaaggccttgggagtgcaatgaatgtggaaaattctttagccaaacctcccacctgaatgatcatcggagaatccacaccggagaaaggccttatgagtgcagcgaatgtggaaaattatttagacaaaactccagccttgttgaccaccagaaaatacacactggagcaaggccttatgagtgtagccagtgtgggaaatcctttagccaaaaagccacccttgttaaacaccaaagagttcacactggagaaaggccttataagtgtggtgaatgtgggaattcctttagtcaaagtgccattcttaatcaacaccgaagaattcacactggagcaaagccttatgagtgtggccagtgtgggaaatcctttagtcaaaaagctaccctcattaaacaccagagagttcacactggagaaaggccttataagtgtggtgactgtgggaaatcctttagtcaaagctccatccttattcaacaccggagaattcatactggagcaaggccttatgagtgtggccagtgtggaaagtcctttagccaaaagtctggtctcattcaacaccaagtggttcacactggagaaaggccttatgagtgcaacaaatgtgggaattcctttagccaatgctccagcctcatacatcaccaaaaatgtcataacaca

SEQ ID NO: 6086 - DNA, 1296 bp, Homo sapiens
  source 1..1296: mol_type = genomic DNA
atgctggagaactttgcccttgtagcctcactgggttgtggccatggaacagaggatgaagagacaccttctgaccagaatgtttctgtaggagtgtcacagtcaaaggcaggttcatccacacagaagactcaatcctgtgagatgtgtgtcccagtcctgaaagatattttgcatctagctgatctccctgggcagaaaccatacttggttggagaatgtacaaaccatcaccagcaccagaagcatcacagtgcaaagaaatccttgaagagggacatggacagagcctcatatgtgaagtgctgcctattctgtatgtcattgaagccctttcgcaaatgggaggttggaaaggaccttccagccatgttgcggcttctgaggtccctggtctttcctggaggcaagaaacccggcacaattactgaatgtggggaggacattcgcagtcaaaaaagtcattacaagtcaggtgaatgtgggaaggcttccaggcacaaacacactcctgtttaccatccaagagtctacactggaaaaaagctttatgagtgtagcaaatgtgggaaagccttccgtggcaagtactcacttgttcagcaccagagagtccatactggagaaaggccttgggagtgcaatgaatgtggaaaattctttagccaaacctcccacctgaatgatcatcggagaatccacaccggagaaaggccttatgagtgcagcgaatgtggaaaattatttagacaaaactccagccttgttgaccaccagaaaatacacactggagcaaggccttatgagtgtagccagtgtgggaaatcctttagccaaaaagccacccttgttaaacaccaaagagttcacactggagaaaggccttataagtgtggtgaatgtgggaattcctttagtcaaagtgccattcttaatcaacaccgaagaattcacactggagcaaagccttatgagtgtggccagtgtgggaaatcctttagtcaaaaagctaccctcattaaacaccagagagttcacactggagaaaggccttataagtgtggtgactgtgggaaatcctttagtcaaagctccatccttattcaacaccggagaattcatactggagcaaggccttatgagtgtggccagtgtggaaagtcctttagccaaaagtctggtctcattcaacaccaagtggttcacactggagaaaggccttatgagtgcaacaaatgtgggaattcctttagccaatgctccagcctcatacatcaccaaaaatgtcataacaca

SEQ ID NO: 6087 - DNA, 1422 bp, Homo sapiens
  source 1..1422: mol_type = genomic DNA
atggctgcggccgcgctgagggccccgactcagggctgtgtgacctttgaggacatcgccatttacttctcacaggacgagtggggacttcttgatgaggctcagagactcctgtaccttgaagtgatgctggagaactttgcccttgtagcctcactgggttgtggccatggaacagaggatgaagagacaccttctgaccagaatgtttctgtaggagtgtcacagtcaaaggcaggttcatccacacagaagactcaatcctgtgagatgtgtgtcccagtcctgaaagatattttgcatctagctgatctccctgggcagaaaccatacttggttggagaatgtacaaaccatcaccagcaccagaagcatcacagtgcaaagaaatccttgaagagggacatggacagagcctcatatgtgaagtgctgcctattctgtatgtcattgaagccctttcgcaaatgggaggttggaaaggaccttccagccatgttgcggcttctgaggtccctggtctttcctggaggcaagaaacccggcacaattactgaatgtggggaggacattcgcagtcaaaaaagtcattacaagtcaggtgaatgtgggaaggcttccaggcacaaacacactcctgtttaccatccaagagtctacactggaaaaaagctttatgagtgtagcaaatgtgggaaagccttccgtggcaagtactcacttgttcagcaccagagagtccatactggagaaaggccttgggagtgcaatgaatgtggaaaattctttagccaaacctcccacctgaatgatcatcggagaatccacaccggagaaaggccttatgagtgcagcgaatgtggaaaattatttagacaaaactccagccttgttgaccaccagaaaatacacactggagcaaggccttatgagtgtagccagtgtgggaaatcctttagccaaaaagccacccttgttaaacaccaaagagttcacactggagaaaggccttataagtgtggtgaatgtgggaattcctttagtcaaagtgccattcttaatcaacaccgaagaattcacactggagcaaagccttatgagtgtggccagtgtgggaaatcctttagtcaaaaagctaccctcattaaacaccagagagttcacactggagaaaggccttataagtgtggtgactgtgggaaatcctttagtcaaagctccatccttattcaacaccggagaattcatactggagcaaggccttatgagtgtggccagtgtggaaagtcctttagccaaaagtctggtctcattcaacaccaagtggttcacactggagaaaggccttatgagtgcaacaaatgtgggaattcctttagccaatgctccagcctcatacatcaccaaaaatgtcataacaca

SEQ ID NO: 6088 - DNA, 666 bp, Homo sapiens
  source 1..666: mol_type = genomic DNA
atgagcgcagcgttcccgccgtcgctgatgatgatgcagcgcccgctggggagtagcaccgccttcagcatagactcgctgatcggcagcccgccgcagcccagccccggccatttcgtctacaccggctaccccatgttcatgccctaccggccggtagtgctgccgccgccgccgccgccgccgcccgcgctgccccaggccgcgctgcagccagcgctgccgcccgcacaccctcaccaccagatccccagcctgcccacaggcttctgctccagcctggcgcagggcatggcgctcacctctacgctcatggccacgctccccggcggcttctccgcgtcgccccagcaccaggaggcggcagcggcccgcaagttcgcgccgcagccgctgcccggcggcggtaacttcgacaaggcggaggcgctgcaggctgacgcggaggacggcaaaggcttcctggccaaagagggctcgctgctcgccttctccgcggccgagacggtgcaggcttcgctcggccgcctctgccgctccgcggtgacctggggttccggtcggggctgtccgagggcaagggaaagacgagtcaaaggtggaagacgacccgaagggcaaggaggagagcttctcgctggagagcgatgtggactacagctcgga

SEQ ID NO: 6089 - DNA, 1089 bp, Homo sapiens
  source 1..1089: mol_type = genomic DNA
atgcagcgggccggaggcggtagcgcccctgggggcaacggcgggggcggcggcgggggcccgggcactgccttctccatcgactccctaatcgggccgccgccgccgcgctccggccacttgctgtacaccggctaccccatgttcatgccctaccggccgctcgtgctgccgcaggcgctggcccctgcgccgctgcccgctggcctcccgcccctcgccccgctagcctctttcgccggccgccttaccaacaccttctgcgcggggctgggtcaggctgtgccctcgatggtggcgctgaccaccgcgctgcccagcttcgcggagccgcccgacgctttctacgggccccaggagctcgccgccgccgctgccgccgccgccgccactgccgcccgaaacaaccccgagccaggcggccgacgcccagagggtgggctggaagctgatgagctgctgccggcccgggagaaagtggcagagcccccaccacctccgcctccgcacttctcagagacttttccaagtctgcccgcagaggggaaggtgtacagctcagatgaggagaagctggaggcatcagcaggagacccagcaggcagcgaacaggaggaagagggctcaggcggtgacagcgaggatgacggtttcctggacagttctgcagggggcccaggggctcttctgggacctaaaccgaagctaaagggaagcctggggactggagctgaggagggggcaccggtgacagcaggggtcacagctcctggggggaaaagccgacggcgccgcacagcatttaccagcgagcagcttttggaattggagaaggaatttcattgcaagaaatacctgagcttgacagagcgctctcagatcgcccacgccctcaagctcagtgaggtgcaggtcaagatctggtttcagaatcgacgggccaagtggaagcgcatcaaagctggcaatgtgagcagccgttctggggagcccgtaagaaaccccaagattgttgtccccatacctgtgcatgtcaacaggtttgctgtgcggagccagcaccaacaaatggagcagggggcccggccc

SEQ ID NO: 6090 - DNA, 537 bp, Homo sapiens
  source 1..537: mol_type = genomic DNA
atggtctctagcgaccggcccgtgtcactggaggacgaggtctcccatagtatgaaggagatgattggaggctgttgcgtttgctcagacgagagaggctgggccgagaacccgctggtttattgcgacgggcacggctgcagcgtcgcggtgcatcaagcttgctatggcattgttcaagtacccactggaccgtggttttgcaggaaatgtgaatctcaggagagagcagccagagtgatggtatgcaattcctgttggttagcctcatctgaaaacgtcactcctggatacatagaacatcactgcgcatgtgcatctccccacccccgatgcctggtgtctaacgttcctccagtttctggtgctctgatgcattgcttttgggcttgtcttactacagcagctttcttcggtcctcagtcatttaccacttgtcatatgtcctttctagtttccagggatattcttttttatatttatggctttatgccatttatctcagttgtcatttggcgtttcaagaaggagaggtgg

SEQ ID NO: 6091 - DNA, 3081 bp, Homo sapiens
  source 1..3081: mol_type = genomic DNA
atggtctctagcgaccggcccgtgtcactggaggacgaggtctcccatagtatgaaggagatgattggaggctgttgcgtttgctcagacgagagaggctgggccgagaacccgctggtttattgcgacgggcacggctgcagcgtcgcggtgcatcaagcttgctatggcattgttcaagtacccactggaccgtggttttgcaggaaatgtgaatctcaggagagagcagccagagtgagatgtgaactttgtccccataaggatggagctttaaaaagaacagataatgggggttgggcccatgtggtttgtgccctgtatattccagaggtacaatttgccaatgtttccacaatggaaccaattgttttacagtctgttccgcatgatcgttataataagacttgctacatttgtgatgaacaaggaagagaaagcaaagcagccactggtgcttgcatgacatgtaataaacatggatgtcgacaggctttccatgtaacatgcgctcagtttgccggactgctttgtgaagaagaaggtaatggtgccgataatgtccaatactgtggctactgtaaataccattttagtaagctgaaaaagagcaaacggggatctaataggtcatatgatcaaagtttaagtgattcttcctctcactctcaggataaacatcatgagaaagagaaaaaaaaatataaagagaaggacaaacacaaacagaaacacaagaagcagccagaaccatcacctgcattggttccatccttgactgttactacagaaaaaacttatacaagcactagcaacaactctatatctggatcattgaagcgcttggaagatactactgcacgatttacaaatgcaaatttccaggaagtctctgcacacacctctagtggaaaagatgtttcagagactagagggtcagagggcaaagggaagaaatcttcagctcacagctcaggtcaaaggggaagaaagcctggtggtggaagaaatccaggaacaactgtgtcagcagctagcccttttcctcaaggcagtttttcaggaactccaggcagtgtaaagtcatcttctggaagttcagtgcagtctccccaggatttcctgagctttacagactcagatctgcgtaatgacagttactctcactcccaacagtcatcagcaaccaaagatgtacataaaggagagtctggaagccaggaagggggggtaaatagttttagtaccttaattggcctcccttcaacctcagctgttacttcacagcctaaaagctttgaaaattcacctggagatttgggtaattccagccttcctacagcaggatataagcgggctcaaacttctggcatagaagaagaaactgtaaaggaaaagaaaaggaaaggaaataaacaaagtaagcatgggcctggcagacccaaaggaaacaaaaatcaagagaatgtttctcatctctcagtttcttctgcttcaccaacatcatctgtagcatcagctgcaggaagcataacaagctctagtctgcagaaatctcctacattgctcaggaatggaagtttacagagcctcagtgttggctcatctccagttggttcagaaatttccatgcagtatcggcatgatggagcttgcccaacaactacgttctcagagttgctgaatgcaatacacaacgacagaggtgacagttctacactaacaaagcaagaacttaaattcataggtatttataacagcaatgatgtagcagtatcgtttccaaatgtagtatctggctcgggatctagtactcctgtctccagctctcacttacctcagcagtcttctgggcatttgcaacaagtaggagcgctctctccctcagctgtgtcatctgcagcccctgctgttgctacaactcaggcaaatactctatctggatcttctctcagtcaggcaccatctcatatgtatggcaatagatcaaattcatcaatggcagctcttatagctcagtctgaaaacaatcaaacagatcaagatcttggagacaatagccgcaacctagttggcagaggaagctcaccccgaggaagtctctcgccacgatcccctgtaagcagcttacagattcgctatgatcaaccaggcaacagcagtttggaaaatctgcctccagtagcagccagcatagaacagcttttggagaggcagtggagtgaaggacagcaatttttactagaacagggtactcctagtgacattttaggaatgctgaagtcattacaccaacttcaagttgaaaaccgaagattagaggaacaaattaaaaacttgactgccaaaaaggaacggcttcagttattgaatgcacagctttcagtgccttttccaacaataacagcaaatcctagtccgtctcatcaaatacacacattttcagcacagactgctcctactactgattccttgaacagcagtaagagccctcatataggaaacagctttttacctgataattctcttcctgtattaaatcaggacttaacctccagtggacaaagtaccagcagctcatcagctctttctaccccacctcctgctgggcagagtccggctcaacaaggctcaggagtgagtggagttcagcaggtcaatggcgtgacagtgggggcactagctagtggaatgcagcctgtaacttccaccattcctgccgtgtctgcagtgggtggaataattggagctttgccaggtaaccaactggcaattaatggcattgtaggagctttaaatggggttatgcagactcctgtcacaatgtcccagaaccctacccctctcacccacacaaccgtaccacctaatgcaacacatccaatgccagctacactgactaacagtgcctcaggactaggattactttctgaccagcaacgacaaatacttattcatcaacagcagtttcagcagttgttaaattctcaacagctcacaccagtacacaggcacccccacttcacacagctaccaccaacccatttctcaccatccatggagataatgcaagtcagaaag

SEQ ID NO: 6092 - DNA, 3204 bp, Homo sapiens
  source 1..3204: mol_type = genomic DNA
atggtctctagcgaccggcccgtgtcactggaggacgaggtctcccatagtatgaaggagatgattggaggctgttgcgtttgctcagacgagagaggctgggccgagaacccgctggtttattgcgacgggcacggctgcagcgtcgcggtgcatcaagcttgctatggcattgttcaagtacccactggaccgtggttttgcaggaaatgtgaatctcaggagagagcagccagagtgagatgtgaactttgtccccataaggatggagctttaaaaagaacagataatgggggttgggcccatgtggtttgtgccctgtatattccagaggtacaatttgccaatgtttccacaatggaaccaattgttttacagtctgttccgcatgatcgttataataagacttgctacatttgtgatgaacaaggaagagaaagcaaagcagccactggtgcttgcatgacatgtaataaacatggatgtcgacaggctttccatgtaacatgcgctcagtttgccggactgctttgtgaagaagaaggtaatggtgccgataatgtccaatactgtggctactgtaaataccattttagtaagctgaaaaagagcaaacggggatctaataggtcatatgatcaaagtttaagtgattcttcctctcactctcaggataaacatcatgagaaagagaaaaaaaaatataaagagaaggacaaacacaaacagaaacacaagaagcagccagaaccatcacctgcattggttccatccttgactgttactacagaaaaaacttatacaagcactagcaacaactctatatctggatcattgaagcgcttggaagatactactgcacgatttacaaatgcaaatttccaggaagtctctgcacacacctctagtggaaaagatgtttcagagactagagggtcagagggcaaagggaagaaatcttcagctcacagctcaggtcaaaggggaagaaagcctggtggtggaagaaatccaggaacaactgtgtcagcagctagcccttttcctcaaggcagtttttcaggaactccaggcagtgtaaagtcatcttctggaagttcagtgcagtctccccaggatttcctgagctttacagactcagatctgcgtaatgacagttactctcactcccaacagtcatcagcaaccaaagatgtacataaaggagagtctggaagccaggaagggggggtaaatagttttagtaccttaattggcctcccttcaacctcagctgttacttcacagcctaaaagctttgaaaattcacctggagatttgggtaattccagccttcctacagcaggatataagcgggctcaaacttctggcatagaagaagaaactgtaaaggaaaagaaaaggaaaggaaataaacaaagtaagcatgggcctggcagacccaaaggaaacaaaaatcaagagaatgtttctcatctctcagtttcttctgcttcaccaacatcatctgtagcatcagctgcaggaagcataacaagctctagtctgcagaaatctcctacattgctcaggaatggaagtttacagagcctcagtgttggctcatctccagttggttcagaaatttccatgcagtatcggcatgatggagcttgcccaacaactacgttctcagagttgctgaatgcaatacacaacggtatttataacagcaatgatgtagcagtatcgtttccaaatgtagtatctggctcgggatctagtactcctgtctccagctctcacttacctcagcagtcttctgggcatttgcaacaagtaggagcgctctctccctcagctgtgtcatctgcagcccctgctgttgctacaactcaggcaaatactctatctggatcttctctcagtcaggcaccatctcatatgtatggcaatagatcaaattcatcaatggcagctcttatagctcagtctgaaaacaatcaaacagatcaagatcttggagacaatagccgcaacctagttggcagaggaagctcaccccgaggaagtctctcgccacgatcccctgtaagcagcttacagattcgctatgatcaaccaggcaacagcagtttggaaaatctgcctccagtagcagccagcatagaacagcttttggagaggcagtggagtgaaggacagcaatttttactagaacagggtactcctagtgacattttaggaatgctgaagtcattacaccaacttcaagttgaaaaccgaagattagaggaacaaattaaaaacttgactgccaaaaaggaacggcttcagttattgaatgcacagctttcagtgccttttccaacaataacagcaaatcctagtccgtctcatcaaatacacacattttcagcacagactgctcctactactgattccttgaacagcagtaagagccctcatataggaaacagctttttacctgataattctcttcctgtattaaatcaggacttaacctccagtggacaaagtaccagcagctcatcagctctttctaccccacctcctgctgggcagagtccggctcaacaaggctcaggagtgagtggagttcagcaggtcaatggcgtgacagtgggggcactagctagtggaatgcagcctgtaacttccaccattcctgccgtgtctgcagtgggtggaataattggagctttgccaggtaaccaactggcaattaatggcattgtaggagctttaaatggggttatgcagactcctgtcacaatgtcccagaaccctacccctctcacccacacaaccgtaccacctaatgcaacacatccaatgccagctacactgactaacagtgcctcaggactaggattactttctgaccagcaacgacaaatacttattcatcaacagcagtttcagcagttgttaaattctcaacagctcacaccagaacaacatcaagcctttttgtatcagttaatgcaacatcaccaccagcagcaccaccaacctgaacttcagcagctgcagatccctggaccaacacaaatacccataaacaaccttcttgcaggtacacaggcacccccacttcacacagctaccaccaacccatttctcaccatccatggagataatgcaagtcagaaagtagcaagacttagtgataaaactgggcctgtagctcaagagaaaagt

SEQ ID NO: 6093 - DNA, 2910 bp, Homo sapiens
  source 1..2910: mol_type = genomic DNA
atggctctttctcagggtctattgacattcagggatgtggccatagaattctctcaggaagagtggaagtgcctggaccctgctcagaggactctatacagggacgtgatgctggagaattataggaacctggtctccctggatatctcttccaaatgcatgatgaaggagttctcatcaacagcacaaggcaatacagaagtgatccacacagggacattgcaaagacatgaacgtcatcacattggagatttttgcttccaggaaatggagaaagatattcatgattttgagtttcagtggaaagaagatgaaagaaatagccatgaagcacccatgacagaaatcaaacagttgacgggtagtacaaaccgacatgatcaaaggcatgctggaaacaagcctattaaagatcagcttggatcaagctttcattcgcatctgcctgaactccacatgtttcagaccgaagggaaaattggtaatcaagttgagaagtctatcaacagtgcttcgttggtttcaacatcccaaagaatttcttgtaggcctaaaacccacatttctaagaactatgggaataatttcctgaattcttcattactcacacaaaagcaggaagtacacatgagagaaaaatctttccaatgtaatgagagtggcaaagcctttaattatagctcagtcttaaggaaacatcagataatccatttaggagcgaaacaatataaatgtgatgtgtgtggcaaggtctttaatcaaaagcgatatcttgcatgtcatcgtagatgtcacactggcaagaaaccttacaagtgtaatgattgtggcaagaccttcagtcaggagttaacccttacatgccatcatagacttcatactggagagaaacattacaagtgcagtgagtgtggcaagaccttcagtcgaaattcagcccttgtaattcataaggcaattcatactggagagaaatcttacaagtgtaatgaatgtggcaagaccttcagtcaaacgtcataccttgtgtaccatcgtagacttcatactggagagaaaccttacaaatgtgaagaatgtgacaaagctttcagtttcaaatcaaaccttgaaagacataggaaaattcatactggagagaaaccttacaagtgtaatgaatgcagcaggacctttagtcggaagtcatcccttacacgccatcgtagacttcatactggagagaaaccttataagtgtaatgattgtggcaagaccttcagtcagatgtcatcccttgtataccatcgtagacttcatactggagagaaaccttacaaatgtgaagaatgtgatgaagctttcagtttcaaatcgaaccttgaaagacataggagaattcatactggagagaaaccttacaagtgtaatgattgtggcaagaccttcagtcagacatcatcccttgtataccatcgtagacttcatactggagagaaaccttacaaatgtgaagaatgtgatgaagctttcagtttcaaatcaaaccttgaaagacataggataattcatactggagagaaactttacaagtgtaatgaatgtggcaagacctttagtcggaagtcatcccttacacgccattgtagacttcatactggagagaaaccttaccagtgtaatgagtgtggcaaagcctttcgtgggcagtcagcacttatttaccatcaagcaatccatggtatagggaaactttacaaatgtaatgattgtcaccaagtctttagtaatgctacaaccattgcaaatcattggagaatccataatgaagagagatcgtacaagtgtaatagatgtggcaaatttttcagacatcgttcataccttgcagttcattggcgaactcatagtggagagaaaccttacaaatgtgaagaatgtgatgaagctttcagtttcaaatcaaaccttcaaagacataggagaattcatactggagagaaaccttacaggtgtaatgaatgtggcaagacctttagtcggaagtcataccttacatgccatcgtagacttcatactggagagaaaccttacaagtgtaatgagtgtggcaagaccttcggtcgaaattcagcccttataattcacaaggcaattcatactggagagaaaccttacaagtgtaatgagtgtggcaaggccttcagtcagaagtcatcccttacatgccatcttagacttcatactggagagaaaccttacaaatgtgaagaatgtgacaaagttttcagtcgcaaatcaagccttgaaaaacacaggagaattcatactggagagaaaccatacaaatgtaaggtttgtgacaaagcttttgggcgtgattcacacctggcacaacatactagaattcacactggagagaaaccttacaagtgtaatgaatgtggcaagaacttccgtcacaattcagcccttgtaattcataaggcaattcatagtggagagaaaccttacaagtgtaatgagtgtggcaagaccttccgtcacaattcagcccttgaaattcataaggcaattcatactggagaaaaaccttacaagtgtagtgaatgtggcaaggtttttaatagaaaagcaaacctttcacgtcatcatagacttcatactggagagaaaccttacaagtgtaataaatgtggtaaggtttttaatcaacaagcacaccttgcatgtcatcatagaattcatactggagagaaaccttacaagtgtaatgagtgtggcaaaaccttccgtcacaattcagtccttgtaattcataagacaattcatactggagagaaaccttacaagtgtaatgaatgtggcaaggtttttaatcgaaaagcaaaacttgcacgtcatcatagaattcatactggaaagaaacat

SEQ ID NO: 6094 - DNA, 843 bp, Homo sapiens
  source 1..843: mol_type = genomic DNA
atggtgttggccccactcccagatccgggacccccaagcctggctgtagcccctgagccctgccctcagcccctgcggagccccagcttggacaatcccactcccttcccaaacctggggccctctgagaacccactgaagcggctgttggtgccgggggaagagtgggagttcgaggtgacagccttctaccggggccgccaagtcttccagcagaccatctcctgcccggagggcctgcggctggtggggtccgaagtgggagacaggacgctgcctggatggccagtcacactgccagaccctggcatgtccctgacagacaggggagtgatgagctacgtgaggcatgtgctgagctgcctgggtgggggactggctctctggcgggccgggcagtggctctgggcccagcggctggggcactgccacacatactgggcagtgagcgaggagctgctccccaacagcgggcatgggcctgatggcgaggtccccaaggacaaggaaggaggcgtgtttgacctggggcccttcattgtagatctgattaccttcacggaaggaagcggacgctcaccacgctatgccctctggttctgtgtgggggagtcatggccccaggaccagccgtggaccaagaggctcgtgatggtcaaggttgtgcccacgtgcctcagggccttggtagaaatggcccgggtagggggtgcctcctccctggagaatactgtggacctgcacatttccaacagccacccactctccctcacctccgaccagtacaaggcctacctgcaggacttggtggagggcatggatttccagggccctggggagagc

SEQ ID NO: 6095 - DNA, 462 bp, Homo sapiens
  source 1..462: mol_type = genomic DNA
atggtgttggccccactcccagatccgggacccccaagcctggctgtagcccctgagccctgccctcagcccctgcggagccccagcttggacaatcccactcccttcccaaacctggggccctctgagaacccactgaagcggctgttggtgccgggggaagatctgattaccttcacggaaggaagcggacgctcaccacgctatgccctctggttctgtgtgggggagtcatggccccaggaccagccgtggaccaagaggctcgtgatggtcaaggttgtgcccacgtgcctcagggccttggtagaaatggcccgggtagggggtgcctcctccctggagaatactgtggacctgcacatttccaacagccacccactctccctcacctccgaccagtacaaggcctacctgcaggacttggtggagggcatggatttccagggccctggggagagc

SEQ ID NO: 6096 - DNA, 900 bp, Homo sapiens
  source 1..900: mol_type = genomic DNA
atgggaaccccaaagccacggatcctgccctggctggtgtcgcagctggacctggggcaactggagggcgtggcctgggtgaacaagagccgcacgcgcttccgcatcccttggaagcacggcctacggcaggatgcacagcaggaggatttcggaatcttccaggcctgggccgaggccactggtgcatatgttcccgggagggataagccagacctgccaacctggaagaggaatttccgctctgccctcaaccgcaaagaagggttgcgtttagcagaggaccggagcaaggaccctcacgacccacataaaatctacgagtttgtgaactcaggagttggggacttttcccagccagacacctctccggacaccaatggtggaggcagtacttctgatacccaggaagacattctggatgagttactgggtaacatggtgttggccccactcccagatccgggacccccaagcctggctgtagcccctgagccctgccctcagcccctgcggagccccagcttggacaatcccactcccttcccaaacctggggccctctgagaacccactgaagcggctgttggtgccgggggaagatctgattaccttcacggaaggaagcggacgctcaccacgctatgccctctggttctgtgtgggggagtcatggccccaggaccagccgtggaccaagaggctcgtgatggtcaaggttgtgcccacgtgcctcagggccttggtagaaatggcccgggtagggggtgcctcctccctggagaatactgtggacctgcacatttccaacagccacccactctccctcacctccgaccagtacaaggcctacctgcaggacttggtggagggcatggatttccagggccctggggagagc

SEQ ID NO: 6097 - DNA, 1281 bp, Homo sapiens
  source 1..1281: mol_type = genomic DNA
atgggaaccccaaagccacggatcctgccctggctggtgtcgcagctggacctggggcaactggagggcgtggcctgggtgaacaagagccgcacgcgcttccgcatcccttggaagcacggcctacggcaggatgcacagcaggaggatttcggaatcttccaggcctgggccgaggccactggtgcatatgttcccgggagggataagccagacctgccaacctggaagaggaatttccgctctgccctcaaccgcaaagaagggttgcgtttagcagaggaccggagcaaggaccctcacgacccacataaaatctacgagtttgtgaactcaggagttggggacttttcccagccagacacctctccggacaccaatggtggaggcagtacttctgatacccaggaagacattctggatgagttactgggtaacatggtgttggccccactcccagatccgggacccccaagcctggctgtagcccctgagccctgccctcagcccctgcggagccccagcttggacaatcccactcccttcccaaacctggggccctctgagaacccactgaagcggctgttggtgccgggggaagagtgggagttcgaggtgacagccttctaccggggccgccaagtcttccagcagaccatctcctgcccggagggcctgcggctggtggggtccgaagtgggagacaggacgctgcctggatggccagtcacactgccagaccctggcatgtccctgacagacaggggagtgatgagctacgtgaggcatgtgctgagctgcctgggtgggggactggctctctggcgggccgggcagtggctctgggcccagcggctggggcactgccacacatactgggcagtgagcgaggagctgctccccaacagcgggcatgggcctgatggcgaggtccccaaggacaaggaaggaggcgtgtttgacctggggcccttcattgtagatctgattaccttcacggaaggaagcggacgctcaccacgctatgccctctggttctgtgtgggggagtcatggccccaggaccagccgtggaccaagaggctcgtgatggtcaaggttgtgcccacgtgcctcagggccttggtagaaatggcccgggtagggggtgcctcctccctggagaatactgtggacctgcacatttccaacagccacccactctccctcacctccgaccagtacaaggcctacctgcaggacttggtggagggcatggatttccagggccctggggagagc

SEQ ID NO: 6098 - DNA, 1356 bp, Homo sapiens
  source 1..1356: mol_type = genomic DNA
atgggaaccccaaagccacggatcctgccctggctggtgtcgcagctggacctggggcaactggagggcgtggcctgggtgaacaagagccgcacgcgcttccgcatcccttggaagcacggcctacggcaggatgcacagcaggaggatttcggaatcttccaggcctgggccgaggccactggtgcatatgttcccgggagggataagccagacctgccaacctggaagaggaatttccgctctgccctcaaccgcaaagaagggttgcgtttagcagaggaccggagcaaggaccctcacgacccacataaaatctacgagtttgtgaactcaggagttggggacttttcccagccagacacctctccggacaccaatggtggaggcagtacttctgatacccaggaagacattctggatgagttactgggtaacatggtgttggccccactcccagatccgggacccccaagcctggctgtagcccctgagccctgccctcagcccctgcggagccccagcttggacaatcccactcccttcccaaacctggggccctctgagaacccactgaagcggctgttggtgccgggggaagagtgggagttcgaggtgacagccttctaccggggccgccaagtcttccagcagaccatctcctgcccggagggcctgcggctggtggggtccgaagtgggagacaggacgctgcctggatggccagtcacactgccagaccctggcatgtccctgacagacaggggagtgatgagctacgtgaggcatgtgctgagctgcctgggtgggggactggctctctggcgggccgggcagtggctctgggcccagcggctggggcactgccacacatactgggcagtgagcgaggagctgctccccaacagcgggcatgggcctgatggcgaggtccccaaggacaaggaaggaggcgtgtttgacctggggcccttcattgtaggctcctgggcccccagatctgattaccttcacggaaggaagcggacgctcaccacgctatgccctctggttctgtgtgggggagtcatggccccaggaccagccgtggaccaagaggctcgtgatggtcaaggttgtgcccacgtgcctcagggccttggtagaaatggcccgggtagggggtgcctcctccctggagaatactgtggacctgcacatttccaacagccacccactctccctcacctccgaccagtacaaggcctacctgcaggacttggtggagggcatggatttccagggccctggggagagctgagccctcgctcctcatggtgtgcctccaacccccctgttccccaccacctcaaccaa

SEQ ID NO: 6099 - DNA, 975 bp, Homo sapiens
  source 1..975: mol_type = genomic DNA
atgcccatcactcggatgcgcatgagaccctggctagagatgcagattaattccaaccaaatcccggggctcatctggattaataaagaggagatgatcttccagatcccatggaagcatgctgccaagcatggctgggacatcaacaaggatgcctgtttgttccggagctgggccattcacacaggccgatacaaagcaggggaaaaggagccagatcccaagacgtggaaggccaactttcgctgtgccatgaactccctgccagatatcgaggaggtgaaagaccagagcaggaacaagggcagctcagctgtgcgagtgtaccggatgcttccacctctcaccaagaaccagagaaaagaaagaaagtcgaagtccagccgagatgctaagagcaaggccaagaggaagtcatgtggggattccagccctgataccttctctgatggactcagcagctccactctgcctgatgaccacagcagctacacagttccaggctacatgcaggacttggaggtggagcaggccctgactccagcactgtcgccatgtgctgtcagcagcactctccccgactggcacatcccagtggaagttgtgccggacagcaccagtgatctgtacaacttccaggtgtcacccatgccctccacctctgaagctacaacagatgaggatgaggaagggaaattacctgaggacatcatgaagctcttggagcagtcggagtggcagccaacaaacgtggatgggaaggggtacctactcaatgaacctggagtccagcccacctctgtctatggagactttagctgtaaggaggagccagaaattgacagcccagggggggatattgggctgagtctacagcgtgtcttcacagatctgaagaacatggatgccacctggctggacagcctgctgaccccagtccggttgccctccatccaggccattccctgtgcaccg

SEQ ID NO: 6100 - DNA, 1422 bp, Homo sapiens
  source 1..1422: mol_type = genomic DNA
atggccttggctcctgagagggcagccccacgcgtgctgttcggagagtggctccttggagagatcagcagcggctgctatgaggggctgcagtggctggacgaggcccgcacctgtttccgcgtgccctggaagcacttcgcgcgcaaggacctgagcgaggccgacgcgcgcatcttcaaggcctgggctgtggcccgcggcaggtggccgcctagcagcaggggaggtggcccgccccccgaggctgagactgcggagcgcgccggctggaaaaccaacttccgctgcgcactgcgcagcacgcgtcgcttcgtgatgctgcgggataactcgggggacccggccgacccgcacaaggtgtacgcgctcagccgggagctgtgctggcgagaaggcccaggcacggaccagactgaggcagaggcccccgcagctgtcccaccaccacagggtgggcccccagggccattcctggcacacacacatgctggactccaagccccaggccccctccctgccccagctggtgacaagggggacctcctgctccaggcagtgcaacagagctgcctggcagaccatctgctgacagcgtcatggggggcagatccagtcccaaccaaggctcctggagagggacaagaagggcttcccctgactggggcctgtgctggaggcgaggccgcggccccagagtccccgcaccaggcagagccgtacctgtcaccctccccaagcgcctgcaccgcggtgcaagagcccagcccaggggcgctggacgtgaccatcatgtacaagggccgcacggtgctgcagaaggtggtgggacacccgagctgcacgttcctatacggccccccagacccagctgtccgggccacagacccccagcaggtagcattccccagccctgccgagctcccggaccagaagcagctgcgctacacggaggaactgctgcggcacgtggcccctgggttgcacctggagcttcgggggccacagctgtgggcccggcgcatgggcaagtgcaaggtgtactgggaggtgggcggacccccaggctccgccagcccctccaccccagcctgcctgctgcctcggaactgtgacacccccatcttcgacttcagagtcttcttccaagagctggtggaattccgggcacggcagcgccgtggctccccacgctataccatctacctgggcttcgggcaggacctgtcagctgggaggcccaaggagaagagcctggtcctggtgaagctggaaccctggctgtgccgagtgcacctagagggcacgcagcgtgagggtgtgtcttccctggatagcagcagcctcagcctctgcctgtccagcgccaacagcctctatgacgacatcgagtgcttccttatggagctggagcagcccgcc

SEQ ID NO: 6101 - DNA, 1548 bp, Homo sapiens
  source 1..1548: mol_type = genomic DNA
atgccagtccccgagcgccctgcagccggccctgactctccgcggccgggcacccgcagggcagccccacgcgtgctgttcggagagtggctccttggagagatcagcagcggctgctatgaggggctgcagtggctggacgaggcccgcacctgtttccgcgtgccctggaagcacttcgcgcgcaaggacctgagcgaggccgacgcgcgcatcttcaaggcctgggctgtggcccgcggcaggtggccgcctagcagcaggggaggtggcccgccccccgaggctgagactgcggagcgcgccggctggaaaaccaacttccgctgcgcactgcgcagcacgcgtcgcttcgtgatgctgcgggataactcgggggacccggccgacccgcacaaggtgtacgcgctcagccgggagctgtgctggcgagaaggcccaggcacggaccagactgaggcagaggcccccgcagctgtcccaccaccacagggtgggcccccagggccattcctggcacacacacatgctggactccaagccccaggccccctccctgccccagctggtgacaagggggacctcctgctccaggcagtgcaacagagctgcctggcagaccatctgctgacagcgtcatggggggcagatccagtcccaaccaaggctcctggagagggacaagaagggcttcccctgactggggcctgtgctggaggcccagggctccctgctggggagctgtacgggtgggcagtagagacgacccccagccccgggccccagcccgcggcactaacgacaggcgaggccgcggccccagagtccccgcaccaggcagagccgtacctgtcaccctccccaagcgcctgcaccgcggtgcaagagcccagcccaggggcgctggacgtgaccatcatgtacaagggccgcacggtgctgcagaaggtggtgggacacccgagctgcacgttcctatacggccccccagacccagctgtccgggccacagacccccagcaggtagcattccccagccctgccgagctcccggaccagaagcagctgcgctacacggaggaactgctgcggcacgtggcccctgggttgcacctggagcttcgggggccacagctgtgggcccggcgcatgggcaagtgcaaggtgtactgggaggtgggcggacccccaggctccgccagcccctccaccccagcctgcctgctgcctcggaactgtgacacccccatcttcgacttcagagtcttcttccaagagctggtggaattccgggcacggcagcgccgtggctccccacgctataccatctacctgggcttcgggcaggacctgtcagctgggaggcccaaggagaagagcctggtcctggtgaagctggaaccctggctgtgccgagtgcacctagagggcacgcagcgtgagggtgtgtcttccctggatagcagcagcctcagcctctgcctgtccagcgccaacagcctctatgacgacatcgagtgcttccttatggagctggagcagcccgcc

SEQ ID NO: 6102 - DNA, 1509 bp, Homo sapiens
  source 1..1509: mol_type = genomic DNA
atggccttggctcctgagagggcagccccacgcgtgctgttcggagagtggctccttggagagatcagcagcggctgctatgaggggctgcagtggctggacgaggcccgcacctgtttccgcgtgccctggaagcacttcgcgcgcaaggacctgagcgaggccgacgcgcgcatcttcaaggcctgggctgtggcccgcggcaggtggccgcctagcagcaggggaggtggcccgccccccgaggctgagactgcggagcgcgccggctggaaaaccaacttccgctgcgcactgcgcagcacgcgtcgcttcgtgatgctgcgggataactcgggggacccggccgacccgcacaaggtgtacgcgctcagccgggagctgtgctggcgagaaggcccaggcacggaccagactgaggcagaggcccccgcagctgtcccaccaccacagggtgggcccccagggccattcctggcacacacacatgctggactccaagccccaggccccctccctgccccagctggtgacaagggggacctcctgctccaggcagtgcaacagagctgcctggcagaccatctgctgacagcgtcatggggggcagatccagtcccaaccaaggctcctggagagggacaagaagggcttcccctgactggggcctgtgctggaggcccagggctccctgctggggagctgtacgggtgggcagtagagacgacccccagccccgggccccagcccgcggcactaacgacaggcgaggccgcggccccagagtccccgcaccaggcagagccgtacctgtcaccctccccaagcgcctgcaccgcggtgcaagagcccagcccaggggcgctggacgtgaccatcatgtacaagggccgcacggtgctgcagaaggtggtgggacacccgagctgcacgttcctatacggccccccagacccagctgtccgggccacagacccccagcaggtagcattccccagccctgccgagctcccggaccagaagcagctgcgctacacggaggaactgctgcggcacgtggcccctgggttgcacctggagcttcgggggccacagctgtgggcccggcgcatgggcaagtgcaaggtgtactgggaggtgggcggacccccaggctccgccagcccctccaccccagcctgcctgctgcctcggaactgtgacacccccatcttcgacttcagagtcttcttccaagagctggtggaattccgggcacggcagcgccgtggctccccacgctataccatctacctgggcttcgggcaggacctgtcagctgggaggcccaaggagaagagcctggtcctggtgaagctggaaccctggctgtgccgagtgcacctagagggcacgcagcgtgagggtgtgtcttccctggatagcagcagcctcagcctctgcctgtccagcgccaacagcctctatgacgacatcgagtgcttccttatggagctggagcagcccgcc

SEQ ID NO: 6103 - DNA, 1461 bp, Homo sapiens
  source 1..1461: mol_type = genomic DNA
atgccagtccccgagcgccctgcagccggccctgactctccgcggccgggcacccgcagggcagccccacgcgtgctgttcggagagtggctccttggagagatcagcagcggctgctatgaggggctgcagtggctggacgaggcccgcacctgtttccgcgtgccctggaagcacttcgcgcgcaaggacctgagcgaggccgacgcgcgcatcttcaaggcctgggctgtggcccgcggcaggtggccgcctagcagcaggggaggtggcccgccccccgaggctgagactgcggagcgcgccggctggaaaaccaacttccgctgcgcactgcgcagcacgcgtcgcttcgtgatgctgcgggataactcgggggacccggccgacccgcacaaggtgtacgcgctcagccgggagctgtgctggcgagaaggcccaggcacggaccagactgaggcagaggcccccgcagctgtcccaccaccacagggtgggcccccagggccattcctggcacacacacatgctggactccaagccccaggccccctccctgccccagctggtgacaagggggacctcctgctccaggcagtgcaacagagctgcctggcagaccatctgctgacagcgtcatggggggcagatccagtcccaaccaaggctcctggagagggacaagaagggcttcccctgactggggcctgtgctggaggcgaggccgcggccccagagtccccgcaccaggcagagccgtacctgtcaccctccccaagcgcctgcaccgcggtgcaagagcccagcccaggggcgctggacgtgaccatcatgtacaagggccgcacggtgctgcagaaggtggtgggacacccgagctgcacgttcctatacggccccccagacccagctgtccgggccacagacccccagcaggtagcattccccagccctgccgagctcccggaccagaagcagctgcgctacacggaggaactgctgcggcacgtggcccctgggttgcacctggagcttcgggggccacagctgtgggcccggcgcatgggcaagtgcaaggtgtactgggaggtgggcggacccccaggctccgccagcccctccaccccagcctgcctgctgcctcggaactgtgacacccccatcttcgacttcagagtcttcttccaagagctggtggaattccgggcacggcagcgccgtggctccccacgctataccatctacctgggcttcgggcaggacctgtcagctgggaggcccaaggagaagagcctggtcctggtgaagctggaaccctggctgtgccgagtgcacctagagggcacgcagcgtgagggtgtgtcttccctggatagcagcagcctcagcctctgcctgtccagcgccaacagcctctatgacgacatcgagtgcttccttatggagctggagcagcccgcc

SEQ ID NO: 6104 - DNA, 1116 bp, Homo sapiens
  source 1..1116: mol_type = genomic DNA
atgtatgatggcaccaaggaggtgcccatgaacccagtgaagatatatcaagtgtgtgacatccctcagccccagggctcgatcattaacccaggatccacagggtctgctccctgggatgagaaggataatgatgtggatgaagaagatgaggaagatgagctggatcagtcgcagcaccatgttcccatccaggacaccttccccttcctgaacatcaatggttctcccatggcgccagccagtgtgggcaattgcagtgtgggcaactgcagcccggaggcagtgtggcccaaaactgaacccctggagatggaagtaccccaggcacctatacagcccttctatagctctccagaactgtggatcagctctctcccaatgactgacctggacatcaagtttcagtaccgtgggaaggagtacgggcagaccatgaccgtgagcaaccctcagggctgccgactcttctatggggacctgggtcccatgcctgaccaggaggagctctttggtcccgtcagcctggagcaggtcaaattcccaggtcctgagcatattaccaatgagaagcagaagctgttcactagcaagctgctggacgtcatggacagaggactgatcctggaggtcagcggtcatgccatttatgccatcaggctgtgccagtgcaaggtgtactggtctgggccatgtgccccatcacttgttgctcccaacctgattgagagacaaaagaaggtcaagctattttgtctggaaacattccttagcgatctcattgcccaccagaaaggacagatagagaagcagccaccgtttgagatctacttatgctttggggaagaatggccagatgggaaaccattggaaaggaaactcatcttggttcaggtcattccagtagtggctcggatgatctacgagatgttttctggtgatttcacacgatcctttgatagtggcagtgtccgcctgcagatctcaaccccagacatcaaggataacatcgttgctcagctgaagcagctgtaccgcatccttcaaacccaggagagctggcagcccatgcagcccacccccagcatgcaactgccccctgccctgcctccccag

SEQ ID NO: 6105 - DNA, 1401 bp, Homo sapiens
  source 1..1401: mol_type = genomic DNA
atggccctccacccccgcagagtccggctaaagccctggctggtggcccaggtggatagtggcctctaccctgggctcatctggctacacagggactctaaacgcttccagattccctggaaacatgccacccggcatagccctcaacaagaagaggaaaataccatttttaaggcctgggctgtagagacagggaagtaccaggaaggggtggatgaccctgacccagctaaatggaaggcccagctgcgctgtgctctcaataagagcagagaattcaacctgatgtatgatggcaccaaggaggtgcccatgaacccagtgaagatatatcaagtgtgtgacatccctcagccccagggctcgatcattaacccaggatccacagggtctgctccctgggatgagaaggataatgatgtggatgaagaagatgaggaagatgagctggatcagtcgcagcaccatgttcccatccaggacaccttccccttcctgaacatcaatggttctcccatggcgccagccagtgtgggcaattgcagtgtgggcaactgcagcccggaggcagtgtggcccaaaactgaacccctggagatggaagtaccccaggcacctatacagcccttctatagctctccagaactgtggatcagctctctcccaatgactgacctggacatcaagtttcagtaccgtgggaaggagtacgggcagaccatgaccgtgagcaaccctcagggctgccgactcttctatggggacctgggtcccatgcctgaccaggaggagctctttggtcccgtcagcctggagcaggtcaaattcccaggtcctgagcatattaccaatgagaagcagaagctgttcactagcaagctgctggacgtcatggacagaggactgatcctggaggtcagcggtcatgccatttatgccatcaggctgtgccagtgcaaggtgtactggtctgggccatgtgccccatcacttgttgctcccaacctgattgagagacaaaagaaggtcaagctattttgtctggaaacattccttagcgatctcattgcccaccagaaaggacagatagagaagcagccaccgtttgagatctacttatgctttggggaagaatggccagatgggaaaccattggaaaggaaactcatcttggttcaggtcattccagtagtggctcggatgatctacgagatgttttctggtgatttcacacgatcctttgatagtggcagtgtccgcctgcagatctcaaccccagacatcaaggataacatcgttgctcagctgaagcagctgtaccgcatccttcaaacccaggagagctggcagcccatgcagcccacccccagcatgcaactgccccctgccctgcctccccag

SEQ ID NO: 6106 - DNA, 1236 bp, Homo sapiens
  source 1..1236: mol_type = genomic DNA
atgaaccagtccatcccagtggctcccaccccaccccgccgcgtgcggctgaagccctggctggtggcccaggtgaacagctgccagtacccagggcttcaatgggtcaacggggaaaagaaattattctgcatcccctggaggcatgccacaaggcatggtcccagccaggacggagataacaccatcttcaaggcctgggccaaggagacagggaaatacaccgaaggcgtggatgaagccgatccggccaagtggaaggccaacctgcgctgtgcccttaacaagagccgggacttccgcctcatctacgacgggccccgggacatgccacctcagccctacaagatctacgaggtctgctccaatggccctgctcccacagactcccagccccctgaggattactcttttggtgcaggagaggaggaggaagaagaggaagagctgcagaggatgttgccaagcctgagcctcacagtgaccgacctggagatcaagtttcagtaccgggggcggccaccccgggccctcaccatcagcaacccccatggctgccggctcttctacagccagctggaggccacccaggagcaggtggaactcttcggccccataagcctggagcaagtgcgcttccccagccctgaggacatccccagtgacaagcagcgcttctacacgaaccagctgctggatgtcctggaccgcgggctcatcctccagctacagggccaggacctttatgccatccgcctgtgtcagtgcaaggtgttctggagcgggccttgtgcctcagcccatgactcatgccccaaccccatccagcgggaggtcaagaccaagcttttcagcctggagcattttctcaatgagctcatcctgttccaaaagggccagaccaacaccccaccacccttcgagatcttcttctgctttggggaagaatggcctgaccgcaaaccccgagagaagaagctcattactgtacaggtggtgcctgtagcagctcgactgctgctggagatgttctcaggggagctatcttggtcagctgatagtatccggctacagatctcaaacccagacctcaaagaccgcatggtggagcaattcaaggagctccatcacatctggcagtcccagcagcggttgcagcctgtggcccaggcccctcctggagcaggccttggtgttggccaggggccctggcctatgcacccagctggcatgcaa

SEQ ID NO: 6107 - DNA, 1542 bp, Homo sapiens
  source 1..1542: mol_type = genomic DNA
atgaaccagtccatcccagtggctcccaccccaccccgccgcgtgcggctgaagccctggctggtggcccaggtgaacagctgccagtacccagggcttcaatgggtcaacggggaaaagaaattattctgcatcccctggaggcatgccacaaggcatggtcccagccaggacggagataacaccatcttcaaggcctgggccaaggagacagggaaatacaccgaaggcgtggatgaagccgatccggccaagtggaaggccaacctgcgctgtgcccttaacaagagccgggacttccgcctcatctacgacgggccccgggacatgccacctcagccctacaagatctacgaggtctgctccaatggccctgctcccacagactcccagccccctgaggattactcttttggtgcaggagaggaggaggaagaagaggaagagctgcagaggatgttgccaagcctgagcctcacagatgcagtgcagtctggcccccacatgacaccctattctttactcaaagaggatgtcaagtggccgcccactctgcagccgcccactctgcggccgcctactctgcagccgcccactctgcagccgcccgtggtgctgggtccccctgctccagaccccagccccctggctcctccccctggcaaccctgctggcttcagggagcttctctctgaggtcctggagcctgggcccctgcctgccagcctgccccctgcaggcgaacagctcctgccagacctgctgatcagcccccacatgctgcctctgaccgacctggagatcaagtttcagtaccgggggcggccaccccgggccctcaccatcagcaacccccatggctgccggctcttctacagccagctggaggccacccaggagcaggtggaactcttcggccccataagcctggagcaagtgcgcttccccagccctgaggacatccccagtgacaagcagcgcttctacacgaaccagctgctggatgtcctggaccgcgggctcatcctccagctacagggccaggacctttatgccatccgcctgtgtcagtgcaaggtgttctggagcgggccttgtgcctcagcccatgactcatgccccaaccccatccagcgggaggtcaagaccaagcttttcagcctggagcattttctcaatgagctcatcctgttccaaaagggccagaccaacaccccaccacccttcgagatcttcttctgctttggggaagaatggcctgaccgcaaaccccgagagaagaagctcattactgtacaggtggtgcctgtagcagctcgactgctgctggagatgttctcaggggagctatcttggtcagctgatagtatccggctacagatctcaaacccagacctcaaagaccgcatggtggagcaattcaaggagctccatcacatctggcagtcccagcagcggttgcagcctgtggcccaggcccctcctggagcaggccttggtgttggccaggggccctggcctatgcacccagctggcatgcaa

SEQ ID NO: 6108 - DNA, 2520 bp, Homo sapiens
  source 1..2520: mol_type = genomic DNA
atggctggaccgggcagcacgggggggcagatcggggctgcggccctggcaggcggcgcgcggtccaaggtagccccgagcgtggacttcgaccatagctgctcggacagtgtcgagtacctgacgctcaacttcgggcccttcgaaacagtgcatcgctggcggcgcctcccgccctgcgacgagttcgtgggtgcccggcgcagcaagcacacagtggtggcctataaagatgccatttatgtatttggtggagacaatgggaagaccatgctcaatgacctcctgcggttcgatgtgaaagactgctcctggtgcagggcctttaccactgggaccccaccggccccccgttaccaccactcggccgtcgtctatgggagcagcatgtttgtctttgggggttacactggggacatttattccaattctaacttgaagaataaaaacgacctctttgaatacaagtttgcaactggccagtggacggagtggaaaattgaaggacggttgccagtcgctaggtcagcccatggggccacggtgtacagtgacaagctgtggatctttgctggctatgacggcaacgccaggttgaatgacatgtggacaattggcctccaggaccgagagctcacctgctgggaggaggtggcccagagtggcgagatccccccatcttgctgcaacttccccgtggctgtgtgccgggacaagatgtttgtattctctgggcaaagcggagccaaaataaccaacaacctcttccagtttgaattcaaggacaagacgtggacacgcatcccaactgaacacctgctccggggctccccaccacccccgcagcggcgctacgggcataccatggtggcctttgaccgccacctctatgtgtttgggggtgcggccgacaacacgctgcccaacgagctgcactgctatgacgtggacttccagacctgggaggtcgtccagcccagctccgacagcgaggttggtggggctgaagtgcccgagcgagcctgtgcttccgaggaggtgcccaccctgacctatgaggagcgggttggcttcaagaagtcccgagatgtgtttggcctggactttggcaccacctcagccaagcagcccacccagcctgcctcggagctgcccagtgggaggctcttccacgcggctgctgtcatctcggacgccatgtacatcttcgggggcacggtggacaacaacatccgcagcggggagatgtacaggttccagttctcctgttaccctaaatgcacgctgcacgaggactacgggcggctgtgggagagccgccagttctgcgacgtggagttcgtgctgggtgagaaggaggagtgcgtgcagggccacgtagccattgtcacagcgcggagccgctggcttcgcaggaagatcacgcaggcgcgggagaggctggcccagaagctggagcaggaggccgccccagttcccagggaggcccccggcgtggctgctggtggggcccggccgcccctgctgcacgtggccatccgggaggccgaggcccggcccttcgaggtgctcatgcagttcctctacaccgacaagatcaaatacccacggaaaggccatgtggaggatgtgctgctcatcatggatgtgtacaaactggcactgagcttccagttgtgccgcctggagcagctgtgccgccagtacatcgaggcctccgtggacctgcagaacgtgctggttgtgtgcgagagtgccgcccggctgcagctgagccaactcaaggagcactgcctgaacttcgtggtaaaggagtcccacttcaaccaggtgatcatgatgaaggagttcgagcgcctctcctctccactgatagtggagattgtgcggcggaagcagcagccgccccctcgcactcccttggaccagccagtggacattggcacatctctgatccaggacatgaaggcatacctggagggagcgggcgcggaattctgtgacatcactctgttgcttgacgggcacccacggccagcccacaaggctatcctggccgcccgctccagctactttgaagccatgttccggtccttcatgcccgaagatgggcaggtgaacatctccatcggggagatggtgcccagcaggcaggccttcgagtccatgctgcgctacatctactacggcgaggtcaacatgccgcccgaggactcgctctacttgtttgcggccccctactactacggcttctacaacaaccggctgcaggcgtactgcaagcagaacctggagatgaacgtgacggtgcagaacgtgctgcagatcctggaggcagctgacaaaacgcaggcactggacatgaagcggcactgcctgcacatcattgtgcaccagttcaccaaggtctccaagttgcccaccctgcggtcgctgagccagcagctgctgctggacatcatagactccctggcctcccacatctcagacaagcagtgcgcagagctgggcgccgacatc

SEQ ID NO: 6109 - DNA, 666 bp, Homo sapiens
  source 1..666: mol_type = genomic DNA
atggtgatcagcttctactatgggggcaagctggtgggccaggccaccaccacctgccccgagggctgccgcctgtccctgagccagcctgggctgcccggcaccaagctgtatgggcccgagggcctggagctggtgcgcttcccgccggccgacgccatccccagcgagcgacagaggcaggtgacgcggaagctgttcgggcacctggagcgcggggtgctgctgcacagcagccggcagggcgtgttcgtcaagcggctgtgccagggccgcgtgttctgcagcggcaacgccgtggtgtgcaaaggcaggcccaacaagctggagcgtgatgaggtggtccaggtcttcgacaccagccagttcttccgagagctgcagcagttctataacagccagggccggcttcctgacggcagggtggtgctgtgctttggggaagagtttccggatatggcccccttgcgctccaaactcattctcgtgcagattgagcagctgtatgtccggcaactggcagaagaggctgggaagagctgtggagccggctctgtgatgcaggcccccgaggagccgccgccagaccaggtcttccggatgtttccagatatttgtgcctcacaccagagatcatttttcagagaaaaccaacagatcaccgtc

SEQ ID NO: 6110 - DNA, 849 bp, Homo sapiens
  source 1..849: mol_type = genomic DNA
atgaacggcgaggagcagtactacgcggccacgcagctttacaaggacccatgcgcgttccagcgaggcccggcgccggagttcagcgccagcccccctgcgtgcctgtacatgggccgccagcccccgccgccgccgccgcacccgttccctggcgccctgggcgcgctggagcagggcagccccccggacatctccccgtacgaggtgccccccctcgccgacgaccccgcggtggcgcaccttcaccaccacctcccggctcagctcgcgctcccccacccgcccgccgggcccttcccggagggagccgagccgggcgtcctggaggagcccaaccgcgtccagctgcctttcccatggatgaagtctaccaaagctcacgcgtggaaaggccagtgggcaggcggcgcctacgctgcggagccggaggagaacaagcggacgcgcacggcctacacgcgcgcacagctgctagagctggagaaggagttcctattcaacaagtacatctcacggccgcgccgggtggagctggctgtcatgttgaacttgaccgagagacacatcaagatctggttccaaaaccgccgcatgaagtggaaaaaggaggaggacaagaagcgcggcggcgggacagctgtcgggggtggcggggtcgcggagcctgagcaggactgcgccgtgacctccggcgaggagcttctggcgctgccgccgccgccgccccccggaggtgctgtgccgcccgctgcccccgttgccgcccgagagggccgcctgccgcctggccttagcgcgtcgccacagccctccagcgtcgcgcctcggcggccgcaggaaccacga

SEQ ID NO: 6111 - DNA, 3366 bp, Homo sapiens
  source 1..3366: mol_type = genomic DNA
atgaactctcccaacgagtcggatgggatgtcaggtcgggaaccatccttggaaatcctgccgcggacttctctgcacagcatccctgtgacagtggaggtgaagccggtgctgccaagagccatgcccagttccatggggggtgggggtggaggcagccccagccctgtggagctacggggggctctggtgggctctgtggaccccacactgcgggagcagcaactgcagcaggagctcctggcgctcaagcagcagcagcagctgcagaagcagctcctgttcgctgagttccagaaacagcatgaccacctgacaaggcagcatgaggtccagctgcagaagcacctcaagcagcagcaggagatgctggcagccaagcagcagcaggagatgctggcagccaagcggcagcaggagctggagcagcagcggcagcgggagcagcagcggcaggaagagctggagaagcagcggctggagcagcagctgctcatcctgcggaacaaggagaagagcaaagagagtgccattgccagcactgaggtaaagctgaggctccaggaattcctcttgtcgaagtcaaaggagcccacaccaggcggcctcaaccattccctcccacagcaccccaaatgctggggagcccaccatgcttctttggaccagagttcccctccccagagcggcccccctgggacgcctccctcctacaaactgcctttgcctgggccctacgacagtcgagacgacttccccctccgcaaaacagcctctgaacccaacttgaaagtgcgttcaaggctaaaacagaaggtggctgagcggagaagcagtcccctcctgcgtcgcaaggatgggactgttattagcacctttaagaagagagctgttgagatcacaggtgccgggcctggggcgtcgtccgtgtgtaacagcgcacccggctccggccccagctctcccaacagctcccacagcaccatcgctgagaatggctttactggctcagtccccaacatccccactgagatgctccctcagcaccgagccctccctctggacagctcccccaaccagttcagcctctacacgtctccttctctgcccaacatctccctagggctgcaggccacggtcactgtcaccaactcacacctcactgcctccccgaagctgtcgacacagcaggaggccgagaggcaggccctccagtccctgcggcagggtggcacgctgaccggcaagttcatgagcacatcctctattcctggctgcctgctgggcgtggcactggagggcgacgggagcccccacgggcatgcctccctgctgcagcatgtgctgttgctggagcaggcccggcagcagagcaccctcattgctgtgccactccacgggcagtccccactagtgacgggtgaacgtgtggccaccagcatgcggacggtaggcaagctcccgcggcatcggcccctgagccgcactcagtcctcaccgctgccgcagagtccccaggccctgcagcagctggtcatgcaacaacagcaccagcagttcctggagaagcagaagcagcagcagctacagctgggcaagatcctcaccaagacaggggagctgcccaggcagcccaccacccaccctgaggagacagaggaggagctgacggagcagcaggaggtcttgctgggggagggagccctgaccatgccccgggagggctccacagagagtgagagcacacaggaagacctggaggaggaggacgaggaagacgatggggaggaggaggaggattgcatccaggttaaggacgaggagggcgagagtggtgctgaggaggggcccgacttggaggagcctggtgctggatacaaaaaactgttctcagatgcccagccgctgcagcctttgcaggtgtaccaggcgcccctcagcctggccactgtgccccaccaggccctgggccgtacccagtcctcccctgctgcccctgggggcatgaagagccccccagaccagcccgtcaagcacctcttcaccacaggtgtggtctacgacacgttcatgctaaagcaccagtgcatgtgcgggaacacacacgtgcaccctgagcatgctggccggatccagagcatctggtcccggctgcaggagacaggcctgcttagcaagtgcgagcggatccgaggtcgcaaagccacgctagatgagatccagacagtgcactctgaataccacaccctgctctatgggaccagtcccctcaaccggcagaagctagacagcaagaagttgctcggccccatcagccagaagatgtatgctgtgctgccttgtgggggcatcggggtggacagtgacaccgtgtggaatgagatgcactcctccagtgctgtgcgcatggcagtgggctgcctgctggagctggccttcaaggtggctgcaggagagctcaagaatggatttgccatcatccggcccccaggacaccacgccgaggaatccacagccatgggattctgcttcttcaactctgtagccatcaccgcaaaactcctacagcagaagttgaacgtgggcaaggtcctcatcgtggactgggacattcaccatggcaatggcacccagcaggcgttctacaatgacccctctgtgctctacatctctctgcatcgctatgacaacgggaacttctttccaggctctggggctcctgaagaggttggtggaggaccaggcgtggggtacaatgtgaacgtggcatggacaggaggtgtggacccccccattggagacgtggagtaccttacagccttcaggacagtggtgatgcccattgcccacgagttctcacctgatgtggtcctagtctccgccgggtttgatgctgttgaaggacatctgtctcctctgggtggctactctgtcaccgccagatgttttggccacttgaccaggcagctgatgaccctggcagggggccgggtggtgctggccctggagggaggccatgacttgaccgccatctgtgatgcctctgaggcttgtgtctcggctctgctcagtgtagagctgcagcccttggatgaggcagtcttgcagcaaaagcccaacatcaacgcagtggccacgctagagaaagtcatcgagatccagagcaaacactggagctgtgtgcagaagttcgccgctggtctgggccggtccctgcgagaggcccaagcaggtgagaccgaggaggccgagactgtgagcgccatggccttgctgtcggtgggggccgagcaggcccaggctgcggcagcccgggaacacagccccaggccggcagaggagcccatggagcaggagcctgccctg

SEQ ID NO: 6112 - DNA, 3369 bp, Homo sapiens
  source 1..3369: mol_type = genomic DNA
atgaactctcccaacgagtcggcagatgggatgtcaggtcgggaaccatccttggaaatcctgccgcggacttctctgcacagcatccctgtgacagtggaggtgaagccggtgctgccaagagccatgcccagttccatggggggtgggggtggaggcagccccagccctgtggagctacggggggctctggtgggctctgtggaccccacactgcgggagcagcaactgcagcaggagctcctggcgctcaagcagcagcagcagctgcagaagcagctcctgttcgctgagttccagaaacagcatgaccacctgacaaggcagcatgaggtccagctgcagaagcacctcaagcagcagcaggagatgctggcagccaagcagcagcaggagatgctggcagccaagcggcagcaggagctggagcagcagcggcagcgggagcagcagcggcaggaagagctggagaagcagcggctggagcagcagctgctcatcctgcggaacaaggagaagagcaaagagagtgccattgccagcactgaggtaaagctgaggctccaggaattcctcttgtcgaagtcaaaggagcccacaccaggcggcctcaaccattccctcccacagcaccccaaatgctggggagcccaccatgcttctttggaccagagttcccctccccagagcggcccccctgggacgcctccctcctacaaactgcctttgcctgggccctacgacagtcgagacgacttccccctccgcaaaacagcctctgaacccaacttgaaagtgcgttcaaggctaaaacagaaggtggctgagcggagaagcagtcccctcctgcgtcgcaaggatgggactgttattagcacctttaagaagagagctgttgagatcacaggtgccgggcctggggcgtcgtccgtgtgtaacagcgcacccggctccggccccagctctcccaacagctcccacagcaccatcgctgagaatggctttactggctcagtccccaacatccccactgagatgctccctcagcaccgagccctccctctggacagctcccccaaccagttcagcctctacacgtctccttctctgcccaacatctccctagggctgcaggccacggtcactgtcaccaactcacacctcactgcctccccgaagctgtcgacacagcaggaggccgagaggcaggccctccagtccctgcggcagggtggcacgctgaccggcaagttcatgagcacatcctctattcctggctgcctgctgggcgtggcactggagggcgacgggagcccccacgggcatgcctccctgctgcagcatgtgctgttgctggagcaggcccggcagcagagcaccctcattgctgtgccactccacgggcagtccccactagtgacgggtgaacgtgtggccaccagcatgcggacggtaggcaagctcccgcggcatcggcccctgagccgcactcagtcctcaccgctgccgcagagtccccaggccctgcagcagctggtcatgcaacaacagcaccagcagttcctggagaagcagaagcagcagcagctacagctgggcaagatcctcaccaagacaggggagctgcccaggcagcccaccacccaccctgaggagacagaggaggagctgacggagcagcaggaggtcttgctgggggagggagccctgaccatgccccgggagggctccacagagagtgagagcacacaggaagacctggaggaggaggacgaggaagacgatggggaggaggaggaggattgcatccaggttaaggacgaggagggcgagagtggtgctgaggaggggcccgacttggaggagcctggtgctggatacaaaaaactgttctcagatgcccagccgctgcagcctttgcaggtgtaccaggcgcccctcagcctggccactgtgccccaccaggccctgggccgtacccagtcctcccctgctgcccctgggggcatgaagagccccccagaccagcccgtcaagcacctcttcaccacaggtgtggtctacgacacgttcatgctaaagcaccagtgcatgtgcgggaacacacacgtgcaccctgagcatgctggccggatccagagcatctggtcccggctgcaggagacaggcctgcttagcaagtgcgagcggatccgaggtcgcaaagccacgctagatgagatccagacagtgcactctgaataccacaccctgctctatgggaccagtcccctcaaccggcagaagctagacagcaagaagttgctcggccccatcagccagaagatgtatgctgtgctgccttgtgggggcatcggggtggacagtgacaccgtgtggaatgagatgcactcctccagtgctgtgcgcatggcagtgggctgcctgctggagctggccttcaaggtggctgcaggagagctcaagaatggatttgccatcatccggcccccaggacaccacgccgaggaatccacagccatgggattctgcttcttcaactctgtagccatcaccgcaaaactcctacagcagaagttgaacgtgggcaaggtcctcatcgtggactgggacattcaccatggcaatggcacccagcaggcgttctacaatgacccctctgtgctctacatctctctgcatcgctatgacaacgggaacttctttccaggctctggggctcctgaagaggttggtggaggaccaggcgtggggtacaatgtgaacgtggcatggacaggaggtgtggacccccccattggagacgtggagtaccttacagccttcaggacagtggtgatgcccattgcccacgagttctcacctgatgtggtcctagtctccgccgggtttgatgctgttgaaggacatctgtctcctctgggtggctactctgtcaccgccagatgttttggccacttgaccaggcagctgatgaccctggcagggggccgggtggtgctggccctggagggaggccatgacttgaccgccatctgtgatgcctctgaggcttgtgtctcggctctgctcagtgtagagctgcagcccttggatgaggcagtcttgcagcaaaagcccaacatcaacgcagtggccacgctagagaaagtcatcgagatccagagcaaacactggagctgtgtgcagaagttcgccgctggtctgggccggtccctgcgagaggcccaagcaggtgagaccgaggaggccgagactgtgagcgccatggccttgctgtcggtgggggccgagcaggcccaggctgcggcagcccgggaacacagccccaggccggcagaggagcccatggagcaggagcctgccctg

SEQ ID NO: 6113 - DNA, 3252 bp, Homo sapiens
  source 1..3252: mol_type = genomic DNA
atgagctcccaaagccatccagatggactttctggccgagaccagccagtggagctgctgaatcctgcccgcgtgaaccacatgcccagcacggtggatgtggccacggcgctgcctctgcaagtggccccctcggcagtgcccatggacctgcgcctggaccaccagttctcactgcctgtggcagagccggccctgcgggagcagcagctgcagcaggagctcctggcgctcaagcagaagcagcagatccagaggcagatcctcatcgctgagttccagaggcagcacgagcagctctcccggcagcacgaggcgcagctccacgagcacatcaagcaacaacaggagatgctggccatgaagcaccagcaggagctgctggaacaccagcggaagctggagaggcaccgccaggagcaggagctggagaagcagcaccgggagcagaagctgcagcagctcaagaacaaggagaagggcaaagagagtgccgtggccagcacagaagtgaagatgaagttacaagaatttgtcctcaataaaaagaaggcgctggcccaccggaatctgaaccactgcatttccagcgaccctcgctactggtacgggaaaacgcagcacagttcccttgaccagagttctccaccccagagcggagtgtcgacctcctataaccacccggtcctgggaatgtacgacgccaaagatgacttccctcttaggaaaacagcttctgaaccgaatctgaaattacggtccaggctaaagcagaaagtggccgaaagacggagcagccccctgttacgcaggaaagacgggccagtggtcactgctctaaaaaagcgtccgttggatgtcacagactccgcgtgcagcagcgccccaggctccggacccagctcacccaacaacagctccgggagcgtcagcgcggagaacggtatcgcgcccgccgtccccagcatcccggcggagacgagtttggcgcacagacttgtggcacgagaaggctcggccgctccacttcccctctacacatcgccatccttgcccaacatcacgctgggcctgcctgccaccggcccctctgcgggcacggcgggccagcaggacgccgagagactcacccttcccgccctccagcagaggctctcccttttccccggcacccacctcactccctacctgagcacctcgcccttggagcgggacggaggggcagcgcacagccctcttctgcagcacatggtcttactggagcagccgccggcacaagcacccctcgtcacaggcctgggagcactgcccctccacgcacagtccttggttggtgcagaccgggtgtccccctccatccacaagctgcggcagcaccgcccactggggcggacccagtcggccccgctgccccagaacgcccaggctctgcagcacctggtcatccagcagcagcatcagcagtttctggagaaacacaagcagcagttccagcagcagcaactgcagatgaacaagatcatccccaagccaagcgagccagcccggcagccggagagccacccggaggagacggaggaggagctccgtgagcaccaggctctgctggacgagccctacctggaccggctgccggggcagaaggaggcgcacgcacaggccggcgtgcaggtgaagcaggagcccattgagagcgatgaggaagaggcagagcccccacgggaggtggagccgggccagcgccagcccagtgagcaggagctgctcttcagacagcaagccctcctgctggagcagcagcggatccaccagctgaggaactaccaggcgtccatggaggccgccggcatccccgtgtccttcggcggccacaggcctctgtcccgggcgcagtcctcacccgcgtctgccaccttccccgtgtctgtgcaggagccccccaccaagccgaggttcacgacaggcctcgtgtatgacacgctgatgctgaagcaccagtgcacctgcgggagtagcagcagccaccccgagcacgccgggaggatccagagcatctggtcccgcctgcaggagacgggcctccggggcaaatgcgagtgcatccgcggacgcaaggccaccctggaggagctacagacggtgcactcggaagcccacaccctcctgtatggcacgaaccccctcaaccggcagaaactggacagtaagaaacttctaggctcgctcgcctccgtgttcgtccggctcccttgcggtggtgttggggtggacagtgacaccatatggaacgaggtgcactcggcgggggcagcccgcctggctgtgggctgcgtggtagagctggtcttcaaggtggccacaggggagctgaagaatggctttgctgtggtccgcccccctggacaccatgcggaggagagcacgcccatgggcttttgctacttcaactccgtggccgtggcagccaagcttctgcagcagaggttgagcgtgagcaagatcctcatcgtggactgggacgtgcaccatggaaacgggacccagcaggctttctacagcgaccccagcgtcctgtacatgtccctccaccgctacgacgatgggaacttcttcccaggcagcggggctcctgatgaggtgggcacagggcccggcgtgggtttcaacgtcaacatggctttcaccggcggcctggacccccccatgggagacgctgagtacttggcggccttcagaacggtggtcatgccgatcgccagcgagtttgccccggatgtggtgctggtgtcatcaggcttcgatgccgtggagggccaccccacccctcttgggggctacaacctctccgccagatgcttcgggtacctgacgaagcagctgatgggcctggctggcggccggattgtcctggccctcgagggaggccacgacctgaccgccatttgcgacgcctcggaagcatgtgtttctgccttgctgggaaacgagcttgatcctctcccagaaaaggttttacagcaaagacccaatgcaaacgctgtccgttccatggagaaagtcatggagatccacagcaagtactggcgctgcctgcagcgcacaacctccacagcggggcgttctctgatcgaggctcagacttgcgagaacgaagaagccgagacggtcaccgccatggcctcgctgtccgtgggcgtgaagcccgccgaaaagagaccagatgaggagcccatggaagaggagccgcccctg

SEQ ID NO: 6114 - DNA, 1482 bp, Homo sapiens
  source 1..1482: mol_type = genomic DNA
atggagctgagcctggagagcctggggggcctgcacagcgtggcccacgcgcaggcgggcgagctgctgagcccgggccacgcgcgctcggcggcggcgcagcaccgcggcctggtggcgcccgggcgcccgggcctggtggccggcatggcgagcctgctggacggcggcggcggcggcggcggtgggggcgccgggggcgcgggcggcgcgggcagcgcgggcggcggcgcggacttccgcggggaactggcgggcccgctgcacccggcaatgggcatggcctgcgaggcgccgggcctgggcggcacctacacgacgctcacgcccctgcagcacctgccgccgctcgcggccgtggccgacaagttccaccagcacgcggcggccgcggccgtggccggggcgcacggcggccatccccacgcgcacccgcacccggcggccgcgccgcccccgccacccccgccgcagcgtctggcggccagcgtgagcggcagcttcaccctcatgcgcgacgagcgggcggcgctcgcctccgtgggccacctctacggaccctacggcaaggagctgcccgccatggggtcgccgctgtcgccgctgcccaacgcgctgccgcccgcgctgcacggcgccccgcagcccccgccgccgccaccacccccgccgctggccgcctacggcccgccaggccacctggctggggacaagctgctgccgcccgccgccttcgagccgcacgccgcgctgctgggacgcgcggaggacgcactggcccgcgggctgcccggaggcggcggcggcacaggcagcggcggagcgggcagcgggagcgccgcggggctgctggcgccgctgggcgggctggcggcggccggggcgcacgggccgcacgggggaggcggcggccccggcgggagcggcggcggccccagcgcgggcgcagcggccgaggagatcaacaccaaggaggtggcgcagcgcatcacggcggagctgaagcgctacagcatcccgcaggcaatcttcgcgcagcggatcctgtgtcgctctcagggcacgctctccgacctgctgcgcaaccccaagccgtggagcaagctcaaatccggccgcgagaccttccgcaggatgtggaagtggctgcaggagccagagttccagcgcatgtcggcgctgcgcttggcagcctgcaagcgcaaggaacaggagcagcagaaggagcgcgccctgcagcccaagaagcagcgcctggtgttcaccgacctgcagcgacgcacgctgatcgccatcttcaaggagaacaagcggccgtccaaggagatgcaggtcaccatctcgcagcagctcggcttggagctcaacaccgtcagcaacttcttcatgaacgcgcggcgccgctgcatgaaccgctgggctgaggagcccagcacggcccccgggggccccgccggcgccacggccactttctccaaggcc

SEQ ID NO: 6115 - DNA, 8367 bp, Homo sapiens
  source 1..8367: mol_type = genomic DNA
atgcggctcgggggcgggcagctggtgtcagaggagctgatgaacctgggcgagagcttcatccagaccaacgacccgtcgctgaagctcttccagtgcgccgtctgcaacaagttcacgacggacaacctggacatgctgggcctgcacatgaacgtggagcgcagcctgtcggaggacgagtggaaggcggtgatgggggactcataccagtgcaagctctgccgctacaacacccagctcaaggccaacttccagctgcactgcaagacagacaagcacgtgcagaagtaccagctggtggcccacatcaaggagggcggcaaggccaacgagtggaggctcaagtgtgtggccatcggcaaccccgtgcacctcaagtgcaacgcctgtgactactacaccaacagcctggagaagctgcggctgcacacggtcaactccaggcacgaggccagcctgaagttgtacaagcacctgcagcagcatgagagtggtgtagaaggtgagagctgctactaccactgcgttctgtgcaactactccaccaaggccaagctcaacctcatccagcatgtgcgctccatgaagcaccagcgaagcgagagcctgcgaaagctgcagcggctgcagaagggccttccagaggaggacgaggacctggggcagatcttcaccatccgcaggtgcccctccacggacccagaagaagccattgaagatgttgaaggacccagtgaaacagctgctgatccagaggagcttgctaaggaccaagagggcggagcatcgtccagccaagcagagaaggagctgacagattctcctgcaacctccaaacgcatctccttcccaggtagctcagagtctcccctctcttcgaagcgaccaaaaacagctgaggagatcaaaccggagcagatgtaccagtgtccctactgcaagtacagtaatgccgatgtcaaccggctccgggtgcatgccatgacgcagcactcggtgcaacccatgcttcgctgccccctgtgccaggacatgctcaacaacaagatccacctccagctgcacctcacccacctccacagcgtggcacctgactgcgtggagaagctcattatgacggtgaccacccctgagatggtgatgccaagcagcatgttcctcccagcagctgttccagatcgagatgggaattccaatttggaagaggcaggaaagcagcctgaaacctcagaggatctgggaaagaacatcttgccatccgcaagcacagagcaaagcggagatttgaaaccatcccctgctgacccaggctctgtgagagaagactcaggcttcatctgctggaagaaggggtgcaaccaggttttcaaaacttctgctgcccttcagacgcattttaatgaagtgcatgccaagaggcctcagctgccggtgtcagatcgccatgtgtacaagtaccgctgtaatcagtgtagcctggccttcaagaccattgaaaagttgcagctccattctcagtaccatgtgatcagagctgccaccatgtgctgtctttgtcagcgcagtttccgaactttccaggctctgaagaagcaccttgagacaagccacctggagctgagtgaggctgacatccaacagctttatggtggcctgctggccaatggggacctcctggcaatgggagaccccactctggcagaggaccataccataattgttgaggaagacaaggaggaagagagtgacttggaagataaacagagcccaacgggcagtgactctgggtcagtacaagaagactcgggctcagagccaaagagagctctgcctttcagaaaaggtcccaattttactatggaaaagttcctagacccttctcgcccttacaagtgtaccgtctgcaaggaatctttcactcaaaagaatatcctgctagtacactacaattctgtctcccacctgcataagttaaagagagcccttcaagaatcagcaaccggtcagccagaacccaccagcagcccagacaacaaaccttttaagtgtaacacttgtaatgtggcctacagccagagttccactctggagatccatatgaggtctgtgttacatcaaaccaaggcccgggcagccaagctggaggctgcaagtggcagcagcaatgggactgggaacagcagcagtatttccttgagctcctccacgccaagtcctgtgagcaccagtggcagtaacacctttaccacctccaatccaagcagtgctggcattgctccaagctctaacttactaagccaagtgcccactgagagtgtagggatgccacccctggggaatcctattggtgccaacattgcttccccttcagagcccaaagaggccaatcggaagaaactggcagatatgattgcatccaggcagcagcaacaacagcagcagcaacagcaacaacaacaacaacaacaacaacaacaagcacaaacgctggcccaggcccaggctcaagttcaagctcacctgcagcaggagctgcagcaacaggctgccctgatccagtctcagctgtttaaccccaccctccttcctcacttccccatgacaactgagaccctgctgcaactacagcagcagcagcacctcctcttccctttctacatccccagtgctgagttccagcttaaccccgaggtgagcttgccagtgaccagtggggcactgacactgactgggacaggcccaggcctgctggaagatctgaaggctcaggttcaggtcccacagcagagccatcagcagatcttgccgcagcagcagcagaaccaactctctatagcccagagtcactctgccctccttcagccaagccagcaccccgaaaagaagaacaaattggtcatcaaagaaaaggaaaaagaaagccagagagagagggacagcgccgaggggggagagggcaacaccggtccgaaggaaacactgccagatgccttgaaggccaaagagaagaaagagttggcaccagggggtggttctgagccttccatgctccctccacgcattgcttcagatgccagagggaacgccaccaaggccctgctggagaactttggctttgagttggtcatccagtataatgagaacaagcagaaggtgcagaaaaagaatgggaagactgaccagggagagaacctggaaaagctcgagtgtgactcctgcggcaagttgttttccaacatcttgattttaaagagtcatcaagagcacgttcatcagaattactttcctttcaaacagctcgagaggtttgccaaacagtacagagaccactacgataaactgtacccactgaggccccagaccccagagccaccaccacctccccctccaccccctccacccccacttccggcagcgccgcctcagccggcgtccacaccagccatccccgcatcagccccacccatcacctcacctacaattgcaccggcccagccatcagtgccgctcacccagctctccatgccgatggagctgcccatcttctcgccgctgatgatgcagacgatgccgctgcagaccttgccggctcagctacccccgcagctgggacctgtggagcctctgcctgcggacctggcccaactctaccagcatcagctcaatccaaccctgctccagcagcagaacaagaggcctcgcaccaggatcacagatgatcagctccgagtcttgcggcaatattttgacattaacaactcccccagtgaagagcaaataaaagagatggcagacaagtccgggttgccccagaaagtgatcaagcactggttcaggaacactctcttcaaagagaggcagcgtaacaaggactccccttacaacttcagtaatcctcctatcaccagcctggaggagctcaagattgactcccggcccccttcgccggaacctccaaagcaggagtactggggaagcaagaggtcttcaagaacaaggtttacggactaccagctgagggtcttacaggacttcttcgatgccaatgcttacccaaaggatgatgaatttgagcaactctctaatttactgaaccttccaacccgagtgatagtggtgtggtttcagaatgcccgacagaaggccaggaagaattatgagaatcagggagagggcaaagatggagagcggcgtgagcttacaaatgatagatacattcgaacaagcaacttgaactaccagtgcaaaaaatgtagcctggtgtttcagcgcatctttgatctcatcaagcaccagaagaagctgtgttacaaggatgaggatgaggaggggcaggacgacagccaaaatgaggattccatggatgccatggaaatcctgacgcctaccagctcatcctgcagtaccccgatgccctcacaggcttacagcgccccagcaccatcagccaataatacagcttcctccgctttcttgcagcttacagcggaggctgaggaactggccaccttcaattcaaaaacagaggcaggcgatgagaaaccaaagctggcggaagctcccagtgcacagccaaaccaaacccaagaaaagcaaggacaaccaaagccagagctgcagcagcaagagcagcccgagcagaagaccaacactccccagcagaagctcccccagctggtgtccctgccttcgttgccacagcctcctccacaagcgccccctccacagtgccccttaccccagtcgagccccagtccttcccagctctcccacctgcccctcaagcccctccacacatcaactcctcaacagctcgcaaacctacctcctcagctaatcccctaccagtgtgaccagtgtaagttggcatttccgtcatttgagcactggcaggagcatcagcagctccacttcctgagcgcgcagaaccagttcatccacccccagtttttggacaggtccctggatatgcctttcatgctctttgatcccagtaacccactcctggccagccagctgctctctggggccatacctcagattccagcaagctcagccacttctccttcaactccaacctccacaatgaacactctcaagaggaagctggaggaaaaggccagtgcaagccctggcgaaaacgacagtgggacaggaggagaagagcctcagagagacaagcgtttgagaacaaccatcacaccggaacaactagaaattctctaccagaagtatctactggattccaatccgactcgaaagatgttggatcacattgcacacgaggtgggcttgaagaaacgtgtggtacaagtctggtttcagaacacccgagctcgggaaaggaaaggacagttccgggctgtaggcccagcgcaggcccacaggagatgccctttttgcagagcgctcttcaaagccaagactgctcttgaggctcatatccggtcccgtcactggcatgaagccaagagagctggctacaacctaactctgtctgcgatgctcttagactgtgatgggggactccagatgaaaggagatatttttgacggaactagcttttcccacctacccccaagcagtagtgatggtcagggtgtccccctctcacctgtgagtaaaaccatggaattgtcacccagaactcttctaagcccttcctccattaaggtggaagggattgaagactttgaaagcccctccatgtcctcagttaatctaaactttgaccaaactaagctggacaacgatgactgttcctctgtcaacacagcaatcacagataccacaactggagacgagggcaacgcagataacgacagtgcaacgggaatagcaactgaaaccaaatcctcttctgcacccaacgaagggttgaccaaagcggccatgatggcaatgtctgagtatgaagatcggttgtcatctggtctggtcagcccggccccgagcttttatagcaaggaatatgacaatgaaggtacagtggactacagtgaaacctcaagccttgcagatccctgctccccgagtcctggtgcgagtggatctgcaggcaaatctggtgacagcggagatcggcctgggcagaaacgttttcgcactcaaatgaccaatctgcagctgaaggtcctcaagtcatgctttaatgactacaggacacccactatgctagaatgtgaggtcctgggcaatgacattggactgccaaagagagtcgttcaggtctggttccagaatgcccgggcaaaagaaaagaagtccaagttaagcatggccaagcattttggtataaaccaaacgagttatgagggacccaaaacagagtgcactttgtgtggcatcaagtacagcgctcggctgtctgtacgtgaccatatcttttcccaacagcatatctccaaagttaaagacaccattggaagccagctggacaaggagaaagaatactttgacccagccaccgtacgtcagttgatggctcaacaagagttggaccggattaaaaaggccaacgaggtccttggactggcagctcagcagcaagggatgtttgacaacacccctcttcaggcccttaaccttcctacagcatatccagcgctccagggcattcctcctgtgttgctcccgggcctcaacagcccctccttgccaggctttactccatccaacacagctttaacgtctcctaagccgaacttgatgggtctgcccagcacaactgttccttcccctggcctccccacttctggattaccaaataaaccgtcctcagcgtcgctgagctccccaaccccagcacaagccacgatggcgatgggccctcagcaacccccccagcagcagcagcagcagcagcaaccacaggtgcagcagcctcccccgccgccagcagcccagccgccacccacaccacagctcccactgcaacagcagcagcaacgcaaggacaaagacagtgagaaagtaaaggagaaggaaaaggcacacaaagggaaaggggaacccctgcctgtccccaagaaggagaaaggagaggcccccacggcaactgcagccacgatctcagccccgctgcccaccatggagtatgcggtagaccctgcacagctgcaggccctgcaggccgcgttgacttcggaccccacagcattgctcacaagccagttccttccttactttgtaccaggcttttctccttattatgctccccagatccctggcgccctgcagagcgggtacctgcagcctatgtatggcatggaaggcctgttcccctacagccctgcactgtcgcaggccctgatggggctgtccccaggctccctactgcagcagtaccagcaataccagcagagtctgcaggaggcaattcagcagcagcagcagcggcaactacagcagcagcagcagcaaaaagtgcagcagcagcagcccaaagcaagccaaaccccagtcccccccggggctccttccccagacaaagaccctgccaaagaatcccccaaaccagaagaacagaaaaacaccccccgtgaggtgtcccccctcctgccgaaactccctgaagagccagaagcagaaagcaaaagtgcggactccctctacgaccccttcattgttccaaaggtgcagtacaagttggtctgccgcaagtgccaggcgggcttcagcgacgaggaggcagcgaggagccacctgaagtccctctgcttcttcggccagtctgtggtgaacctgcaagagatggtgcttcacgtccccaccggcggcggcggcggtggcagtggcggcggcggcggcggtggcggcggcggcggcggcggcggctcgtaccactgcctggcgtgcgagagcgcgctctgtggggaggaagctctgagtcaacatctcgagtcggccttgcacaaacacagaacaatcacgagagcagcaagaaacgccaaagagcaccctagtttattacctcactctgcctgcttccccgatcctagcaccgcatctacctcgcagtctgccgctcactcaaacgacagcccccctcccccgtcggccgccgccccctcctccgcttccccccacgcctccaggaagtcttggccgcaagtggtctcccgggcttcggcagcgaagcccccttcttttcctcctctctcctcatcttcaacggttacctcaagttcatgcagcacctcaggggttcagccctcgatgccaacagacgactattcggaggagtctgacacggatctcagccaaaagtccgacggaccggcgagcccggtggagggtcccaaagaccccagctgccccaaggacagtggtctgaccagtgtaggaacggacaccttcagattg

SEQ ID NO: 6116 - DNA, 7716 bp, Homo sapiens
  source 1..7716: mol_type = genomic DNA
atggccacccttaactcagcctctaccactggtaccaccccctcccctgggcacaatgccccgtccctgccttcggacaccttctcctccagcaccccctctgatcctgtcaccaaagatccccctgctgcctcctccacctctgagaacatgaggtcctcagagccagggggacagctcctggagtcgggctgtggcctcgtcccaccaaaggagattggggagccccaggaagggcctgactgtggtcacttcccaccaaatgacccaggggtggaaaaggacaaggagcaggaggaggaagaagaagggctccctcccatggacctaagcaaccacttattcttcacagctggaggtgaggcctacctagtggccaagctgtccctgccaggtggcagtgaactcctgttaccaaagggcttcccctggggtgaggcgggcatcaaggaagagcccagtctgcccttccttgcctacccacccccctcacacctcactgcccttcacatccaacatggctttgacccaatccaaggctttagctcttctgaccaaattctgtcccatgatacctcagcaccatctccggctgcctgtgaggaaaggcatggagctttctggagctaccagctggctccaaatccacccggagatcccaaagatggccccatggggaacagcgggggcaaccacgtggcggtcttctggctctgccttctgtgccgcctgggtttcagcaagccccaggcctttatggatcacacacagtctcatggggtgaagctaacccctgcccaatatcagggcctgtcaggtagcccagctgtactccaggagggagatgaaggctgcaaggccctcataagctttctggagccaaaactccctgctcgcccctcttctgacataccccttgacaacagcagcacagtgaacatggaggcgaatgtggcccagacagaggatggcccccctgaggcagaagtccaggcccttatcctcctggatgaagaagttatggccctcagcccaccctctccacccacagccacctgggaccccagcccaacccaagccaaagaatcgccagtagcagcaggcgaggcagggccagattggttccctgaggggcaagaagaggatggagggctctgccccccactcaaccaaagctcacccacctccaaggaggggggcactctccctgccccagtgggctcccccgaagaccccagtgacccaccccagccctatcgcctagctgatgactacaccccagcccctgcagccttccagggcctcagcctgtccagccacatgtccctgctccactcacgcaactcctgcaagacactcaagtgtcccaagtgcaactggcactacaagtaccagcagaccctggatgtgcacatgcgagagaagcaccctgagagcaacagtcactgcagctactgcagtgctgggggcgcccacccccgccttgctcgtggagagagctacaactgtggctacaaaccctaccgctgtgacgtctgcaactactctacaaccaccaaaggcaacctcagcatccatatgcagtctgacaagcacctggccaacctacagggcttccaggcgggccctggtgggcagggaagtccaccagaggcatcactcccaccctccgcgggagacaaagagcctaagaccaaatcatcctggcagtgcaaggtgtgcagctacgagacaaacatctcccgtaacctgcgcatccatatgacctctgagaagcacatgcagaatgtcctaatgctgcaccaggggctgccgctgggcctgccacctggattgatggggccaggccctcctcccccaccaggggctacccccactagcccccctgaactcttccagtactttgggccccaggccctagggcagcctcagactcccttggctggcccggggctgaggccagacaagcccctggaagcccagctacttctcaatggtttccaccacgtaggagcacctgcccgcaagttccccacatccgcccctggaagcctatcccctgatgcccacctgcctccaagtcagctcctgggttcctcatctgacagcctgcccacctcaccacccccagacgacagcctgtccctgaaggtgttccgctgcctagtgtgccaggccttcagcacagacagcctggagctgctgctctaccactgcagcataggccggagcctcccggaagctgaatggaaggaggtggctggtgacacccaccgctgcaagctttgctgctatggcacccagctcaaggccaacttccaactccacctcaagactgacaaacatgctcagaagtaccagctggcagcccacctgcgggaggggggtggagccatgggcaccccttccccagcatccctgggagatggggctccttatgggtctgtctccccactacacctgcgctgcaacatctgtgactttgagtccaacagcaaggagaagatgcagctgcatgccaggggtgcagcccacgaagaaaacagccaaatctataagtttctgctggacatggagggagcggaggcaggggcagagctggggctataccactgcctgttgtgtgcgtgggagacaccctcccgcttggctgtgctgcaacacctgcgcacacctgcccaccgcgatgcccaggcccagaggcgtctgcagctgctacagaatggcccaaccactgaggaaggactcgcagctcttcagagcatcctgagcttcagccacgggcagctccggactcccgggaaggctcctgtcacccccttagctgagccacccacccctgagaaagatgcccagaacaagacagaacaattggcttcagaagagacagaaaacaagactggcccttccagagacagtgccaaccagaccacggtatactgctgtccatactgcagcttcctgagcccagagtccagccaggtgagggctcatacactctcccagcatgcagtgcagcccaagtacagatgcccactgtgccaggaacagctggtgggccggcctgccctgcacttccaccttagccaccttcacaacgtggtgcccgagtgcgttgagaagctgctgcttgtagctacaactgtagaaatgacatttacaaccaaagtgctgtctgcacccacattaagccctctggacaatggccaagaaccccccactcatgggccagagcctacaccgagcagagaccaggcagcagaaggccctaacctgaccccagaagccagtccagatcctcttcctgagcctcccctggcctcagttgaggtcccagacaaaccctcaggaagccctggccaacccccttctccagccccatctccagtccctgaacctgatgcccaagctgaagacgtagctcctccgcccaccatggctgaggaggaagaggggaccactggggagctccgctctgcagagccagctccagctgactctcgccaccctctgacctatcggaaaaccaccaactttgccctggacaagtttctcgaccctgcccggccctataagtgcactgtgtgtaaggagtccttcacccagaagaatattctgttggttcattataattctgtctcccaccttcacaagatgaagaaggctgccattgacccctctgcccctgcacggggagaggccggtgccccacccaccaccactgctgccacagacaagccctttaagtgcacagtctgcagagtctcctacaaccagagctccaccctggagatccacatgcggtcagttctgcatcagactcgctctcggggaaccaagactgattccaagattgaagggccagaacgcagccaagaagagcccaaggaaggcgagacagagggggaggtgggcactgagaagaagggccctgacaccagtggcttcatatctggattgcctttcctgtcccctcccccacctcccttggacctgcaccgattcccagcccctctcttcaccccaccagtcctgccccccttccctctggtgcccgaatcactgcttaagctccagcagcagcagctgctcctgcccttctacctccacgatctcaaggtggggcccaagctgacactagctgggcctgcacctgtgctgtccctgccagctgccacccctcctcctccaccccaacctcccaaggctgagctggctgagcgggagtgggagcggccccccatggccaaagagggtaatgaggcagggccttcctcaccccccgacccattgcccaacgaggctgcccgcactgcagccaaagcccttctagaaaactttggctttgagctggtgatccagtacaatgaagggaagcaagctgtgccccctccccctaccccacccccacctgaggccctcgggggtggggacaagctggcctgtggggcctgtgggaaactcttctccaatatgcttatcctcaagacacacgaggaacatgtccaccgccgctttctgccctttgaagccctgagccgttatgctgctcagtttcgaaagagctatgacagcctatacccgccccttgcagagcctcccaaacctcctgatgggtctctggattcacctgttccccatctgggcccacccttcctggtcccagagcctgaggcaggggggacccgtgcccctgaagagcgaagtcgagcagggggacactggcccatagaagaggaagaaagctccagagggaatcttcctcccctggtgcctgccggccgccggttctccagaaccaagttcacagagttccagacccaagccctgcagtctttctttgagactagcgcctaccccaaagacggagaggtggagcgactcgcaagtctgttgggtctggctagccgtgtggtggtggtgtggttccagaatgcccgccagaaagcacgcaaaaatgcctgtgagggtgggtccatgccaaccggaggaggcactgggggagcctccggctgcaggcgttgccacgccactttctcctgtgtttttgagttggtgcgccacctcaagaagtgctatgatgaccagacccttgaagaggaggaggaagaggcagagagaggggaagaggaggaagaggtggaagaagaagaagtagaggaggaacagggccttgaacctccagcagggcctgagggcccattaccagagcctccagatggggaggagctgagccaagcagaggcaacaaaggcaggaggcaaagagcctgaagagaaggctactccatcaccttccccagcccatacctgtgaccagtgtgccatttctttctccagccaggacctcctgaccagtcaccgccgactacatttcctgccatctctgcagcccagtgctcccccccaactcctagatctgcccttgctggtgtttggggagagaaaccccctggtggcagccacctcaccaatgccaggtccacctctcaaacggaagcatgaggacggcagcttgtctcccacaggcagtgaagcagggggaggaggggagggcgagccccccagggacaagcgcctgcgcaccaccatcttgcctgagcagctagagatcctgtaccgttggtacatgcaggattccaacccaacacgcaagatgctcgactgcatctccgaggaggtggggctcaaaaagcgagtggtacaggtctggttccagaataccagggcccgggagaggaaaggccagtttcgaagcacccctgggggggtgcctagtccagcagtgaaaccgcctgccacagccacccctgcatccttgcccaagttcaacctcttattaggcaaggtagatgatggcactgggagggaagccccaaagagggaagcacctgcttttccctaccccactgccacgcttgcttctgggccccagcctttcctaccacctgggaaagaggccaccaccccaacaccagagccacctctacctctcctacctccccctccacccagtgaggaagagggcccagaggaaccacctaaagcttctccagagagtgaggcttgcagtctctctgcaggagatctgagtgattcatctgcttccagcctagctgaaccagaatcccctggggctggagggaccagtgggggacctggaggtgggactggggttccagatggaatggggcagcggcgctacaggacccagatgagcagcctgcagctgaagatcatgaaagcctgctatgaagcttaccgcacccccaccatgcaggagtgtgaggtgctgggagaggagattgggctgcccaagagagtcatccaggtctggttccagaatgctcgtgccaaggaaaagaaggccaaactacaggggacagccgctgggagcactgggggcagcagtgagggcctcttagcagcccagcgcactgactgcccctattgtgatgtcaagtatgatttctatgtctcctgccgaggccatctcttttcccgtcagcacctggccaagctcaaggaggcggttcgagcccagctgaagagtgaaagcaagtgctacgacttggccccagcacctgaggctcccccagctctcaaggccccacctgccaccacacctgcctccatgcccctcggggctgccccaaccttgcctcgcctggcgccggtcctcttatctggcccagctctggctcagcccccgctgggcaacttagctcctttcaattcaggcccggcagcctcctcaggcctcctcggcctcgccacttcggtcctgcctaccaccacagtggtccagactgctggcccaggccgccccttacctcagagacccatgcccgaccaaaccaacacctccacagcaggcaccactgaccctgtcccaggccctcctactgagcccttgggggacaaggtctccagtgagcgaaagccagttgcaggccccaccagctcctccaatgatgccctcaagaacctcaaagcattgaagaccactgtcccagccctgttggggggccagttcctgccctttccattgccccctgctgggggaacagcaccgccagctgtctttggcccccagctacagggggcctacttccaacagctctatggcatgaagaaggggctatttcccatgaaccccatgatacctcagaccctcattgggctgctccccaatgccctcctccagccgccaccccagccccctgagcccacagccacagcacctccaaagcctcctgaactgcctgctccaggggagggggaagctggtgaggttgatgagctgctgacaggcagcactggcatctccaccgtggatgtaacccatcgctacctgtgccgccagtgcaagatggcatttgacggggaggccccggctactgcccaccagagatccttctgcttctttgggcggggctctgggggctccatgccacccccattgcgggtgcccatctgcacctaccactgcctggcatgtgaggtgctgctgagtgggcgtgaagccctagcctcccacctgcgctcctcggcccacaggcgcaaggcagccccacctcaagggggcccacccatctccatcaccaacgccgccactgctgcctcggctgctgtggcttttgccaaagaggaagcaagattacctcacacggactccaacccaaaaactacgactacctctacacttctagcttta

SEQ ID NO: 6117 - DNA, 1581 bp, Homo sapiens
  source 1..1581: mol_type = genomic DNA
atgtccgaggactcgagcgccctgccctggtccatcaacagggacgattacgagctgcaggaggtgatcgggagtggagcaactgctgtagtccaagcagcttattgtgcccctaaaaaggagaaagtggcaatcaaacggataaaccttgagaaatgtcaaactagcatggatgaactcctgaaagaaattcaagccatgagtcaatgccatcatcctaatattgtatcttactacacatcttttgtggtaaaagatgagctgtggcttgtcatgaagctgctaagtggaggttctgttctggatattattaagcacattgtggcaaaaggggaacacaaaagtggagtcctagatgaatctaccattgctacgatactccgagaagtactggaagggctggaatatctgcataaaaatggacagatccacagagatgtgaaagctggaaacattcttcttggagaagatggctcagtacagattgcagactttggggttagtgcttttttagcaactggtggtgatattacccgaaataaagtgagaaagacctttgttggcaccccttgttggatggcacctgaagttatggaacaggtccgtggttatgatttcaaagctgatatttggagttttggaattacagcaattgaattggctacaggggcggctccttatcataaatatccaccaatgaaggttttaatgctgacactgcagaacgatcctccttctttggaaactggtgttcaagataaagaaatgctgaaaaaatatggaaaatcatttagaaaaatgatttcattgtgccttcaaaaagatccagaaaaaagaccaacagcagcagaactattaaggcacaaatttttccagaaagcaaagaataaagaatttcttcaagaaaaaacattgcagagagcaccaaccatttctgaaagagcaaaaaaggttcggagagtaccaggttccagtgggcgtcttcataagacagaggatggaggctgggagtggagtgatgatgaatttgatgaagaaagtgaggaagggaaagcagcaatttcacaactcaggtctccccgagtgaaagaatcaatatcaaattctgagctctttccaacaactgatcctgtgggtactttgctccaagttccagaacagatctctgctcatctacctcagccagctgggcagattgctacacagccaactcaagtctctctcccacccaccgcagagccagcaaaaacagctcaggctttgtcttcaggatcaggttcacaagaaaccaagatcccaatcagtctagtactaagattaaggaattccaaaaaagaactaaatgatattcgatttgaatttactcctgggagagatacagcagagggtgtctctcaggaactcatttctgctggcctggtcgacggaagggatttagtaatagtggcagctaatttgcagaaaattgtggaagaacctcagtcaaatcgatctgtcactttcaaactggcatctggtgtcgaaggctcagatattcctgatgatggtaaactgataggatttgcccagctcagcatcagc

SEQ ID NO: 6118 - DNA, 804 bp, Homo sapiens
  source 1..804: mol_type = genomic DNA
atggcccagcccctgtgcccgccgctctccgagtcctggatgctctctgcggcctggggcccaactcggcggccgccgccctccgacaaggactgcggccgctccctcgtctcgtccccagactcatggggcagcaccccagccgacagccccgtggcgagccccgcgcggccaggcaccctccgggacccccgcgccccctccgtaggtaggcgcggcgcgcgcagcagccgcctgggcagcgggcagaggcagagcgccagtgagcgggagaaactgcgcatgcgcacgctggcccgcgccctgcacgagctgcgccgctttctaccgccgtccgtggcgcccgcgggccagagcctgaccaagatcgagacgctgcgcctggctatccgctatatcggccacctgtcggccgtgctaggcctcagcgaggagagtctccagcgccggtgccggcagcgcggtgacgcggggtcccctcggggctgcccgctgtgccccgacgactgccccgcgcagatgcagacacggacgcaggctgaggggcaggggcaggggcgcgggctgggcctggtatccgccgtccgcgccggggcgtcctggggatccccgcctgcctgccccggagcccgagctgcacccgagccgcgcgacccgcctgcgctgttcgccgaggcggcgtgccctgaagggcaggcgatggagccaagcccaccgtccccgctccttccgggcgacgtgctggctctgttggagacctggatgcccctctcgcctctggagtggctgcctgaggagcccaag

SEQ ID NO: 6119 - DNA, 1191 bp, Homo sapiens
  source 1..1191: mol_type = genomic DNA
atggcccagtcgcctcctccgcagagcctcctcggccacgaccactggatcttcgcccagggctggggctgggccggccactgggactccacgtccccggcctcctcctccgattcgtcgggttcgtgcccctgcgacggcgcccgcggactcccgcagccacagcctccgagctgcagctcccgagccgcagaggcagccgcgacgacgcccagacgagcgcgcaccggaccagcgggcggacagcggcagagcgccagcgagcgggagaaactgcgcatgcgcacgctggcccgcgccctgcacgagttgcgccgctttctgcctccctccttggcgccggccggccagagcctgaccaagatcgagacgctgcgcctggccatccgctacatcggccacctatcggccgtgctgggtctcagcgaggagagtctgcagtgccggcgcaggcagcgcggggacgcggggtccccttggggctgcccgctgtgccccgaccgtggccccgcagaggcgcagacgcaggcggaggggcaggggcaagggcaggggcaggggcaggggcaagggcaggggcaaggacaggggcaaggacaggggcaagggcaggggcgcaggccgggcctggtctccgccgtcctcgccgaggcgtcctggggatccccgtccgcctgccccggagcccaagccgcacccgagcgcctggggaggggggtccacgacacggatccctgggcaacacccccttactgccccaagatacagtcgcccccgtattcgtcccaagggacaacctccgacgcgtctctttggacgccaccccaaggctgtccctggacgcagtcgtccccagagccccggaacccaccagtgccctggacggcggccccagcaactttggagctggccgcagtgtaccagggtctctctgtgtctccagagccctgtctgtcgctgggagctccatctctcctgccccacccatcatgccagagactgcagcctcagacccccgggaggtgctggagccacagtgcagaggtggtgcccaactcagaggaccagggaccgggcgccgccttccagctcagtgaagcaagccctccccagagctcaggcctgcggttcagtggctgccctgaactttggcaagaagatctggagggggcccgcctgggcatcttctac

SEQ ID NO: 6120 - DNA, 321 bp, Homo sapiens
  source 1..321: mol_type = genomic DNA
atggagctgaactccctgctgatcctgctggaggcggccgagtacctggagcgcagggatcgagaggccgagcacggctacgcctcggtgctgcccttcgacggcgacttcgccagggagaaaacaaaggcggccggcctggtgcgcaaggccccgaacaacagcggcatcctgggaggcccgggagccctggctggcctgtggggtcctgcctggacacggaaggtggcctggagctgggagcgaggtccccctgcctcgttatcctccaggcagatgctgtggcacaccctgtggtgctgggaattgtgtgcccgcgtc

SEQ ID NO: 6121 - DNA, 627 bp, Homo sapiens
  source 1..627: mol_type = genomic DNA
atggagctgaactccctgctgatcctgctggaggcggccgagtacctggagcgcagggatcgagaggccgagcacggctacgcctcggtgctgcccttcgacggcgacttcgccagggagaaaacaaaggcggccggcctggtgcgcaaggccccgaacaacaggtcttcacacaacgagctagaaaagcacagacgagccaaactcaggctgtaccttgagcagctcaagcaactggtgcccctgggccccgacagcacccgccacaccacgctgagcctcctgaagcgggccaaggtgcacatcaagaaactggaggagcaggaccgccgggcactgagcatcaaggagcagctgcagcaggagcatcgtttcctgaagcggcgcctggagcagctgtcggtgcagagcgtggagcgcgtgcgcacagatagcacgggctctgctgtctccacggacgactcagagcaagaagtggacatagagggcatggagtttggccctggtgagctggacagtgttggcagcagcagtgacgcggacgaccactacagcctgcagagtggcaccggcggcgacagtggcttcgggccccactgccggcggctgggccgccccgccctctcg

SEQ ID NO: 6122 - DNA, 579 bp, Homo sapiens
  source 1..579: mol_type = genomic DNA
atggaacccttggccagcaacatccaggtcctgctgcaggcggccgagttcctggagcgccgtgagagagaggccgagcatggttatgcgtccctgtgcccgcatcgcagtccaggccccatccacaggaggaagaagcgacccccccaggctcctggcgcgcaggacagcgggcggtcagtgcacaatgaactggagaagcgcaggagggcccagttgaagcggtgcctggagcggctgaagcagcagatgcccctgggggccgactgtgcccggtacaccacgctgagcctgctgcgccgtgccaggatgcacatccagaagctggaggatcaggagcagcgggcccgacagctcaaggagaggctgcgcagcaagcagcagagcctgcagcggcagctggagcagctccgggggctggcaggggcggccgagcgggagcggctgcgggcggacagtctggactcctcaggcctctcctctgagcgctcagactcagaccaagtcttgcctaatgaaaacgggggaactcccaaccacagacccactggaagaggaaataatatcagttcccatcac

SEQ ID NO: 6123 - DNA, 1596 bp, Homo sapiens
  source 1..1596: mol_type = genomic DNA
atggaggagctgagcagcgtgggcgagcaggtcttcgccgccgagtgcatcctgagcaagcggctccgcaagggcaagctggagtacctggtcaagtggcgcggctggtcctccaaacataacagctgggagccggaggagaacatcctggacccgaggctgctcctggccttccagaagaaggaacatgagaaggaggtgcagaaccggaagagaggcaagaggccgagaggccggccaaggaagctcactgccatgtcctcctgcagccggcgctccaagctcaaggaacccgatgctccctccaaatccaagtccagcagttcctcctcttcctccacgtcatcctcctcttcctcagatgaagaggatgacagtgacttagatgctaagaggggtccccggggccgcgagacccacccagtgccgcagaagaaggcccagatcctggtggccaaacccgagctgaaggatcccatccggaagaagcggggacgaaagcccctgcccccagagcaaaaggcaacccgaagacccgtgagcctggccaaggtgctgaagaccgcccggaaggatctgggggccccggccagcaagctgccccctccactcagcgcccccgttgcaggcctggcagctctgaaggcccacgccaaggaggcctgtggcggccccagtgccatggccaccccagagaacctggccagcctaatgaagggcatggccagtagccccggccggggtggcatcagctggcagagctccatcgtgcactacatgaaccggatgacccagagccaggcccaggctgccagcaggttggcgctgaaggcccaggccaccaacaagtgcggcctcgggctggacctgaaggtgaggacgcagaaaggggagctgggaatgagccctccaggaagcaaaatcccgaaggcccccagcggtggggctgtggagcagaaagtggggaacacagggggccccccgcacacccatggtgccagcagggtgcctgctgggtgcccaggcccccagccagcacccacccaggagctgagcctccaggtcttggacttgcagagtgtcaagaatggcatgcccggggtgggtctccttgcccgccacgccaccgccaccaagggtgtcccggccaccaacccagcccctgggaagggcactgggagtggcctcattggggccagcggggccaccatgcccaccgacacaagcaaaagtgagaagctggcttccagagcagtggcgccacccacccctgccagcaagagggactgtgtcaagggcagtgctacccccagtgggcaggagagccgcacagcccccggagaagcccgcaaggcggccacactgccagagatgagcgcaggtgaggagagtagcagctcggactccgaccccgactccgcctcgccgcccagcactggacagaacccgtcagtgtccgttcagaccagccaggactggaagcccacccgcagcctcatcgagcacgtatttgtcaccgacgtcactgccaacctcatcaccgtcacagtgaaggagtctcccaccagcgtgggcttcttcaacctgaggcattac

SEQ ID NO: 6124 - DNA, 633 bp, Homo sapiens
  source 1..633: mol_type = genomic DNA
atggaggagctgagcagcgtgggcgagcaggtcttcgccgccgagtgcatcctgagcaagcggctccgcaagggcaagctggagtacctggtcaagtggcgcggctggtcctccaaacataacagctgggagccggaggagaacatcctggacccgaggctgctcctggccttccagaagaaggaacatgagaaggaggtgcagaaccggaagagaggcaagaggccgagaggccggccaaggaagctcactgccatgtcctcctgcagccggcgctccaagctcaaggtgggtggctgcgctgggtatgctgaccccacctcccagcacccccttggcgtagggggcaggcagagggagggtttggggccctcaggaagggggtggcacttctgccaacagtctgtccctctactcggaaaacaggagccccctttcttcctgtctctcagcttctgctgccaggggccccagccggctgagagttcctccccgcccctcccaggggcttcctgcttcagcctgtcctgcacgcctctctgctgggtggcagggtcaaactgctgcagacaagcactcttccctcccagggggtccttgggggacggaaaggaacaggaagcatgcgtacag

SEQ ID NO: 6125 - DNA, 633 bp, Homo sapiens
  source 1..633: mol_type = genomic DNA
atggcggcggcggttcggatgaacatccagatgctgctggaggcggccgactatctggagcggcgggagagagaagctgaacatggttatgcctccatgttaccatacaataacaaggacagagatgccttaaaacggaggaacaaatccaaaaagaataacagcagtagcagacgggctcatcttcgcttgtgcctggagaagttgaaggggctggtgccacttggacccgaatcaagtcgacacactacgttgagtttattaacaaaagccaaattgcacataaagaaacttgaagattgtgacagaaaagccgttcaccaaatcgaccagcttcagcgagagcagcgacacctgaagaggcagctggagaagctgggcattgagaggatccggatggacagcatcggctccaccgtctcctcggagcgctccgactccgacagggaagaaatcgacgttgacgtggagagcacggactatctcacaggtgatctggactggagcagcagcagtgtgagcgactctgacgagcggggcagcatgcagagcctcggcagtgatgagggctattccagcaccagcatcaagagaataaagctgcaggacagtcacaaggcgtgtcttggtctc

SEQ ID NO: 6126 - DNA, 3159 bp, Homo sapiens
  source 1..3159: mol_type = genomic DNA
atgtcaagcgaggaaagctaccgggccatcctgcgttacctgacgaacgagcgcgagccgtatgcgccgggcaccgagggcaatgtcaagcgtaaaatccgaaaagctgccgcctgctacgtggtgcgcggcgggactctgtattaccagcggcggcagcggcaccgcaagaccttcgcggagctggaggtggtgctgcagccggagcgacgccgggacctcatcgaggcggcgcacctgggtcccggcggcactcaccacacccggcatcagacctggcactacttgtccaagacgtactggtggcgaggtatattgaagcaagtcaaagattacattaaacagtgtagcaaatgccaggagaaactagatcgatcccgtccaatatcagatgtttcagaaatgttggaagaattgggactagaccttgaatctggagaagaaagtaatgaatcggaagatgacctgagcaactttacttcatctccaactacagcatccaagcctgcaaaaaagaagccagtatccaaacatgaacttgtgtttgttgacaccaaaggagtggtaaaacgttcttctccaaaacattgtcaggctgtcttaaaacagctgaacgaacagagactttccaaccagttctgtgatgttactttgttaattgaaggagaagagtacaaagctcataaatctgttttgtcagcaaatagcgagtattttcgagatctttttattgagaaaggagctgtttccagtcatgaggctgtggtggatctttctggtttttgtaaggccagcttccttcctttactggaatttgcctatacttctgtactaagttttgatttctgtagcatggctgatgtagccatcttagctcgtcatcttttcatgtcagaagtcttagagatttgtgaaagtgtacataagctaatggaagagaagcagctaacagtatataagaagggcgaagtacaaacagttgcatccacccaggacttacgagtacagaatggaggtacagcacctcctgttgctagcagtgagggaaccacaacaagtttacctactgaacttggggattgtgaaattgtactactggtaaatggagaattgccagaagctgagcagaatggagaggtaggacgacagcctgagccccaggtttcttcagaggctgaatctgccctgtcatcagtaggatgtatagctgattcccatcctgaaatggagtctgttgatttaataacaaaaaacaaccagacagaactagaaacttcaaacaacagagaaaataacacagtttctaatatacaccctaaactttcaaaagagaatgtaattagtagctcgccagaggatagtggtatgggaaatgatatatcagctgaggatatttgtgccgaagacattccaaaacataggcagaaagttgaccaacctttaaaagatcaggaaaatctagttgcatcaacagcaaagacagactttggccctgatgatgatacttatagaagcaggcttcgacaacgttctgttaatgaaggggcatatattcgactacacaagggaatggagaaaaagctgcagaaacggaaagccgttcccaagtcagcagttcaacaggtggctcagaagttagttcaaagaggaaaaaagatgaaacagccaaaaagagatgctaaagagaacacagaagaagcatctcataaatgtggggaatgtggaatggtttttcagagacgatacgcccttataatgcacaaactgaaacatgaaagagctagagattacaaatgtccattgtgtaaaaaacagtttcagtacagtgcctctttgcgagcacatcttattcgtcataccagaaaagatgcaccctcttcatcctcgtccaattccacgtctaatgaagcatcgggaacatcatctgagaagggcagaaccaagcgggaatttatatgttccatatgtggaagaacattacctaaattatattctctccgaatacatatgttaaagcacacaggtgtaaagccacatgcatgccaggtctgtggaaagacttttatctataagcatggtctaaaattacatcagagtcttcatcaatcacagaagcagttccagtgtgaactgtgtgttaagtcatttgttaccaaacggagtcttcaagaacatatgagtattcacacaggagagtccaagtacctttgctcagtttgtggaaagtcttttcataggggctctggactcagcaagcacttcaagaaacaccaaccaaagcctgaggttcgaggctatcattgtactcaatgtgaaaaaagtttctttgaagctagagatcttcgccagcacatgaacaaacatcttggtgtgaagccattccagtgccaattttgtgataagtgctatagttggaagaaagattggtattcccatgtgaagtctcattctgtcactgagccttataggtgtaatatatgtggcaaagaattttatgaaaaagctttgttcagaaggcatgtaaagaaagctacccatgggaagaaaggaagagcaaagcaaaacctggaacgggtgtgtgaaaaatgtggaagaaaattcactcagctaagagagtataggagacacatgaacaaccatgaaggagttaagccatttgagtgcttaacatgtggagtagcttgggctgatgcccgatctctaaaacgccatgtcagaacacatactggtgaacggccctatgtctgtcctgtatgtagcgaagcctacatagatgctcgaacactccgtaaacatatgactaaattccacagagactatgtgccttgcaaaattatgctggaaaaagacacccttcagtttcataaccaaggaactcaagtggcacatgctgttagcatcttaacagcaggcatgcaggaacaagaaagcagtggtcctcaagaacttgagactgtggtagtgacaggagaaactatggaagctctggaagctgttgcagctactgaagagtatccatcggtatctacactttctgaccaaagtattatgcaagtggttaattatgtattagcacaacagcaaggacagaagctatctgaagttgcagaagctattcaaactgttaaagtagaggtagcacatatttcaggaggagaa

SEQ ID NO: 6127 - DNA, 1737 bp, Homo sapiens
  source 1..1737: mol_type = genomic DNA
atgacaaggctggagcgcagctcccaccgcacagttatttgcaaagtcccaggtgaactcgtggcgagagaaggaaaatgcgcgtcccgggcgcgggagtcagaaataccatcagaggaggggtactgtgactttaatagtaggccaaatgagaactcttattgctatcaacttctgcgacaactaaatgaacagagaaagaaaggtattctttgtgatgtcagcattgtggtaagcggaaaaatcttcaaagctcataagaacatcctggttgcaggcagccgtttctttaagactttatattgcttttcaaacaaagaaagccctaaccaaaacaatactacccacttagatattgctgcagttcaaggtttttcagtcatcttggacttcttgtattctggtaacctggtgctcacaagccaaaatgccattgaagttatgaccgtggccagctatcttcaaatgagtgaagttgttcaaacttgccgaaatttcattaaagatgccttaaatataagcattaaatcagaagctccagagtctgtagttgtggactataataatagaaaaccagttaatagagatggtctgtcttcatcacgggatcaaaaaattgccagtttttgggcaacacggaatcttaccaatttggcaagtaatgtaaagattgaaaatgatggttgtaatgtcgacgagggccaaatagaaaactaccaaatgaatgacagtagttgggtccaggatggatctcctgaaatggctgaaaatgaatctgaaggtcaaacaaaagtgtttatttggaataatatgggctcccagggaattcaagagactggcaaaacaaggaggaaaaaccaaactacaaaaagatttatttataatattccacctaataatgaaacgaatttagaagattgctcagtaatgcagccacctgttgcctatccagaagaaaatacactactcatcaaggaagaaccagatttagatggtgctctactctcggggccagatggtgataggaatgtgaatgcaaatttattggctgaagctggcactagtcaagatggaggtgatgctggtacttcacatgatttcaagtatggtttgatgcctggtccttcaaatgatttcaagtatggattgataccaggtacttcaaatgatttcaagtatggattgataccaggtgcttcaaatgatttcaagtatggattattgccagaatcttggccaaaacaagaaacctgggaaaatggtgaatcatctctaatcatgaacaagttaaaatgccctcattgtagctatgtagccaaatacagacgaacactaaaaaggcacttgctcattcacacaggagtgagatcatttagctgtgatatttgtggaaaactgtttactcgaagagaacatgtaaaaagacattccctggtgcataaaaaggataaaaaatacaaatgtatggtgtgtaagaagatcttcatgttagcagccagtgttggaataagacatggatctcgacgttatggtgtttgtgtagactgtgcagataaatcacagccaggagggcaagaaggtgtagatcagggacaggatacagaattccctcgggatgaagaatacgaggagaatgaagtaggagaagctgatgaagagctagttgatgatggagaagatcagaatgatccctctcgatgggatgaatcaggagaagtttgtatgtctctagatgat

SEQ ID NO: 6128 - DNA, 2613 bp, Homo sapiens
  source 1..2613: mol_type = genomic DNA
atgtcgttcagtgaaatgaaccgcaggacgctggcgttccgaggaggcgggttggtcaccgctagcggcggcggctccacgaacaataacgctggcggggaggcctcagcttggcctccgcagccccagccgagacagcccccgccgccagcgccgcccgcgcttcagccgcctaatgggcggggggccgacgaggaagtggaattggagggcctggagccccaagacctggaggcctccgccgggccggccgccggcgccgccgaggaagccaaggagttgctgctcccccaagacgcgggcggccccacctcgcttggcggtggcgcggggggccccctgctagcggaaaggaaccgtcggactctggccttccgaggcggcggcggcgggggtctcggcaacaatggcagtagccgcggccgccccgagacctcggtgtggcccttgaggcatttcaatgggcgagggccggcgactgtggatctggagctggacgcgctggaggggaaggagttgatgcaggacggcgcgtccctgagcgacagcaccgaggacgaggaggagggggcgagcctgggcgacggcagcggggcggaaggcggcagctgcagcagcagcaggcggtcgggcggcgatggcggggacgaagtggagggcagcggtgtgggagctggcgaaggagagactgtccagcacttcccgctcgcgcggcccaagtctctaatgcagaagctccaatgctccttccagacctcctggctcaaggactttccctggctgcgctattccaaggatactggtcttatgtcttgcggctggtgccaaaagacccctgcagatgggggaagcgtggaccttcccccagtggggcatgatgagctttcgcgagggacccgcaactacaagaaaaccctcctcctgaggcaccacgtctctaccgagcacaaactccacgaagccaacgcccaggagtcagaaataccatcagaggaggggtactgtgactttaatagtaggccaaatgagaactcttattgctatcaacttctgcgacaactaaatgaacagagaaagaaaggtattctttgtgatgtcagcattgtggtaagcggaaaaatcttcaaagctcataagaacatcctggttgcaggcagccgtttctttaagactttatattgcttttcaaacaaagaaagccctaaccaaaacaatactacccacttagatattgctgcagttcaaggtttttcagtcatcttggacttcttgtattctggtaacctggtgctcacaagccaaaatgccattgaagttatgaccgtggccagctatcttcaaatgagtgaagttgttcaaacttgccgaaatttcattaaagatgccttaaatataagcattaaatcagaagctccagagtctgtagttgtggactataataatagaaaaccagttaatagagatggtctgtcttcatcacgggatcaaaaaattgccagtttttgggcaacacggaatcttaccaatttggcaagtaatgtaaagattgaaaatgatggttgtaatgtcgacgagggccaaatagaaaactaccaaatgaatgacagtagttgggtccaggatggatctcctgaaatggctgaaaatgaatctgaaggtcaaacaaaagtgtttatttggaataatatgggctcccagggaattcaagagactggcaaaacaaggaggaaaaaccaaactacaaaaagatttatttataatattccacctaataatgaaacgaatttagaagattgctcagtaatgcagccacctgttgcctatccagaagaaaatacactactcatcaaggaagaaccagatttagatggtgctctactctcggggccagatggtgataggaatgtgaatgcaaatttattggctgaagctggcactagtcaagatggaggtgatgctggtacttcacatgatttcaagtatggtttgatgcctggtccttcaaatgatttcaagtatggattgataccaggtacttcaaatgatttcaagtatggattgataccaggtgcttcaaatgatttcaagtatggattattgccagaatcttggccaaaacaagaaacctgggaaaatggtgaatcatctctaatcatgaacaagttaaaatgccctcattgtagctatgtagccaaatacagacgaacactaaaaaggcacttgctcattcacacaggagtgagatcatttagctgtgatatttgtggaaaactgtttactcgaagagaacatgtaaaaagacattccctggtgcataaaaaggataaaaaatacaaatgtatggtgtgtaagaagatcttcatgttagcagccagtgttggaataagacatggatctcgacgttatggtgtttgtgtagactgtgcagataaatcacagccaggagggcaagaaggtgtagatcagggacaggatacagaattccctcgggatgaagaatacgaggagaatgaagtaggagaagctgatgaagagctagttgatgatggagaagatcagaatgatccctctcgatgggatgaatcaggagaagtttgtatgtctctagatgat

SEQ ID NO: 6129 - DNA, 2541 bp, Homo sapiens
  source 1..2541: mol_type = genomic DNA
atgtcgttcagtgaaatgaaccgcaggacgctggcgttccgaggaggcgggttggtcaccgctagcggcggcggctccacgaacaataacgctggcggggaggcctcagcttggcctccgcagccccagccgagacagcccccgccgccagcgccgcccgcgcttcagccgcctaatgggcggggggccgacgaggaagtggaattggagggcctggagccccaagacctggaggcctccgccgggccggccgccggcgccgccgaggaagccaaggagttgctgctcccccaagacgcgggcggccccacctcgcttggcggtggcgcggggggccccctgctagcggaaaggaaccgtcggactctggccttccgaggcggcggcggcgggggtctcggcaacaatggcagtagccgcggccgccccgagacctcggtgtggcccttgaggcatttcaatgggcgagggccggcgactgtggatctggagctggacgcgctggaggggaaggagttgatgcaggacggcgcgtccctgagcgacagcaccgaggacgaggaggagggggcgagcctgggcgacggcagcggggcggaaggcggcagctgcagcagcagcaggcggtcgggcggcgatggcggggacgaagtggagggcagcggtgtgggagctggcgaaggagagactgtccagcacttcccgctcgcgcggcccaagtctctaatgcagaagctccaatgctccttccagacctcctggctcaaggactttccctggctgcgctattccaaggatactggtcttatgtcttgcggctggtgccaaaagacccctgcagatgggggaagcgtggaccttcccccagtggggcatgatgagctttcgcgagggacccgcaactacaagaaaaccctcctcctgaggcaccacgtctctaccgagcacaaactccacgaagccaacgcccaggagtcagaaataccatcagaggaggggtactgtgactttaatagtaggccaaatgagaactcttattgctatcaacttctgcgacaactaaatgaacagagaaagaaaggtattctttgtgatgtcagcattgtggtaagcggaaaaatcttcaaagctcataagaacatcctggttgcaggcagccgtttctttaagactttatattgcttttcaaacaaagaaagccctaaccaaaacaatactacccacttagatattgctgcagttcaaggtttttcagtcatcttggacttcttgtattctggtaacctggtgctcacaagccaaaatgccattgaagttatgaccgtggccagctatcttcaaatgagtgaagttgttcaaacttgccgaaatttcattaaagatgccttaaatataagcattaaatcagaagctccagagtctgtagttgtggactataataatagaaaaccagttaatagagatggtctgtcttcatcacgggatcaaaaaattgccagtttttgggcaacacggaatcttaccaatttggcaagtaatgtaaagattgaaaatgatggttgtaatgtcgacgagggccaaatagaaaactaccaaatgaatgacagtagttgggtccaggatggatctcctgaaatggctgaaaatgaatctgaaggtcaaacaaaagtgtttatttggaataatatgggctcccagggaattcaagagactggcaaaacaaggaggaaaaaccaaactacaaaaagatttatttataatattccacctaataatgaaacgaatttagaagattgctcagtaatgcagccacctgttgcctatccagaagaaaatacactactcatcaaggaagaaccagatttagatggtgctctactctcggggccagatggtgataggaatgtgaatgcaaatttattggctgaagctggcactagtcaagatggaggtgatgctggtacttcacatgatttcaagtatggtttgatgcctggtgcttcaaatgatttcaagtatggattattgccagaatcttggccaaaacaagaaacctgggaaaatggtgaatcatctctaatcatgaacaagttaaaatgccctcattgtagctatgtagccaaatacagacgaacactaaaaaggcacttgctcattcacacaggagtgagatcatttagctgtgatatttgtggaaaactgtttactcgaagagaacatgtaaaaagacattccctggtgcataaaaaggataaaaaatacaaatgtatggtgtgtaagaagatcttcatgttagcagccagtgttggaataagacatggatctcgacgttatggtgtttgtgtagactgtgcagataaatcacagccaggagggcaagaaggtgtagatcagggacaggatacagaattccctcgggatgaagaatacgaggagaatgaagtaggagaagctgatgaagagctagttgatgatggagaagatcagaatgatccctctcgatgggatgaatcaggagaagtttgtatgtctctagatgat

SEQ ID NO: 6130 - DNA, 2409 bp, Homo sapiens
  source 1..2409: mol_type = genomic DNA
atggactttccccagcacagccagcatgtcttggaacagctgaaccagcagcggcagctggggcttctctgtgactgcacctttgtggtggacggtgttcactttaaggctcataaagcagtgctggcggcctgcagcgagtacttcaagatgctcttcgtggaccagaaggacgtggtgcacctggacatcagtaacgcggcaggcctggggcaggtgctggagtttatgtacacggccaagctgagcctgagccctgagaacgtggatgatgtgctggccgtggccactttcctccaaatgcaggacatcatcacggcctgccatgccctcaagtcacttgctgagccggctaccagccctgggggaaatgcggaggccttggccacagaaggaggggacaagagagccaaagaggagaaggtggccaccagcacgctgagcaggctggagcaggcaggacgcagcacacccataggccccagcagggacctcaaggaggagcgcggcggtcaggcccagagtgcggccagcggtgcagagcagacagagaaagccgatgcgccccgggagccgccgcctgtggagctcaagccagaccccacgagtggcatggctgctgcagaagctgaggccgctttgtccgagagctcggagcaagaaatggaggtggagcccgcccggaaaggggaagaggagcaaaaggagcaagaggagcaagaggaggagggcgcagggccagctgaggtcaaggaggagggttcccagctggagaacggagaggcccccgaggagaacgagaatgaggagtcagcgggcacagactcggggcaggagctcggctccgaggcccggggcctgcgctcaggcacctacggcgaccgcacggagtccaaggcctacggctccgtcatccacaagtgcgaggactgtgggaaggagttcacgcacacggggaacttcaagcggcacatccgcatccacacgggggagaagcccttctcgtgccgggagtgcagcaaggccttttccgacccggccgcgtgcaaggcccatgagaagacgcacagccctctgaagccctacggctgcgaggagtgcgggaagagctaccgcctcatcagcctgctgaacctgcacaagaagcggcactcgggcgaggcgcgctaccgctgcgaggactgcggcaagctcttcaccacctcgggcaacctcaagcgccaccagctggtgcacagcggcgagaagccctaccagtgcgactactgcggccgctccttctccgaccccacttccaagatgcgccacctggagacccacgacacggacaaggagcacaagtgcccacactgcgacaagaagttcaaccaggtagggaacctgaaggcccacctgaagatccacatcgctgacgggcccctcaagtgccgagagtgtgggaagcagttcaccacctcagggaacctgaagcggcaccttcggatccacagcggggagaagccctacgtgtgcatccactgccagcgacagtttgcagaccccggcgctctgcagcggcacgtccgcattcacacaggtgagaagccatgccagtgtgtgatgtgcggtaaggccttcacccaggccagctccctcatcgcccacgtgcgccagcacaccggggagaagccctacgtctgcgagcgctgcggcaagagattcgtccagtccagccagttggccaatcatattcgccaccacgacaacatccgcccacacaagtgcagcgtgtgcagcaaggccttcgtgaacgtgggggacctgtccaagcacatcatcattcacactggagagaagccttacctgtgtgataagtgtgggcgtggcttcaaccgggtagacaacctgcgctcccacgtgaagaccgtgcaccagggcaaggcaggcatcaagatcctggagcccgaggagggcagtgaggtcagcgtggtcactgtggatgacatggtcacgctggctaccgaggcactggcagcgacagccgtcactcagctcacagtggtgccggtgggagctgcagtgacagccgatgagacggaagtcctgaaggccgagatcagcaaagctgtgaagcaagtgcaggaagaagaccccaacactcacatcctctacgcctgtgactcctgtggggacaagtttctggatgccaacagcctggctcagcatgtgcgaatccacacagcccaggcactggtcatgttccagacagacgcggacttctatcagcagtatgggccaggtggcacgtggcctgccgggcaggtgctgcaggctggggagctggtcttccgccctcgcgacggggctgagggccagcccgcactggcagagacctcccctacagctcctgaatgtcccccgcctgccgag

SEQ ID NO: 6131 - DNA, 2163 bp, Homo sapiens
  source 1..2163: mol_type = genomic DNA
atgatgtgctggccgtggccactttcctccaaatgcaggacatcatcacggcctgccatgccctcaagtcacttgctgagccggctaccagccctgggggaaatgcggaggccttggccacagaaggtctgccctgttccatctccaggaggggacaagagagccaaagaggagaaggtggccaccagcacgctgagcaggctggagcaggcaggacgcagcacacccataggccccagcagggacctcaaggaggagcgcggcggtcaggcccagagtgcggccagcggtgcagagcagacagagaaagccgatgcgccccgggagccgccgcctgtggagctcaagccagaccccacgagtggcatggctgctgcagaagctgaggccgctttgtccgagagctcggagcaagaaatggaggtggagcccgcccggaaaggggaagaggagcaaaaggagcaagaggagcaagaggaggagggcgcagggccagctgaggtcaaggaggagggttcccagctggagaacggagaggcccccgaggagaacgagaatgaggagtcagcgggcacagactcggggcaggagctcggctccgaggcccggggcctgcgctcaggcacctacggcgaccgcacggagtccaaggcctacggctccgtcatccacaagtgcgaggactgtgggaaggagttcacgcacacggggaacttcaagcggcacatccgcatccacacgggggagaagcccttctcgtgccgggagtgcagcaaggccttttccgacccggccgcgtgcaaggcccatgagaagacgcacagccctctgaagccctacggctgcgaggagtgcgggaagagctaccgcctcatcagcctgctgaacctgcacaagaagcggcactcgggcgaggcgcgctaccgctgcgaggactgcggcaagctcttcaccacctcgggcaacctcaagcgccaccagctggtgcacagcggcgagaagccctaccagtgcgactactgcggccgctccttctccgaccccacttccaagatgcgccacctggagacccacgacacggacaaggagcacaagtgcccacactgcgacaagaagttcaaccaggtagggaacctgaaggcccacctgaagatccacatcgctgacgggcccctcaagtgccgagagtgtgggaagcagttcaccacctcagggaacctgaagcggcaccttcggatccacagcggggagaagccctacgtgtgcatccactgccagcgacagtttgcagaccccggcgctctgcagcggcacgtccgcattcacacaggtgagaagccatgccagtgtgtgatgtgcggtaaggccttcacccaggccagctccctcatcgcccacgtgcgccagcacaccggggagaagccctacgtctgcgagcgctgcggcaagagattcgtccagtccagccagttggccaatcatattcgccaccacgacaacatccgcccacacaagtgcagcgtgtgcagcaaggccttcgtgaacgtgggggacctgtccaagcacatcatcattcacactggagagaagccttacctgtgtgataagtgtgggcgtggcttcaaccgggtagacaacctgcgctcccacgtgaagaccgtgcaccagggcaaggcaggcatcaagatcctggagcccgaggagggcagtgaggtcagcgtggtcactgtggatgacatggtcacgctggctaccgaggcactggcagcgacagccgtcactcagctcacagtggtgccggtgggagctgcagtgacagccgatgagacggaagtcctgaaggccgagatcagcaaagctgtgaagcaagtgcaggaagaagaccccaacactcacatcctctacgcctgtgactcctgtggggacaagtttctggatgccaacagcctggctcagcatgtgcgaatccacacagcccaggcactggtcatgttccagacagacgcggacttctatcagcagtatgggccaggtggcacgtggcctgccgggcaggtgctgcaggctggggagctggtcttccgccctcgcgacggggctgagggccagcccgcactggcagagacctcccctacagctcctgaatgtcccccgcctgccgag

SEQ ID NO: 6132 - DNA, 2430 bp, Homo sapiens
  source 1..2430: mol_type = genomic DNA
atggactttccccagcacagccagcatgtcttggaacagctgaaccagcagcggcagctggggcttctctgtgactgcacctttgtggtggacggtgttcactttaaggctcataaagcagtgctggcggcctgcagcgagtacttcaagatgctcttcgtggaccagaaggacgtggtgcacctggacatcagtaacgcggcaggcctggggcaggtgctggagtttatgtacacggccaagctgagcctgagccctgagaacgtggatgatgtgctggccgtggccactttcctccaaatgcaggacatcatcacggcctgccatgccctcaagtcacttgctgagccggctaccagccctgggggaaatgcggaggccttggccacagaaggaggggacaagagagccaaagaggagaaggtggccaccagcacgctgagcaggctggagcaggcaggacgcagcacacccataggccccagcagggacctcaaggaggagcgcggcggtcaggcccagagtgcggccagcggtgcagagcagacagagaaagccgatgcgccccgggagccgccgcctgtggagctcaagccagaccccacgagtggcatggctgctgcagaagctgaggccgctttgtccgagagctcggagcaagaaatggaggtggagcccgcccggaaaggggaagaggagcaaaaggagcaagaggagcaagaggaggagggcgcagggccagctgaggtcaaggaggagggttcccagctggagaacggagaggcccccgaggagaacgagaatgaggagtcagcgggcacagactcggggcaggagctcggctccgaggcccggggcctgcgctcaggcacctacggcgaccgcacggagtccaaggcctacggctccgtcatccacaagtgcgaggactgtgggaaggagttcacgcacacggggaacttcaagcggcacatccgcatccacacgggggagaagcccttctcgtgccgggagtgcagcaaggccttttccgacccggccgcgtgcaaggcccatgagaagacgcacagccctctgaagccctacggctgcgaggagtgcgggaagagctaccgcctcatcagcctgctgaacctgcacaagaagcggcactcgggcgaggcgcgctaccgctgcgaggactgcggcaagctcttcaccacctcgggcaacctcaagcgccaccagctggtgcacagcggcgagaagccctaccagtgcgactactgcggccgctccttctccgaccccacttccaagatgcgccacctggagacccacgacacggacaaggagcacaagtgcccacactgcgacaagaagttcaaccaggtagggaacctgaaggcccacctgaagatccacatcgctgacgggcccctcaagtgccgagagtgtgggaagcagttcaccacctcagggaacctgaagcggcaccttcggatccacagcggggagaagccctacgtgtgcatccactgccagcgacagtttgcagaccccggcgctctgcagcggcacgtccgcattcacacaggtgagaagccatgccagtgtgtgatgtgcggtaaggccttcacccaggccagctccctcatcgcccacgtgcgccagcacaccggggagaagccctacgtctgcgagcgctgcggcaagagattcgtccagtccagccagttggccaatcatattcgccaccacgacaacatccgcccacacaagtgcagcgtgtgcagcaaggccttcgtgaacgtgggggacctgtccaagcacatcatcattcacactggagagaagccttacctgtgtgataagtgtgggcgtggcttcaaccgggtagacaacctgcgctcccacgtgaagaccgtgcaccagggcaaggcaggcatcaagatcctggagcccgaggagggcagtgaggtcagcgtggtcactgtggatgacatggtcacgctggctaccgaggcactggcagcgacagccgtcactcagctcacaggccctgcgactctgcccgcagtggtgccggtgggagctgcagtgacagccgatgagacggaagtcctgaaggccgagatcagcaaagctgtgaagcaagtgcaggaagaagaccccaacactcacatcctctacgcctgtgactcctgtggggacaagtttctggatgccaacagcctggctcagcatgtgcgaatccacacagcccaggcactggtcatgttccagacagacgcggacttctatcagcagtatgggccaggtggcacgtggcctgccgggcaggtgctgcaggctggggagctggtcttccgccctcgcgacggggctgagggccagcccgcactggcagagacctcccctacagctcctgaatgtcccccgcctgccgag

SEQ ID NO: 6133 - DNA, 2019 bp, Homo sapiens
  source 1..2019: mol_type = genomic DNA
atggatctgacaaaaatgggcatgatccagctgcagaaccctagccaccccacggggctactgtgcaaggccaaccagatgcggctggccgggactttgtgcgatgtggtcatcatggtggacagccaggagttccacgcccaccggacggtgctggcctgcaccagcaagatgtttgagatcctcttccaccgcaatagtcaacactatactttggacttcctctcgccaaagaccttccagcagattctggagtatgcatatacagccacgctgcaagccaaggcggaggacctggatgacctgctgtatgcggccgagatcctggagatcgagtacctggaggaacagtgcctgaagatgctggagaccatccaggcctcagacgacaatgacacggaggccaccatggccgatggcggggccgaggaagaagaggaccgcaaggctcggtacctcaagaacatcttcatctcgaagcattccagcgaggagagtgggtatgccagtgtggctggacagagcctccctgggcccatggtggaccagagcccttcagtctccacttcatttggtctttcagccatgagtcccaccaaggctgcagtggacagtttgatgaccataggacagtctctcctgcagggaactcttcagccacctgcagggcccgaggagccaactctggctgggggtgggcggcaccctggggtggctgaggtgaagacggagatgatgcaggtggatgaggtgcccagccaggacagccctggggcagccgagtccagcatctcaggagggatgggggacaaggttgaggaaagaggcaaagaggggcctgggaccccgactcgaagcagcgtcatcaccagtgctagggagctacactatgggcgagaggagagtgccgagcaggtgccacccccagctgaggctggccaggcccccactggccgacctgagcacccagcacccccgcctgagaagcatctgggcatctactccgtgttgcccaaccacaaggctgacgctgtattgagcatgccgtcttccgtgacctctggcctccacgtgcagcctgccctggctgtctccatggacttcagcacctatggggggctgctgccccagggcttcatccagagggagctgttcagcaagctgggggagctggctgtgggcatgaagtcagagagccggaccatcggagagcagtgcagcgtgtgtggggtcgagcttcctgataacgaggctgtggagcagcacaggaagctgcacagtgggatgaagacgtacgggtgcgagctctgcgggaagcggttcctggatagtttgcggctgagaatgcacttactggctcattcagcgggtgccaaagcctttgtctgtgatcagtgcggtgcacagttttcgaaggaggatgccctggagacacacaggcagacccatactggcactgacatggccgtcttctgtctgctgtgtgggaagcgcttccaggcgcagagcgcactgcagcagcacatggaggtccacgcgggcgtgcgcagctacatctgcagtgagtgcaaccgcaccttccccagccacacggctctcaaacgccacctgcgctcacatacaggcgaccacccctacgagtgtgagttctgtggcagctgcttccgggatgagagcacactcaagagccacaaacgcatccacacgggtgagaaaccctacgagtgcaatggctgtggcaagaagttcagcctcaagcatcagctggagacgcactatagggtgcacacaggtgagaagccctttgagtgtaagctctgccaccagcgctcccgggactactcggccatgatcaagcacctgagaacgcacaacggcgcctcgccctaccagtgcaccatctgcacagagtactgccccagcctctcctccatgcagaagcacatgaagggccacaagcccgaggagatcccgcccgactggaggatagagaagacgtacctctacctgtgctatgtg

SEQ ID NO: 6134 - DNA, 1566 bp, Homo sapiens
  source 1..1566: mol_type = genomic DNA
atggagtttccagaccatagtagacatttgctacagtgtctgagcgagcagagacaccagggttttctttgtgactgcactgttctggtgggagatgcccagttccgagcgcaccgagctgtactggcttcatgcagcatgtatttccacctcttttacaaggaccagctggacaaaagagacattgttcatctgaacagcgacattgttacagcccccgctttcgctctcctgcttgaattcatgtatgaagggaaactccagttcaaagacttgcccattgaagacgtgctagcagctgccagttatctccacatgtatgacattgtcaaagtctgcaaaaagaagctgaaagagaaagccaccacggaggcagacagcaccaaaaaggaagaagatgcttcaagttgttcggacaaagtcgagagtctctccgatggcagcagccacatagcaggcgatttgcccagtgatgaagatgaaggagaagatgaaaaattgaacatcctgcccagcaaaagggacttggcggccgagcctgggaacatgtggatgcgattgccctcagactcagcaggcatcccccaggctggcggagaggcagagccacacgccacagcagctggaaaaacagtagccagcccctgcagctcaacagagtctttgtcccagaggtctgtcacctccgtgagggattcggcagatgttgactgtgtgctggacctgtctgtcaagtccagcctttcaggagttgaaaatctgaacagctcttatttctcttcacaggacgtgctgagaagcaacctggtgcaggtgaaggtggagaaagaggcttcctgtgatgagagtgatgttggcactaatgactatgacatggaacatagcactgtgaaagaaagtgtgagcactaataacagggtacagtatgagccggcccatctggctcccctgagggaggactcggtcttgagggagctggaccgggaggacaaagccagtgatgatgagatgatgaccccagagagcgagcgtgtccaggtggagggaggcatggagagcagtctgctcccctacgtctccaacatcctgagccccgcgggccagatcttcatgtgccccctgtgcaacaaggtcttccccagcccccacatcctgcagatccacctgagcacgcacttccgcgagcaggacggcatccgcagcaagcccgccgccgatgtcaacgtgcccacgtgctcgctgtgtgggaagactttctcttgcatgtacaccctcaagcgccacgagaggactcactcgggggagaagccctacacatgcacccagtgcggcaagagcttccagtactcgcacaacctgagccgccatgccgtggtgcacacccgcgagaagccgcacgcctgcaagtggtgcgagcgcaggttcacgcagtccggggacctgtacagacacattcgcaagttccactgtgagttggtgaactccttgtcggtcaaaagcgaagcactgagcttgcctactgtcagagactggaccttagaagatagctctcaagaactttggaaa

SEQ ID NO: 6135 - DNA, 1593 bp, Homo sapiens
  source 1..1593: mol_type = genomic DNA
atgtgtcctaaaggttatgaagacagtatggagtttccagaccatagtagacatttgctacagtgtctgagcgagcagagacaccagggttttctttgtgactgcactgttctggtgggagatgcccagttccgagcgcaccgagctgtactggcttcatgcagcatgtatttccacctcttttacaaggaccagctggacaaaagagacattgttcatctgaacagcgacattgttacagcccccgctttcgctctcctgcttgaattcatgtatgaagggaaactccagttcaaagacttgcccattgaagacgtgctagcagctgccagttatctccacatgtatgacattgtcaaagtctgcaaaaagaagctgaaagagaaagccaccacggaggcagacagcaccaaaaaggaagaagatgcttcaagttgttcggacaaagtcgagagtctctccgatggcagcagccacatagcaggcgatttgcccagtgatgaagatgaaggagaagatgaaaaattgaacatcctgcccagcaaaagggacttggcggccgagcctgggaacatgtggatgcgattgccctcagactcagcaggcatcccccaggctggcggagaggcagagccacacgccacagcagctggaaaaacagtagccagcccctgcagctcaacagagtctttgtcccagaggtctgtcacctccgtgagggattcggcagatgttgactgtgtgctggacctgtctgtcaagtccagcctttcaggagttgaaaatctgaacagctcttatttctcttcacaggacgtgctgagaagcaacctggtgcaggtgaaggtggagaaagaggcttcctgtgatgagagtgatgttggcactaatgactatgacatggaacatagcactgtgaaagaaagtgtgagcactaataacagggtacagtatgagccggcccatctggctcccctgagggaggactcggtcttgagggagctggaccgggaggacaaagccagtgatgatgagatgatgaccccagagagcgagcgtgtccaggtggagggaggcatggagagcagtctgctcccctacgtctccaacatcctgagccccgcgggccagatcttcatgtgccccctgtgcaacaaggtcttccccagcccccacatcctgcagatccacctgagcacgcacttccgcgagcaggacggcatccgcagcaagcccgccgccgatgtcaacgtgcccacgtgctcgctgtgtgggaagactttctcttgcatgtacaccctcaagcgccacgagaggactcactcgggggagaagccctacacatgcacccagtgcggcaagagcttccagtactcgcacaacctgagccgccatgccgtggtgcacacccgcgagaagccgcacgcctgcaagtggtgcgagcgcaggttcacgcagtccggggacctgtacagacacattcgcaagttccactgtgagttggtgaactccttgtcggtcaaaagcgaagcactgagcttgcctactgtcagagactggaccttagaagatagctctcaagaactttggaaa

SEQ ID NO: 6136 - DNA, 543 bp, Homo sapiens
  source 1..543: mol_type = genomic DNA
atgatggacaacagaggcaactctagtctacctgacaaacttcctatcttccctgattctgcccgcttgccactgaccaggtccttctatctggagcccatggtcactttccacgtgcacccagaggccccggtgtcatccccttactctgaggagctgccacggctgccttttcccagcgactctcttatcctgggaaattacagtgaaccctgccccttctctttcccgatgccttatccaaattacagagggtgcgagtactcctacgggccagccttcacccggaaaaggaatgagcgggaaaggcagcgggtgaaatgtgtcaatgaaggctacgcccagctccgccatcatctgccagaggagtatttggagaagcgactcagcaaagtggaaaccctcagagctgcgatcaagtacattaactacctgcagtctcttctgtaccctgataaagctgagaccaagaataaccctggaaaagtttcctccatgatagcaaccaccagccaccatgctgaccctatgttcagaattgtt

SEQ ID NO: 6137 - DNA, 708 bp, Homo sapiens
  source 1..708: mol_type = genomic DNA
atggaaagctctgccaagatggagagcggcggcgccggccagcagccccagccgcagccccagcagcccttcctgccgcccgcagcctgtttctttgccacggccgcagccgcggcggccgcagccgccgcagcggcagcgcagagcgcgcagcagcagcagcagcagcagcagcagcagcagcaggcgccgcagctgagaccggcggccgacggccagccctcagggggcggtcacaagtcagcgcccaagcaagtcaagcgacagcgctcgtcttcgcccgaactgatgcgctgcaaacgccggctcaacttcagcggctttggctacagcctgccgcagcagcagccggccgccgtggcgcgccgcaacgagcgcgagcgcaaccgcgtcaagttggtcaacctgggctttgccacccttcgggagcacgtccccaacggcgcggccaacaagaagatgagtaaggtggagacactgcgctcggcggtcgagtacatccgcgcgctgcagcagctgctggacgagcatgacgcggtgagcgccgccttccaggcaggcgtcctgtcgcccaccatctcccccaactactccaacgacttgaactccatggccggctcgccggtctcatcctactcgtcggacgagggctcttacgacccgctcagccccgaggagcaggagcttctcgacttcaccaactggttc

SEQ ID NO: 6138 - DNA, 519 bp, Homo sapiens
  source 1..519: mol_type = genomic DNA
atgatggagacgcgtaaaccggcggaacggctggccttgccatactcgctgcgcaccgcgcccctgggcgttccggggaccctgcccggactcccgcggagggaccccctcagggtcgccctgcgtctggacgccgcgtgctgggagtgggcgcgcagcggctgcgcacggggatggcagtacttgcccgtgccgctggacagcgccttcgagcccgccttcctccgcaagcgcaacgagcgcgagcggcagcgggtgcgctgcgtgaacgagggctatgcgcgcctccgagaccacctgccccgggagctggcagacaagcgcctcagcaaagtggagacgctccgcgctgccatcgactacatcaagcacctgcaggagctgctggagcgccaggcctgggggctcgagggcgcggccggcgccgtcccccagcgcagggcggaatgcaacagcgacggggagtccaaggcctcttcggcgccttcgcccagcagcgagcccgaggaggggggcagc

SEQ ID NO: 6139 - DNA, 618 bp, Homo sapiens
  source 1..618: mol_type = genomic DNA
atgaacaataacttctgccgggctctggtggaccggaggcctctggggccccccagctgcatgcagctgggcgtcatgccccctccccggcaggcgcccctgccccccgccgagcccctgggcaacgtgcccttcctgctgtacccgggcccagcagagccgccctactacgacgcctatgcgggggtgttcccctacgtgcccttccccggcgccttcggggtctacgaataccccttcgagccagccttcatccagaagcgcaacgagcgcgagaggcagcgagtcaagtgcgtcaacgagggctacgctcgcctccgcggccacctccccggcgccctggctgagaagcgactcagcaaggtggagacgctgcgcgccgccatccgctacataaagtacctgcaagagctgctgagctcggcccccgacggctcgacgccccccgcttcccgcggcctcccgggcaccgggccctgccccgcgccgcccgccaccccccgtcccgaccgccctggcgacggcgaggcccgggcgccctcctccctggtgccggagtcatccgagtcctcctgcttctccccgtcgcctttcttggagtcggaggaatcctggcat

SEQ ID NO: 6140 - DNA, 1755 bp, Homo sapiens
  source 1..1755: mol_type = genomic DNA
atggagcctgcacccgcccgatctccgaggccccagcaggaccccgcccggccccaggagcccaccatgcctccccccgagaccccctctgaaggccgccagcccagccccagccccagccctacagagcgagcccccgcttcggaggaggagttccagtttctgcgctgccagcaatgccaggcggaagccaagtgcccgaagctgctgccttgtctgcacacgctgtgctcaggatgcctggaggcgtcgggcatgcagtgccccatctgccaggcgccctggcccctaggtgcagacacacccgccctggataacgtctttttcgagagtctgcagcggcgcctgtcggtgtaccggcagattgtggatgcgcaggctgtgtgcacccgctgcaaagagtcggccgacttctggtgctttgagtgcgagcagctcctctgcgccaagtgcttcgaggcacaccagtggttcctcaagcacgaggcccggcccctagcagagctgcgcaaccagtcggtgcgtgagttcctggacggcacccgcaagaccaacaacatcttctgctccaaccccaaccaccgcacccctacgctgaccagcatctactgccgaggatgttccaagccgctgtgctgctcgtgcgcgctccttgacagcagccacagtgagctcaagtgcgacatcagcgcagagatccagcagcgacaggaggagctggacgccatgacgcaggcgctgcaggagcaggatagtgcctttggcgcggttcacgcgcagatgcacgcggccgtcggccagctgggccgcgcgcgtgccgagaccgaggagctgatccgcgagcgcgtgcgccaggtggtagctcacgtgcgggctcaggagcgcgagctgctggaggctgtggacgcgcggtaccagcgcgactacgaggagatggccagtcggctgggccgcctggatgctgtgctgcagcgcatccgcacgggcagcgcgctggtgcagaggatgaagtgctacgcctcggaccaggaggtgctggacatgcacggtttcctgcgccaggcgctctgccgcctgcgccaggaggagccccagagcctgcaagctgccgtgcgcaccgatggcttcgacgagttcaaggtgcgcctgcaggacctcagctcttgcatcacccaggggaaagatgcagctgtatccaagaaagccagcccagaggctgccagcactcccagggaccctattgacgttgacctggatgtctccaatacaacgacagcccagaagaggaagtgcagccagacccagtgccccaggaaggtcatcaagatggagtctgaggaggggaaggaggcaaggttggctcggagctccccggagcagcccaggcccagcacctccaaggcagtctcaccaccccacctggatggaccgcctagccccaggagccccgtcataggaagtgaggtcttcctgcccaacagcaaccacgtggccagtggcgccggggaggcagaggaacgcgttgtggtgatcagcagctcggaagactcagatgccgaaaactcgtcctcccgagagctggatgacagcagcagtgagtccagtgacctccagctggaaggccccagcaccctcagggtcctggacgagaaccttgctgacccccaagcagaagacagacctctggttttctttgacctcaagattgacaatgaaagtgggttctcctggggctacccccacccctttctaatt

SEQ ID NO: 6141 - DNA, 2646 bp, Homo sapiens
  source 1..2646: mol_type = genomic DNA
atggagcctgcacccgcccgatctccgaggccccagcaggaccccgcccggccccaggagcccaccatgcctccccccgagaccccctctgaaggccgccagcccagccccagccccagccctacagagcgagcccccgcttcggaggaggagttccagtttctgcgctgccagcaatgccaggcggaagccaagtgcccgaagctgctgccttgtctgcacacgctgtgctcaggatgcctggaggcgtcgggcatgcagtgccccatctgccaggcgccctggcccctaggtgcagacacacccgccctggataacgtctttttcgagagtctgcagcggcgcctgtcggtgtaccggcagattgtggatgcgcaggctgtgtgcacccgctgcaaagagtcggccgacttctggtgctttgagtgcgagcagctcctctgcgccaagtgcttcgaggcacaccagtggttcctcaagcacgaggcccggcccctagcagagctgcgcaaccagtcggtgcgtgagttcctggacggcacccgcaagaccaacaacatcttctgctccaaccccaaccaccgcacccctacgctgaccagcatctactgccgaggatgttccaagccgctgtgctgctcgtgcgcgctccttgacagcagccacagtgagctcaagtgcgacatcagcgcagagatccagcagcgacaggaggagctggacgccatgacgcaggcgctgcaggagcaggatagtgcctttggcgcggttcacgcgcagatgcacgcggccgtcggccagctgggccgcgcgcgtgccgagaccgaggagctgatccgcgagcgcgtgcgccaggtggtagctcacgtgcgggctcaggagcgcgagctgctggaggctgtggacgcgcggtaccagcgcgactacgaggagatggccagtcggctgggccgcctggatgctgtgctgcagcgcatccgcacgggcagcgcgctggtgcagaggatgaagtgctacgcctcggaccaggaggtgctggacatgcacggtttcctgcgccaggcgctctgccgcctgcgccaggaggagccccagagcctgcaagctgccgtgcgcaccgatggcttcgacgagttcaaggtgcgcctgcaggacctcagctcttgcatcacccaggggaaagatgcagctgtatccaagaaagccagcccagaggctgccagcactcccagggaccctattgacgttgacctgcccgaggaggcagagagagtgaaggcccaggttcaggccctggggctggctgaagcccagcctatggctgtggtacagtcagtgcccggggcacaccccgtgccagtgtacgccttctccatcaaaggcccttcctatggagaggatgtctccaatacaacgacagcccagaagaggaagtgcagccagacccagtgccccaggaaggtcatcaagatggagtctgaggaggggaaggaggcaaggttggctcggagctccccggagcagcccaggcccagcacctccaaggcagtctcaccaccccacctggatggaccgcctagccccaggagccccgtcataggaagtgaggtcttcctgcccaacagcaaccacgtggccagtggcgccggggaggcagaggaacgcgttgtggtgatcagcagctcggaagactcagatgccgaaaactcgtcctcccgagagctggatgacagcagcagtgagtccagtgacctccagctggaaggccccagcaccctcagggtcctggacgagaaccttgctgacccccaagcagaagacagacctctggttttctttgacctcaagattgacaatgaaacccagaagattagccagctggctgcggtgaaccgggaaagcaagttccgcgtggtcatccagcctgaagccttcttcagcatctactccaaggccgtgtccctggaggtggggctgcagcacttcctcagctttctgagctccatgcgccgccctatcttggcctgctacaagctgtgggggcctggcctcccaaacttcttccgggccctggaggacattaacaggctgtgggaattccaggaggccatctcgggcttcctggctgccctgcctctcatccgggagcgtgtgcccggggccagcagcttcaaactcaagaacctggcccagacctacctggcgagaaacatgagcgagcgcagcgccatggctgccgtgctggccatgcgtgacctgtgccgcctcctcgaggtctccccgggcccccagctggcccagcatgtctaccccttcagtagcctgcagtgctttgcctccctgcagcccctggtgcaggcagctgtgctgccccgggctgaggcccgcctcctggccctacacaacgtgagcttcatggagctgctgagtgcacaccgccgtgaccggcaggggggcctgaagaagtacagccgctatctaagcctgcagaccaccacgttgccccctgcccagcctgctttcaacctgcaggctctgggcacctactttgaaggcctgttggagggtccggcgctggcacgggcagaaggagtctccaccccacttgctggccgtggcttggcagagagggcctcccagcagagc

SEQ ID NO: 6142 - DNA, 1680 bp, Homo sapiens
  source 1..1680: mol_type = genomic DNA
atggagcctgcacccgcccgatctccgaggccccagcaggaccccgcccggccccaggagcccaccatgcctccccccgagaccccctctgaaggccgccagcccagccccagccccagccctacagagcgagcccccgcttcggaggaggagttccagtttctgcgctgccagcaatgccaggcggaagccaagtgcccgaagctgctgccttgtctgcacacgctgtgctcaggatgcctggaggcgtcgggcatgcagtgccccatctgccaggcgccctggcccctaggtgcagacacacccgccctggataacgtctttttcgagagtctgcagcggcgcctgtcggtgtaccggcagattgtggatgcgcaggctgtgtgcacccgctgcaaagagtcggccgacttctggtgctttgagtgcgagcagctcctctgcgccaagtgcttcgaggcacaccagtggttcctcaagcacgaggcccggcccctagcagagctgcgcaaccagtcggtgcgtgagttcctggacggcacccgcaagaccaacaacatcttctgctccaaccccaaccaccgcacccctacgctgaccagcatctactgccgaggatgttccaagccgctgtgctgctcgtgcgcgctccttgacagcagccacagtgagctcaagtgcgacatcagcgcagagatccagcagcgacaggaggagctggacgccatgacgcaggcgctgcaggagcaggatagtgcctttggcgcggttcacgcgcagatgcacgcggccgtcggccagctgggccgcgcgcgtgccgagaccgaggagctgatccgcgagcgcgtgcgccaggtggtagctcacgtgcgggctcaggagcgcgagctgctggaggctgtggacgcgcggtaccagcgcgactacgaggagatggccagtcggctgggccgcctggatgctgtgctgcagcgcatccgcacgggcagcgcgctggtgcagaggatgaagtgctacgcctcggaccaggaggtgctggacatgcacggtttcctgcgccaggcgctctgccgcctgcgccaggaggagccccagagcctgcaagctgccgtgcgcaccgatggcttcgacgagttcaaggtgcgcctgcaggacctcagctcttgcatcacccaggggaaagatgcagctgtatccaagaaagccagcccagaggctgccagcactcccagggaccctattgacgttgacctgcccgaggaggcagagagagtgaaggcccaggttcaggccctggggctggctgaagcccagcctatggctgtggtacagtcagtgcccggggcacaccccgtgccagtgtacgccttctccatcaaaggcccttcctatggagaggatgtctccaatacaacgacagcccagaagaggaagtgcagccagacccagtgccccaggaaggtcatcaagatggagtctgaggaggggaaggaggcaaggttggctcggagctccccggagcagcccaggcccagcacctccaaggcagtctcaccaccccacctggatggaccgcctagccccaggagccccgtcataggaagtgaggtcttcctgcccaacagcaaccacgtggccagtggcgccggggaggcaggtagggagaggaacgcgttgtgg

SEQ ID NO: 6143 - DNA, 1833 bp, Homo sapiens
  source 1..1833: mol_type = genomic DNA
atggagcctgcacccgcccgatctccgaggccccagcaggaccccgcccggccccaggagcccaccatgcctccccccgagaccccctctgaaggccgccagcccagccccagccccagccctacagagcgagcccccgcttcggaggaggagttccagtttctgcgctgccagcaatgccaggcggaagccaagtgcccgaagctgctgccttgtctgcacacgctgtgctcaggatgcctggaggcgtcgggcatgcagtgccccatctgccaggcgccctggcccctaggtgcagacacacccgccctggataacgtctttttcgagagtctgcagcggcgcctgtcggtgtaccggcagattgtggatgcgcaggctgtgtgcacccgctgcaaagagtcggccgacttctggtgctttgagtgcgagcagctcctctgcgccaagtgcttcgaggcacaccagtggttcctcaagcacgaggcccggcccctagcagagctgcgcaaccagtcggtgcgtgagttcctggacggcacccgcaagaccaacaacatcttctgctccaaccccaaccaccgcacccctacgctgaccagcatctactgccgaggatgttccaagccgctgtgctgctcgtgcgcgctccttgacagcagccacagtgagctcaagtgcgacatcagcgcagagatccagcagcgacaggaggagctggacgccatgacgcaggcgctgcaggagcaggatagtgcctttggcgcggttcacgcgcagatgcacgcggccgtcggccagctgggccgcgcgcgtgccgagaccgaggagctgatccgcgagcgcgtgcgccaggtggtagctcacgtgcgggctcaggagcgcgagctgctggaggctgtggacgcgcggtaccagcgcgactacgaggagatggccagtcggctgggccgcctggatgctgtgctgcagcgcatccgcacgggcagcgcgctggtgcagaggatgaagtgctacgcctcggaccaggaggtgctggacatgcacggtttcctgcgccaggcgctctgccgcctgcgccaggaggagccccagagcctgcaagctgccgtgcgcaccgatggcttcgacgagttcaaggtgcgcctgcaggacctcagctcttgcatcacccaggggaaagatgcagctgtatccaagaaagccagcccagaggctgccagcactcccagggaccctattgacgttgacctgcccgaggaggcagagagagtgaaggcccaggttcaggccctggggctggctgaagcccagcctatggctgtggtacagtcagtgcccggggcacaccccgtgccagtgtacgccttctccatcaaaggcccttcctatggagaggatgtctccaatacaacgacagcccagaagaggaagtgcagccagacccagtgccccaggaaggtcatcaagatggagtctgaggaggggaaggaggcaaggttggctcggagctccccggagcagcccaggcccagcacctccaaggcagtctcaccaccccacctggatggaccgcctagccccaggagccccgtcataggaagtgaggtcttcctgcccaacagcaaccacgtggccagtggcgccggggaggcagaggaacgcgttgtggtgatcagcagctcggaagactcagatgccgaaaactcggtgagtggcccagaagttcagcccaggactcctgcctccccccatttcaggtcccagggggcacagccacagcaggtgactctcagacttgccttgcgcctggggaattttccagtgaggcat

SEQ ID NO: 6144 - DNA, 2343 bp, Homo sapiens
  source 1..2343: mol_type = genomic DNA
atggaaccggcgccagcgcgtagtccacgtccacagcaagatccagcccgcccgcaagaaccaacgatgccaccaccagaaaccccaagcgaaggccgccagccaagcccgagtccaagtccgacggaacgtgccccggcgagtgaagaggaattccagtttctgcgctgccagcagtgtcaagccgaagccaaatgcccgaaactgctgccatgtctgcatacgctgtgcagcggttgtctggaagccagtggtatgcagtgcccaatttgccaagccccgtggccactgggcgccgatacgccagccctcgacaacgtgtttttcgaaagtctgcagcgtcgtctgagcgtttaccgccagattgtggacgcccaagccgtttgcacccgttgcaaggaaagtgcggacttttggtgcttcgagtgcgaacagctgctgtgcgccaaatgctttgaagcgcaccagtggtttctgaaacacgaagcccgtccactggcggaactgcgcaaccagagcgttcgtgagtttctggatggcacccgcaagaccaacaatatcttttgcagtaacccgaatcaccgcacgccgacgctgaccagtatctactgccgcggctgcagcaaaccactgtgctgcagctgtgcgctgctggatagcagccacagcgaactgaagtgcgacatcagtgcggaaatccagcaacgccaagaagaactcgatgcgatgacccaagcgctgcaagaacaagatagtgcgtttggtgccgttcatgcccagatgcatgcggcggttggtcaactgggccgtgcccgcgccgaaaccgaagaactgatccgtgagcgcgtgcgccaagttgtggcccatgttcgcgcccaagaacgcgaactgctggaagcggttgatgcgcgctaccagcgtgattatgaagagatggccagccgtctgggtcgtctggatgcggtgctgcagcgcattcgcaccggtagcgcgctggtgcagcgcatgaaatgctatgcgagcgaccaagaagtgctggatatgcacggttttctgcgtcaagcgctgtgccgtctgcgccaagaggaaccacagagtctgcaagccgccgtgcgtaccgatggcttcgacgaattcaaggttcgtctgcaagatctgagcagctgcatcacccaaggcaaagatgccgcggtgagcaaaaaagcgagcccagaagccgccagtacccccagggaccctattgacgttgacctggatgtctccaatacaacgacagcccagaagaggaagtgcagccagacccagtgccccaggaaggtcatcaagatggagtctgaggaggggaaggaggcaaggttggctcggagctccccggagcagcccaggcccagcacctccaaggcagtctcaccaccccacctggatggaccgcctagccccaggagccccgtcataggaagtgaggtcttcctgcccaacagcaaccacgtggccagtggcgccggggaggcagaggaacgcgttgtggtgatcagcagctcggaagactcagatgccgaaaactcgtgcatggagcccatggagaccgccgagccacagtcctcgccagcccactcctcgccagcccactcctcgccagcccactcctcgccagtccagtctctgctgagagcacaaggagcctccagcctgccctgtggcacataccaccccccagcttggcctccccaccagcccgctgagcaggctgccacccccgatgctgagcctcacagcgagcctcctgatcaccaggagcgccctgccgtccaccgtgggatccgctacctgttgtacagagcacagagagccatccgccttcgccatgccctccgcttgcaccctcaattgcatcgggcccctattcggacttggtctccccatgtggtccaagccagcactcctgccatcacagggcccctcaaccatcctgccaatgcccaggaacatcctgcccagctgcaaaggggcatcagcccaccccaccggatacgaggggctgtgcgatcccgcagccgctccctccggggctcctcccatttatcccagtggctcaacaacttttttgccctccccttctcctccatggcttcccagcttgacatgtcttccgtggtgggggcaggggaaagcagagcccagactcttggagcaggtgttccccctggggactctgtcagaggctccatggaggcctctcaagtccaagtgcctctggaagcctctccaattacattcccaccaccctgtgccccagaaaggccccccatcagcccagtcccaggcgcccgtcaagcaggcctc

SEQ ID NO: 6145 - DNA, 1269 bp, Homo sapiens
  source 1..1269: mol_type = genomic DNA
atggagcctgcacccgcccgatctccgaggccccagcaggaccccgcccggccccaggagcccaccatgcctccccccgagaccccctctgaaggccgccagcccagccccagccccagccctacagagcgagcccccgcttcggaggaggagttccagtttctgcgctgccagcaatgccaggcggaagccaagtgcccgaagctgctgccttgtctgcacacgctgtgctcaggatgcctggaggcgtcgggcatgcagtgccccatctgccaggcgccctggcccctaggtgcagacacacccgccctggataacgtctttttcgagagtctgcagcggcgcctgtcggtgtaccggcagattgtggatgcgcaggctgtgtgcacccgctgcaaagagtcggccgacttctggtgctttgagtgcgagcagctcctctgcgccaagtgcttcgaggcacaccagtggttcctcaagcacgaggcccggcccctagcagagctgcgcaaccagtcggtgcgtgagttcctggacggcacccgcaagaccaacaacatcttctgctccaaccccaaccaccgcacccctacgctgaccagcatctactgccgaggatgttccaagccgctgtgctgctcgtgcgcgctccttgacagcagccacagtgagctcaagtgcgacatcagcgcagagatccagcagcgacaggaggagctggacgccatgacgcaggcgctgcaggagcaggatagtgcctttggcgcggttcacgcgcagatgcacgcggccgtcggccagctgggccgcgcgcgtgccgagaccgaggagctgatccgcgagcgcgtgcgccaggtggtagctcacgtgcgggctcaggagcgcgagctgctggaggctgtggacgcgcggtaccagcgcgactacgaggagatggccagtcggctgggccgcctggatgctgtgctgcagcgcatccgcacgggcagcgcgctggtgcagaggatgaagtgctacgcctcggaccaggaggtgctggacatgcacggtttcctgcgccaggcgctctgccgcctgcgccaggaggagccccagagcctgcaagctgccgtgcgcaccgatggcttcgacgagttcaaggtgcgcctgcaggacctcagctcttgcatcacccaggggaaagatgcagctgtatccaagaaagccagcccagaggctgccagcactcccagggaccctattgacgttgacctgaggaacgcgttgtgg

SEQ ID NO: 6146 - DNA, 1899 bp, Homo sapiens
  source 1..1899: mol_type = genomic DNA
atggagcctgcacccgcccgatctccgaggccccagcaggaccccgcccggccccaggagcccaccatgcctccccccgagaccccctctgaaggccgccagcccagccccagccccagccctacagagcgagcccccgcttcggaggaggagttccagtttctgcgctgccagcaatgccaggcggaagccaagtgcccgaagctgctgccttgtctgcacacgctgtgctcaggatgcctggaggcgtcgggcatgcagtgccccatctgccaggcgccctggcccctaggtgcagacacacccgccctggataacgtctttttcgagagtctgcagcggcgcctgtcggtgtaccggcagattgtggatgcgcaggctgtgtgcacccgctgcaaagagtcggccgacttctggtgctttgagtgcgagcagctcctctgcgccaagtgcttcgaggcacaccagtggttcctcaagcacgaggcccggcccctagcagagctgcgcaaccagtcggtgcgtgagttcctggacggcacccgcaagaccaacaacatcttctgctccaaccccaaccaccgcacccctacgctgaccagcatctactgccgaggatgttccaagccgctgtgctgctcgtgcgcgctccttgacagcagccacagtgagctcaagtgcgacatcagcgcagagatccagcagcgacaggaggagctggacgccatgacgcaggcgctgcaggagcaggatagtgcctttggcgcggttcacgcgcagatgcacgcggccgtcggccagctgggccgcgcgcgtgccgagaccgaggagctgatccgcgagcgcgtgcgccaggtggtagctcacgtgcgggctcaggagcgcgagctgctggaggctgtggacgcgcggtaccagcgcgactacgaggagatggccagtcggctgggccgcctggatgctgtgctgcagcgcatccgcacgggcagcgcgctggtgcagaggatgaagtgctacgcctcggaccaggaggtgctggacatgcacggtttcctgcgccaggcgctctgccgcctgcgccaggaggagccccagagcctgcaagctgccgtgcgcaccgatggcttcgacgagttcaaggtgcgcctgcaggacctcagctcttgcatcacccaggggaaagatgcagctgtatccaagaaagccagcccagaggctgccagcactcccagggaccctattgacgttgacctgcccgaggaggcagagagagtgaaggcccaggttcaggccctggggctggctgaagcccagcctatggctgtggtacagtcagtgcccggggcacaccccgtgccagtgtacgccttctccatcaaaggcccttcctatggagaggatgtctccaatacaacgacagcccagaagaggaagtgcagccagacccagtgccccaggaaggtcatcaagatggagtctgaggaggggaaggaggcaaggttggctcggagctccccggagcagcccaggcccagcacctccaaggcagtctcaccaccccacctggatggaccgcctagccccaggagccccgtcataggaagtgaggtcttcctgcccaacagcaaccacgtggccagtggcgccggggaggcagaggaacgcgttgtggtgatcagcagctcggaagactcagatgccgaaaactcgtcctcccgagagctggatgacagcagcagtgagtccagtgacctccagctggaaggccccagcaccctcagggtcctggacgagaaccttgctgacccccaagcagaagacagacctctggttttctttgacctcaagattgacaatgaaagtgggttctcctggggctacccccacccctttctaatt

SEQ ID NO: 6147 - DNA, 2487 bp, Homo sapiens
  source 1..2487: mol_type = genomic DNA
atggagcctgcacccgcccgatctccgaggccccagcaggaccccgcccggccccaggagcccaccatgcctccccccgagaccccctctgaaggccgccagcccagccccagccccagccctacagagcgagcccccgcttcggaggaggagttccagtttctgcgctgccagcaatgccaggcggaagccaagtgcccgaagctgctgccttgtctgcacacgctgtgctcaggatgcctggaggcgtcgggcatgcagtgccccatctgccaggcgccctggcccctaggtgcagacacacccgccctggataacgtctttttcgagagtctgcagcggcgcctgtcggtgtaccggcagattgtggatgcgcaggctgtgtgcacccgctgcaaagagtcggccgacttctggtgctttgagtgcgagcagctcctctgcgccaagtgcttcgaggcacaccagtggttcctcaagcacgaggcccggcccctagcagagctgcgcaaccagtcggtgcgtgagttcctggacggcacccgcaagaccaacaacatcttctgctccaaccccaaccaccgcacccctacgctgaccagcatctactgccgaggatgttccaagccgctgtgctgctcgtgcgcgctccttgacagcagccacagtgagctcaagtgcgacatcagcgcagagatccagcagcgacaggaggagctggacgccatgacgcaggcgctgcaggagcaggatagtgcctttggcgcggttcacgcgcagatgcacgcggccgtcggccagctgggccgcgcgcgtgccgagaccgaggagctgatccgcgagcgcgtgcgccaggtggtagctcacgtgcgggctcaggagcgcgagctgctggaggctgtggacgcgcggtaccagcgcgactacgaggagatggccagtcggctgggccgcctggatgctgtgctgcagcgcatccgcacgggcagcgcgctggtgcagaggatgaagtgctacgcctcggaccaggaggtgctggacatgcacggtttcctgcgccaggcgctctgccgcctgcgccaggaggagccccagagcctgcaagctgccgtgcgcaccgatggcttcgacgagttcaaggtgcgcctgcaggacctcagctcttgcatcacccaggggaaagatgcagctgtatccaagaaagccagcccagaggctgccagcactcccagggaccctattgacgttgacctgcccgaggaggcagagagagtgaaggcccaggttcaggccctggggctggctgaagcccagcctatggctgtggtacagtcagtgcccggggcacaccccgtgccagtgtacgccttctccatcaaaggcccttcctatggagaggatgtctccaatacaacgacagcccagaagaggaagtgcagccagacccagtgccccaggaaggtcatcaagatggagtctgaggaggggaaggaggcaaggttggctcggagctccccggagcagcccaggcccagcacctccaaggcagtctcaccaccccacctggatggaccgcctagccccaggagccccgtcataggaagtgaggtcttcctgcccaacagcaaccacgtggccagtggcgccggggaggcagaggaacgcgttgtggtgatcagcagctcggaagactcagatgccgaaaactcgtgcatggagcccatggagaccgccgagccacagtcctcgccagcccactcctcgccagcccactcctcgccagcccactcctcgccagtccagtctctgctgagagcacaaggagcctccagcctgccctgtggcacataccaccccccagcttggcctccccaccagcccgctgagcaggctgccacccccgatgctgagcctcacagcgagcctcctgatcaccaggagcgccctgccgtccaccgtgggatccgctacctgttgtacagagcacagagagccatccgccttcgccatgccctccgcttgcaccctcaattgcatcgggcccctattcggacttggtctccccatgtggtccaagccagcactcctgccatcacagggcccctcaaccatcctgccaatgcccaggaacatcctgcccagctgcaaaggggcatcagcccaccccaccggatacgaggggctgtgcgatcccgcagccgctccctccggggctcctcccatttatcccagtggctcaacaacttttttgccctccccttctcctccatggcttcccagcttgacatgtcttccgtggtgggggcaggggaaagcagagcccagactcttggagcaggtgttccccctggggactctgtcagaggctccatggaggcctctcaagtccaagtgcctctggaagcctctccaattacattcccaccaccctgtgccccagaaaggccccccatcagcccagtcccaggcgcccgtcaagcaggcctc

SEQ ID NO: 6148 - DNA, 1305 bp, Homo sapiens
  source 1..1305: mol_type = genomic DNA
atggagcctgcacccgcccgatctccgaggccccagcaggaccccgcccggccccaggagcccaccatgcctccccccgagaccccctctgaaggccgccagcccagccccagccccagccctacagagcgagcccccgcttcggaggaggagttccagtttctgcgctgccagcaatgccaggcggaagccaagtgcccgaagctgctgccttgtctgcacacgctgtgctcaggatgcctggaggcgtcgggcatgcagtgccccatctgccaggcgccctggcccctaggtgcagacacacccgccctggataacgtctttttcgagagtctgcagcggcgcctgtcggtgtaccggcagattgtggatgcgcaggctgtgtgcacccgctgcaaagagtcggccgacttctggtgctttgagtgcgagcagctcctctgcgccaagtgcttcgaggcacaccagtggttcctcaagcacgaggcccggcccctagcagagctgcgcaaccagtcggtgcgtgagttcctggacggcacccgcaagaccaacaacatcttctgctccaaccccaaccaccgcacccctacgctgaccagcatctactgccgaggatgttccaagccgctgtgctgctcgtgcgcgctccttgacagcagccacagtgagctcaagtgcgacatcagcgcagagatccagcagcgacaggaggagctggacgccatgacgcaggcgctgcaggagcaggatagtgcctttggcgcggttcacgcgcagatgcacgcggccgtcggccagctgggccgcgcgcgtgccgagaccgaggagctgatccgcgagcgcgtgcgccaggtggtagctcacgtgcgggctcaggagcgcgagctgctggaggctgtggacgcgcggtaccagcgcgactacgaggagatggccagtcggctgggccgcctggatgctgtgctgcagcgcatccgcacgggcagcgcgctggtgcagaggatgaagtgctacgcctcggaccaggaggtgctggacatgcacggtttcctgcgccaggcgctctgccgcctgcgccaggaggagccccagagcctgcaagctgccgtgcgcaccgatggcttcgacgagttcaaggtgcgcctgcaggacctcagctcttgcatcacccaggggaaagatgcagctgtatccaagaaagccagcccagaggctgccagcactcccagggaccctattgacgttgacctgctgcctcctccagcccatgctcttacaggccctgcacagagtagcactcat

SEQ ID NO: 6149 - DNA, 7242 bp, Homo sapiens
  source 1..7242: mol_type = genomic DNA
atggccgagaatgtggtggaaccggggccgccttcagccaagcggcctaaactctcatctccggccctctcggcgtccgccagcgatggcacagattttggctctctatttgacttggagcacgacttaccagatgaattaatcaactctacagaattgggactaaccaatggtggtgatattaatcagcttcagacaagtcttggcatggtacaagatgcagcttctaaacataaacagctgtcagaattgctgcgatctggtagttcccctaacctcaatatgggagttggtggcccaggtcaagtcatggccagccaggcccaacagagcagtcctggattaggtttgataaatagcatggtcaaaagcccaatgacacaggcaggcttgacttctcccaacatggggatgggcactagtggaccaaatcagggtcctacgcagtcaacaggtatgatgaacagtccagtaaatcagcctgccatgggaatgaacacagggatgaatgcgggcatgaatcctggaatgttggctgcaggcaatggacaagggataatgcctaatcaagtcatgaacggttcaattggagcaggccgagggcgacagaatatgcagtacccaaacccaggcatgggaagtgctggcaacttactgactgagcctcttcagcagggctctccccagatgggaggacaaacaggattgagaggcccccagcctcttaagatgggaatgatgaacaaccccaatccttatggttcaccatatactcagaatcctggacagcagattggagccagtggccttggtctccagattcagacaaaaactgtactatcaaataacttatctccatttgctatggacaaaaaggcagttcctggtggaggaatgcccaacatgggtcaacagccagccccgcaggtccagcagccaggcctggtgactccagttgcccaagggatgggttctggagcacatacagctgatccagagaagcgcaagctcatccagcagcagcttgttctccttttgcatgctcacaagtgccagcgccgggaacaggccaatggggaagtgaggcagtgcaaccttccccactgtcgcacaatgaagaatgtcctaaaccacatgacacactgccagtcaggcaagtcttgccaagtggcacactgtgcatcttctcgacaaatcatttcacactggaagaattgtacaagacatgattgtcctgtgtgtctccccctcaaaaatgctggtgataagagaaatcaacagccaattttgactggagcacccgttggacttggaaatcctagctctctaggggtgggtcaacagtctgcccccaacctaagcactgttagtcagattgatcccagctccatagaaagagcctatgcagctcttggactaccctatcaagtaaatcagatgccgacacaaccccaggtgcaagcaaagaaccagcagaatcagcagcctgggcagtctccccaaggcatgcggcccatgagcaacatgagtgctagtcctatgggagtaaatggaggtgtaggagttcaaacgccgagtcttctttctgactcaatgttgcattcagccataaattctcaaaacccaatgatgagtgaaaatgccagtgtgccctccctgggtcctatgccaacagcagctcaaccatccactactggaattcggaaacagtggcacgaagatattactcaggatcttcgaaatcatcttgttcacaaactcgtccaagccatatttcctacgccggatcctgctgctttaaaagacagacggatggaaaacctagttgcatatgctcggaaagttgaaggggacatgtatgaatctgcaaacaatcgagcggaatactaccaccttctagctgagaaaatctataagatccagaaagaactagaagaaaaacgaaggaccagactacagaagcagaacatgctaccaaatgctgcaggcatggttccagtttccatgaatccagggcctaacatgggacagccgcaaccaggaatgacttctaatggccctctacctgacccaagtatgatccgtggcagtgtgccaaaccagatgatgcctcgaataactccacaatctggtttgaatcaatttggccagatgagcatggcccagccccctattgtaccccggcaaacccctcctcttcagcaccatggacagttggctcaacctggagctctcaacccgcctatgggctatgggcctcgtatgcaacagccttccaaccagggccagttccttcctcagactcagttcccatcacagggaatgaatgtaacaaatatccctttggctccgtccagcggtcaagctccagtgtctcaagcacaaatgtctagttcttcctgcccggtgaactctcctataatgcctccagggtctcaggggagccacattcactgtccccagcttcctcaaccagctcttcatcagaattcaccctcgcctgtacctagtcgtacccccacccctcaccatactcccccaagcataggggctcagcagccaccagcaacaacaattccagcccctgttcctacacctcctgccatgccacctgggccacagtcccaggctctacatccccctccaaggcagacacctacaccaccaacaacacaacttccccaacaagtgcagccttcacttcctgctgcaccttctgctgaccagccccagcagcagcctcgctcacagcagagcacagcagcgtctgttcctaccccaacagcaccgctgcttcctccgcagcctgcaactccactttcccagccagctgtaagcattgaaggacaggtatcaaatcctccatctactagtagcacagaagtgaattctcaggccattgctgagaagcagccttcccaggaagtgaagatggaggccaaaatggaagtggatcaaccagaaccagcagatactcagccggaggatatttcagagtctaaagtggaagactgtaaaatggaatctaccgaaacagaagagagaagcactgagttaaaaactgaaataaaagaggaggaagaccagccaagtacttcagctacccagtcatctccggctccaggacagtcaaagaaaaagattttcaaaccagaagaactacgacaggcactgatgccaactttggaggcactttaccgtcaggatccagaatcccttccctttcgtcaacctgtggaccctcagcttttaggaatccctgattactttgatattgtgaagagccccatggatctttctaccattaagaggaagttagacactggacagtatcaggagccctggcagtatgtcgatgatatttggcttatgttcaataatgcctggttatataaccggaaaacatcacgggtatacaaatactgctccaagctctctgaggtctttgaacaagaaattgacccagtgatgcaaagccttggatactgttgtggcagaaagttggagttctctccacagacactgtgttgctacggcaaacagttgtgcacaatacctcgtgatgccacttattacagttaccagaacaggtatcatttctgtgagaagtgtttcaatgagatccaaggggagagcgtttctttgggggatgacccttcccagcctcaaactacaataaataaagaacaattttccaagagaaaaaatgacacactggatcctgaactgtttgttgaatgtacagagtgcggaagaaagatgcatcagatctgtgtccttcaccatgagatcatctggcctgctggattcgtctgtgatggctgtttaaagaaaagtgcacgaactaggaaagaaaataagttttctgctaaaaggttgccatctaccagacttggcacctttctagagaatcgtgtgaatgactttctgaggcgacagaatcaccctgagtcaggagaggtcactgttagagtagttcatgcttctgacaaaaccgtggaagtaaaaccaggcatgaaagcaaggtttgtggacagtggagagatggcagaatcctttccataccgaaccaaagccctctttgcctttgaagaaattgatggtgttgacctgtgcttctttggcatgcatgttcaagagtatggctctgactgccctccacccaaccagaggagagtatacatatcttacctcgatagtgttcatttcttccgtcctaaatgcttgaggactgcagtctatcatgaaatcctaattggatatttagaatatgtcaagaaattaggttacacaacagggcatatttgggcatgtccaccaagtgagggagatgattatatcttccattgccatcctcctgaccagaagatacccaagcccaagcgactgcaggaatggtacaaaaaaatgcttgacaaggctgtatcagagcgtattgtccatgactacaaggatatttttaaacaagctactgaagatagattaacaagtgcaaaggaattgccttatttcgagggtgatttctggcccaatgttctggaagaaagcattaaggaactggaacaggaggaagaagagagaaaacgagaggaaaacaccagcaatgaaagcacagatgtgaccaagggagacagcaaaaatgctaaaaagaagaataataagaaaaccagcaaaaataagagcagcctgagtaggggcaacaagaagaaacccgggatgcccaatgtatctaacgacctctcacagaaactatatgccaccatggagaagcataaagaggtcttctttgtgatccgcctcattgctggccctgctgccaactccctgcctcccattgttgatcctgatcctctcatcccctgcgatctgatggatggtcgggatgcgtttctcacgctggcaagggacaagcacctggagttctcttcactccgaagagcccagtggtccaccatgtgcatgctggtggagctgcacacgcagagccaggaccgctttgtctacacctgcaatgaatgcaagcaccatgtggagacacgctggcactgtactgtctgtgaggattatgacttgtgtatcacctgctataacactaaaaaccatgaccacaaaatggagaaactaggccttggcttagatgatgagagcaacaaccagcaggctgcagccacccagagcccaggcgattctcgccgcctgagtatccagcgctgcatccagtctctggtccatgcttgccagtgtcggaatgccaattgctcactgccatcctgccagaagatgaagcgggttgtgcagcataccaagggttgcaaacggaaaaccaatggcgggtgccccatctgcaagcagctcattgccctctgctgctaccatgccaagcactgccaggagaacaaatgcccggtgccgttctgcctaaacatcaagcagaagctccggcagcaacagctgcagcaccgactacagcaggcccaaatgcttcgcaggaggatggccagcatgcagcggactggtgtggttgggcagcaacagggcctcccttcccccactcctgccactccaacgacaccaactggccaacagccaaccaccccgcagacgccccagcccacttctcagcctcagcctacccctcccaatagcatgccaccctacttgcccaggactcaagctgctggccctgtgtcccagggtaaggcagcaggccaggtgacccctccaacccctcctcagactgctcagccaccccttccagggcccccacctgcagcagtggaaatggcaatgcagattcagagagcagcggagacgcagcgccagatggcccacgtgcaaatttttcaaaggccaatccaacaccagatgcccccgatgactcccatggcccccatgggtatgaacccacctcccatgaccagaggtcccagtgggcatttggagccagggatgggaccgacagggatgcagcaacagccaccctggagccaaggaggattgcctcagccccagcaactacagtctgggatgccaaggccagccatgatgtcagtggcccagcatggtcaacctttgaacatggctccacaaccaggattgggccaggtaggtatcagcccactcaaaccaggcactgtgtctcaacaagccttacaaaaccttttgcggactctcaggtctcccagctctcccctgcagcagcaacaggtgcttagtatccttcacgccaacccccagctgttggctgcattcatcaagcagcgggctgccaagtatgccaactctaatccacaacccatccctgggcagcctggcatgccccaggggcagccagggctacagccacctaccatgccaggtcagcagggggtccactccaatccagccatgcagaacatgaatccaatgcaggcgggcgttcagagggctggcctgccccagcagcaaccacagcagcaactccagccacccatgggagggatgagcccccaggctcagcagatgaacatgaaccacaacaccatgccttcacaattccgagacatcttgagacgacagcaaatgatgcaacagcagcagcaacagggagcagggccaggaataggccctggaatggccaaccataaccagttccagcaaccccaaggagttggctacccaccacagcagcagcagcggatgcagcatcacatgcaacagatgcaacaaggaaatatgggacagataggccagcttccccaggccttgggagcagaggcaggtgccagtctacaggcctatcagcagcgactccttcagcaacagatggggtcccctgttcagcccaaccccatgagcccccagcagcatatgctcccaaatcaggcccagtccccacacctacaaggccagcagatccctaattctctctccaatcaagtgcgctctccccagcctgtcccttctccacggccacagtcccagcccccccactccagtccttccccaaggatgcagcctcagccttctccacaccacgtttccccacagacaagttccccacatcctggactggtagctgcccaggccaaccccatggaacaagggcattttgccagcccggaccagaattcaatgctttctcagcttgctagcaatccaggcatggcaaacctccatggtgcaagcgccacggacctgggactcagcaccgataactcagacttgaattcaaacctctcacagagtacactagacatacac

SEQ ID NO: 6150 - DNA, 2859 bp, Homo sapiens
  source 1..2859: mol_type = genomic DNA
atgcgacagctgcagaagaaaataaagaatggaacactgaacataaagcaggacgacccctttgaactcttcatagcagccacaaacattcgctactgctactacaacgagacccacaagatcctgggcaataccttcggcatgtgtgtgctgcaggattttgaagccttaactccaaacttgctggccaggactgtagaaacagtggaaggtggtgggctagtggtcatcctcctacggaccatgaactcactcaagcaattgtacacagtgactatggatgtgcattccaggtacagaactgaggcccatcaggatgtggtgggaagatttaatgaaaggtttattctgtctctggcctcttgtaagaagtgtctcgtcattgatgaccagctcaacatcctgcccatctcctcccacgttgccaccatggaggccctgcctccccagactccggatgagagtcttggtccttctgatctggagctgagggagttgaaggagagcttgcaggacacccagcctgtgggtgtgttggtggactgctgtaagactctagaccaggccaaagctgtcttgaaatttatcgagggcatctctgaaaagaccctgaggagtactgttgcactcacagctgctcgaggacggggaaaatctgcagccctgggattggcgattgctggggcggtggcatttgggtactccaatatctttgttacctccccaagccctgataacctccatactctgtttgaatttgtatttaaaggatttgatgctctgcaatatcaggaacatctggattatgagattatccagtctctaaatcctgaatttaacaaagcagtgatcagagtgaatgtatttcgagaacacaggcagactattcagtatatacatcctgcagatgctgtgaagctgggccaggctgaactagttgtgattgatgaagctgccgccatccccctccccttggtgaagagcctacttggcccctaccttgttttcatggcatccaccatcaatggctatgagggcactggccggtcactgtccctcaagctaattcagcagctccgtcaacagagcgcccagagccaggtcagcaccactgctgagaataagaccacgacgacagccagattggcatcagcgcggacactgtatgaggtttccctccaggagtcaatccgatacgcccctggggatgcagtggagaagtggctgaatgacttgctgtgcctggattgcctcaacatcactcggatagtctcaggctgccccttgcctgaagcttgtgaactgtactatgttaatagagataccctcttttgctaccacaaggcctctgaagttttcctccaacggcttatggccctctacgtggcttctcactacaagaactctcccaatgatctccagatgctctccgatgcacctgctcaccatctcttctgccttctgcctcccgtgccccccacccagaatgcccttccagaagtgcttgctgttatccaggtgtgccttgaaggggagatttctcgccagtccatcttgaacagtctgtctcgaggcaagaaggcttcaggggacctgattccatggacagtgtcagaacagttccaagatccagactttggtggtctgtctggtggaagggtcgttcgcattgctgttcacccagattatcaagggatgggctatggcagccgtgctctgcagctgctgcagatgtactatgaaggcaggtttccttgtctggaggaaaaggtccttgagacaccacaggaaattcacaccgtaagcagcgaggctgtcagcttgttggaagaggtcatcactccccggaaggacctgcctcctttactcctcaaattgaatgagaggcctgccgaacgcctggattacctgggtgtttcctatggcttgacccccaggctcctcaagttctggaaacgagctggatttgttcctgtttatctgagacagaccccgaatgacctgaccggagagcactcgtgcatcatgctgaagacgctcactgatgaggatgaggctgaccagggaggctggcttgcagccttctggaaagatttccgacggcggttcctagccttgctctcctaccagttcagtaccttctctccttccctggctctgaacatcattcagaacaggaacatggggaagccagcccagcctgccctgagccgggaggagctggaagcactcttcctcccctatgacctgaagcggctggagatgtattcacggaatatggtggactatcacctcatcatggacatgatcccggccatctctcgcatctatttcctgaaccagctgggggacctggccctgtctgcggctcagtcggctcttctcttggggattggcctgcagcataagtctgtggaccagctggaaaaggagattgagctgccctcgggccagttgatgggacttttcaaccggatcatccgcaaagttgtgaagctatttaatgaagttcaggaaaaggccattgaggagcagatggtggcagcgaaggatgtggtcatggagcccacgatgaagaccctcagtgacgacctagatgaagcagcaaaggaatttcaggagaaacacaagaaggaagtagggaagctgaagagcatggacctctctgaatacataatccgtggggacgatgaagagtggaatgaagttttgaacaaagctgggccgaacgcctcgatcatcagcctgaaaagtgacaagaaaaggaagttagaggccaaacaagaacccaaacagagcaagaagttgaagaacagagagacaaagaacaaaaaagatatgaaactgaagcggaagaaa

SEQ ID NO: 6151 - DNA, 663 bp, Homo sapiens
  source 1..663: mol_type = genomic DNA
atggctgccgccggggccaggcctgtggagctgggcttcgccgagtcggcgccggcgtggcgactgcgcagcgagcagttccccagcaaggtgggcgggcggccggcatggctgggcgcggccgggctgccggggccccaggccctggcctgcgagctgtgcggccgcccgctctccttcctgctgcaggtgtatgcgccgctgcctggccgcccggacgccttccaccgctgcatcttcctcttctgctgccgcgagcagccgtgctgtgccggcctgcgagtttttaggaatcaactacccaggaaaaacgatttttactcatatgagccaccttctgagaatcctcccccagaaacaggagaatcagtgtgtctccagcttaagtctggtgctcatctctgcagggtttgtggctgtttaggccccaaaacgtgctccagatgccacaaagcatattactgcagcaaggagcatcagaccctagactggagattgggacataagcaggcttgtgcacaaccagatcatctggaccatataattccagaccacaacttcctttttccagaatttgaaattgtaatagaaacagaagatgagattatgcctgaggttgtggaaaaggaagattactcagagattatagggagcatggggata

SEQ ID NO: 6152 - DNA, 585 bp, Homo sapiens
  source 1..585: mol_type = genomic DNA
atggctgccgccggggccaggcctgtggagctgggcttcgccgagtcggcgccggcgtggcgactgcgcagcgagcagttccccagcaaggtgtatgcgccgctgcctggccgcccggacgccttccaccgctgcatcttcctcttctgctgccgcgagcagccgtgctgtgccggcctgcgagtttttaggaatcaactacccaggaaaaacgatttttactcatatgagccaccttctgagaatcctcccccagaaacaggagaatcagtgtgtctccagcttaagtctggtgctcatctctgcagggtttgtggctgtttaggccccaaaacgtgctccagatgccacaaagcatattactgcagcaaggagcatcagaccctagactggagattgggacataagcaggcttgtgcacaaccagatcatctggaccatataattccagaccacaacttcctttttccagaatttgaaattgtaatagaaacagaagatgagattatgcctgaggttgtggaaaaggaagattactcagagattatagggagcatgggtaagcagtttcaggacttcattcat

SEQ ID NO: 6153 - DNA, 564 bp, Homo sapiens
  source 1..564: mol_type = genomic DNA
atggctgccgccggggccaggcctgtggagctgggcttcgccgagtcggcgccggcgtggcgactgcgcagcgagcagttccccagcaaggtgtatgcgccgctgcctggccgcccggacgccttccaccgctgcatcttcctcttctgctgccgcgagcagccgtgctgtgccggcctgcgagtttttaggaatcaactacccaggaaaaacgatttttactcatatgagccaccttctgagaatcctcccccagaaacaggagaatcagtgtgtctccagcttaagtctggtgctcatctctgcagggtttgtggctgtttaggccccaaaacgtgctccagatgccacaaagcatattactgcagcaaggagcatcagaccctagactggagattgggacataagcaggcttgtgcacaaccagatcatctggaccatataattccagaccacaacttcctttttccagaatttgaaattgtaatagaaacagaagatgagattatgcctgaggttgtggaaaaggaagattactcagagattatagggagcatggggata

SEQ ID NO: 6154 - DNA, 1032 bp, Homo sapiens
  source 1..1032: mol_type = genomic DNA
atggctgccgccggggccaggcctgtggagctgggcttcgccgagtcggcgccggcgtggcgactgcgcagcgagcagttccccagcaaggtgggcgggcggccggcatggctgggcgcggccgggctgccggggccccaggccctggcctgcgagctgtgcggccgcccgctctccttcctgctgcaggtgtatgcgccgctgcctggccgcccggacgccttccaccgctgcatcttcctcttctgctgccgcgagcagccgtgctgtgccggcctgcgagtttttaggaatcaactacccaggaaaaacgatttttactcatatgagccaccttctgagaatcctcccccagaaacaggagaatcagtgtgtctccagcttaagtctggtgctcatctctgcagggtttgtggctgtttaggccccaaaacgtgctccagatgccacaaagcatattactgcagcaaggagcatcagaccctagactggagattgggacataagcaggcttgtgcacaaccagatcatctggaccatataattccagaccacaacttcctttttccagaatttgaaattgtaatagaaacagaagatgagattatgcctgaggttgtggaaaaggaagattactcagagattatagggagcatgggtgaagcacttgaggaagaactggattccatggcaaaacatgaatccagggaagataaaatttttcagaagtttaaaactcagatagcccttgaaccagaacagattcttagatatggcagaggtattgcccccatctggatttctggtgaaaatattcctcaagaaaaggatattccagattgcccctgtggtgccaagagaatattggaattccaggtcatgcctcagctcctaaactacctgaaggctgacagactgggcaagagcattgactggggcatcctggctgtcttcacctgtgctgagagctgcagcttgggtactggctatacagaagaatttgtgtggaagcaggatgtaacagatacaccg

SEQ ID NO: 6155 - DNA, 933 bp, Homo sapiens
  source 1..933: mol_type = genomic DNA
atggctgccgccggggccaggcctgtggagctgggcttcgccgagtcggcgccggcgtggcgactgcgcagcgagcagttccccagcaaggtgtatgcgccgctgcctggccgcccggacgccttccaccgctgcatcttcctcttctgctgccgcgagcagccgtgctgtgccggcctgcgagtttttaggaatcaactacccaggaaaaacgatttttactcatatgagccaccttctgagaatcctcccccagaaacaggagaatcagtgtgtctccagcttaagtctggtgctcatctctgcagggtttgtggctgtttaggccccaaaacgtgctccagatgccacaaagcatattactgcagcaaggagcatcagaccctagactggagattgggacataagcaggcttgtgcacaaccagatcatctggaccatataattccagaccacaacttcctttttccagaatttgaaattgtaatagaaacagaagatgagattatgcctgaggttgtggaaaaggaagattactcagagattatagggagcatgggtgaagcacttgaggaagaactggattccatggcaaaacatgaatccagggaagataaaatttttcagaagtttaaaactcagatagcccttgaaccagaacagattcttagatatggcagaggtattgcccccatctggatttctggtgaaaatattcctcaagaaaaggatattccagattgcccctgtggtgccaagagaatattggaattccaggtcatgcctcagctcctaaactacctgaaggctgacagactgggcaagagcattgactggggcatcctggctgtcttcacctgtgctgagagctgcagcttgggtactggctatacagaagaatttgtgtggaagcaggatgtaacagatacaccg

SEQ ID NO: 6156 - DNA, 684 bp, Homo sapiens
  source 1..684: mol_type = genomic DNA
atggctgccgccggggccaggcctgtggagctgggcttcgccgagtcggcgccggcgtggcgactgcgcagcgagcagttccccagcaaggtgggcgggcggccggcatggctgggcgcggccgggctgccggggccccaggccctggcctgcgagctgtgcggccgcccgctctccttcctgctgcaggtgtatgcgccgctgcctggccgcccggacgccttccaccgctgcatcttcctcttctgctgccgcgagcagccgtgctgtgccggcctgcgagtttttaggaatcaactacccaggaaaaacgatttttactcatatgagccaccttctgagaatcctcccccagaaacaggagaatcagtgtgtctccagcttaagtctggtgctcatctctgcagggtttgtggctgtttaggccccaaaacgtgctccagatgccacaaagcatattactgcagcaaggagcatcagaccctagactggagattgggacataagcaggcttgtgcacaaccagatcatctggaccatataattccagaccacaacttcctttttccagaatttgaaattgtaatagaaacagaagatgagattatgcctgaggttgtggaaaaggaagattactcagagattatagggagcatgggtaagcagtttcaggacttcattcat

SEQ ID NO: 6157 - DNA, 894 bp, Homo sapiens
  source 1..894: mol_type = genomic DNA
atggctgccgccggggccaggcctgtggagctgggcttcgccgagtcggcgccggcgtggcgactgcgcagcgagcagttccccagcaaggtgggcgggcggccggcatggctgggcgcggccgggctgccggggccccaggccctggcctgcgagctgtgcggccgcccgctctccttcctgctgcaggtgtatgcgccgctgcctggccgcccggacgccttccaccgctgcatcttcctcttctgctgccgcgagcagccgtgctgtgccggcctgcgagtttttaggaatcaactacccaggaaaaacgatttttactcatatgagccaccttctgagaatcctcccccagaaacaggagaatcagtgtgtctccagcttaagtctggtgctcatctctgcagggtttgtggctgtttaggccccaaaacgtgctccagatgccacaaagcatattactgcagcaaggagcatcagaccctagactggagattgggacataagcaggcttgtgcacaaccagatcatctggaccatataattccagaccacaacttcctttttccagaatttgaaattgtaatagaaacagaagatgagattatgcctgaggttgtggaaaaggaagattactcagagattatagggagcatgggtgaagcacttgaggaagaactggattccatggcaaaacatgaatccagggaagataaaatttttcagaagtttaaaactcagatagcccttgaaccagaacagattcttagatatggcagaggtattgcccccatctggatttctggtgaaaatattcctcaagaaaaggatattccagattgcccctgtggtgccaagagaatattggaattccagttttcagacacggtctat

SEQ ID NO: 6158 - DNA, 1890 bp, Homo sapiens
  source 1..1890: mol_type = genomic DNA
atgtcggtctccagcggcgtccagattctgacaaagccagagaccgtggaccggaggagaagtgcggaaacgaccaaagaggccgggcgaccactggagatggctgtgtccgagcccgaggccagcgccgcggaatggaagcaactggatcctgctcagagcaacctgtataatgatgtgatgctggagaactactgcaaccaagcctcaatggggtgtcaagctcccaaaccagacatgatctccaagttggaaaaaggagaagcaccatggttggggaaggggaaaagacccagtcaaggttgtccaagtaaaatagcaagacccaagcaaaaagaaactgatggaaaagtccagaaagatgatgaccagcttgaaaatatccagaaatctcaaaacaaactcctcagggaagttgcagtcaagaagaaaactcaagctaagaagaatggcagtgactgtggttcactggggaaaaaaaataatttgcataaaaaacatgttccttcaaagaaaaggcttcttaaatttgagtcatgtggaaaaattttgaaacagaatttagatttacctgatcactcaagaaactgtgtaaaaaggaaatctgatgcagctaaagaacacaagaagtcattcaaccatagcttatctgatacaaggaaaggcaaaaagcaaactggaaagaaacatgagaaattatccagccatagctcatctgataagtgtaacaaaactggcaaaaaacatgacaaattatgctgtcatagttcatcccatattaaacaggacaaaattcaaactggagagaaacatgagaaatcacccagccttagctcatctactaagcatgaaaaacctcaagcttgtgtgaaaccctatgaatgtaatcaatgtggaaaggttctcagccataaacaaggactcattgaccatcagagagttcatactggggagaaaccatatgaatgtaatgaatgtgggatagcctttagccaaaagtcacaccttgttgtacatcagagaactcacaccggagaaaaaccatatgaatgtattcagtgtggcaaagcccatggtcataaacatgcactcactgaccatctaagaattcatactggagaaaagccctatgaatgtgctgaatgtgggaaaaccttcagacacagctcaaaccttattcaacatgtgagatctcacacaggtgagaagccatatgaatgtaaggaatgtgggaagtcttttaggtataactcatctcttaccgaacatgtgagaacacatacaggtgaaataccatatgaatgcaatgaatgtggaaaagcctttaagtatagctcatcccttactaaacacatgagaattcatacaggtgagaaaccctttgaatgtaatgaatgtgggaaagctttcagcaagaagtcacacctcattatacatcaaagaactcatactaaggagaaaccttataaatgtaatgagtgtggaaaagcctttggacatagctcatctcttacttaccatatgagaactcatacaggtgaaagtccctttgaatgtaatcaatgtgggaaaggctttaaacaaattgaaggccttactcaacatcagagagttcatactggagagaaaccgtatgagtgtaatgaatgtgggaaagcctttagccaaaagtctcacctcattgtacatcagagaactcatactggggagaaaccttatgaatgtaacgaatgtgaaaaagcctttaatgcaaaatcacagcttgttatacatcagcgatcccacactggagaaaaaccctatgaatgtaatgaatgtgggaaaactttcaaacaaaatgcatccctaaccaaacatgtgaaaactcattcagaagataaatctcatgag

SEQ ID NO: 6159 - DNA, 1893 bp, Homo sapiens
  source 1..1893: mol_type = genomic DNA
atgtcggtctccagcggcgtccagattctgacaaagccagagaccgtggaccggaggagaagtgcggaaacgaccaaagaggccgggcgaccactggagatggctgtgtccgagcccgaggccagcgccgcgaaggaatggaagcaactggatcctgctcagagcaacctgtataatgatgtgatgctggagaactactgcaaccaagcctcaatggggtgtcaagctcccaaaccagacatgatctccaagttggaaaaaggagaagcaccatggttggggaaggggaaaagacccagtcaaggttgtccaagtaaaatagcaagacccaagcaaaaagaaactgatggaaaagtccagaaagatgatgaccagcttgaaaatatccagaaatctcaaaacaaactcctcagggaagttgcagtcaagaagaaaactcaagctaagaagaatggcagtgactgtggttcactggggaaaaaaaataatttgcataaaaaacatgttccttcaaagaaaaggcttcttaaatttgagtcatgtggaaaaattttgaaacagaatttagatttacctgatcactcaagaaactgtgtaaaaaggaaatctgatgcagctaaagaacacaagaagtcattcaaccatagcttatctgatacaaggaaaggcaaaaagcaaactggaaagaaacatgagaaattatccagccatagctcatctgataagtgtaacaaaactggcaaaaaacatgacaaattatgctgtcatagttcatcccatattaaacaggacaaaattcaaactggagagaaacatgagaaatcacccagccttagctcatctactaagcatgaaaaacctcaagcttgtgtgaaaccctatgaatgtaatcaatgtggaaaggttctcagccataaacaaggactcattgaccatcagagagttcatactggggagaaaccatatgaatgtaatgaatgtgggatagcctttagccaaaagtcacaccttgttgtacatcagagaactcacaccggagaaaaaccatatgaatgtattcagtgtggcaaagcccatggtcataaacatgcactcactgaccatctaagaattcatactggagaaaagccctatgaatgtgctgaatgtgggaaaaccttcagacacagctcaaaccttattcaacatgtgagatctcacacaggtgagaagccatatgaatgtaaggaatgtgggaagtcttttaggtataactcatctcttaccgaacatgtgagaacacatacaggtgaaataccatatgaatgcaatgaatgtggaaaagcctttaagtatagctcatcccttactaaacacatgagaattcatacaggtgagaaaccctttgaatgtaatgaatgtgggaaagctttcagcaagaagtcacacctcattatacatcaaagaactcatactaaggagaaaccttataaatgtaatgagtgtggaaaagcctttggacatagctcatctcttacttaccatatgagaactcatacaggtgaaagtccctttgaatgtaatcaatgtgggaaaggctttaaacaaattgaaggccttactcaacatcagagagttcatactggagagaaaccgtatgagtgtaatgaatgtgggaaagcctttagccaaaagtctcacctcattgtacatcagagaactcatactggggagaaaccttatgaatgtaacgaatgtgaaaaagcctttaatgcaaaatcacagcttgttatacatcagcgatcccacactggagaaaaaccctatgaatgtaatgaatgtgggaaaactttcaaacaaaatgcatccctaaccaaacatgtgaaaactcattcagaagataaatctcatgag

SEQ ID NO: 6160 - DNA, 1935 bp, Homo sapiens
  source 1..1935: mol_type = genomic DNA
atgtcggtctccagcggcgtccagattctgacaaagccagagaccgtggaccggaggagaagtgcggaaacgaccaaagaggccgggcgaccactggagatggctgtgtccgagcccgaggccagcgccgcggtatcagtaacattcaaacatgtgactatggcctttacccagaaggaatggaagcaactggatcctgctcagagcaacctgtataatgatgtgatgctggagaactactgcaaccaagcctcaatggggtgtcaagctcccaaaccagacatgatctccaagttggaaaaaggagaagcaccatggttggggaaggggaaaagacccagtcaaggttgtccaagtaaaatagcaagacccaagcaaaaagaaactgatggaaaagtccagaaagatgatgaccagcttgaaaatatccagaaatctcaaaacaaactcctcagggaagttgcagtcaagaagaaaactcaagctaagaagaatggcagtgactgtggttcactggggaaaaaaaataatttgcataaaaaacatgttccttcaaagaaaaggcttcttaaatttgagtcatgtggaaaaattttgaaacagaatttagatttacctgatcactcaagaaactgtgtaaaaaggaaatctgatgcagctaaagaacacaagaagtcattcaaccatagcttatctgatacaaggaaaggcaaaaagcaaactggaaagaaacatgagaaattatccagccatagctcatctgataagtgtaacaaaactggcaaaaaacatgacaaattatgctgtcatagttcatcccatattaaacaggacaaaattcaaactggagagaaacatgagaaatcacccagccttagctcatctactaagcatgaaaaacctcaagcttgtgtgaaaccctatgaatgtaatcaatgtggaaaggttctcagccataaacaaggactcattgaccatcagagagttcatactggggagaaaccatatgaatgtaatgaatgtgggatagcctttagccaaaagtcacaccttgttgtacatcagagaactcacaccggagaaaaaccatatgaatgtattcagtgtggcaaagcccatggtcataaacatgcactcactgaccatctaagaattcatactggagaaaagccctatgaatgtgctgaatgtgggaaaaccttcagacacagctcaaaccttattcaacatgtgagatctcacacaggtgagaagccatatgaatgtaaggaatgtgggaagtcttttaggtataactcatctcttaccgaacatgtgagaacacatacaggtgaaataccatatgaatgcaatgaatgtggaaaagcctttaagtatagctcatcccttactaaacacatgagaattcatacaggtgagaaaccctttgaatgtaatgaatgtgggaaagctttcagcaagaagtcacacctcattatacatcaaagaactcatactaaggagaaaccttataaatgtaatgagtgtggaaaagcctttggacatagctcatctcttacttaccatatgagaactcatacaggtgaaagtccctttgaatgtaatcaatgtgggaaaggctttaaacaaattgaaggccttactcaacatcagagagttcatactggagagaaaccgtatgagtgtaatgaatgtgggaaagcctttagccaaaagtctcacctcattgtacatcagagaactcatactggggagaaaccttatgaatgtaacgaatgtgaaaaagcctttaatgcaaaatcacagcttgttatacatcagcgatcccacactggagaaaaaccctatgaatgtaatgaatgtgggaaaactttcaaacaaaatgcatccctaaccaaacatgtgaaaactcattcagaagataaatctcatgag

SEQ ID NO: 6161 - DNA, 1680 bp, Homo sapiens
  source 1..1680: mol_type = genomic DNA
atggcggggccgcagcccctggcgctgcaactggaacagttgttgaacccgcgaccaagcgaggcggaccctgaagcggaccccgaggaagccactgctgccagggtgattgacaggtttgatgaaggggaagatggggaaggtgatttcctagtagtgggtagcattagaaaactggcatcagcctccctcttggacacggacaaaaggtattgcggcaaaaccacctctagaaaagcatggaatgaagaccattgggagcagactctgccaggatcgtctgatgaggaaatatctgatgaggaagggtctggagatgaagattcagagggactgggtctggaggaatatgatgaggacgacctgggtgctgctgaggaacaggagtgtggtgatcacagggagagcaagaagagcagaagccactctgcaaaaacaccgggcttcagtgtccagagtatcagtgactttgagaaatttaccaagggaatggatgaccttgggagcagtgaggaggaggaagacgaagagagtggcatggaagaaggggatgacgcggaagactcccaaggcgagagtgaggaagacagggctggagatagaaacagtgaggatgatggtgtggtgatgaccttctctagtgtcaaagtttctgaggaagtggagaaaggaagagccgtgaagaaccagatagcactgtgggaccagctcttggaaggaaggatcaaactacaaaaagctctgttgaccaccaaccagcttcctcaaccagatgttttcccattgttcaaggacaaaggtggcccagaattttccagtgccctgaaaaatagtcacaaggcacttaaagcattgttgaggtcattggtaggtcttcaggaagagttgcttttccagtacccagacactagatatctagtagatgggacaaagcccaatgcgggaagtgaggagatttctagtgaagatgatgagctggtagaagagaagaagcagcaacgaagaagggtccctgcaaagaggaagctggagatggaggactatcccagcttcatggcaaagcgctttgccgactttacagtctacaggaaccgcacacttcagaaatggcacgataagaccaaactggcttctggaaaactggggaagggttttggtgcctttgaacgctcaatcttgactcagatcgaccatattctgatggacaaagagagattacttcgaaggacacagaccaagcgctctgtctatcgagttcttggcaaacctgagccagcagctcagcctgtcccagagagtttgccaggggaaccggagatccttcctcaagcccctgctaatgctcatctgaaggacttggatgaagaaatctttgatgatgatgacttttaccaccagctccttcgagaactcatagaacggaagaccagctccttggatcccaacgatcaggtggccatgggaaggcagtggcttgcaatccagaagttacgaagcaaaatccacaaaaaagtagataggaaagccagcaaaggcaggaaacttcggtttcatgtccttagcaagctactgagtttcatggcacctattgaccatactacaatgaatgatgatgccaggacagaactgtaccgctctctttttggccagctccaccctcccgacgaaggccacggggat

SEQ ID NO: 6162 - DNA, 1977 bp, Homo sapiens
  source 1..1977: mol_type = genomic DNA
atgctccaccagccgactcccgggaatcggggtctgaccgccaggatggaagtggggccagccaccgagaccttcgtgctggaacttcaatgtcttgaggatgggggcccagggcctgacaccctctcaggtggcagcggtgggagcgagagtcaggaggaggaagagcctcaggagaggaacagcagtccacagcggccagcagtctcggccccagtgggggccagtgaaatcgctgaggaaacccggccgggacaacgagagttgcaactgcagcagttagaacagcagcccgagccgcagcaacagccgcaacacgagcagctgcaacagccgcagccacacctagaactgcaacagcagccgcagcaagatgggcaacaacagctatctcaactacaacaggaaaaacaccaatccgtgcaccatcaggaactgaaaccagaactgcagctaatgcaccagcagcaacagttacagccacagcaagtgcaagagcaacagcggttgcagcagcagcaggagcagttacagacgcagcaagcacaagagcaacaggtattgcagcagcaggaacagctacagcagcaagtgcaagagcaacagctgttacagcaacagcaggaacagttacagcagcagcagctgctacaacagcaggaacagttacagcagcaacagtttcaacagcagcaggaacagttacagcagcagcagcagctactattgctgcagcagcagggacagttacagcagcaactgttgcagcagcagcaggcacagttacaacagcagctgctggaacagcagcaggcacagttacagcagcagctactgctgcagcagcaggaacagttacagcagcagcagcaacagcagctgttgcaacagcagcaggaacaattgcagcagcaacaactgcagcctcctcccctggagcccgaggaggaggaagaggtggagctggagctcatgccggtggacctggggtcagagcaggagctggagcagcagcggcaggagttggagcggcagcaggagctggaacggcagcaggagcagcggcagctgcagctcaaactgcaggaggagctgcagcagctggagcaacagctggagcagcagcagcagcagctggagcagcaggaggtgcagctggagctgaccccggtggagctaggcgcccagcagcaggaggtgcagctggagctgacccccgtgcagccggagctgcagctggaactggtgccagccgcagggggcggcggagcggcggtcccgggggctccggccgcggtcgtggtggctcccccgggctacgtggtggtgcaggagctcatggtgctgcccgccgtggcagcgccggccgtggtggccatcccgggcccggcaggcagcgcggcgttgacccctgcacggcagcggcggcggcggcgcgctcgggaccggccgaccatctgcggggagtgcggcaagggcttcagccgcagcacggacctggtgcgccaccaggccacgcacacgggtgagcggccacaccgctgcggcgagtgcggcaagggcttctcgcagcactcgaatctggtgacgcaccaacgcatccacacgggcgagaaaccctacgcctgctcctactgcgccaagcgcttcagcgagagctcggcgctcgtgcagcaccagcgcacgcacaccggggagcgaccctacgcctgcggggactgtggcaagcgcttcagcgtctcctccaacctgctgcgccaccggcgcacgcactcgggcgagcggccctacgtgtgcgaggactgtggcgagcgcttccgacacaaggtgcagatccgccgccacgagcgccagctgcacggcgcgggccgctccaggggcctcggcctgctgcgcgcctcgcggccggcggccctcggtggcccagcccgcgcggagcaggccgctacagccactgcgcccgcagacaaggcgctg

SEQ ID NO: 6163 - DNA, 1509 bp, Homo sapiens
  source 1..1509: mol_type = genomic DNA
atggaggaacacggagtgacccaaaccgaacatatggctaccatagaagcacatgcagtggcccagcaagtgcagcaggtccatgtggctacttacaccgagcatagtatgctgagtgctgatgaagactcgccttcttctcccgaggacacctcttacgatgactcagatatactcaactccacagcagctgatgaggtgacagctcatctggcagctgcaggtcctgtgggaatggccgctgctgctgctgtggcaacaggaaagaaacggaaacggcctcatgtatttgagtctaatccatctatccggaagaggcaacaaacacgtttgcttcggaaacttcgagccacgttagatgaatatactactcgtgtgggacagcaagctattgtcctctgtatctcaccctccaaacctaaccctgtctttaaagtgtttggtgcagcacctttggagaatgtggtgcgtaagtacaagagcatgatcctggaagacctggagtctgctctggcagaacacgcccctgcgccacaggaggttaactcagaactgccgcctctcaccatcgacggaattccagtctctgtggacaaaatgacccaggcccagcttcgggcatttatcccagagatgctcaagtactctacaggtcggggaaaaccaggctgggggaaagaaagctgcaagcccatctggtggcctgaagatatcccctgggcaaatgtccggagtgatgtccgcacagaagagcaaaagcagagggtttcatggacccaggcactacggaccatagttaaaaactgttataaacagcatgggcgggaagaccttttgtatgcctttgaagatcagcaaacgcaaacacaggccacagccacacatagtatagctcatcttgtaccatcacagactgtagtccagacttttagtaaccctgatggcactgtctcacttatccaggttggtacgggggcaacagtagccacattggctgatgcttcagaattgccaaccacggtcaccgttgcccaagtgaattattctgccgtggctgatggagaggtggaacaaaattgggccacgttacagggaggtgagatgaccatccagacgacgcaagcatcagaggccacccaggcggtggcatcgttggcagaggccgcagtggcagcttctcaggagatgcagcagggagctacagtcactatggcgcttaacagcgaagctgccgcccatgctgtcgccaccctggctgaggccaccttacaaggtgggggacagatcgtcttgtctggggaaaccgcagcagccgtcggagcacttactggagtccaagatgctaatggcctggtccagatccctgtgagcatgtaccagactgtggtgaccagcctcgcccagggcaacggaccagtgcaggtggccatggcccctgtgaccaccaggatatcagacagcgcagtcaccatggacggccaagctgtggaggtggtgacattggaacag

SEQ ID NO: 6164 - DNA, 1188 bp, Homo sapiens
  source 1..1188: mol_type = genomic DNA
atgctggggtttttgtccgcacgccaaacgggtttggaggaccctcttcgccttcggagagcagagtcaacacggagagttttgggactggaattaaataaagacagagatgttgaaagaatccacggcggtggaattaacacccttgacattgaacctgttgaagggagatacatgttatcaggtggttcagatggtgtgattgtactttatgaccttgagaactccagcagacaatcttattacacatgtaaagcagtgtgttccattggcagagatcatcctgatgttcacagatacagtgtggagactgtacagtggtatcctcatgacactggcatgttcacatcaagctcatttgataaaactctgaaagtatgggatacaaatacattacaaactgcagatgtatttaattttgaggaaacagtttatagtcatcatatgtctccagtctccaccaagcactgtttggtagcagttggtactagaggacccaaagtacaactttgtgacttgaagtctggatcctgttctcacattctacagggtcacagacaagaaatattagcagtttcctggtctccacgttatgactatatcttggcaacagcaagtgctgacagtagagtaaaattatgggatgtgagaagagcatcaggatgtttgattactcttgatcaacataatgggaaaaagtcacaagctgttgaatcagcaaacactgctcataatgggaaagttaatggcttatgttttacaagtgatggacttcacctcctcactgttggtacagataatcgaatgaggctctggaatagttccaatggagaaaacacacttgtgaactatggaaaagtttgtaataacagtaaaaaaggattgaaattcactgtctcctgtggctgcagttcagaatttgtttttgtaccatatggtagcaccattgctgtttatacagtttactcaggagaacagataactatgcttaagggacattataaaactgttgactgctgtgtatttcagtcaaatttccaggaactttatagtggtagcagagactgcaacattctggcttgggttccatccttatatgaaccagttcctgatgatgatgagactacaacaaaatcacaattaaatccggcctttgaagatgcctggagcagcagtgatgaagaagga

SEQ ID NO: 6165 - DNA, 1215 bp, Homo sapiens
  source 1..1215: mol_type = genomic DNA
atgcgggagctcaaacgcacgctggacgccaagggtcatggagtcctggagatgccctcaggcaccgggaagacagtatccctgttggccctgatcatggcataccagagagcatatccgctggaggtgaccaaactcatctactgctcaagaactgtgccagagattgagaaggtgattgaagagcttcgaaagttgctcaacttctatgagaagcaggagggcgagaagctgccgtttctgggactggctctgagctcccgcaaaaacttgtgtattcaccctgaggtgacacccctgcgctttgggaaggacgtcgatgggaaatgccacagcctcacagcctcctatgtgcgggcgcagtaccagcatgacaccagcctgccccactgccgattctatgaggaatttgatgcccatgggcgtgaggtgcccctccccgctggcatctacaacctggatgacctgaaggccctggggcggcgccagggctggtgcccatacttccttgctcgatactcaatcctgcatgccaatgtggtggtttatagctaccactacctcctggaccccaagattgcagacctggtgtccaaggaactggcccgcaaggccgtcgtggtcttcgacgaggcccacaacattgacaacgtctgcatcgactccatgagcgtcaacctcacccgccggacccttgaccggtgccagggcaacctggagaccctgcagaagacggtgctcaggatcaaagagacagacgagcagcgcctgcgggacgagtaccggcgtctggtggaggggctgcgggaggccagcgccgcccgggagacggacgcccacctggccaaccccgtgctgcccgacgaagtgctgcaggaggcagtgcctggctccatccgcacggccgagcatttcctgggcttcctgaggcggctgctggagtacgtgaagtggcggctgcgtgtgcagcatgtggtgcaggagagcccgcccgccttcctgagcggcctggcccagcgcgtgtgcatccagcgcaagcccctcagattctgtgctgaacgcctccggtccctgctgcatactctggagatcaccgaccttgctgacttctccccgctcaccctccttgctaactttgccacccttgtcagcacctacgccaaaggccaggctcagcactgtggaagcagcaggaaccaaaaaagatctcatccc

SEQ ID NO: 6166 - DNA, 2280 bp, Homo sapiens
  source 1..2280: mol_type = genomic DNA
atgaagctcaacgtggacgggctcctggtctacttcccgtacgactacatctaccccgagcagttctcctacatgcgggagctcaaacgcacgctggacgccaagggtcatggagtcctggagatgccctcaggcaccgggaagacagtatccctgttggccctgatcatggcataccagagagcatatccgctggaggtgaccaaactcatctactgctcaagaactgtgccagagattgagaaggtgattgaagagcttcgaaagttgctcaacttctatgagaagcaggagggcgagaagctgccgtttctgggactggctctgagctcccgcaaaaacttgtgtattcaccctgaggtgacacccctgcgctttgggaaggacgtcgatgggaaatgccacagcctcacagcctcctatgtgcgggcgcagtaccagcatgacaccagcctgccccactgccgattctatgaggaatttgatgcccatgggcgtgaggtgcccctccccgctggcatctacaacctggatgacctgaaggccctggggcggcgccagggctggtgcccatacttccttgctcgatactcaatcctgcatgccaatgtggtggtttatagctaccactacctcctggaccccaagattgcagacctggtgtccaaggaactggcccgcaaggccgtcgtggtcttcgacgaggcccacaacattgacaacgtctgcatcgactccatgagcgtcaacctcacccgccggacccttgaccggtgccagggcaacctggagaccctgcagaagacggtgctcaggatcaaagagacagacgagcagcgcctgcgggacgagtaccggcgtctggtggaggggctgcgggaggccagcgccgcccgggagacggacgcccacctggccaaccccgtgctgcccgacgaagtgctgcaggaggcagtgcctggctccatccgcacggccgagcatttcctgggcttcctgaggcggctgctggagtacgtgaagtggcggctgcgtgtgcagcatgtggtgcaggagagcccgcccgccttcctgagcggcctggcccagcgcgtgtgcatccagcgcaagcccctcagattctgtgctgaacgcctccggtccctgctgcatactctggagatcaccgaccttgctgacttctccccgctcaccctccttgctaactttgccacccttgtcagcacctacgccaaaggcttcaccatcatcatcgagccctttgacgacagaaccccgaccattgccaaccccatcctgcacttcagctgcatggacgcctcgctggccatcaaacccgtatttgagcgtttccagtctgtcatcatcacatctgggacactgtccccgctggacatctaccccaagatcctggacttccaccccgtcaccatggcaaccttcaccatgacgctggcacgggtctgcctctgccctatgatcatcggccgtggcaatgaccaggtggccatcagctccaaatttgagacccgggaggatattgctgtgatccggaactatgggaacctcctgctggagatgtccgctgtggtccctgatggcatcgtggccttcttcaccagctaccagtacatggagagcaccgtggcctcctggtatgagcaggggatccttgagaacatccagaggaacaagctgctctttattgagacccaggatggtgccgaaaccagtgtcgccctggagaagtaccaggaggcctgcgagaatggccgcggggccatcctgctgtcagtggcccggggcaaagtgtccgagggaatcgactttgtgcaccactacgggcgggccgtcatcatgtttggcgtcccctacgtctacacacagagccgcattctcaaggcgcggctggaatacctgcgggaccagttccagattcgtgagaatgactttcttaccttcgatgccatgcgccacgcggcccagtgtgtgggtcgggccatcaggggcaagacggactacggcctcatggtctttgccgacaagcggtttgcccgtggggacaagcgggggaagctgccccgctggatccaggagcacctcacagatgccaacctcaacctgaccgtggacgagggtgtccaggtggccaagtacttcctgcggcagatggcacagcccttccaccgggaggatcagctgggcctgtccctgctcagcctggagcagctagaatcagaggagacgctgaagaggatagagcagattgctcagcagctc

SEQ ID NO: 6167 - DNA, 2346 bp, Homo sapiens
  source 1..2346: mol_type = genomic DNA
atgggcaaaagagaccgagcggaccgcgacaagaagaaatccaggaagcggcactatgaggatgaagaggatgatgaagaggacgccccggggaacgaccctcaggaagcggttccctcggcggcggggaagcaggtggatgagtcaggcaccaaagtggatgaatatggagccaaggactacaggctgcaaatgccgctgaaggacgaccacacctccaggcccctctgggtggctcccgatggccatatcttcttggaagccttctctccagtttacaaatatgcccaagacttcttggtggctattgcagagccagtgtgccgaccaacccatgtgcatgagtacaaactaactgcctactccttgtatgcagctgtcagcgttgggctgcaaaccagtgacatcaccgagtacctcaggaagctcagcaagactggagtccctgatggaattatgcagtttattaagttgtgtactgtcagctatggaaaagtcaagctggtcttgaagcacaacagatacttcgttgaaagttgccaccctgatgtaatccagcatcttctccaggaccccgtgatccgagaatgccgcttaagaaactctgaaggggaggccactgagctcatcacagagactttcacaagcaaatctgccatttctaagactgctgaaagcagtggtgggccctccacttcccgagtgacagatccacagggtaaatctgacatccccatggacctgtttgacttctatgagcaaatggacaaggatgaagaagaagaagaagagacacagacagtgtcttttgaagtcaagcaggaaatgattgaggaactccagaaacgttgcatccacctggagtaccctctgttggcagaatatgacttccggaatgattctgtcaaccctgatatcaacattgacctaaagcccacagctgtcctcagaccctatcaggagaagagcttgcgaaagatgtttggaaacgggcgtgcacgttcgggggtcattgttcttccctgcggtgctggaaagtccctggttggtgtgactgctgcatgcactgtcagaaaacgctgtctggtgctgggcaactcagctgtttctgtggagcagtggaaagcccagttcaagatgtggtccaccattgacgacagccagatctgccggttcacctccgatgccaaggacaagcccatcggctgctccgttgccattagcacctactccatgctgggccacaccaccaaaaggtcctgggaggccgagcgagtcatggagtggctcaagacccaggagtggggcctcatgatcctggatgaagtgcacaccataccagccaagatgttccgaagggtgctcaccatcgtgcaggcccactgtaagctgggtttgactgcgaccctcgtccgcgaagatgacaaaattgtggatttaaattttctgattgggcctaagctctacgaagccaactggatggagctgcagaataatggctacatcgccaaagtccagtgtgctgaggtctggtgccctatgtctcctgaattttaccgggaatatgtggcaatcaaaaccaagaaacgaatcttgctgtacaccatgaaccccaacaaatttagagcttgccagtttctgatcaagtttcatgaaaggaggaatgacaagattattgtctttgctgacaatgtgtttgccctaaaggaatatgccattcgactgaacaaaccctatatctacggacctacgtctcagggggaaaggatgcaaattctccagaatttcaagcacaaccccaaaattaacaccatcttcatatccaaggtaggtgacacttcgtttgatctgccggaagcaaatgtcctcattcagatctcatcccatggtggctccaggcgtcaggaagcccaaaggctagggcgggtgcttcgagctaaaaaagggatggttgcagaagagtacaatgcctttttctactcactggtatcccaggacacacaggaaatggcttactcaaccaagcggcagagattcttggtagatcaaggttatagcttcaaggtgatcacgaaactcgctggcatggaggaggaagacttggcgttttcgacaaaagaagagcaacagcagctcttacagaaagtcctggcagccactgacctggatgccgaggaggaggtggtggctggggaatttggctccagatccagccaggcatctcggcgctttggcaccatgagttctatgtctggggccgacgacactgtgtacatggagtaccactcatcgcggagcaaggcgcccagcaaacatgtacacccgctcttcaagcgctttaggaaa

SEQ ID NO: 6168 - DNA, 4479 bp, Homo sapiens
  source 1..4479: mol_type = genomic DNA
atgccaaatgagggaatcccccactcaagtcaaactcaggagcaagactgtttacagagtcaacctgtcagtaataatgaagaaatggcaatcaagcaagaaagtggtggtgatggggaggtggaggagtacctctcctttcgttctgtgggtgacgggctgtccacctctgctgtggggtgcgcatcagcagctccgaggagagggccagccctgctgcacatcgaccgacatcagatccaggcagtagagcctagcgcccaggcccttgagctgcagggtttgggtgtggacgtctatgaccaggacgtgctggaacagggagtgcttcagcaggtggacaatgccatccatgaggccagccgtgcctcccagctcgttgacgtggagaaggagtatcggtcggtcctggatgacctcacgtcatgtacgacatccctaaggcaaatcaataaaattattgaacagcttagccctcaagctgccaccagcagagacatcaacaggaaactagattctgtaaaacgacagaagtataataaggaacaacagctaaaaaagatcactgcaaaacaaaagcatctccaggccatccttggaggagcagaggtgaaaattgaactagatcacgccagtctggaggaggatgcagagccggggccatccagtcttggcagcatgctcatgcctgtccaggagactgcctgggaagagctcatccgcactggccagatgacaccttttggtacccagatccctcagaaacaggagaaaaagcccagaaaaatcatgcttaatgaagcatcaggcttcgaaaagtatttggcagatcaagcaaaactgtcttttgaaaggaagaagcaaggttgtaataaaagagcagctagaaaagctccagccccagtcacgcctccagccccagtgcaaaataaaaacaaaccaaacaagaaagccagagttctgtccaaaaaagaggagcgtttgaaaaagcacatcaagaaactccagaagagggctttgcagttccaggggaaagtgggattgccaaaggcaaggagaccttgggagtcagacatgaggccagaggcagagggagactctgagggtgaagagtctgagtatttccccacagaggaggaggaagaggaggaagatgacgaggtggagggggcagaggcggacctgtctggagatggtactgactatgagctgaagcctctgcccaagggcgggaaacggcagaagaaagtgccagtgcaggagattgatgatgactttttcccaagttctggggaagaagctgaagctgcttctgtaggagaaggaggaggaggaggtcggaaagtgggaagataccgagatgatggagatgaagattattataagcagcggttaaggagatggaataaactgagactgcaggacaaagagaaacgtctgaagctggaggacgattctgaggaaagtgatgctgaatttgacgaaggttttaaagtgccaggttttctgttcaaaaagctttttaagtaccagcagacaggtgttaggtggctgtgggaattgcactgccagcaggcaggaggaattctgggagatgaaatgggattgggcaagaccatccagataattgccttcttggcaggtctgagctacagcaagatcaggactcgtggttcaaattacaggtttgaggggttgggtccaactgtaattgtctgtccaacaacagtgatgcatcagtgggtgaaggaatttcacacgtggtggcctccgttcagagtggcaattctacatgaaaccggttcctatacccacaaaaaggagaaactaattcgagatgttgctcattgtcatggaattttgatcacatcttactcctacattcgattgatgcaggatgacattagcaggtatgactggcactatgtgatcttggacgaaggacacaaaattcgaaatccaaatgctgctgtcacccttgcttgcaaacagtttcgcacccctcatcggatcattctgtctggctcaccgatgcaaaataacctccgagagctgtggtcgctctttgacttcatcttcccgggaaagttaggcacgttgcctgtgtttatggagcagttctccgtccccatcaccatggggggatattcaaatgcttccccagtacaggtcaaaactgcttacaagtgtgcatgtgtcttacgagataccataaatccatacctactgcggagaatgaagtcagatgtcaagatgagcctttctttgccagataaaaatgaacaggtcttattttgccgtcttacagatgagcagcataaagtctaccaaaatttcgttgattccaaagaagtttacaggattctcaatggagagatgcagattttctccggacttatagccctaagaaaaatttgcaaccaccctgatctcttttctggaggtcccaagaatctcaaaggtcttcctgatgatgaactagaagaagatcagtttgggtactggaaacgttctgggaaaatgattgttgttgagtctttgttgaaaatatggcacaagcagggtcagcgagtattgctgttttctcagtcaaggcagatgctggacatacttgaagtattccttagagcccaaaagtatacctatctcaagatggatggtaccactacaatagcttcaagacagccactgattacgagatacaatgaggacacatccatatttgtgtttcttctgaccacgcgggtgggcggcttaggtgtcaacctgacgggggcaaacagagttgtcatctatgacccagactggaacccaagcacggacacgcaggcccgggagcgagcatggagaataggccagaagaagcaagtgactgtgtacaggctcctgactgcgggcaccattgaagaaaagatctaccaccgacaaatcttcaagcagtttttgacaaatagagtgctaaaagacccaaaacaaaggcggtttttcaaatccaatgatctctatgagctatttactctgactagtcctgatgcatcccagagcactgaaacaagtgcaatttttgcaggaactggatcagatgttcagacacccaaatgccatctaaaaagaaggattcaaccagcctttggagcagaccatgatgttccaaaacgcaagaagttccctgcttctaacatatctgtaaatgatgccacatcatctgaagagaaatctgaggctaaaggagctgaagtaaatgcagtaacttctaatcgaagtgatcctttgaaagatgaccctcacatgagtagtaatgtaactagcaatgataggcttggagaagagacaaatgcagtatctggaccagaagagttgtcagtgattagtggaaatggggaatgttcaaattcttcaggaacaggcaaaacttctatgccatctggtgatgaaagcattgatgaaaagttaggtctttcttacaaaagagaaagacccagccaggctcaaacagaagctttttgggagaataaacaaatggaaaataatttttataagcacaagtcaaaaacaaaacatcatagtgtggcagaagaagagaccctggagaaacatctgagaccaaagcaaaagcctaagaactctaagcattgcagagacgccaagtttgaaggaactcgaattccacacctggtgaagaaaaggcgttaccagaagcaagacagtgaaaacaagagtgaggccaaggaacagagcaatgacgattatgttttggaaaagcttttcaaaaaatcagttggcgtgcacagtgtcatgaagcacgatgccatcatggatggagccagcccagattatgtactggtggaggcagaagccaaccgagtggcccaggatgccctgaaagcactgaggctctctcgtcagcggtgtctgggagcagtgtctggtgttcccacctggactggccacagggggatttctggtgcaccagcaggaaaaaagagtagatttggtaagaaaaggaattctaacttctctgtgcagcatccttcatcaacatctccaacagagaagtgccaggatggcatcatgaaaaaggagggaaaagataatgtccctgagcattttagtggaagagcagaagatgcagactcttcatccgggcccctcgcttcctcctcactcttggctaaaatgagagctagaaaccacctgattctgccagagcgtttagaaagtgaaagcgggcacctgcaggaagcttctgccctgctgcccaccacagaacacgatgaccttctggtggagatgagaaacttcatcgctttccaggcccacactgatggccaggccagcaccagggagatactgcaggagtttgaatccaagttatctgcatcacagtcttgtgtcttccgagaactattgagaaatctgtgcactttccatagaacttctggtggtgaaggaatttggaaactcaagccagaatactgc

SEQ ID NO: 6169 - DNA, 3183 bp, Homo sapiens
  source 1..3183: mol_type = genomic DNA
atgccaaatgagggaatcccccactcaagtcaaactcaggagcaagactgtttacagagtcaacctgtcagtaataatgaagaaatggcaatcaagcaagaaagtggtggtgatggggaggtggaggagtacctctcctttcgttctgtgggtgacgggctgtccacctctgctgtggggtgcgcatcagcagctccgaggagagggccagccctgctgcacatcgaccgacatcagatccaggcagtagagcctagcgcccaggcccttgagctgcagggtttgggtgtggacgtctatgaccaggacgtgctggaacagggagtgcttcagcaggtggacaatgccatccatgaggccagccgtgcctcccagctcgttgacgtggagaaggagtatcggtcggtcctggatgacctcacgtcatgtacgacatccctaaggcaaatcaataaaattattgaacagcttagccctcaagctgccaccagcagagacatcaacaggaaactagattctgtaaaacgacagaagtataataaggaacaacagctaaaaaagatcactgcaaaacaaaagcatctccaggccatccttggaggagcagaggtgaaaattgaactagatcacgccagtctggaggaggatgcagagccggggccatccagtcttggcagcatgctcatgcctgtccaggagactgcctgggaagagctcatccgcactggccagatgacaccttttggtacccagatccctcagaaacaggagaaaaagcccagaaaaatcatgcttaatgaagcatcaggcttcgaaaagtatttggcagatcaagcaaaactgtcttttgaaaggaagaagcaaggttgtaataaaagagcagctagaaaagctccagccccagtcacgcctccagccccagtgcaaaataaaaacaaaccaaacaagaaagccagagttctgtccaaaaaagaggagcgtttgaaaaagcacatcaagaaactccagaagagggctttgcagttccaggggaaagtgggattgccaaaggcaaggagaccttgggagtcagacatgaggccagaggcagagggagactctgagggtgaagagtctgagtatttccccacagaggaggaggaagaggaggaagatgacgaggtggagggggcagaggcggacctgtctggagatggtactgactatgagctgaagcctctgcccaagggcgggaaacggcagaagaaagtgccagtgcaggagattgatgatgactttttcccaagttctggggaagaagctgaagctgcttctgtaggagaaggaggaggaggaggtcggaaagtgggaagataccgagatgatggagatgaagattattataagcagcggttaagtcccaagatgcctcgaacactaagtttacatgaaataactgaccttttagagacagatgacagcatagaagcaagtgctatagtgatacaaccacctgaaaatgctacagcacctgtttctgatgaggaatcaggagatgaagaaggtggaacaataaataatctgccaggttctttgttgcacacagctgcgtatcttattcaagatggctctgatgctgagtctgactcagatgatccctcatacgcacctaaagatgactctcctgatgaagttccatctacgtttactgtgcagcaacctccaccatcaaggaggaggaaaatgacaaaaattctttgcaaatggaaaaaagccgacctaactgtacaacccgtagcaggtagagttacagcaccaccaaacgatttcttcaccgtaatgagaactcccacagaaattcttgaactttttcttgatgacgaggtcattgaactcattgtcaagtactccaacttatatgcttgcagtaaaggtgtacatcttggcttgactagctctgaattcaaatgttttctgggaattatttttctgagtggttatgtctcagttcctagaaggcgtatgttttgggaacaaagaacagatgtgcataatgtactggttagtgctgccatgagacgtgaccggtttgaaactatattttctaatttgcatgttgctgacaatgcaaatttggatccagtggacaaattttccaaattgcgacctctcataagcaaacttaatgagagatgcatgaaatttgttccaaatgaaacatatttcagctttgatgaattcatggttccttattttggtcgtcacgggtgcaaacaatttattcggggaaagcccattcggtttggctataagttttggtgtggtgccacctgtctgggctacatttgctggtttcagccgtatcagggtaaaaacccaaatactaaacatgaggaatatggtgtcggtgcgtcacttgtccttcagtttagtgaggcacttacagaggcacaccctggacaataccattttgtattcaataactttttcaccagtattgcacttcttgataagctcagttcaatgggacatcaggcaacaggtacagtgagaaaggatcacattgacagagttccactggaatcagatgtagctttaaagaaaaaagaaagaggcacatttgattatcgaattgatggcaaaggcaatattgtctgcagatggaatgataacagtgttgtcactgttgcctcatctggtgctggtatccatcccctgtgtcttgtcagtcgttactcccagaaactgaaaaagaagatacaagttcagcagccaaacatgatcaaagtgtataaccagttcatgggaggcgtagacagagctgatgaaaacattgataagtatcgggcatcaatccgtggaaagaaatggtattcaagccctcttttgttctgtttcgaactggtcttacaaaatgcttggcaattgcataaaacatatgatgagaaaccagtggattttctggagtttcgtcgacgtgtggtatgccattatctggagacccatggtcatcctccagaacctggccaaaaaggaagacctcagaagcgtaacattgactcacgttatgatggcataaatcatgtgatagtcaaacagggaaagcaaacgcgatgcgctgaatgtcataagaacacaacttttcgatgtgaaaaatgtgatgttgccttacatgtgaagtgttccgttgaatatcacactgaa

SEQ ID NO: 6170 - DNA, 1338 bp, Homo sapiens
  source 1..1338: mol_type = genomic DNA
atgctggacatgagcgaggcccgctcccagccgccctgcagcccgtccggcaccgccagctccatgtcgcacgtggaggactcggactcggacgcgccgccgtctcccgccggctccgagggcctgggccgcgcgggggtcgcggtggggggcgcccggggcgacccggcggaggcggcggacgagcgcttcccggcctgcatccgcgacgccgtgtcgcaggtgctcaagggctacgactggagtctggtgcccatgccggtgcgcggcggcggcggcggcgcgctcaaagccaagccgcatgtgaagcggcccatgaacgcattcatggtgtgggcgcaggcggcgcgccgcaagctggccgaccagtacccgcacctgcacaacgccgagctcagcaagacgctgggcaagctgtggcgcttgctgagcgagagcgagaagcggcccttcgtggaggaggcagagcgccttcgcgtgcagcacaagaaggaccaccccgactacaagtaccagccacggcgcaggaagagcgccaaagccggccacagcgactccgactcgggcgcggagctgggaccccaccctggcggcggtgccgtgtacaaggctgaagcagggcttggagatgggcaccaccatggcgaccacacagggcagacccacgggccgcccaccccgcccaccacccccaagacggagctgcagcaggcgggcgccaagccggagctgaagctggagggacgccggccggtggacagcgggcgccagaacatcgacttcagcaacgtggacatctcggagctcagcagcgaggtcatgggcaccatggacgccttcgacgtccacgagttcgaccagtacctgcccctgggcggccccgccccacccgagccgggccaggcctatgggggcgcctacttccacgccggggcgtcccccgtgtgggcccacaagagtgccccgtcggcctccgcgtcgcccaccgagacgggtcccccacggccgcacatcaagacggagcagccgagccccggccactacggcgaccagccccgaggctcgcccgactacggttcctgcagcggccagtccagcgccaccccggccgcccccgccggccccttcgccggctcacagggcgactatggcgacctgcaggcctccagctactatggtgcctaccctggctacgcacccggcctctaccagtacccctgcttccactcgccgcgccggccctacgcctcacccctgctcaacggcctggccctgccgcccgcccacagccccaccagtcactgggaccagccggtgtacaccaccctgaccaggccc

SEQ ID NO: 6171 - DNA, 1527 bp, Homo sapiens
  source 1..1527: mol_type = genomic DNA
atgaatctcctggaccccttcatgaagatgaccgacgagcaggagaagggcctgtccggcgcccccagccccaccatgtccgaggactccgcgggctcgccctgcccgtcgggctccggctcggacaccgagaacacgcggccccaggagaacacgttccccaagggcgagcccgatctgaagaaggagagcgaggaggacaagttccccgtgtgcatccgcgaggcggtcagccaggtgctcaaaggctacgactggacgctggtgcccatgccggtgcgcgtcaacggctccagcaagaacaagccgcacgtcaagcggcccatgaacgccttcatggtgtgggcgcaggcggcgcgcaggaagctcgcggaccagtacccgcacttgcacaacgccgagctcagcaagacgctgggcaagctctggagacttctgaacgagagcgagaagcggcccttcgtggaggaggcggagcggctgcgcgtgcagcacaagaaggaccacccggattacaagtaccagccgcggcggaggaagtcggtgaagaacgggcaggcggaggcagaggaggccacggagcagacgcacatctcccccaacgccatcttcaaggcgctgcaggccgactcgccacactcctcctccggcatgagcgaggtgcactcccccggcgagcactcggggcaatcccagggcccaccgaccccacccaccacccccaaaaccgacgtgcagccgggcaaggctgacctgaagcgagaggggcgccccttgccagaggggggcagacagccccctatcgacttccgcgacgtggacatcggcgagctgagcagcgacgtcatctccaacatcgagaccttcgatgtcaacgagtttgaccagtacctgccgcccaacggccacccgggggtgccggccacgcacggccaggtcacctacacgggcagctacggcatcagcagcaccgcggccaccccggcgagcgcgggccacgtgtggatgtccaagcagcaggcgccgccgccacccccgcagcagcccccacaggccccgccggccccgcaggcgcccccgcagccgcaggcggcgcccccacagcagccggcggcacccccgcagcagccacaggcgcacacgctgaccacgctgagcagcgagccgggccagtcccagcgaacgcacatcaagacggagcagctgagccccagccactacagcgagcagcagcagcactcgccccaacagatcgcctacagccccttcaacctcccacactacagcccctcctacccgcccatcacccgctcacagtacgactacaccgaccaccagaactccagctcctactacagccacgcggcaggccagggcaccggcctctactccaccttcacctacatgaaccccgctcagcgccccatgtacacccccatcgccgacacctctggggtcccttccatcccgcagacccacagcccccagcactgggaacaacccgtctacacacagctcactcgacct

SEQ ID NO: 6172 - DNA, 1338 bp, Homo sapiens
  source 1..1338: mol_type = genomic DNA
atgcgacctgttcgagagaactcatcaggtgcgagaagcccgcgggttcctgctgatttggcgcggagcattttgataagcctacccttcccgccggactcgctggcccacaggcccccaagctccgctccgacggagtcccagggccttttcaccgtggccgctccagccccgggagcgccttctcctcccgccacgctggcgcaccttcttcccgccccggcaatgtacagccttctggagactgaactcaagaaccccgtagggacacccacacaagcggcgggcaccggcggccccgcagccccgggaggcgcaggcaagagtagtgcgaacgcagccggcggcgcgaactcgggcggcggcagcagcggtggtgcgagcggaggtggcgggggtacagaccaggaccgtgtgaaacggcccatgaacgccttcatggtatggtcccgcgggcagcggcgcaaaatggccctggagaaccccaagatgcacaattctgagatcagcaagcgcttgggcgccgactggaaactgctgaccgacgccgagaagcgaccattcatcgacgaggccaagcgacttcgcgccgtgcacatgaaggagtatccggactacaagtaccgaccgcgccgcaagaccaagacgctgctcaagaaagataagtactccctgcccagcggcctcctgcctcccggtgccgcggccgccgccgccgctgccgcggccgcagccgctgccgccagcagtccggtgggcgtgggccagcgcctggacacgtacacgcacgtgaacggctgggccaacggcgcgtactcgctggtgcaggagcagctgggctacgcgcagcccccgagcatgagcagcccgccgccgccgcccgcgctgccgccgatgcaccgctacgacatggccggcctgcagtacagcccaatgatgccgcccggcgctcagagctacatgaacgtcgctgccgcggccgccgccgcctcgggctacgggggcatggcgccctcagccacagcagccgcggccgccgcctacgggcagcagcccgccaccgccgcggccgcagctgcggccgcagccgccatgagcctgggccccatgggctcggtagtgaagtctgagcccagctcgccgccgcccgccatcgcatcgcactctcagcgcgcgtgcctcggcgacctgcgcgacatgatcagcatgtacctgccacccggcggggacgcggccgacgccgcctctccgctgcccggcggtcgcctgcacggcgtgcaccagcactaccagggcgccgggactgcagtcaacggaacggtgccgctgacccacatc

SEQ ID NO: 6173 - DNA, 1173 bp, Homo sapiens
  source 1..1173: mol_type = genomic DNA
atgtacagcatgatgatggagaccgacctgcactcgcccggcggcgcccaggcccccacgaacctctcgggccccgccggggcgggcggcggcgggggcggaggcgggggcggcggcggcggcgggggcgccaaggccaaccaggaccgggtcaaacggcccatgaacgccttcatggtgtggtcccgcgggcagcggcgcaagatggcccaggagaaccccaagatgcacaactcggagatcagcaagcgcctgggggccgagtggaaggtcatgtccgaggccgagaagcggccgttcatcgacgaggccaagcggctgcgcgcgctgcacatgaaggagcacccggattacaagtaccggccgcgccgcaagaccaagacgctgctcaagaaggacaagtactcgctggccggcgggctcctggcggccggcgcgggtggcggcggcgcggctgtggccatgggcgtgggcgtgggcgtgggcgcggcggccgtgggccagcgcctggagagcccaggcggcgcggcgggcggcggctacgcgcacgtcaacggctgggccaacggcgcctaccccggctcggtggcggcggcggcggcggccgcggccatgatgcaggaggcgcagctggcctacgggcagcacccgggcgcgggcggcgcgcacccgcacgcgcaccccgcgcacccgcacccgcaccacccgcacgcgcacccgcacaacccgcagcccatgcaccgctacgacatgggcgcgctgcagtacagccccatctccaactcgcagggctacatgagcgcgtcgccctcgggctacggcggcctcccctacggcgccgcggccgccgccgccgccgctgcgggcggcgcgcaccagaactcggccgtggcggcggcggcggcggcggcggccgcgtcgtcgggcgccctgggcgcgctgggctctctggtgaagtcggagcccagcggcagcccgcccgccccagcgcactcgcgggcgccgtgccccggggacctgcgcgagatgatcagcatgtacttgcccgccggcgaggggggcgacccggcggcggcagcagcggccgcggcgcagagccggctgcactcgctgccgcagcactaccagggcgcgggcgcgggcgtgaacggcacggtgcccctgacgcacatc

SEQ ID NO: 6174 - DNA, 2403 bp, Homo sapiens
  source 1..2403: mol_type = genomic DNA
atgtcttccaagcaagccacctctccatttgcctgtgcagctgatggagaggatgcaatgacccaggatttaacctcaagggaaaaggaagagggcagtgatcaacatgtggcctcccatctgcctctgcaccccataatgcacaacaaacctcactctgaggagctaccaacacttgtcagtaccattcaacaagatgctgactgggacagcgttctgtcatctcagcaaagaatggaatcagagaataataagttatgttccctatattccttccgaaatacctctacctcaccacataagcctgacgaagggagtcgggaccgtgagataatgaccagtgttacttttggaaccccagagcgccgcaaagggagtcttgccgatgtggtggacacactgaaacagaagaagcttgaggaaatgactcggactgaacaagaggattcctcctgcatggaaaaactactttcaaaagattggaaggaaaaaatggaaagactaaataccagtgaacttcttggagaaattaaaggtacacctgagagcctggcagaaaaagaacggcagctctccaccatgattacccagctgatcagtttacgggagcagctactggcagcgcatgatgaacagaaaaaactggcagcgtcacaaattgagaaacaacggcagcaaatggaccttgctcgccaacagcaagaacagattgcgagacaacagcagcaacttctgcaacagcagcacaaaattaatctcctgcagcaacagatccaggttcagggtcacatgcctccgctcatgatcccaatttttccacatgaccagcggactctggcagcagctgctgctgcccaacagggattcctcttcccccctggaataacatacaaaccaggtgataactaccccgtacagttcattccatcaacaatggcagctgctgctgcttctggactcagccctttacagctccagcagctctatgccgctcagctggccagcatgcaggtgtcacctggagcaaagatgccatcaactccacagccaccaaacacagcagggacggtctcacctactgggataaaaaatgaaaagagagggaccagccctgtaactcaagttaaggatgaagcagcagcacagcctctgaatctctcatcccgacccaagacagcagagcctgtaaagtccccaacgtctcccacccagaacctcttcccagccagcaaaaccagccctgtcaatctgccaaacaaaagcagcatccctagccccattggaggaagcctgggaagaggatcctctttaggtaaatggaaaagtcaacaccaggaagagacttacgaattagatatcctatctagtctcaactcccctgccctttttggggatcaggatacagtgatgaaagccattcaggaggcgcggaagatgcgagagcagatccagcgggagcaacagcagcaacagccacatggtgttgacgggaaactgtcctccataaataatatggggctgaacagctgcaggaatgaaaaggaaagaacgcgctttgagaatttggggccccagttaacgggaaagtcaaatgaagatggaaaactgggcccaggtgtcatcgaccttactcggccagaagatgcagagggaagtaaagcaatgaatggctctgcagctaaactacagcagtattattgttggccaacaggaggtgccactgtggctgaagcacgagtctacagggacgcccgcggccgtgccagcagcgagccacacattaagcgaccaatgaatgcattcatggtttgggcaaaggatgagaggagaaaaatccttcaggccttccccgacatgcataactccaacattagcaaaatcttaggatctcgctggaaatcaatgtccaaccaggagaagcaaccttattatgaagagcaggcccggctaagcaagatccacttagagaagtacccaaactataaatacaaaccccgaccgaaacgcacctgcattgttgatggcaaaaagcttcggattggggagtataagcaactgatgaggtctcggagacaggagatgaggcagttctttactgtggggcaacagcctcagattccaatcaccacaggaacaggtgttgtgtatcctggtgctatcactatggcaactaccacaccatcgcctcagatgacatctgactgctctagcacctcggccagcccggagcccagcctcccggtcatccagagcacttatggtatgaagacagatggcggaagcctagctggaaatgaaatgatcaatggagaggatgaaatggaaatgtatgatgactatgaagatgaccccaaatcagactatagcagtgaaaatgaagccccggaggctgtcagtgccaac

SEQ ID NO: 6175 - DNA, 2412 bp, Homo sapiens
  source 1..2412: mol_type = genomic DNA
atgggaagaatgtcttccaagcaagccacctctccatttgcctgtgcagctgatggagaggatgcaatgacccaggatttaacctcaagggaaaaggaagagggcagtgatcaacatgtggcctcccatctgcctctgcaccccataatgcacaacaaacctcactctgaggagctaccaacacttgtcagtaccattcaacaagatgctgactgggacagcgttctgtcatctcagcaaagaatggaatcagagaataataagttatgttccctatattccttccgaaatacctctacctcaccacataagcctgacgaagggagtcgggaccgtgagataatgaccagtgttacttttggaaccccagagcgccgcaaagggagtcttgccgatgtggtggacacactgaaacagaagaagcttgaggaaatgactcggactgaacaagaggattcctcctgcatggaaaaactactttcaaaagattggaaggaaaaaatggaaagactaaataccagtgaacttcttggagaaattaaaggtacacctgagagcctggcagaaaaagaacggcagctctccaccatgattacccagctgatcagtttacgggagcagctactggcagcgcatgatgaacagaaaaaactggcagcgtcacaaattgagaaacaacggcagcaaatggaccttgctcgccaacagcaagaacagattgcgagacaacagcagcaacttctgcaacagcagcacaaaattaatctcctgcagcaacagatccaggttcagggtcacatgcctccgctcatgatcccaatttttccacatgaccagcggactctggcagcagctgctgctgcccaacagggattcctcttcccccctggaataacatacaaaccaggtgataactaccccgtacagttcattccatcaacaatggcagctgctgctgcttctggactcagccctttacagctccagcagctctatgccgctcagctggccagcatgcaggtgtcacctggagcaaagatgccatcaactccacagccaccaaacacagcagggacggtctcacctactgggataaaaaatgaaaagagagggaccagccctgtaactcaagttaaggatgaagcagcagcacagcctctgaatctctcatcccgacccaagacagcagagcctgtaaagtccccaacgtctcccacccagaacctcttcccagccagcaaaaccagccctgtcaatctgccaaacaaaagcagcatccctagccccattggaggaagcctgggaagaggatcctctttaggtaaatggaaaagtcaacaccaggaagagacttacgaattagatatcctatctagtctcaactcccctgccctttttggggatcaggatacagtgatgaaagccattcaggaggcgcggaagatgcgagagcagatccagcgggagcaacagcagcaacagccacatggtgttgacgggaaactgtcctccataaataatatggggctgaacagctgcaggaatgaaaaggaaagaacgcgctttgagaatttggggccccagttaacgggaaagtcaaatgaagatggaaaactgggcccaggtgtcatcgaccttactcggccagaagatgcagagggaagtaaagcaatgaatggctctgcagctaaactacagcagtattattgttggccaacaggaggtgccactgtggctgaagcacgagtctacagggacgcccgcggccgtgccagcagcgagccacacattaagcgaccaatgaatgcattcatggtttgggcaaaggatgagaggagaaaaatccttcaggccttccccgacatgcataactccaacattagcaaaatcttaggatctcgctggaaatcaatgtccaaccaggagaagcaaccttattatgaagagcaggcccggctaagcaagatccacttagagaagtacccaaactataaatacaaaccccgaccgaaacgcacctgcattgttgatggcaaaaagcttcggattggggagtataagcaactgatgaggtctcggagacaggagatgaggcagttctttactgtggggcaacagcctcagattccaatcaccacaggaacaggtgttgtgtatcctggtgctatcactatggcaactaccacaccatcgcctcagatgacatctgactgctctagcacctcggccagcccggagcccagcctcccggtcatccagagcacttatggtatgaagacagatggcggaagcctagctggaaatgaaatgatcaatggagaggatgaaatggaaatgtatgatgactatgaagatgaccccaaatcagactatagcagtgaaaatgaagccccggaggctgtcagtgccaac

SEQ ID NO: 6176 - DNA, 2424 bp, Homo sapiens
  source 1..2424: mol_type = genomic DNA
atgtcttccaagcaagccacctctccatttgcctgtgcagctgatggagaggatgcaatgacccaggatttaacctcaagggaaaaggaagagggcagtgatcaacatgtggcctcccatctgcctctgcaccccataatgcacaacaaacctcactctgaggagctaccaacacttgtcagtaccattcaacaagatgctgactgggacagcgttctgtcatctcagcaaagaatggaatcagagaataataagttatgttccctatattccttccgaaatacctctacctcaccacataagcctgacgaagggagtcgggaccgtgagataatgaccagtgttacttttggaaccccagagcgccgcaaagggagtcttgccgatgtggtggacacactgaaacagaagaagcttgaggaaatgactcggactgaacaagaggattcctcctgcatggaaaaactactttcaaaagattggaaggaaaaaatggaaagactaaataccagtgaacttcttggagaaattaaaggtacacctgagagcctggcagaaaaagaacggcagctctccaccatgattacccagctgatcagtttacgggagcagctactggcagcgcatgatgaacagaaaaaactggcagcgtcacaaattgagaaacaacggcagcaaatggaccttgctcgccaacagcaagaacagattgcgagacaacagcagcaacttctgcaacagcagcacaaaattaatctcctgcagcaacagatccaggttcagggtcacatgcctccgctcatgatcccaatttttccacatgaccagcggactctggcagcagctgctgctgcccaacagggattcctcttcccccctggaataacatacaaaccaggtgataactaccccgtacagttcattccatcaacaatggcagctgctgctgcttctggactcagccctttacagctccagaagggtcatgtctcccacccacaaattaaccaaaggctaaagggcctaagtgaccgttttggcaggaatttggacacctttgaacatggtggtggccactcttacaaccacaaacagattgagcagctctatgccgctcagctggccagcatgcaggtgtcacctggagcaaagatgccatcaactccacagccaccaaacacagcagggacggtctcacctactgggataaaaaatgaaaagagagggaccagccctgtaactcaagttaaggatgaagcagcagcacagcctctgaatctctcatcccgacccaagacagcagagcctgtaaagtccccaacgtctcccacccagaacctcttcccagccagcaaaaccagccctgtcaatctgccaaacaaaagcagcatccctagccccattggaggaagcctgggaagaggatcctctttagatatcctatctagtctcaactcccctgccctttttggggatcaggatacagtgatgaaagccattcaggaggcgcggaagatgcgagagcagatccagcgggagcaacagcagcaacagccacatggtgttgacgggaaactgtcctccataaataatatggggctgaacagctgcaggaatgaaaaggaaagaacgcgctttgagaatttggggccccagttaacgggaaagtcaaatgaagatggaaaactgggcccaggtgtcatcgaccttactcggccagaagatgcagagggaggtgccactgtggctgaagcacgagtctacagggacgcccgcggccgtgccagcagcgagccacacattaagcgaccaatgaatgcattcatggtttgggcaaaggatgagaggagaaaaatccttcaggccttccccgacatgcataactccaacattagcaaaatcttaggatctcgctggaaatcaatgtccaaccaggagaagcaaccttattatgaagagcaggcccggctaagcaagatccacttagagaagtacccaaactataaatacaaaccccgaccgaaacgcacctgcattgttgatggcaaaaagcttcggattggggagtataagcaactgatgaggtctcggagacaggagatgaggcagttctttactgtggggcaacagcctcagattccaatcaccacaggaacaggtgttgtgtatcctggtgctatcactatggcaactaccacaccatcgcctcagatgacatctgactgctctagcacctcggccagcccggagcccagcctcccggtcatccagagcacttatggtatgaagacagatggcggaagcctagctggaaatgaaatgatcaatggagaggatgaaatggaaatgtatgatgactatgaagatgaccccaaatcagactatagcagtgaaaatgaagccccggaggctgtcagtgccaac

SEQ ID NO: 6177 - DNA, 1164 bp, Homo sapiens
  source 1..1164: mol_type = genomic DNA
atggcttcgctgctgggagcctacccttggcccgagggtctcgagtgcccggccctggacgccgagctgtcggatggacaatcgccgccggccgtcccccggcccccgggggacaagggctccgagagccgtatccggcggcccatgaacgccttcatggtttgggccaaggacgagaggaaacggctggcagtgcagaacccggacctgcacaacgccgagctcagcaagatgctgggaaagtcgtggaaggcgctgacgctgtcccagaagaggccgtacgtggacgaggcggagcggctgcgcctgcagcacatgcaggactaccccaactacaagtaccggccgcgcaggaagaagcaggccaagcggctgtgcaagcgcgtggacccgggcttccttctgagctccctctcccgggaccagaacgccctgccggagaagagaagcggcagccggggggcgctgggggagaaggaggacaggggtgagtactcccccggcactgccctgcccagcctccggggctgctaccacgaggggccggctggtggtggcggcggcggcaccccgagcagtgtggacacgtacccgtacgggctgcccacacctcctgaaatgtctcccctggacgtgctggagccggagcagaccttcttctcctccccctgccaggaggagcatggccatccccgccgcatcccccacctgccagggcacccgtactcaccggagtacgccccaagccctctccactgtagccaccccctgggctccctggcccttggccagtcccccggcgtctccatgatgtcccctgtacccggctgtcccccatctcctgcctattactccccggccacctaccacccactccactccaacctccaagcccacctgggccagctttccccgcctcctgagcaccctggcttcgacgccctggatcaactgagccaggtggaactcctgggggacatggatcgcaatgaattcgaccagtatttgaacactcctggccacccagactccgccacaggggccatggccctcagtgggcatgttccggtctcccaggtgacaccaacgggtcccacagagaccagcctcatctccgtcctggctgatgccacggccacgtactacaacagctacagtgtgtca

SEQ ID NO: 6178 - DNA, 1422 bp, Homo sapiens
  source 1..1422: mol_type = genomic DNA
atggtgcagcaaaccaacaatgccgagaacacggaagcgctgctggccggcgagagctcggactcgggcgccggcctcgagctgggaatcgcctcctcccccacgcccggctccaccgcctccacgggcggcaaggccgacgacccgagctggtgcaagaccccgagtgggcacatcaagcgacccatgaacgccttcatggtgtggtcgcagatcgagcggcgcaagatcatggagcagtcgcccgacatgcacaacgccgagatctccaagcggctgggcaaacgctggaagctgctcaaagacagcgacaagatccctttcattcgagaggcggagcggctgcgcctcaagcacatggctgactaccccgactacaagtaccggcccaggaagaaggtgaagtccggcaacgccaactccagctcctcggccgccgcctcctccaagccgggggagaagggagacaaggtcggtggcagtggcgggggcggccatgggggcggcggcggcggcgggagcagcaacgcggggggaggaggcggcggtgcgagtggcggcggcgccaactccaaaccggcgcagaaaaagagctgcggctccaaagtggcgggcggcgcgggcggtggggttagcaaaccgcacgccaagctcatcctggcaggcggcggcggcggcgggaaagcagcggctgccgccgccgcctccttcgccgccgaacaggcgggggccgccgccctgctgcccctgggcgccgccgccgaccaccactcgctgtacaaggcgcggactcccagcgcctcggcctccgcctcctcggcagcctcggcctccgcagcgctcgcggccccgggcaagcacctggcggagaagaaggtgaagcgcgtctacctgttcggcggcctgggcacgtcgtcgtcgcccgtgggcggcgtgggcgcgggagccgaccccagcgaccccctgggcctgtacgaggaggagggcgcgggctgctcgcccgacgcgcccagcctgagcggccgcagcagcgccgcctcgtcccccgccgccggccgctcgcccgccgaccaccgcggctacgccagcctgcgcgccgcctcgcccgccccgtccagcgcgccctcgcacgcgtcctcctcggcctcgtcccactcctcctcttcctcctcctcgggctcctcgtcctccgacgacgagttcgaagacgacctgctcgacctgaaccccagctcaaactttgagagcatgtccctgggcagcttcagttcgtcgtcggcgctcgaccgggacctggattttaacttcgagcccggctccggctcgcacttcgagttcccggactactgcacgcccgaggtgagcgagatgatctcgggagactggctcgagtccagcatctccaacctggttttcacctac

SEQ ID NO: 6179 - DNA, 1131 bp, Homo sapiens
  source 1..1131: mol_type = genomic DNA
atgcatgatgaagtggcacagccactgaacctatcagctaaacccaagacctctgatggcaaatcacccacatcacccacctctccccatatgccagctctgagaataaacagtggggcaggccccctcaaagcctctgtcccagcagcgttagctagtccttcagccagagttagcacaataggttacttaaatgaccatgatgctgtcaccaaggcaatccaagaagctcggcaaatgaaggagcaactccgacgggaacaacaggtgcttgatgggaaggtggctgttgtgaatagtctgggtctcaataactgccgaacagaaaaggaaaaaacaacactggagagtctgactcagcaactggcagttaaacagaatgaagaaggaaaatttagccatgcaatgatggatttcaatctgagtggagattctgatggaagtgctggagtctcagagtcaagaatttatagggaatcccgagggcgtggtagcaatgaaccccacataaagcgtccaatgaatgccttcatggtgtgggctaaagatgaacggagaaagatccttcaagcctttcctgacatgcacaactccaacatcagcaagatattgggatctcgctggaaagctatgacaaacctagagaaacagccatattatgaggagcaagcccgtctcagcaagcagcacctggagaagtaccctgactataagtacaagcccaggccaaagcgcacctgcctggtggatggcaaaaagctgcgcattggtgaatacaaggcaatcatgcgcaacaggcggcaggaaatgcggcagtacttcaatgttgggcaacaagcacagatccccattgccactgctggtgttgtgtaccctggagccatcgccatggctgggatgccctcccctcacctgccctcggagcactcaagcgtgtctagcagcccagagcctgggatgcctgttatccagagcacttacggtgtgaaaggagaggagccacatatcaaagaagagatacaggccgaggacatcaatggagaaatttatgatgagtacgacgaggaagaggatgatccagatgtagattatgggagtgacagtgaaaaccatattgcaggacaagccaac

SEQ ID NO: 6180 - DNA, 2259 bp, Homo sapiens
  source 1..2259: mol_type = genomic DNA
atgtctgtgatgtcttccaagcgaccagcctctccgtatggggaagcagatggagaggtagccatggtgacaagcagacagaaagtggaagaagaggagagtgacgggctcccagcctttcaccttcccttgcatgtgagttttcccaacaagcctcactctgaggaatttcagccagtttctctgctgacgcaagagacttgtggccataggactcccacttctcagcacaatacaatggaagttgatggcaataaagttatgtcttcatttgccccacacaactcatctacctcacctcagaaggcagaagaaggtgggcgacagagtggcgagtccttgtctagtacagccctgggaactcctgaacggcgcaagggcagtttagctgatgttgttgacaccttgaagcagaggaaaatggaagagctcatcaaaaacgagccggaagaaacccccagtattgaaaaactactctcaaaggactggaaagacaagcttcttgcaatgggatcggggaactttggcgaaataaaagggactcccgagagcttagctgagaaagaaaggcaactcatgggtatgatcaaccagctgaccagcctccgagagcagctgttggctgcccacgatgagcagaagaaactagctgcctctcagattgagaaacagcgtcagcaaatggagctggccaagcagcaacaagaacaaattgcaagacagcagcagcagcttctacagcaacaacacaaaatcaatttgctccagcaacagatccaggttcaaggtcagctgccgccattaatgattcccgtattccctcctgatcaacggacactggctgcagctgcccagcaaggattcctcctccctccaggcttcagctataaggctggatgtagtgacccttaccctgttcagctgatcccaactaccatggcagctgctgccgcagcaacaccaggcttaggcccactccaactgcagcagttatatgctgcccagctagctgcaatgcaggtatctccaggagggaagctgccaggcataccccaaggcaaccttggtgctgctgtatctcctaccagcattcacacagacaagagcacaaacagcccaccacccaaaagcaaggatgaagtggcacagccactgaacctatcagctaaacccaagacctctgatggcaaatcacccacatcacccacctctccccatatgccagctctgagaataaacagtggggcaggccccctcaaagcctctgtcccagcagcgttagctagtccttcagccagagttagcacaataggttacttaaatgaccatgatgctgtcaccaaggcaatccaagaagctcggcaaatgaaggagcaactccgacgggaacaacaggtgcttgatgggaaggtggctgttgtgaatagtctgggtctcaataactgccgaacagaaaaggaaaaaacaacactggagagtctgactcagcaactggcagttaaacagaatgaagaaggaaaatttagccatgcaatgatggatttcaatctgagtggagattctgatggaagtgctggagtctcagagtcaagaatttatagggaatcccgagggcgtggtagcaatgaaccccacataaagcgtccaatgaatgccttcatggtgtgggctaaagatgaacggagaaagatccttcaagcctttcctgacatgcacaactccaacatcagcaagatattgggatctcgctggaaagctatgacaaacctagagaaacagccatattatgaggagcaagcccgtctcagcaagcagcacctggagaagtaccctgactataagtacaagcccaggccaaagcgcacctgcctggtggatggcaaaaagctgcgcattggtgaatacaaggcaatcatgcgcaacaggcggcaggaaatgcggcagtacttcaatgttgggcaacaagcacagatccccattgccactgctggtgttgtgtaccctggagccatcgccatggctgggatgccctcccctcacctgccctcggagcactcaagcgtgtctagcagcccagagcctgggatgcctgttatccagagcacttacggtgtgaaaggagaggagccacatatcaaagaagagatacaggccgaggacatcaatggagaaatttatgatgagtacgacgaggaagaggatgatccagatgtagattatgggagtgacagtgaaaaccatattgcaggacaagccaac

SEQ ID NO: 6181 - DNA, 2289 bp, Homo sapiens
  source 1..2289: mol_type = genomic DNA
atgcttactgaccctgatttacctcaggagtttgaaaggatgtcttccaagcgaccagcctctccgtatggggaagcagatggagaggtagccatggtgacaagcagacagaaagtggaagaagaggagagtgacgggctcccagcctttcaccttcccttgcatgtgagttttcccaacaagcctcactctgaggaatttcagccagtttctctgctgacgcaagagacttgtggccataggactcccacttctcagcacaatacaatggaagttgatggcaataaagttatgtcttcatttgccccacacaactcatctacctcacctcagaaggcagaagaaggtgggcgacagagtggcgagtccttgtctagtacagccctgggaactcctgaacggcgcaagggcagtttagctgatgttgttgacaccttgaagcagaggaaaatggaagagctcatcaaaaacgagccggaagaaacccccagtattgaaaaactactctcaaaggactggaaagacaagcttcttgcaatgggatcggggaactttggcgaaataaaagggactcccgagagcttagctgagaaagaaaggcaactcatgggtatgatcaaccagctgaccagcctccgagagcagctgttggctgcccacgatgagcagaagaaactagctgcctctcagattgagaaacagcgtcagcaaatggagctggccaagcagcaacaagaacaaattgcaagacagcagcagcagcttctacagcaacaacacaaaatcaatttgctccagcaacagatccaggttcaaggtcagctgccgccattaatgattcccgtattccctcctgatcaacggacactggctgcagctgcccagcaaggattcctcctccctccaggcttcagctataaggctggatgtagtgacccttaccctgttcagctgatcccaactaccatggcagctgctgccgcagcaacaccaggcttaggcccactccaactgcagcagttatatgctgcccagctagctgcaatgcaggtatctccaggagggaagctgccaggcataccccaaggcaaccttggtgctgctgtatctcctaccagcattcacacagacaagagcacaaacagcccaccacccaaaagcaaggatgaagtggcacagccactgaacctatcagctaaacccaagacctctgatggcaaatcacccacatcacccacctctccccatatgccagctctgagaataaacagtggggcaggccccctcaaagcctctgtcccagcagcgttagctagtccttcagccagagttagcacaataggttacttaaatgaccatgatgctgtcaccaaggcaatccaagaagctcggcaaatgaaggagcaactccgacgggaacaacaggtgcttgatgggaaggtggctgttgtgaatagtctgggtctcaataactgccgaacagaaaaggaaaaaacaacactggagagtctgactcagcaactggcagttaaacagaatgaagaaggaaaatttagccatgcaatgatggatttcaatctgagtggagattctgatggaagtgctggagtctcagagtcaagaatttatagggaatcccgagggcgtggtagcaatgaaccccacataaagcgtccaatgaatgccttcatggtgtgggctaaagatgaacggagaaagatccttcaagcctttcctgacatgcacaactccaacatcagcaagatattgggatctcgctggaaagctatgacaaacctagagaaacagccatattatgaggagcaagcccgtctcagcaagcagcacctggagaagtaccctgactataagtacaagcccaggccaaagcgcacctgcctggtggatggcaaaaagctgcgcattggtgaatacaaggcaatcatgcgcaacaggcggcaggaaatgcggcagtacttcaatgttgggcaacaagcacagatccccattgccactgctggtgttgtgtaccctggagccatcgccatggctgggatgccctcccctcacctgccctcggagcactcaagcgtgtctagcagcccagagcctgggatgcctgttatccagagcacttacggtgtgaaaggagaggagccacatatcaaagaagagatacaggccgaggacatcaatggagaaatttatgatgagtacgacgaggaagaggatgatccagatgtagattatgggagtgacagtgaaaaccatattgcaggacaagccaac

SEQ ID NO: 6182 - DNA, 2184 bp, Homo sapiens
  source 1..2184: mol_type = genomic DNA
atgcttactgaccctgatttacctcaggagtttgaaaggatgtcttccaagcgaccagcctctccgtatggggaagcagatggagaggtagccatggtgacaagcagacagaaagtggaagaagaggagagtgacgggctcccagcctttcaccttcccttgcatgaagttgatggcaataaagttatgtcttcatttgccccacacaactcatctacctcacctcagaaggcagaagaaggtgggcgacagagtggcgagtccttgtctagtacagccctgggaactcctgaacggcgcaagggcagtttagctgatgttgttgacaccttgaagcagaggaaaatggaagagctcatcaaaaacgagccggaagaaacccccagtattgaaaaactactctcaaaggactggaaagacaagcttcttgcaatgggatcggggaactttggcgaaataaaagggactcccgagagcttagctgagaaagaaaggcaactcatgggtatgatcaaccagctgaccagcctccgagagcagctgttggctgcccacgatgagcagaagaaactagctgcctctcagattgagaaacagcgtcagcaaatggagctggccaagcagcaacaagaacaaattgcaagacagcagcagcagcttctacagcaacaacacaaaatcaatttgctccagcaacagatccaggttcaaggtcagctgccgccattaatgattcccgtattccctcctgatcaacggacactggctgcagctgcccagcaaggattcctcctccctccaggcttcagctataaggctggatgtagtgacccttaccctgttcagctgatcccaactaccatggcagctgctgccgcagcaacaccaggcttaggcccactccaactgcagcagttatatgctgcccagctagctgcaatgcaggtatctccaggagggaagctgccaggcataccccaaggcaaccttggtgctgctgtatctcctaccagcattcacacagacaagagcacaaacagcccaccacccaaaagcaaggatgaagtggcacagccactgaacctatcagctaaacccaagacctctgatggcaaatcacccacatcacccacctctccccatatgccagctctgagaataaacagtggggcaggccccctcaaagcctctgtcccagcagcgttagctagtccttcagccagagttagcacaataggttacttaaatgaccatgatgctgtcaccaaggcaatccaagaagctcggcaaatgaaggagcaactccgacgggaacaacaggtgcttgatgggaaggtggctgttgtgaatagtctgggtctcaataactgccgaacagaaaaggaaaaaacaacactggagagtctgactcagcaactggcagttaaacagaatgaagaaggaaaatttagccatgcaatgatggatttcaatctgagtggagattctgatggaagtgctggagtctcagagtcaagaatttatagggaatcccgagggcgtggtagcaatgaaccccacataaagcgtccaatgaatgccttcatggtgtgggctaaagatgaacggagaaagatccttcaagcctttcctgacatgcacaactccaacatcagcaagatattgggatctcgctggaaagctatgacaaacctagagaaacagccatattatgaggagcaagcccgtctcagcaagcagcacctggagaagtaccctgactataagtacaagcccaggccaaagcgcacctgcctggtggatggcaaaaagctgcgcattggtgaatacaaggcaatcatgcgcaacaggcggcaggaaatgcggcagtacttcaatgttgggcaacaagcacagatccccattgccactgctggtgttgtgtaccctggagccatcgccatggctgggatgccctcccctcacctgccctcggagcactcaagcgtgtctagcagcccagagcctgggatgcctgttatccagagcacttacggtgtgaaaggagaggagccacatatcaaagaagagatacaggccgaggacatcaatggagaaatttatgatgagtacgacgaggaagaggatgatccagatgtagattatgggagtgacagtgaaaaccatattgcaggacaagccaac

SEQ ID NO: 6183 - DNA, 2250 bp, Homo sapiens
  source 1..2250: mol_type = genomic DNA
atgtcttccaagcgaccagcctctccgtatggggaagcagatggagaggtagccatggtgacaagcagacagaaagtggaagaagaggagagtgacgggctcccagcctttcaccttcccttgcatgtgagttttcccaacaagcctcactctgaggaatttcagccagtttctctgctgacgcaagagacttgtggccataggactcccacttctcagcacaatacaatggaagttgatggcaataaagttatgtcttcatttgccccacacaactcatctacctcacctcagaaggcagaagaaggtgggcgacagagtggcgagtccttgtctagtacagccctgggaactcctgaacggcgcaagggcagtttagctgatgttgttgacaccttgaagcagaggaaaatggaagagctcatcaaaaacgagccggaagaaacccccagtattgaaaaactactctcaaaggactggaaagacaagcttcttgcaatgggatcggggaactttggcgaaataaaagggactcccgagagcttagctgagaaagaaaggcaactcatgggtatgatcaaccagctgaccagcctccgagagcagctgttggctgcccacgatgagcagaagaaactagctgcctctcagattgagaaacagcgtcagcaaatggagctggccaagcagcaacaagaacaaattgcaagacagcagcagcagcttctacagcaacaacacaaaatcaatttgctccagcaacagatccaggttcaaggtcagctgccgccattaatgattcccgtattccctcctgatcaacggacactggctgcagctgcccagcaaggattcctcctccctccaggcttcagctataaggctggatgtagtgacccttaccctgttcagctgatcccaactaccatggcagctgctgccgcagcaacaccaggcttaggcccactccaactgcagcagttatatgctgcccagctagctgcaatgcaggtatctccaggagggaagctgccaggcataccccaaggcaaccttggtgctgctgtatctcctaccagcattcacacagacaagagcacaaacagcccaccacccaaaagcaaggatgaagtggcacagccactgaacctatcagctaaacccaagacctctgatggcaaatcacccacatcacccacctctccccatatgccagctctgagaataaacagtggggcaggccccctcaaagcctctgtcccagcagcgttagctagtccttcagccagagttagcacaataggttacttaaatgaccatgatgctgtcaccaaggcaatccaagaagctcggcaaatgaaggagcaactccgacgggaacaacaggtgcttgatgggaaggtggctgttgtgaatagtctgggtctcaataactgccgaacagaaaaggaaaaaacaacactggagagtctgactcagcaactggcagttaaacagaatgaagaaggaaaatttagccatgcaatgatggatttcaatctgagtggagattctgatggaagtgctggagtctcagagtcaagaatttatagggaatcccgagggcgtggtagcaatgaaccccacataaagcgtccaatgaatgccttcatggtgtgggctaaagatgaacggagaaagatccttcaagcctttcctgacatgcacaactccaacatcagcaagatattgggatctcgctggaaagctatgacaaacctagagaaacagccatattatgaggagcaagcccgtctcagcaagcagcacctggagaagtaccctgactataagtacaagcccaggccaaagcgcacctgcctggtggatggcaaaaagctgcgcattggtgaatacaaggcaatcatgcgcaacaggcggcaggaaatgcggcagtacttcaatgttgggcaacaagcacagatccccattgccactgctggtgttgtgtaccctggagccatcgccatggctgggatgccctcccctcacctgccctcggagcactcaagcgtgtctagcagcccagagcctgggatgcctgttatccagagcacttacggtgtgaaaggagaggagccacatatcaaagaagagatacaggccgaggacatcaatggagaaatttatgatgagtacgacgaggaagaggatgatccagatgtagattatgggagtgacagtgaaaaccatattgcaggacaagccaac

SEQ ID NO: 6184 - DNA, 2769 bp, Homo sapiens
  source 1..2769: mol_type = genomic DNA
atgttggagaactacagaaacctggtctccctagctatgtgttctcatttcacccaagactttttgccagtgcaggggatagaagattcattccacaaacttatactgagaagatatgagaaatgtgggcatgataatttacaattaaggaaaggctgtaaaagtatgaacgtgtgtaaagtgcagaagggagtttataatggaattaataaatgcttgtcaaatactcagagcaaaatatttcaatgtaatgcacgtgtcaaagtttttagtaaatttgcaaattcaaacaaagataagacaagacatactggagagaaacactttaaatgtaacgaatgtggcaagtcatttcagaagttctcagacctaactcaacataaaggaattcatgctggagagaaaccctacacttgtgaagaacgtggcaaagactttggatggtacacagacctgaatcaacacaagaaaattcatactggagagaaaccttacaaatgtgaagaatgtggcaaagcctttaataggtcaacaaaccttactgcacataagagaattcacaacagagagaaagcttacacaggtgaagatcgtgacagagcctttggatggtccacaaacctgaatgaatataagaaaattcatactggagataaaccctacaaatgtaaagaatgtgggaaagcctttatgcattcctcacacctgaataaacatgagaaaattcatactggagagaaaccctacaaatgtaaggaatgtggcaaagtcatttcctcatcctcaagctttgctaaacataagaggattcatactggcgagaaaccctttaaatgtttagaatgtggtaaagcctttaatatttccacaacccttactaaacataggagaattcatactggagagaaaccctacacatgtgaagtatgtggcaaagcctttagacagtccgcaaacctttatgtacataggagaattcatactggagagaaaccctacacatgtggagaatgtggcaaaacctttagacagtccgcaaacctttacgtacataggagaattcatactggagagaaaccttacaaatgcgaagactgtggcaaagcctttggacggtacacagccctgaatcaacacaagaaaattcatactggagagaaaccttacaaatgtgaagagtgtggcaaagcctttaatagttcaacaaaccttactgcacataagagaattcacaccagagagaaaccctacacatgtgaagatcgtggcagagcctttggattgtccacaaacctgaatgaatataagaaaattcatactggagataaaccctacaaatgtaaagaatgtgggaaagcctttatacattccttgcacctgaataaacatgagaaaattcatactggaaagaaaccctacaaatgtaagcaatgtggcaaagtcattacctcatcctcaagctttgctaaacataagaggattcatactggcgagaaaccctttgaatgtttagaatgtggtaaagcgtttactagttccacaacccttactaaacataggagaattcatactggagagaaaccctacacatgtgaagtatgtggcaaagcctttagacagtccgcaatcctttatgtacataggagaattcatactggagagaaaccctacacatgtgaagaatgtggcaaaacctttagacagtccgcaaacctttatgtacataggagaattcatactggagagaaaccttacaaatgtgaagagtgtggcaaagcctttggacggtacacagacctgaatcaacacaagaaaattcatactggagagaaactttacaaatgtgaagagtgtggcaaagactttgtatggtacacggacctgaatcaacagaagaaaatttacactggggagaaaccttacaaatgtgaagagtgtggcaaagcctttgccccatcaacagacctgaatcaacacacgaaaattcttactggagagcaaagttacaaatgtgaagagtgtggcaaagcctttggatggtccatagccctgaatcaacacaagaaaattcatactggagaaaaaccttacaaatgtgaagagtgtggcaaagcctttagtaggtcaagaaaccttactacacataggagagttcacactagggagaaaccctacaaatgtgaagatcgtggcagatcctttggatggtccacaaacctgaacgaatataagaaaattcatactggagataaactctacaaatgtaaagaatgtgggaaagtgtttaaacagtcctcacacctgaatagacatgagaaaattcatactggaaagaaaccctacaaatgtaaggaatgtggcaaagtcattacgtcatcctcaagctttgctaaacataagaggattcatacaggtgagaaaccctttaaatgtttagaatgtggtaaagcgtttactagttccacaacccttactaaacataggagaattcatactggagagaaaccctacacatgtgaagaatgtggcaaagcctttagacagtcagcaatcctttatgtacataggagaattcatactggagagaaaccctacacatgtggagaatgtggcaaaacctttagacagtctgcaaatctttatgcgcataagaaaattcatactggagagaaaccctacacgtgtggagactgtggcaaaacctttagacagtctgcaaatctttatgcacataagaaaattcatactggagataaaaccatacaagtg

SEQ ID NO: 6185 - DNA, 1035 bp, Homo sapiens
  source 1..1035: mol_type = genomic DNA
atgcaacgcctggtggcctgggacccagcatgtctccccctgccgccgccgccgcctgcctttaaatccatggaagtggccaacttctactacgaggcggactgcttggctgctgcgtacggcggcaaggcggcccccgcggcgccccccgcggccagacccgggccgcgcccccccgccggcgagctgggcagcatcggcgaccacgagcgcgccatcgacttcagcccgtacctggagccgctgggcgcgccgcaggccccggcgcccgccacggccacggacaccttcgaggcggctccgcccgcgcccgcccccgcgcccgcctcctccgggcagcaccacgacttcctctccgacctcttctccgacgactacgggggcaagaactgcaagaagccggccgagtacggctacgtgagcctggggcgcctgggggccgccaagggcgcgctgcaccccggctgcttcgcgcccctgcacccaccgcccccgccgccgccgccgcccgccgagctcaaggcggagccgggcttcgagcccgcggactgcaagcggaaggaggaggccggggcgccgggcggcggcgcaggcatggcggcgggcttcccgtacgcgctgcgcgcttacctcggctaccaggcggtgccgagcggcagcagcgggagcctctccacgtcctcctcgtccagcccgcccggcacgccgagccccgctgacgccaaggcgcccccgaccgcctgctacgcgggggccgcgccggcgccctcgcaggtcaagagcaaggccaagaagaccgtggacaagcacagcgacgagtacaagatccggcgcgagcgcaacaacatcgccgtgcgcaagagccgcgacaaggccaagatgcgcaacctggagacgcagcacaaggtcctggagctcacggccgagaacgagcggctgcagaagaaggtggagcagctgtcgcgcgagctcagcaccctgcggaacttgttcaagcagctgcccgagcccctgctcgcctcctccggccactgc

SEQ ID NO: 6186 - DNA, 1074 bp, Homo sapiens
  source 1..1074: mol_type = genomic DNA
atggagtcggccgacttctacgaggcggagccgcggcccccgatgagcagccacctgcagagccccccgcacgcgcccagcagcgccgccttcggctttccccggggcgcgggccccgcgcagcctcccgccccacctgccgccccggagccgctgggcggcatctgcgagcacgagacgtccatcgacatcagcgcctacatcgacccggccgccttcaacgacgagttcctggccgacctgttccagcacagccggcagcaggagaaggccaaggcggccgtgggccccacgggcggcggcggcggcggcgactttgactacccgggcgcgcccgcgggccccggcggcgccgtcatgcccgggggagcgcacgggcccccgcccggctacggctgcgcggccgccggctacctggacggcaggctggagcccctgtacgagcgcgtcggggcgccggcgctgcggccgctggtgatcaagcaggagccccgcgaggaggatgaagccaagcagctggcgctggccggcctcttcccttaccagccgccgccgccgccgccgccctcgcacccgcacccgcacccgccgcccgcgcacctggccgccccgcacctgcagttccagatcgcgcactgcggccagaccaccatgcacctgcagcccggtcaccccacgccgccgcccacgcccgtgcccagcccgcaccccgcgcccgcgctcggtgccgccggcctgccgggccctggcagcgcgctcaaggggctgggcgccgcgcaccccgacctccgcgcgagtggcggcagcggcgcgggcaaggccaagaagtcggtggacaagaacagcaacgagtaccgggtgcggcgcgagcgcaacaacatcgcggtgcgcaagagccgcgacaaggccaagcagcgcaacgtggagacgcagcagaaggtgctggagctgaccagtgacaatgaccgcctgcgcaagcgggtggaacagctgagccgcgaactggacacgctgcggggcatcttccgccagctgccagagagctccttggtcaaggccatgggcaactgcgcg

SEQ ID NO: 6187 - DNA, 807 bp, Homo sapiens
  source 1..807: mol_type = genomic DNA
atgagcgccgcgctcttcagcctggacggcccggcgcgcggcgcgccctggcctgcggagcctgcgcccttctacgaaccgggccgggcgggcaagccgggccgcggggccgagccaggggccctaggcgagccaggcgccgccgcccccgccatgtacgacgacgagagcgccatcgacttcagcgcctacatcgactccatggccgccgtgcccaccctggagctgtgccacgacgagctcttcgccgacctcttcaacagcaatcacaaggcgggcggcgcggggcccctggagcttcttcccggcggccccgcgcgccccttgggcccgggccctgccgctccccgcctgctcaagcgcgagcccgactggggcgacggcgacgcgcccggctcgctgttgcccgcgcaggtggccgcgtgcgcacagaccgtggtgagcttggcggccgcagggcagcccaccccgcccacgtcgccggagccgccgcgcagcagccccaggcagacccccgcgcccggccccgcccgggagaagagcgccggcaagaggggcccggaccgcggcagccccgagtaccggcagcggcgcgagcgcaacaacatcgccgtgcgcaagagccgcgacaaggccaagcggcgcaaccaggagatgcagcagaagttggtggagctgtcggctgagaacgagaagctgcaccagcgcgtggagcagctcacgcgggacctggccggcctccggcagttcttcaagcagctgcccagcccgcccttcctgccggccgccgggacagcagactgccgg

SEQ ID NO: 6188 - DNA, 3756 bp, Homo sapiens
  source 1..3756: mol_type = genomic DNA
atgccaggtgcccctggcagcctagaaatgggaccattgacatttagagatgtgaccatagaattctctctggaggagtggcaatgcctggacacggttcagcagaatttatatagggatgtgatgttagagaactacagaaacctggtcttcctgggtatggctgtctttaagccagacttgataacttgtctgaagcaagggaaagagccttggaatatgaagagacatgagatggtaactaaacccccagttatgcgttctcattttacacaagacctttggccagatcagagcacaaaagattctttccaagaagtaatactgagaacatatgcaagatgtggacataagaatttacgattaagaaaagattgtaaaagtgccaatgagggtaagatgcacaaagaaggttataataaacttaaccaatgcaggacagctacccagagaaaaatatttcagtgtaacaaacatatgaaagtctttcataaatattcaaatagaaataaggttagacacactaaaaagaaaactttcaaatgtataaaatgtagcaaatcatttttcatgctttcatgcttaattcgacataagagaattcatattagacagaatatctacaaatgtgaagaacgtggcaaagcctttaaatcgttctcaacccttactaaacataagataattcatactgaagacaaaccttacaaatataagaaatgtggcaatgcctttaaattttcttcaacgttcactaaacataagagaattcatactggagagacacctttcagatgtgaagaatgtggcaaagcttttaaccagtcctcaaatcttactgaccataagagaattcatactggagagaaaacctacaaatgtgaagaatgtggcaaagcttttaaggggtcctcaaattttaatgcacataaggtaattcatactgcagagaaaccctacaaatgtgaagattgtggcaaaacttttaaccatttctcagcccttagaaaacataagataattcatactggaaagaaaccctacaagcgtgaagaatgtggcaaagcttttagccagtcctcaacccttagaaaacatgagataattcatactggagagaaaccctacaaatgtgaagaatgtggtaaagcttttaagtggtcttcaaaacttactgtacataaggtagttcatactggagagaaaccctacaaatgtgaagaatgtggcaaagcttttagccagttctcaacccttaaaaaacataagataattcatactggaaagaaaccctacaaatgtgaagaatgtggcaaagcttttaacagttcctcaacccttatgaaacataagataattcatactggggagaaaccatacaaatgtgaagaatgtggcaaagcttttaggcaatcctcacaccttactagacataaagcaattcatactggagagaaaccctacaaatgtgaagaatgtggcaaagcttttaaccatttctcagaccttagaagacataagataattcatactggaaagaaaccctacaaatgtgaagaatgtgggaaagcttttagccagtcctcaacccttagaaaccatcagataattcatactggagagaaaccctacaaatgtgaagaatgtggtaaagcttttaagtggtcatcaaaacttactgtacataaggtaattcatactggagagaaaccctgcaaatgtgaagaatgtggcaaagcttttaagcatttctcagccctcagaaaacataaggtaattcatactagggagaaattgtacaaatgtgaagaatgtggcaaagcttttaacaattcctcaatccttgctaaacataagataattcatactgggaagaaaccgtacaaatgtgaagaatgtggcaaagcttttaggcaatcctcacaccttactagacataaagcaattcatactggagagaaaccttacaaatgtgaagaatgtggcaaagcttttagccatttctcagcccttagaagacataagataattcatactggaaagaaaccgtacaaatgtgaagaatgtggcaaagcttttagccatttctcagcccttagaagacataagataattcatactggagagaaaccctacaaatgtgaagaatgtggtaaagcttttaagtggtcatcaaaacttactgtacataaggtaattcatactgcagagaaaccctgcaaatgtgaagaatgtggcaaatcttttaagcatttctcagcccttagaaaacataaggtaattcatactagggagaaattgtacaaatgtgaagaatgtgtcaaagcttttaacagtttctcagcccttatgaaacataaggtaattcatactggagagaaaccctacaagtgtgaagaatgtggtaaagcttttaagtggtcctcaaagcttactgtacataaggtaattcatactggagagaaaccctgcaaatgtgaagaatgtggcaaagcttttaagcatttctcagcccttagaaaacataaggtaattcatactggaaagaaaccctacaaatgtgaagaatgtggcaaagcttttagccaatcctcatcccttagaaaacatgagataattcatagtggagagaaaccatacaaatgtgaagaatgtggtaaagcttttaagtggttgtcaaaacttactgtacataaggtaattcatactgcagagaaaccctgtaaatgtgaagaatgtggcaaagcttttaagcatttctcagcccttagaaaacataagataattcatactggaaagaaaccctacaaatgtgaagaatgtggcaaagcttttaatgattcctcaacccttatgaagcataagataattcatactgggaagaaaccatacaaatgtgcagaatgtggcaaagcttttaagcaatcctcacatcttactagacataaagcaattcatactggggagaaaccctacaaatgcgaagaatgtggcaaagattttaacaattcctcaacccttaagaaacataagctaattcatactagggagaaattgtacaaatgtgaagaatgtgtcaaagcttttaacaatttctcagcccttatgaaacataagataattcatactggggagaaaccctacaaatgtgaagaatgtggtaaagcttttaagtggtcctcaaaacttactgaacataaggtaattcatactggagagaaaccctgcaaatgtgaagaatgtgacaaagcttttaagcatttctcagcccttagaaaacataaggtaattcatactggaaagaaaccctaccaatgtgacgaatgtggcaaagcttttaacaattcctcaacccttacgaaacataagataattcatactggggagaaaccctacaaatgtgaagaatgtggcaaagcctttagtcagtcctcaatccttactaaacataagataattcattctgtagagaaaccctacaaatgtgaagaatgtggcaaagcctttaaccagtcctcacaccttactagacacaaaacaattcatactggagagaaaccctacaaatgtgaagaatgtggcaaagcttttattcagtgctcataccttattagacataaaacaattcataccagagagaaacctacaaatgtgaagaaagtaccaaagcttttaagcaatcctcacaccttactagacaaaacaattcatactggagagaaaccctacaaatgtgaagaatgtgccaaagctttt

SEQ ID NO: 6189 - DNA, 2184 bp, Homo sapiens
  source 1..2184: mol_type = genomic DNA
atggaggcggcggcaggcggccgcggctgtttccagccgcacccggggctgcagaagacgctggagcagttccacctgagctccatgagctcgctgggcggcccggccgctttctcggcgcgctgggcgcaggaggcctacaagaaggagagcgccaaggaggcgggcgcggccgcggtgccggcgccggtgcccgcagccaccgagccgccgcccgtgctgcacctgcccgccatccagccgccgccgcccgtgctgcccgggcccttcttcatgccgtccgaccgctccaccgagcgctgcgagaccgtactggaaggcgagaccatctcgtgcttcgtggtgggaggcgagaagcgcctgtgtctgccgcagattctcaactcggtgctgcgcgacttctcgctgcagcagatcaacgcggtgtgcgacgagctccacatctactgctcgcgctgcacggccgaccagctggagatcctcaaagtcatgggcatcctgcccttctcggcgccctcgtgcgggctcatcaccaagacggacgccgagcgcctgtgcaacgcgctgctctacggcggcgcctacccgccgccctgcaagaaggagctggccgccagcctggcgctgggcctggagctcagcgagcgcagcgtccgcgtgtaccacgagtgcttcggcaagtgtaaggggctgctggtgcccgagctctacagcagcccgagcgccgcctgcatccagtgcctggactgccgcctcatgtacccgccgcacaagttcgtggtgcactcgcacaaggccctggagaaccggacctgccactggggcttcgactcggccaactggcgggcctacatcctgctgagccaggattacacgggcaaggaggagcaggcgcgcctcggccgctgcctggacgacgtgaaggagaaattcgactatggcaacaagtacaagcggcgggtgccccgggtctcctctgagcctccggcctccataagacccaaaacagatgacacctcttcccagtcccccgcgccttccgaaaaggacaagccgtccagctggctgcggaccttggccggctcttccaataagagcctgggctgtgttcaccctcgccagcgcctctctgctttccgaccctggtcccccgcagtgtcagcgagtgagaaagagctctccccacacctcccggccctcatccgagacagcttctactcctacaagagctttgagacagccgtggcgcccaacgtggccctcgcaccgccggcccagcagaaggttgtgagcagccctccgtgtgccgccgccgtctcccgggcccccgagcctctcgccacttgcacccagcctcggaagcggaagctgactgtggacaccccaggagccccagagacgctggcgcccgtggctgccccagaggaggacaaggactcggaggcggaggtggaagttgaaagcagggaggaattcacctcctccttgtcctcgctctcttccccgtcctttacctcatccagctccgccaaggacctgggctccccgggtgcgcgtgccctgccctcggccgtccctgatgctgcggcccctgccgacgcccccagtgggctggaggcggagctggagcacctgcggcaggcactggagggcggcctggacaccaaggaagccaaagagaagttcctgcatgaggtggtcaagatgcgcgtgaagcaggaggagaagctcagcgcagccctgcaggccaagcgcagcctccaccaggagctggagttcctacgcgtggccaagaaggagaagctgcgggaggccacggaggccaagcgtaacctgcggaaggagatcgagcgtctccgcgccgagaacgagaagaagatgaaagaggccaacgagtcacggctgcgcctgaagcgggagctggagcaggcgcggcaggcccgggtgtgcgacaagggctgcgaggcgggccgcctgcgcgccaagtactcggcccagatcgaagacctgcaggtgaagctgcagcacgcggaggcggaccgggagcagctgcgggccgacctgctgcgggagcgcgaggcccgggagcacctggagaaggtggtgaaggagctgcaggaacagctgtggccgcgggcccgccccgaggctgcgggcagcgagggcgctgcggagctggagccg

SEQ ID NO: 6190 - DNA, 723 bp, Homo sapiens
  source 1..723: mol_type = genomic DNA
atgtgcagcggtgctggggtcatgatggctcggtgggcagcgaggggccgggccggctggaggagcacagtgcggattctgtcgccactgggacactgtgaaccaggagtgagtcggagctgccgcgctgcccaggccatggactgtgaggtcaacaacggttccagcctcagggatgagtgcatcacaaacctactggtgtttggcttcctccaaagctgttctgacaacagcttccgcagagagctggacgcactgggccacgagctgccagtgctggctccccagtgggagggctacgatgagctgcagactgatggcaaccgcagcagccactcccgcttgggaagaatagaggcagattctgaaagtcaagaagacatcatccggaatattgccaggcacctcgcccaggtcggggacagcatggaccgtagcatccctccgggcctggtgaacggcctggccctgcagctcaggaacaccagccggtcggaggaggaccggaacagggacctggccactgccctggagcagctgctgcaggcctaccctagagacatggagaaggagaagaccatgctggtgctggccctgctgctggccaagaaggtggccagtcacacgccgtccttgctccgtgatgtctttcacacaacagtgaattttattaaccagaacctacgcacctacgtgaggagcttagccagaaatgggatggac

SEQ ID NO: 6191 - DNA, 297 bp, Homo sapiens
  source 1..297: mol_type = genomic DNA
atggaccgtagcatccctccgggcctggtgaacggcctggccctgcagctcaggaacaccagccggtcggaggaggaccggaacagggacctggccactgccctggagcagctgctgcaggcctaccctagagacatggagaaggagaagaccatgctggtgctggccctgctgctggccaagaaggtggccagtcacacgccgtccttgctccgtgatgtctttcacacaacagtgaattttattaaccagaacctacgcacctacgtgaggagcttagccagaaatgggatggac

SEQ ID NO: 6192 - DNA, 585 bp, Homo sapiens
  source 1..585: mol_type = genomic DNA
atggactgtgaggtcaacaacggttccagcctcagggatgagtgcatcacaaacctactggtgtttggcttcctccaaagctgttctgacaacagcttccgcagagagctggacgcactgggccacgagctgccagtgctggctccccagtgggagggctacgatgagctgcagactgatggcaaccgcagcagccactcccgcttgggaagaatagaggcagattctgaaagtcaagaagacatcatccggaatattgccaggcacctcgcccaggtcggggacagcatggaccgtagcatccctccgggcctggtgaacggcctggccctgcagctcaggaacaccagccggtcggaggaggaccggaacagggacctggccactgccctggagcagctgctgcaggcctaccctagagacatggagaaggagaagaccatgctggtgctggccctgctgctggccaagaaggtggccagtcacacgccgtccttgctccgtgatgtctttcacacaacagtgaattttattaaccagaacctacgcacctacgtgaggagcttagccagaaatgggatggac

SEQ ID NO: 6193 - DNA, 1164 bp, Homo sapiens
  source 1..1164: mol_type = genomic DNA
atgatactctggcttcacagtttggagactgccagggaccatgttttgcccattgactattactttccaccccagaagacctgcctgatctgtggagatgaagcttctgggtgtcactatggagctctcacatgtggaagctgcaaggtcttcttcaaaagagccgctgaagggaaacagaagtacctgtgcgccagcagaaatgattgcactattgataaattccgaaggaaaaattgtccatcttgtcgtcttcggaaatgttatgaagcagggatgactctgggagcccggaagctgaagaaacttggtaatctgaaactacaggaggaaggagaggcttccagcaccaccagccccactgaggagacaacccagaagctgacagtgtcacacattgaaggctatgaatgtcagcccatctttctgaatgtcctggaagccattgagccaggtgtagtgtgtgctggacacgacaacaaccagcccgactcctttgcagccttgctctctagcctcaatgaactgggagagagacagcttgtacacgtggtcaagtgggccaaggccttgcctggcttccgcaacttacacgtggacgaccagatggctgtcattcagtactcctggatggggctcatggtgtttgccatgggctggcgatccttcaccaatgtcaactccaggatgctctacttcgcccctgatctggttttcaatgagtaccgcatgcacaagtcccggatgtacagccagtgtgtccgaatgaggcacctctctcaagagtttggatggctccaaatcaccccccaggaattcctgtgcatgaaagcactgctactcttcagcattattccagtggatgggctgaaaaatcaaaaattctttgatgaacttcgaatgaactacatcaaggaactcgatcgtatcattgcatgcaaaagaaaaaatcccacatcctgctcaagacgcttctaccagctcaccaagctcctggactccgtgcagcctattgcgagagagctgcatcagttcacttttgacctgctaatcaagtcacacatggtgagcgtggactttccggaaatgatggcagagatcatctctgtgcaagtgcccaagatcctttctgggaaagtcaagcccatctatttccacacccag

SEQ ID NO: 6194 - DNA, 2760 bp, Homo sapiens
  source 1..2760: mol_type = genomic DNA
atggaagtgcagttagggctgggaagggtctaccctcggccgccgtccaagacctaccgaggagctttccagaatctgttccagagcgtgcgcgaagtgatccagaacccgggccccaggcacccagaggccgcgagcgcagcacctcccggcgccagtttgctgctgctgcagcagcagcagcagcagcagcagcagcagcagcagcagcagcagcagcagcagcagcagcagcagcaagagactagccccaggcagcagcagcagcagcagggtgaggatggttctccccaagcccatcgtagaggccccacaggctacctggtcctggatgaggaacagcaaccttcacagccgcagtcggccctggagtgccaccccgagagaggttgcgtcccagagcctggagccgccgtggccgccagcaaggggctgccgcagcagctgccagcacctccggacgaggatgactcagctgccccatccacgttgtccctgctgggccccactttccccggcttaagcagctgctccgctgaccttaaagacatcctgagcgaggccagcaccatgcaactccttcagcaacagcagcaggaagcagtatccgaaggcagcagcagcgggagagcgagggaggcctcgggggctcccacttcctccaaggacaattacttagggggcacttcgaccatttctgacaacgccaaggagttgtgtaaggcagtgtcggtgtccatgggcctgggtgtggaggcgttggagcatctgagtccaggggaacagcttcggggggattgcatgtacgccccacttttgggagttccacccgctgtgcgtcccactccttgtgccccattggccgaatgcaaaggttctctgctagacgacagcgcaggcaagagcactgaagatactgctgagtattcccctttcaagggaggttacaccaaagggctagaaggcgagagcctaggctgctctggcagcgctgcagcagggagctccgggacacttgaactgccgtctaccctgtctctctacaagtccggagcactggacgaggcagctgcgtaccagagtcgcgactactacaactttccactggctctggccggaccgccgccccctccgccgcctccccatccccacgctcgcatcaagctggagaacccgctggactacggcagcgcctgggcggctgcggcggcgcagtgccgctatggggacctggcgagcctgcatggcgcgggtgcagcgggacccggttctgggtcaccctcagccgccgcttcctcatcctggcacactctcttcacagccgaagaaggccagttgtatggaccgtgtggtggtggtgggggtggtggcggcggcggcggcggcggcggcggcggcggcggcggcggcggcggcggcgaggcgggagctgtagccccctacggctacactcggccccctcaggggctggcgggccaggaaagcgacttcaccgcacctgatgtgtggtaccctggcggcatggtgagcagagtgccctatcccagtcccacttgtgtcaaaagcgaaatgggcccctggatggatagctactccggaccttacggggacatgcgtttggagactgccagggaccatgttttgcccattgactattactttccaccccagaagacctgcctgatctgtggagatgaagcttctgggtgtcactatggagctctcacatgtggaagctgcaaggtcttcttcaaaagagccgctgaagggaaacagaagtacctgtgcgccagcagaaatgattgcactattgataaattccgaaggaaaaattgtccatcttgtcgtcttcggaaatgttatgaagcagggatgactctgggagcccggaagctgaagaaacttggtaatctgaaactacaggaggaaggagaggcttccagcaccaccagccccactgaggagacaacccagaagctgacagtgtcacacattgaaggctatgaatgtcagcccatctttctgaatgtcctggaagccattgagccaggtgtagtgtgtgctggacacgacaacaaccagcccgactcctttgcagccttgctctctagcctcaatgaactgggagagagacagcttgtacacgtggtcaagtgggccaaggccttgcctggcttccgcaacttacacgtggacgaccagatggctgtcattcagtactcctggatggggctcatggtgtttgccatgggctggcgatccttcaccaatgtcaactccaggatgctctacttcgcccctgatctggttttcaatgagtaccgcatgcacaagtcccggatgtacagccagtgtgtccgaatgaggcacctctctcaagagtttggatggctccaaatcaccccccaggaattcctgtgcatgaaagcactgctactcttcagcattattccagtggatgggctgaaaaatcaaaaattctttgatgaacttcgaatgaactacatcaaggaactcgatcgtatcattgcatgcaaaagaaaaaatcccacatcctgctcaagacgcttctaccagctcaccaagctcctggactccgtgcagcctattgcgagagagctgcatcagttcacttttgacctgctaatcaagtcacacatggtgagcgtggactttccggaaatgatggcagagatcatctctgtgcaagtgcccaagatcctttctgggaaagtcaagcccatctatttccacacccag

SEQ ID NO: 6195 - DNA, 2148 bp, Homo sapiens
  source 1..2148: mol_type = genomic DNA
atggcgcctcagaagcacggcggtgggggagggggcggctcggggcccagcgcggggtccgggggaggcggcttcgggggttcggcggcggtggcggcggcgacggcttcgggcggcaaatccggcggcgggagctgtggagggggtggcagttactcggcctcctcctcctcctccgcggcggcagcggcgggggctgcggtgttaccggtgaagaagccgaaaatggagcacgtccaggctgaccacgagcttttcctccaggcctttgagaagccaacacagatctatagatttcttcgaactcggaatctcatagcaccaatatttttgcacagaactcttacttacatgtctcatcgaaactccagaacaaacatcaaaagcttgtcagctcatttgcagcttacgtttactggtttcttccacaaaaatgataagccatcaccaaactcagaaaatgaacaaaattctgttaccctggaagtcctgcttgtgaaagtttgccacaaaaaaagaaaggatgtaagttgtccaataaggcaagttcccacaggtaaaaagcaggtgcctttgaatcctgacctcaatcaaacaaaacccggaaatttcccgtcccttgcagtttccagtaatgaatttgaacctagtaacagccatatggtgaagtcttactcgttgctatttagagtgactcgtccaggaagaagagagtttaatggaatgattaatggagaaaccaatgaaaatattgatgtcaatgaagagcttccagccagaagaaaacgaaatcgtgaggatggggaaaagacatttgttgcacaaatgacagtatttgataaaaacaggcgcttacagcttttagatggggaatatgaagtagccatgcaggaaatggaagaatgtccaataagcaagaaaagagcaacatgggagactattcttgatgggaagaggctgcctccattcgaaacattttctcagggacctacgttgcagttcactcttcgttggacaggagagaccaatgataaatctacggctcctattgccaaacctcttgccactagaaattcagagagtctccatcaggaaaacaagcctggttcagttaaacctactcaaactattgctgttaaagaatcattgactacagatctacaaacaagaaaagaaaaggatactccaaatgaaaaccgacaaaaattaagaatattttatcagtttctctataacaacaatacaaggcaacaaactgaagcaagagatgacctgcattgcccttggtgtactctgaactgccgcaaactttatagtttactcaagcatcttaaactctgccatagcagatttatcttcaactatgtttatcatccaaaaggtgctaggatagatgtttctatcaatgagtgttatgatggctcctatgcaggaaatcctcaggatattcatcgccaacctggatttgcttttagtcgcaacggaccagttaagagaacacctatcacacatattcttgtgtgcaggccaaaacgaacaaaagcaagcatgtctgaatttcttgaatctgaagatggggaagtagaacagcaaagaacatatagtagtggccacaatcgtctgtatttccatagtgatacctgcttacctctccgtccacaagaaatggaagtagatagtgaagatgaaaaggatcctgaatggctaagagaaaaaaccattacacaaattgaagagttttctgatgttaatgaaggagagaaagaagtgatgaaactctggaatctccatgtcatgaagcatgggtttattgctgacaatcaaatgaatcatgcctgtatgctgtttgtagaaaattatggacagaaaataattaagaagaatttatgtcgaaacttcatgcttcatctagtcagcatgcatgactttaatcttattagcataatgtcaatagataaagctgttaccaagctccgtgaaatgcagcaaaaattagaaaagggggaatctgcttcccctgcaaacgaagaaataactgaagaacaaaatgggacagcaaatggatttagtgaaattaactcaaaagagaaagctttggaaacagatagtgtctcaggggtttcaaaacagagcaaaaaacaaaaactc

SEQ ID NO: 6196 - DNA, 3393 bp, Homo sapiens
  source 1..3393: mol_type = genomic DNA
atgtttcaaattcctgtggaaaatcttgacaacatcagaaaggtgcgaaaaaaggtgaaaggtattcttgtggatattgggcttgacagctgcaaggagttactgaaggaccttaaaggctttgatccaggagagaaatactttcataacacatcatggggtgatgtttctctctgggaaccttctggaaagaaagtgagatatcgaacaaagccatactgttgtggcctctgtaaatactctacaaaggtgcttacttcattcaagaatcatttacatcgttaccatgaagatgaaattgaccaagagctggtgatcccttgcccaaactgtgtatttgcatctcagcccaaagttgtgggaaggcacttcagaatgttccatgcacctgtccggaaagtccagaactacacagtgaatattttaggtgaaactaaatcatctaggagcgatgtgataagtttcacatgtctaaaatgtaacttttcaaacactttgtactacagcatgaagaagcatgtgctggtagcccattttcactacttaattaactcctactttggcctaagaactgaggaaatgggtgagcaaccgaaaactaacgatactgtttctatagagaagatcccaccacctgacaaatattactgtaaaaagtgcaacgccaatgccagcagccaggatgcgttaatgtatcacattttgacatcagacatacacagagatttggagaataagcttagatctgtgatttcagaacatattaagaggactggactcttgaagcaaacgcacattgctccaaaaccagcagcacatttggctgcaccagcaaatggcagtgctccaagcgctccagcgcagcctccttgcttccatcttgctttgccacagaacagtccaagcccagccgcaggacagccagtgactgtggcccagggtgcccctggaagcctcactcattccccccctgctgctggccaatcccacatgactctggtctccagccctctgcctgtgggccagaacagcctcaccctgcagcccccagcacctcagcccgtctttctttctcacggggttccacttcatcagtctgtgaatcctcctgtgttgcccttgagtcagccagtcggacctgtcaataagtctgttggaactagtgtcctccccataaatcagactgttcgccctggggttttacccctcacccagcctgtgggacccataaacagacctgttgggcctggtgttcttcctgtgagcccctctgtcacccctggggtcctgcaggctgtctcgccaggggtgctttctgtgagtcgggcggtcccgtctggagtccttcctgcaggccagatgactcctgcaggccagatgactcctgcaggggttatccctgggcaaacagcaacttctggggttcttcctactggccagatggtccagtcaggagttctccctgtgggccagacagctccgtcacgggttcttcccccaggccagacagccccattgagggttatctctgcaggccaggtggtcccgtctgggcttctttctcccaaccagacagtctcctcctcagctgttgtgcctgtaaaccagggtgtgaattctggtgttctgcagcttagtcagcctgttgtgtcgggagttcttcctgtgggccagccagtgaggcctggggtcttgcaactcaaccagactgtgggcaccaacattctgcctgtgaatcagccagtgagacctggtgcttcgcagaacaccaccttcctgacatcaggctctattctcagacagctcatccctacagggaaacaagtgaatgggattccaacctacacgctggcccccgtgtctgtcactctgccggttccccctggaggccttgcgactgtcgctccgccccagatgcccatccagctcctgccgtcaggtgcagctgcaccaatggccggttccatgcccggcatgccctctcctccagtgctggtgaatgctgctcagagcgtgtttgttcaggcctcctcctctgcagcagacacaaaccaggtgctcaaacaggccaagcagtggaagacctgccctgtctgcaacgagctctttccgtccaacgtctaccaggtccacatggaggtagcgcataagcacagcgagtccaagtctggtgagaaacttgagcctgaaaaactggcagcgtgtgcaccatttctaaagtggatgagagagaaaacggtgcgatgtctgtcttgtaagtgcttggtctctgaggaagagcttatacaccacttgctgatgcatggcttggggtgcttgttctgtccatgcaccttccatgatatcaaaggtctttcagagcacagcaggaataggcacctggggaagaagaagttgcctatggattatagcaacagaggttttcaattagatgtcgatgccaatggcaacctgctctttccccaccttgatttcatcaccatattgccaaaggagaagcttggggagcgggaagtctacttggcaatcctggctgggatacactccaagtcactggtgcctgtgtatgtgaaggtgaggcctcaggctgagggcacccccgggagcaccggcaagcgagtgtccacctgccccttttgctttggcccctttgtgacaactgaggcctatgagctgcatttgaaggagaggcaccacatcatgcccacagtccacacggtcctgaagtctcccgccttcaagtgcatccactgctgtggggtctacacgggaaatatgaccctggctgccatcgccgtccatttggtgcgctgcagaagtgctcccaaggacagcagctcagacctgcaggcccagccgggttttattcacaacagtgaactgcttttagtcagtggtgaagtgatgcatgattccagtttttctgttaagagaaagctgcctgacggccacttaggggccgaagaccagcggcatggggaggagcagcctcccatcctaaatgccgatgcagccccgggtccagaaaaggtgacgagtgttgtgccttttaaaagacaaaggaatgaaagcagaacagagggacctattgtcaaggacgaggctcttcagattttagcattagatcctaaaaaatatgaaggccgttcttatgaagaaaagaagcaatttcttaaagattatttccataagaaaccatatcctagtaaaaaggaaatagaactgttgtcctcactcttttgggtgtggaaaattgatgtggcttcattttttggaaaaagaaggtatatttgcatgaaagcaataaaaaatcacaagccttctgtacttttaggctttgatatgtctgaacttaaaaatgtgaaacatagattgaactttgaatatgaacca

SEQ ID NO: 6197 - DNA, 447 bp, Homo sapiens
  source 1..447: mol_type = genomic DNA
atgccctgctgtagtcacaggaggtgtagagaggaccccgggacatctgaaagccaggaaatggaggagtgggctttgctggatatttcccagaggaaactctacaaggaagtgatgctggaaactttcaggaacctgacctctgtaggaaaaagttggaaagaccagaacattgaatatgagtaccaaaaccccaggagaaacttcaggagtctcatagaaaagaaagtcaatgaaattaaagatgacagtcattgtggagaaacttttacccaggttccagatgacaggctgaacttccaggagaagaaagcttctcctgaaataaaatcatgtgacagctttgtgtgtggagaagttggcctaggtaactcatcttttaatatgaacatcagaggtgacattggacacaaggcctatgagtatcaggaatatggaccgaagcca

SEQ ID NO: 6198 - DNA, 990 bp, Homo sapiens
  source 1..990: mol_type = genomic DNA
atggagcacctgggtccgcaccacctccacccgggtcacgcagagcccattagcttcggcatcgaccagatcctcaacagcccggaccagggtggctgcatgggacccgcctcgcgcctccaggacggagaatacggccttggctgcttggtcggaggcgcctacacttacggcggcgggggctccgcggccgcgacgggggctggaggagcgggggcctatggtactggaggtcccggcggccccggaggcccggcaggcggcggcggcgcctgcagcatgggtcctctgaccggctcctacaacgtgaacatggccttggcaggcggccccggtcctggcggcggcggcggcagcagcggcggtgccggggcactcagcgctgcgggggtaatccgggtgccggcacacaggccgctcgccggagccgtggcccacccccagcccctggccaccggcttgcccaccgtgccctctgtgcctgccatgccgggcgtcaacaacctcactggcctcaccttcccctggatggagagtaaccgcagatacacaaaggacaggttcacaggtcacccctatcagaaccggacgccccccaagaagaagaagccgcgcacgtccttcacacgcctgcagatctgcgagctggagaagcgcttccaccgccagaagtacctggcctcggccgagcgcgccgccctggccaaggcgctcaaaatgaccgatgcgcaggtcaaaacctggttccagaaccggcggacaaagtggagacggcagactgcggaggaacgggaggccgagaggcagcaagcgaaccgcatcctcctgcagttgcagcaggaggccttccagaagagcctggcacagccgctgcccgctgaccctctgtgcgtgcacaactcgtcgctcttcgccctgcagaatctgcagccgtggtctgacgactcgaccaaaatcactagcgtcacgtcggtggcgtcggcctgcgag

SEQ ID NO: 6199 - DNA, 771 bp, Homo sapiens
  source 1..771: mol_type = genomic DNA
atggaacatctgggcccgcatcatctgcatccgggtcacgccgaaccgatcagcttcggtatcgatcagattctgaacagcccagatcaaggcggctgcatgggtccagcgagccgtctccaagatggcgaatacggtctgggttgtctggtgggtggcgcgtacacgtatggtggtggtggtagcgccgcggccaccggcgcgggcggcgcgggcgcctacggtacgggtggtccgggcggcccgggcggtccggcgggcggtggcggtgcgtgcagtatgggtccgctgaccggcagctacaatgtgaatatggcgctggccggcggcccgggcccgggcggcggtggtggtagtagcggtggtgccggtgcgctgagcgccgcgggtgttattcgcgttccagcccatcgtccactggcgggtgcggttgcccatccacaaccactggcgacgggtctgccgaccgttccgagtgttccggccatgccgggcgttaacaatctgaccggtctgacctttccgtggatggaaagcaaccgccgctacaccaaggatcgcttcaccggccatccgtatcagaatcgcaccccgccgaagaagaaaaaaccgcgcaccagcttcacccgtctgcagatctgcgaactggaaaaacgcttccaccgccagaaatatctggccagcgcggaacgcgcggcgctggcgaaagcgctgaaaatgacggatgcccaagttaaaacgtggttccagaaccgccgcaccaaatggcgc

SEQ ID NO: 6200 - DNA, 3177 bp, Homo sapiens
  source 1..3177: mol_type = genomic DNA
atgaacatgtctcaggcatcagtgtcattccaggacgtgactgtggaattcacccgggaggagtggcagcacctgggccctgtcgagaggacgctgtacagagatgtgatgctggagaactacagccacctcatctcagtgggatattgcattactaaacctaaggtgatctccaagttggagaaaggagaagagccatggtctttagaagatgaattcctgaaccagaggtacccagggtattttaaagttgatcacatcaaagggatccgggaaaaacaagaaaaacctctgtggcaagaaatattcatcagtgatgctgacaaaacattgagtaaagaaggacagaaagttttagaaaaaccatttaatctggaaatagctccagagctttcagaaaaaatatcctgtaaatgtgactcacacagaatgaatttgccagttgcttctcaattaattataagtgaaagaaaatattcaagaaagaagactgaatacatgaatgtgtgtgagaaactgcagcttgatattaagcatgagaaagctcatgctgaagagaaatcttatgaacatggtgaaaatgctaaagctttcagttataagaaagatcagcattggaaatttcaaactttggaggaatcttttgaatgtgatggatctggacaaggtttatatgataagacaatttgtattacacctcagagttttctaacaggagaaaagtcctgtaaggatgatgaatttagaaaaaactttgataaaatcactttatttaaccacatgagaactgacacaagggggaaatgctctgatcttaatgaatatgggacatcctgtgacaaaaccaccgctgttgaatacaataaagttcacatggctatgacacactatgagtgtaatgaaagggggattaatttcagtaggaagtcacccctcactcaatctcagagaactattacaggatggagtgcttttgaaagcaataaatgtgaagaaaattttagccagagctcagcccatatagtacatcagaaaacacaagctggagataaatttggtgaacataatgaatgtacagatgccctctaccagaaattagactttacagcacatcagagaattcacacagaagataaattctacctttctgatgaacatgggaaatgcagaaaatccttttaccggaaagcacacctcattcagcatcagaggccccactcaggagagaaaacttaccaatatgaggaatgtgcaaaatccttttgttcaagttcacatcctattcagcatcctggaacttatgtgggattcaaactttatgaatgtaatgaatgtgggaaagctttctgtcagaattcaaacctcagtaaacatctgagaattcacacaaaagagaaaccttgtgataacaatggctgtgggagatcttacaagtcacccctcataggacaccagaaaacagatgcagagatggaactctgtggtggcagtgaatatgggaagacatcacatctcaaaggacatcagagaattctcatgggggagaaaccctatgaatgtattgaatgtgggaaaactttctccaagacatcacatctcagagcacatcagagaattcacacaggtgaaaaaccctatgaatgtgttgaatgtgagaaaactttctctcacaagacacacctcagtgtacatcagagagttcacacaggggagaaaccctatgaatgtaatgactgtgggaaatcttttacctataactcagccctgagagcacatcaaagaattcacacaggtgagaagccctatgaatgcagtgactgtgagaaaacttttgcccataattcagccctcagagcacatcatagaattcacacgggggagaaaccttatgaatgtaatgaatgtggaaggtcttttgcccatatttctgttctcaaggcacatcaaagaattcacacaggggagaaaccctatgaatgtaatgaatgtgggagatctttcacctacaattcagccctgagagcacatcagagaattcacacaggtagaaaaccctatgaatgtagtgactgtgagaaaacttttgcccataattcagccctcaaaatacatcagagaattcacacgggggagaaaccctatgaatgtaatgaatgtgagaaaacatttgcccataattcagcccttagagcacatcagaatatccacacaggggagaaactctatgaatgtagtgaatgtggaaaaacttttttccagaagacacgcctcagtacacatcggagaattcacacaggggagaaaccctatgaatgtagcaagtgtgggaaaactttctcccagaaatcatacctcagtggacatgagagaattcacacaggggaaaaaccgtatgaatgtaacgtatgtgggaaaacttttgtctataaggcagccctcatagtgcatcaaagaattcacacaggggagaaaccctatgaatgtaaccaatgtgggaaaactttctcccaaagaacacacctctgtgcacatcagagaattcatactggggaaaaaccctatgagtgtaatgaatgtgggaaaacgtttgctgataattcagccctcagggcacatcacagaattcacacaggggagaaaccctatgaatgtaatgactgtgggaagactttctccaagacatcacatctcagagcacatcttagaactcgctcaggggagaaaccctatgaatgcagtgaatgtgggaaaaccttctctgagaagtcatatgttagtgcacatcagagagttcatacgggggagaaaccctacgaatgtaatgtatgtgggaagccatttgcccataattcaaccctcagagtacatcaaagaattcacacaggggagaaatcctatgaatgtaatgattgtgggaaaacgttctcccagaaatcacaccttagtgcacaccagagaattcacacaggggagaaaccctatgagtgtaatgaatgcggaaaagcttttgcccaaaattcaactctcagagtacaccagagaattcacacaggggagaaaccctatgaatgtgatgaatgtgggaaaacttttgtccgtaaggcagctcttagggtacatcacaccagaatgcataccagagagaaaaccctagcatgtaatggatttgggaagtcc

SEQ ID NO: 6201 - DNA, 330 bp, Homo sapiens
  source 1..330: mol_type = genomic DNA
atggaggaaataccagcccaggaagcagcagggtcaccaagggtccagtttcagtctttggagacccagtctgagtgtctgtccccagagcctcagtttgtgcaggacaccgacatggaacagggactcactgggggcatacttctccgccttcccaccacccggattcatagtgtgaattcctgcccggccctgagtcatacccaggcaagtgctttctctggagaaacacttgccgtccttacagcaggaatctccaagagatggcccaagtatcggcttcccatcgatattgctcgtccctgctcggaaactccttttccacgattg

SEQ ID NO: 6202 - DNA, 1473 bp, Homo sapiens
  source 1..1473: mol_type = genomic DNA
atggaggaaataccagcccaggaagcagcagggtcaccaagggtccagtttcagtctttggagacccagtctgagtgtctgtccccagagcctcagtttgtgcaggacaccgacatggaacagggactcactggggatggagagaccagagaagagaacaagctgttgattcctaagcagaaaatttcggaagaagtgcattcatacaaagtgagagtaggaagactcaaacacgatattacccaagttcctgagactagagaagtgtataagtctgaggacagattagaaagacttcaggaaattctaaggaaatttctgtacctggagagagagtttaggcaaataacaatcagcaaggaaaccttcaccagtgagaagaacaatgaatgtcatgaacccgaaaaaagcttcagtctggactctactattgatgcagatcagagagttcttagaatacagaataccgatgacaatgataagtatgacatgagcttcaaccagaattcagcctctggtaaacatgaacacttaaatctaacagaggattttcagagtagtgaatgtaaggaaagcttaatggatctctcccaccttaataaatgggagagcatccctaacactgagaaatcctataaatgtgatgtatgtgggaaaattttccatcagagctcagcccttactagacatcagagaatccatactagagagaagccctacaaatgtaaagaatgtgaaaagtctttcagtcagagctcaagtcttagtcgacataaaagaatacacactagagaaaaaccttacaaatgtgaagcatctgataaatcctgtgaagcgtctgataaatcctgtagtccaagctcaggcataattcagcataagaaaattcacaccagagccaaatcttacaaatgtagcagttgtgaaagagtcttcagtcgtagtgtccaccttactcaacatcagaaaattcacaaagagatgccctgtaagtgtactgtatgtggcagtgacttctgccatacttcatacctacttgaacatcagagggtccatcatgaagagaaagcctatgagtatgatgaatatgggttggcctatattaaacaacaaggaattcatttcagagaaaagccctatacgtgtagtgaatgtggaaaagacttcagattgaattcacatcttattcagcatcaaagaattcacacaggagagaaagcacatgaatgtaatgaatgtggaaaagctttcagtcaaacctcatgccttattcagcatcacaaaatgcataggaaagagaaatcgtatgaatgtaatgagtatgagggcagtttcagtcatagctcagatcttatcctgcaacaagaagtcctcaccagacagaaagcctttgattgtgatgtatgggaaaagaactccagtcagagagcacatctagttcaacatcagagcattcataccaaagagaactca

SEQ ID NO: 6203 - DNA, 309 bp, Homo sapiens
  source 1..309: mol_type = genomic DNA
atggaggaaataccagcccaggaagcagcagggtcaccaagggtccagtttcagtctttggagacccagtctgagtgtctgtccccagagcctcagtttgtgcaggacaccgacatggaacagggactcactggggctccacctgttcctcaggtgcctgctcttccccgtgagggaagcccaggagaccaggcagctgcgctcttgacagccaggtaccaggatttccaatttccaagcctgatgggatctcccagctggaacaggatctacaggtctttgatctggaaactaagactagagaagtct

SEQ ID NO: 6204 - DNA, 543 bp, Homo sapiens
  source 1..543: mol_type = genomic DNA
atggaggaaataccagcccaggaagcagcagggtcaccaagggtccagtttcagtctttggagacccagtctgagtgtctgtccccagagcctcagtttgtgcaggacaccgacatggaacagggactcactggggctccacctgttcctcaggtgcctgctcttccccgtgagggaagcccaggagaccaggcagctgcgctcttgacagccaggtaccaggagtttgtgacattcgaggatgtggctgtgcaccttactcgagaggaatggggatacctggaccctgttcagagggacctctacagagaagtgatgttagagaattatgggaacgtggtctcactgggcatacttctccgccttcccaccacccggattcatagtgtgaattcctgcccggccctgagtcatacccaggcaagtgctttctctggagaaacacttgccgtccttacagcaggaatctccaagagatggcccaagtatcggcttcccatcgatattgctcgtccctgctcggaaactccttttccacgattg

SEQ ID NO: 6205 - DNA, 1578 bp, Homo sapiens
  source 1..1578: mol_type = genomic DNA
atggaggaaataccagcccaggaagcagcagggtcaccaagggtccagtttcagtctttggagacccagtctgagtgtctgtccccagagcctcagtttgtgcaggacaccgacatggaacagggactcactgggggatttccaatttccaagcctgatgggatctcccagctggaacaggatctacaggtctttgatctggaaactaagactagagaagtcttaagagatgactgctcagatggagagaccagagaagagaacaagctgttgattcctaagcagaaaatttcggaagaagtgcattcatacaaagtgagagtaggaagactcaaacacgatattacccaagttcctgagactagagaagtgtataagtctgaggacagattagaaagacttcaggaaattctaaggaaatttctgtacctggagagagagtttaggcaaataacaatcagcaaggaaaccttcaccagtgagaagaacaatgaatgtcatgaacccgaaaaaagcttcagtctggactctactattgatgcagatcagagagttcttagaatacagaataccgatgacaatgataagtatgacatgagcttcaaccagaattcagcctctggtaaacatgaacacttaaatctaacagaggattttcagagtagtgaatgtaaggaaagcttaatggatctctcccaccttaataaatgggagagcatccctaacactgagaaatcctataaatgtgatgtatgtgggaaaattttccatcagagctcagcccttactagacatcagagaatccatactagagagaagccctacaaatgtaaagaatgtgaaaagtctttcagtcagagctcaagtcttagtcgacataaaagaatacacactagagaaaaaccttacaaatgtgaagcatctgataaatcctgtgaagcgtctgataaatcctgtagtccaagctcaggcataattcagcataagaaaattcacaccagagccaaatcttacaaatgtagcagttgtgaaagagtcttcagtcgtagtgtccaccttactcaacatcagaaaattcacaaagagatgccctgtaagtgtactgtatgtggcagtgacttctgccatacttcatacctacttgaacatcagagggtccatcatgaagagaaagcctatgagtatgatgaatatgggttggcctatattaaacaacaaggaattcatttcagagaaaagccctatacgtgtagtgaatgtggaaaagacttcagattgaattcacatcttattcagcatcaaagaattcacacaggagagaaagcacatgaatgtaatgaatgtggaaaagctttcagtcaaacctcatgccttattcagcatcacaaaatgcataggaaagagaaatcgtatgaatgtaatgagtatgagggcagtttcagtcatagctcagatcttatcctgcaacaagaagtcctcaccagacagaaagcctttgattgtgatgtatgggaaaagaactccagtcagagagcacatctagttcaacatcagagcattcataccaaagagaactca

SEQ ID NO: 6206 - DNA, 3384 bp, Homo sapiens
  source 1..3384: mol_type = genomic DNA
atggcggaggaagagagcgaccaagaggccgaacgcctcggagaagagcttgtggccattgtggagtccccgctgggccctgtggggcttagagctgcgggcgacggcagaggcggcgctggcagcggcaactgcggcggcggcgtcggaatcagcagtcgggattactgccgacgcttctgtcaggtggttgaagattatgctggaagatggcaggtccctttgccacagcttcaggttcttcagactgccctttgttgttttacaacagccagtgcatcattcccagatgaatgtgagcatgtacaatatgttttgagtagccttgctgtgagtttctttgagttgctgctgttctttggaagagatgagttttatgaagagcccttaaaggatattcttggatcattccaggaatgccagaatcacctccgcagatatggaaatgtgaatctggaactggtgactcgaatcattagagatggtggcccatgggaagatccagtgttgcaagctgtccttaaagctcagccagcatctcaggagatagtgaacaaatatttaagttctgaaaatccactgttctttgaactacgtgccagatacctaattgcttgtgaacgcatacccgaagcaatggctcttattaaatcttgtataaatcacccagaaatcagtaaagacttatacttccatcaagcactcttcacatgtctgtttatgtcacctgtagaagatcagctattccgggagcatttattgaaaactgattgtaagagtggaattgatatcatctgtaatgctgaaaaagaaggcaaaactatgttagccttgcaactctgtgaatcctttcttattccacagctccagaatggggatatgtactgtatctgggagttgattttcatatggagtaaactacagcttaaatctaatccttcaaaacaagtttttgtagatcaatgctaccagcttttaagaacagcaactaatgtgagagtcatatttcctttcatgaaaatcatcaaagatgaggttgaagaagaaggcttgcaaatttgtgttgaaatatgtggttgtgctctacaactcgaccttcatgatgatcccaaaactaaatgtctaatttataaaacaattgcacattttttgccaaatgatttggagatcctcaggatttgtgcactctcaatattttttctggagcgctccttagaagcgtatcgtactgttgaagagctttacaaacgtccagatgaagaatataatgaaggcacaagtagtgttcaaaatcgtgttcgttttgaattgcttccaattttgaaaaagggattgttttttgaccctgaattttggaacttcgtaatgattaagaaaaactgtgtagcattattgagtgataaatcagcagttagatttctaaatgaaagcacactggaaaataatgcaggtaatctaaaaaggacggaggaacagcaaggtttggatgaagggtttgactctcttacagatcagagcactggagagactgatcctgatgatgtatctggagtgcagcctaaaggtcatattaatacgaagaaaaatcttacagctctcagtacttccaaagtagatcacaatgtcccaaggcatcgttgtatgttatgtaacaaggaatttttaggtggtcacattgtaaggcatgcccaggctcatcagaaaaaaggcagttttgcatgtgtaatatgtggtaggaaatttagaaacagaggacttatgcagaagcatttgaagaatcatgttaagaagatacagaggcagcaaattgctgcagctcaacaggatgatcaggaagtcactgctttggaagaaataaattgttctagttcttccatttcatttgaaaatgggaattctgatagtaaggatttggaagtggagacacttactgcttctagtgaaggaaacaaagaagtcatccctgagcatgtggctgaattcattgaaattcccataagtgtaccagaagatgttattgaaaatgttattgaaaatggcagtcctaataattctttaaataatgttttcaagcctttaactgaatgtggggatgattatgaggaggaagaggatgaagaaggtgattatgaagaagatgattatgacctgaatcaagaaacttcagtaattcataaaatcaatggaactgtgtgccatccaaaagacatatatgccacagatcaagaaggaaactttaagtgtcctgctcttggttgtgtccggatatttaaaagaattgggtttctaaataaacatgcaatgaccgtacatccaaccgatttaaatgtgcgacaaacagtaatgaagtggagcaaaggaaaatgcaaattttgtcaaaggcaatttgaagattctcaacattttatagaccaccttaatagacatagctatccaaatgtgtatttttgtttgcattttaattgcaacgagtcgtttaagctgccgttccagcttgcccagcacacaaaaagtcacaggatatttcaggctcagtgtagttttccagaatgccatgagctttttgaagatcttcctctgctgtatgaacatgaagctcaacactatttaagtaaaacaccagagtcatctgcacaaccaagtgaaacaattctttgggatgttcagacagactcaaatcctaatcaggaaaaagactcatctagtaatgagaaacaaactattagtctgccagtttctactagcaaatcaaggaaagagtctacagaaccaaagacatgtatagaaagtatggaaaagaaaacagacagtttagttcagaatggaaacgaacgttctgatgacactgtttcaaatataagcttgatagaccaaaagatgcctgacatagagccaaattctgaaaataattgtagtagtagtgatatagtcaatggacacagtgaaatagagcaaacacctttagtttcatcagatcctgctttgaaaattgatacaaacagaatcaggacagaaaatggttccattttgcccagtgttgtaccacaagaacacaacaccttgccagtatctcaggcaccttccaaaccaaatctgacaagtgaacatacttcatatggcttaattttaacaaaaccatacgtcagaccattgcctcccagttaccttgatgaacggtatcttagtatgccaaaacgcagaaaatttctgactgatagagtagatgcctgttctgatcaagataacgtgtataaaaaatcagtgaaaagattaagatgtggcaaatgcctgaccacctactgtaatgcagaagcacttgaggctcatcttgcacaaaagaaatgtcagacactctttggatttgattcagatgatgaaagtgcc

SEQ ID NO: 6207 - DNA, 1743 bp, Homo sapiens
  source 1..1743: mol_type = genomic DNA
atgttatgtaacaaggaatttttaggtggtcacattgtaaggcatgcccaggctcatcagaaaaaaggcagttttgcatgtgtaatatgtggtaggaaatttagaaacagaggacttatgcagaagcatttgaagaatcatgttaagaagatacagaggcagcaaattgctgcagctcaacaggatgatcaggaagtcactgctttggaagaaataaattgttctagttcttccatttcatttgaaaatgggaattctgatagtaaggatttggaagtggagacacttactgcttctagtgaaggaaacaaagaagtcatccctgagcatgtggctgaattcattgaaattcccataagtgtaccagaagatgttattgaaaatgttattgaaaatggcagtcctaataattctttaaataatgttttcaagcctttaactgaatgtggggatgattatgaggaggaagaggatgaagaaggtgattatgaagaagatgattatgacctgaatcaagaaacttcagtaattcataaaatcaatggaactgtgtgccatccaaaagacatatatgccacagatcaagaaggaaactttaagtgtcctgctcttggttgtgtccggatatttaaaagaattgggtttctaaataaacatgcaatgaccgtacatccaaccgatttaaatgtgcgacaaacagtaatgaagtggagcaaaggaaaatgcaaattttgtcaaaggcaatttgaagattctcaacattttatagaccaccttaatagacatagctatccaaatgtgtatttttgtttgcattttaattgcaacgagtcgtttaagctgccgttccagcttgcccagcacacaaaaagtcacaggatatttcaggctcagtgtagttttccagaatgccatgagctttttgaagatcttcctctgctgtatgaacatgaagctcaacactatttaagtaaaacaccagagtcatctgcacaaccaagtgaaacaattctttgggatgttcagacagactcaaatcctaatcaggaaaaagactcatctagtaatgagaaacaaactattagtctgccagtttctactagcaaatcaaggaaagagtctacagaaccaaagacatgtatagaaagtatggaaaagaaaacagacagtttagttcagaatggaaacgaacgttctgatgacactgtttcaaatataagcttgatagaccaaaagatgcctgacatagagccaaattctgaaaataattgtagtagtagtgatatagtcaatggacacagtgaaatagagcaaacacctttagtttcatcagatcctgctttgaaaattgatacaaacagaatcaggacagaaaatggttccattttgcccagtgttgtaccacaagaacacaacaccttgccagtatctcaggcaccttccaaaccaaatctgacaagtgaacatacttcatatggcttaattttaacaaaaccatacgtcagaccattgcctcccagttaccttgatgaacggtatcttagtatgccaaaacgcagaaaatttctgactgatagagtagatgcctgttctgatcaagataacgtgtataaaaaatcagtgaaaagattaagatgtggcaaatgcctgaccacctactgtaatgcagaagcacttgaggctcatcttgcacaaaagaaatgtcagacactctttggatttgattcagatgatgaaagtgcc

SEQ ID NO: 6208 - DNA, 1203 bp, Homo sapiens
  source 1..1203: mol_type = genomic DNA
atggttctagcgcagagccgggtgtctgccggggtgggctccccgcattgttcgggctccggcgggggcggctctgattcctttccatggcccgcctcccaccccgggaatccccagtgctccttttccacggcttttctggcgtccccccgactctcccgcggcactttggcctaccttcccccagcgccgtggtcctccctggcgaccccctctgcgctcctggggtcctcctgcgccccccctcctccaccggcgcgctgcccacagccgcgtgccctctccccggagctggggaccaaggctgggccccgccggccgcatcggtgggaacttccgcggtccccatcccagggcgcacagggtccagctcctcggcgccgactcctggaaacaatgaaaggtattgttgcagcatctggcagtgagactgaggatgaggacagcatggacattcccttggacctttcttcatccgctggctcaggcaagagaaggagaaggggcaacctacccaaggagtctgtgcagattcttcgggattggctgtatgagcaccgttacaatgcctatccttcagagcaagaaaaagcgttgctgtcccagcaaacacacctgtctacgctacaggtctgtaactggttcatcaacgcccgccgcaggctcctccctgacatgctgagaaaggatggcaaagatccaaatcagttcacaatttcccgccgtggggccaagatttctgaaacgagctctgtggagtccgtgatgggcatcaaaaacttcatgccagctctagaggagaccccatttcattcctgtacagctgggccaaacccaaccctagggaggccactgtctcctaagccgtcatccccgggatcagttttggctcgtccatcagtgatctgccataccactgtgactgcattgaaagatgtccctttctctctctgccagtcggtcggtgtgggacaaaacacagatatacagcagatagcggccaaaaacttcacagacacctctctcatgtacccagaggacacttgtaaatctggaccaagtacgaatacacagagtggtcttttcaacactcctccccctactccaccggacctcaaccaggacttcagtggatttcagcttctagtggatgttgcactcaaacgggctgcagagatggagcttcaggcaaaacttacagct

SEQ ID NO: 6209 - DNA, 756 bp, Homo sapiens
  source 1..756: mol_type = genomic DNA
atggacattcccttggacctttcttcatccgctggctcaggcaagagaaggagaaggggcaacctacccaaggagtctgtgcagattcttcgggattggctgtatgagcaccgttacaatgcctatccttcagagcaagaaaaagcgttgctgtcccagcaaacacacctgtctacgctacaggtctgtaactggttcatcaacgcccgccgcaggctcctccctgacatgctgagaaaggatggcaaagatccaaatcagttcacaatttcccgccgtggggccaagatttctgaaacgagctctgtggagtccgtgatgggcatcaaaaacttcatgccagctctagaggagaccccatttcattcctgtacagctgggccaaacccaaccctagggaggccactgtctcctaagccgtcatccccgggatcagttttggctcgtccatcagtgatctgccataccactgtgactgcattgaaagatgtccctttctctctctgccagtcggtcggtgtgggacaaaacacagatatacagcagatagcggccaaaaacttcacagacacctctctcatgtacccagaggacacttgtaaatctggaccaagtacgaatacacagagtggtcttttcaacactcctccccctactccaccggacctcaaccaggacttcagtggatttcagcttctagtggatgttgcactcaaacgggctgcagagatggagcttcaggcaaaacttacagct

SEQ ID NO: 6210 - DNA, 858 bp, Homo sapiens
  source 1..858: mol_type = genomic DNA
atgacttgctcgggcaaaagttgtgcattggcccgatcaagcctgacttctagccaaggtattgttgcagcatctggcagtgagactgaggatgaggacagcatggacattcccttggacctttcttcatccgctggctcaggcaagagaaggagaaggggcaacctacccaaggagtctgtgcagattcttcgggattggctgtatgagcaccgttacaatgcctatccttcagagcaagaaaaagcgttgctgtcccagcaaacacacctgtctacgctacaggtctgtaactggttcatcaacgcccgccgcaggctcctccctgacatgctgagaaaggatggcaaagatccaaatcagttcacaatttcccgccgtggggccaagatttctgaaacgagctctgtggagtccgtgatgggcatcaaaaacttcatgccagctctagaggagaccccatttcattcctgtacagctgggccaaacccaaccctagggaggccactgtctcctaagccgtcatccccgggatcagttttggctcgtccatcagtgatctgccataccactgtgactgcattgaaagatgtccctttctctctctgccagtcggtcggtgtgggacaaaacacagatatacagcagatagcggccaaaaacttcacagacacctctctcatgtacccagaggacacttgtaaatctggaccaagtacgaatacacagagtggtcttttcaacactcctccccctactccaccggacctcaaccaggacttcagtggatttcagcttctagtggatgttgcactcaaacgggctgcagagatggagcttcaggcaaaacttacagct

SEQ ID NO: 6211 - DNA, 1818 bp, Homo sapiens
  source 1..1818: mol_type = genomic DNA
atgagccacacagccagttcttgtcaggagctggttgaaaactgtgctgtgcatgtagcaggaatggcacaagaagatagccgtcgtggtcaagtgccatcttccttttatcatggtgccaaccaagaacttgacctgtccaccaaagtgtacaaaagggaatcaggaagtccttattctgtgttagtggacaccaagatgagcaaaccgcatctccatgaaacagaagaacagccatatttcagggagacaagagcagtgtctgacgtgcatgctgttaaggaagaccgggagaattctgatgacacagaggaggaagaggaagaagtctcttacaaaagggagcagatcatagtggaggtaaaccttaataatcaaacattaaatgtatctaaaggggaaaagggtgtctcttctcagtccaaagagactcctgttcttaagacaagcagtgaggaggaagaggaagagagtgaggaagaggccacagatgacagcaatgactatggagagaatgaaaagcagaagaaaaaggagaagatagtagagaaagtcagcgttacacaaaggagaaccaggagagctgcctctgttgccgcagctaccacttcccctactcccagaactacaagaggtcgtaggaagagtgtagagccacctaagcgtaagaagcgggccacaaaggagcccaaagcaccagtccagaaagctaagtgtgaagagaaagagactctgacctgtgagaagtgccccagggtatttaacactcgctggtacctggagaagcacatgaacgttactcataggcgcatgcagatttgtgataaatgtggcaagaagtttgtcctggaaagtgagctgtcccttcaccagcaaacagactgtgaaaaaaacattcagtgtgtttcctgtaacaaatcgttcaagaaactctggtcccttcatgaacatatcaagatcgtccatggatatgcagaaaagaaattttcctgtgaaatttgtgagaagaaattctataccatggctcatgtgcggaaacacatggttgcacacacaaaagacatgccatttacatgcgaaacctgtggaaaatcattcaaacgcagtatgtcactcaaggtgcactccttgcagcattctggagagaagccctttagatgcgagaactgtgacgaaaggtttcagtacaagtaccagctacgctcccacatgagcattcatattgggcacaaacagttcatgtgccagtggtgtggcaaggatttcaacatgaagcagtacttcgacgaacacatgaaaacacacactggagagaaaccctttatctgtgaaatctgtggcaaaagcttcaccagccgccccaacatgaagagacaccgcagaactcacacaggcgagaagccctatccatgtgatgtgtgtggccagcggttccgcttctcgaacatgcttaaggcccacaaggagaagtgctttcgggtgaccagccccgtgaatgtgccacctgctgtccagatcccacttacaacttccccagccaccccagttccttctgtggtgaacacagccacaaccccaacccctccaatcaatatgaatcctgtaagcactcttccccctcggcccatcccccaccccttctcacacctgcacatccacccacaccctcaccacccacaccaccttcccatccctccagtccctcacctcccgccacctccagctctctttaagagtgagcctttaaatcatagaggccagagtgaggacaactttctgcggcacctggcagagaagaacagttcagcacagcatcat

SEQ ID NO: 6212 - DNA, 1278 bp, Homo sapiens
  source 1..1278: mol_type = genomic DNA
atgagccacacagccagttcttgtcaggagctggttgaaaactgtgctgtgcatgtagcaggaatggcacaagaagatagccgtcgtggtcaagtgccatcttccttttatcatggtgccaaccaagaacttgacctgtccaccaaagtgtacaaaagggaatcaggaagtccttattctgtgttagtggacaccaagatgagcaaaccgcatctccatgaaacagaagaacagccatatttcagggagacaagagcagtgtctgacgtgcatgctgttaaggaagaccgggagaattctgatgacacagaggaggaagaggaagaagtctcttacaaaagggagcagatcatagtggagtgtgtttcctgtaacaaatcgttcaagaaactctggtcccttcatgaacatatcaagatcgtccatggatatgcagaaaagaaattttcctgtgaaatttgtgagaagaaattctataccatggctcatgtgcggaaacacatggttgcacacacaaaagacatgccatttacatgcgaaacctgtggaaaatcattcaaacgcagtatgtcactcaaggtgcactccttgcagcattctggagagaagccctttagatgcgagaactgtgacgaaaggtttcagtacaagtaccagctacgctcccacatgagcattcatattgggcacaaacagttcatgtgccagtggtgtggcaaggatttcaacatgaagcagtacttcgacgaacacatgaaaacacacactggagagaaaccctttatctgtgaaatctgtggcaaaagcttcaccagccgccccaacatgaagagacaccgcagaactcacacaggcgagaagccctatccatgtgatgtgtgtggccagcggttccgcttctcgaacatgcttaaggcccacaaggagaagtgctttcgggtgaccagccccgtgaatgtgccacctgctgtccagatcccacttacaacttccccagccaccccagttccttctgtggtgaacacagccacaaccccaacccctccaatcaatatgaatcctgtaagcactcttccccctcggcccatcccccaccccttctcacacctgcacatccacccacaccctcaccacccacaccaccttcccatccctccagtccctcacctcccgccacctccagctctctttaagagtgagcctttaaatcatagaggccagagtgaggacaactttctgcggcacctggcagagaagaacagttcagcacagcatcat

SEQ ID NO: 6213 - DNA, 1608 bp, Homo sapiens
  source 1..1608: mol_type = genomic DNA
atgaagcagagttcgaacgtgccggctttcctcagcaagctgtggacgcttgtggaggaaacccacactaacgagttcatcacctggagccagaatggccaaagttttctggtcttggatgagcaacgatttgcaaaagaaattcttcccaaatatttcaagcacaataatatggcaagctttgtgaggcaactgaatatgtatggtttccgtaaagtagtacatatcgactctggaattgtaaagcaagaaagagatggtcctgtagaatttcagcatccttacttcaaacaaggacaggatgacttgttggagaacattaaaaggaaggtttcatcttcaaaaccagaagaaaataaaattcgtcaggaagatttaacaaaaattataagtagtgctcagaaggttcagataaaacaggaaactattgagtccaggctttctgaattaaaaagtgagaatgagtccctttggaaggaggtgtcagaattacgagcaaagcatgcacaacagcaacaagttattcgaaagattgtccagtttattgttacattggttcaaaataaccaacttgtgagtttaaaacgtaaaaggcctctacttctaaacactaatggagcccaaaagaagaacctgtttcagcacatagtcaaagaaccaactgataatcatcatcataaagttccacacagtaggactgaaggtttaaagccaagggagaggatttcagatgacatcattatttatgatgttactgatgataatgcagatgaagaaaatatcccagttattccagaaactaatgaggatgttatatctgatccctccaactgtagccagtaccctgatattgtcatcgttgaagatgacaatgaagatgagtatgcacctgtcattcagagtggagagcagaatgaaccagccagagaatccctaagttcaggcagtgatggcagcagccctctcatgtctagtgctgtccagctaaatggctcatccagtctgacctcagaagatccagtgaccatgatggattccattttgaatgataacatcaatcttttgggaaaggttgagctgttggattatcttgacagtattgactgcagtttagaggacttccaggccatgctatcaggaagacaatttagcatagacccagatctcctggttgatcttttcactagttctgtgcagatgaatcccacagattacatcaataatacaaaatctgagaataaaggattagaaactaccaagaacaatgtagttcagccagtttcggaagagggaagaaaatctaaatccaaaccagataagcagcttatccagtataccgcctttccacttcttgcattcctcgatgggaaccctgcttcttctgttgaacaggcgagtacaacagcatcatcagaagttttgtcctctgtagataaacccatagaagttgatgagcttctggatagcagcctagacccagaaccaacccaaagtaagcttgttcgcctggagccattgactgaagctgaagctagtgaagctacactgttttatttatgtgaacttgctcctgcacctctggatagtgatatgccacttttagatagc

SEQ ID NO: 6214 - DNA, 1554 bp, Homo sapiens
  source 1..1554: mol_type = genomic DNA
atgaagcagagttcgaacgtgccggctttcctcagcaagctgtggacgcttgtggaggaaacccacactaacgagttcatcacctggagccagaatggccaaagttttctggtcttggatgagcaacgatttgcaaaagaaattcttcccaaatatttcaagcacaataatatggcaagctttgtgaggcaactgaatatgtatggtttccgtaaagtagtacatatcgactctggaattgtaaagcaagaaagagatggtcctgtagaatttcagcatccttacttcaaacaaggacaggatgacttgttggagaacattaaaaggaaggtttcatcttcaaaaccagaagaaaataaaattcgtcaggaagatttaacaaaaattataagtagtgctcagaaggttcagataaaacaggaaactattgagtccaggctttctgaattaaaaagtgagaatgagtccctttggaaggaggtgtcagaattacgagcaaagcatgcacaacagcaacaagttattcgaaagattgtccagtttattgttacattggttcaaaataaccaacttgtgagtttaaaacgtaaaaggcctctacttctaaacactaatggagcccaaaagaagaacctgtttcagcacatagtcaaagaaccaactgataatcatcatcataaagttccacacagtaggactgaaggtttaaagccaagggagaggatttcagatgacatcattatttatgatgttactgatgataatgcagatgaagaaaatatcccagttattccagaaactaatgaggatgttatatctgatccctccaactgtagccagtaccctgatattgtcatcgttgaagatgacaatgaagatgagtatgcacctgtcattcagagtggagagcagaatgaaccagccagagaatccctaagttcaggcagtgatggcagcagccctctcatgtctagtgctgtccagctaaatggctcatccagtctgacctcagaagatccagtgaccatgatggattccattttgaatgataacatcaatcttttgggaaaggttgagctgttggattatcttgacagtattgactgcagtttagaggacttccaggccatgctatcaggaagacaatttagcatagacccagatctcctggttgattctgagaataaaggattagaaactaccaagaacaatgtagttcagccagtttcggaagagggaagaaaatctaaatccaaaccagataagcagcttatccagtataccgcctttccacttcttgcattcctcgatgggaaccctgcttcttctgttgaacaggcgagtacaacagcatcatcagaagttttgtcctctgtagataaacccatagaagttgatgagcttctggatagcagcctagacccagaaccaacccaaagtaagcttgttcgcctggagccattgactgaagctgaagctagtgaagctacactgttttatttatgtgaacttgctcctgcacctctggatagtgatatgccacttttagatagc

SEQ ID NO: 6215 - DNA, 1788 bp, Homo sapiens
  source 1..1788: mol_type = genomic DNA
atggaggcgctgctctccacccccatcaaccccaacaacttccccgccaagctgtggcgcctggtgaacagcccgcgctaccgctccatccgctgggacggccgcggcgaggggctgcttatcgatcagccgctcttcgaggccgagctgctcagcccgcccgggccggggggcggtggcgggactgcgggggccggggccgagcccgagctcttcaaaaccaccagcttcaccagcttcatccgccagctcaacctctacggcttccgcaaggtggtgctgggcgggccggggggcggcaaaccggcaggcaatgggccgctccatcacttccacaacccgcacttccgccgcgaccagccacagctgctcgtgcacctcaagcgcctcaccagcgccaacaaggccaagctggcggccggcctggaggtgccctgccgcccgcccaaccgcttccagcggctgctcatcacctcggcctccgccgccaccgcgccactgcagcaccagcagccgccgccgcccgcggggccccggcccgagccgcacggaccagtggctgtaggacaatttcaccggtcatttcgtcgagatagtttgtctccttactcctgtgtatcaactccatcccacgaccacagtacttaccctctgaaaggtttagatcggaccccagttcctcatagaatatggcagaactcccttggaatgcatcctggacaagtggagacatctcccacattttcagataaaggggttccgtttcctgtactccagaggtttccaactgaggttacctatacactgcagcccagcaccacatctgtacatgttcaacaaggtcctcaaacaatggtcagctcctcccaaaaatacagtaactacacaccctcagcacagtactcgcaagcctactatccaacagctgtgctacagtgctgttctcctacccacatggatgctctaagtagttgtgtcactcccactgcctcttcctatgcacactgcaactacttccagaatccttcaatgcagtcctcctatccagttgaatttttgccttccaattggccctgcagtactactgatgaaaatacaaagacagaagtaaacctagaggctgtctttcagatagttgatgagttgcattcctcccctaaattggagatggtaaaggtggagcctgttgagaatcagtgcccaacatctccgtcttacagaggccaacacattttagctaattctaacaacagcaatccatgttctgcaagtcaggctagccagctggagccacttactcctgtaggctcagatattatgtcttttgtggttggaacagaacaagcagttgcctgctctctaccacagtcacctgagtacatctataccatccacacagctcagcctgttgaaaatagcacaatacaggaatctgcagccatccagcaagctcatgtcaaactgaaggagcacctaaatcataatccatctccatcttcagtagtatttgtgcaggaagggccaccattcagcacacaccaggtggatgccaacataaaatgccagaccagttcacgtgagaatatcttgccgtcagaacagatgggattcctcatttcagaaatggggcctgctagcaagcctagtgaagacacaggtttagccactccagccagatacagagagcacagaagcaactcacaacaaggaaagtcccctgatcttcatctgctggtggacgtggcctgcaagcaggagcgctttccaaaggaggaagaattaaaagag

SEQ ID NO: 6216 - DNA, 1476 bp, Homo sapiens
  source 1..1476: mol_type = genomic DNA
atgcaggaagcgccagctgcgctgcccacggagccaggccccagccccgtgcctgccttcctcggcaagctatgggcgctggtgggggacccaggcacagaccacctgatccgctggagcccgagcgggaccagtttcctcgtaagcgaccagagccgtttcgccaaggaagtgctgccccagtatttcaagcatagcaacatggcgagcttcgtgcgccaactcaacatgtacggttttcggaaggtggtgagcatcgagcagggcggcctgcttaggccggagcgcgaccacgtcgagttccagcacccgagcttcgtgcgcggccgcgagcagctactggagcgcgtgcggcgcaaggtgcccgcgctgcgcggcgacgacggccgctggcgcccggaggacctgggtcgactactgggcgaggtgcaggctttgcggggagtgcaggagagcaccgaggcgcggctgcgggagctcaggcagcagaacgagatcttgtggcgggaggtggtgacacttcggcagagccacggtcagcagcaccgggtcattggcaagctgatccagtgtctctttgggccacttcaggcggggccgagcaatgcaggaggcaagagaaagctgtccctgatgctggatgaggggagctcatgcccaacacctgccaagttcaacacctgccctctacctggtgcccttctgcaggacccctacttcatccagtcgcctctcccagagacaaatttgggccttagccctcacagggccaggggccccatcatctctgacatcccagaagactctccatcccctgaggggaccaggctttctccctccagtgatggcaggagggagaagggcctggcactgctcaaagaagagccggccagtccagggggggatggcgaggccgggctggccctggccccaaacgagtgtgacttctgcgtgacagcccccccgccactgcctgtggctgtggtgcaggccatcctggaagggaaagggagcttcagccccgaggggcccaggaatgcccaacagcctgaaccaggggatcccagggagatacctgacagggggcctctgggcctggaaagcggggacaggagcccagagagtctgctgcctccgatgctgcttcagccccctcaagaaagtgtggaacctgcagggcctctagatgtgctgggccccagtctccaagggcgagaatggaccctgatggacttggacatggagctgtccttgatgcagcccttggttccagagcggggtgagcctgagctggcggtcaaggggttaaattctccaagcccagggaaggaccccacgctcggggccccactcctgctggatgtccaggcggccttgggaggcccagccctgggcctgcctggggctttaaccatttatagcactcctgagagccggactgcctcctacttgggcccggaagccagtccctccccc

SEQ ID NO: 6217 - DNA, 1386 bp, Homo sapiens
  source 1..1386: mol_type = genomic DNA
atgcaggaagcgccagctgcgctgcccacggagccaggccccagccccgtgcctgccttcctcggcaagctatgggcgctggtgggggacccaggcacagaccacctgatccgctggagcccgagcgggaccagtttcctcgtaagcgaccagagccgtttcgccaaggaagtgctgccccagtatttcaagcatagcaacatggcgagcttcgtgcgccaactcaacatgtacggttttcggaaggtggtgagcatcgagcagggcggcctgcttaggccggagcgcgaccacgtcgagttccagcacccgagcttcgtgcgcggccgcgagcagctactggagcgcgtgcggcgcaaggtgcccgcgctgcgcggcgacgacggccgctggcgcccggaggacctgggtcgactactgggcgaggtgcaggctttgcggggagtgcaggagagcaccgaggcgcggctgcgggagctcaggcagcagaacgagatcttgtggcgggaggtggtgacacttcggcagagccacggtcagcagcaccgggtcattggcaagctgatccagtgtctctttgggccacttcaggcggggccgagcaatgcaggaggcaagagaaagctgtccctgatgctggatgaggggagctcatgcccaacacctgccaagttcaacacctgccctctacctggtgcccttctgcaggacccctacttcatccagtcgccttctacttacagcctctcccagagacaaatttgggccttagccctcacagggccaggggccccatcatctctgacatcccagaagactctccatcccctgaggggaccaggctttctccctccagtgatggcaggagcccccccgccactgcctgtggctgtggtgcaggccatcctggaagggaaagggagcttcagccccgaggggcccaggaatgcccaacagcctgaaccaggggatcccagggagatacctgacagggggcctctgggcctggaaagcggggacaggagcccagagagtctgctgcctccgatgctgcttcagccccctcaagaaagtgtggaacctgcagggcctctagatgtgctgggccccagtctccaagggcgagaatggaccctgatggacttggacatggagctgtccttgatgcagcccttggttccagagcggggtgagcctgagctggcggtcaaggggttaaattctccaagcccagggaaggaccccacgctcggggccccactcctgctggatgtccaggcggccttgggaggcccagccctgggcctgcctggggctttaaccatttatagcactcctgagagccggactgcctcctacttgggcccggaagccagtccctccccc

SEQ ID NO: 6218 - DNA, 1263 bp, Homo sapiens
  source 1..1263: mol_type = genomic DNA
atggcccggaggtatgatgagctgccgcactacccaggcatcgtggatggccccgcagccctggctagcttcccagagacagtgcccgcagtaccagggccctatggcccgcaccggcctccccagcccctgcccccaggcttggacagcgacggcctgaagagggagaaggatgagatctatggacacccgctcttccccctcttggccctggtctttgagaaatgtgaactggctacatgctctccccgtgacggggccggagctgggctggggacaccccctggaggtgacgtctgctcctctgattccttcaacgaggacatcgctgcctttgccaagcaggttcgctctgagaggcccctcttctcctccaacccagaactggacaatctgatgatccaggccatccaggtgctgcggttccacctgctggagctggagaaggtccacgacctgtgcgacaacttctgtcaccgctacatcacctgcctcaagggaaagatgcccatcgacctggtcatcgaggatcgggacggcggctgcagggaggacttcgaggactacccagcctcctgccccagcctcccagaccagaataatatgtggattcgagaccatgaggatagtgggtctgtacatttggggaccccaggtccatccagtgggggcctggcctcccagagtggggacaactccagtgaccaaggagacgggctggacaccagcgtggcctctcccagttctggtggagaagatgaggacttggaccaggagcgacggcgaaacaagaagagggggatcttccccaaggtggccaccaacatcatgcgagcctggttgttccagcacctctcgagacgctcagaagcgccggttctcccagacgtctgcctgggcctgggctccccatcccccggaccccggtgggccagaccttggggttcagactgcggccggccaggcaggcagagtgactcttgctggtggctgcagcacccgtacccctcggaggagcagaagaaacagctggcgcaggacacggggctcaccatcctgcaagtcaacaactggttcattaacgcccggagacgcatcgtgcaacctatgatcgatcaatccaaccgcacagggcagggtgcagccttcagcccagagggccagcccatcgggggctataccgagacgcagccacacgtggccgtccggcctccgggatcagtggggatgagtttgaacttggaaggagaatggcattatcta

SEQ ID NO: 6219 - DNA, 1389 bp, Homo sapiens
  source 1..1389: mol_type = genomic DNA
atgtgtactttgtgtacaacaatgcgcggttcctacaggaggtgtccatggatctccctctctgtctgtctctctctctgtctctgtcactgtcttctcacgccactttctccatctcttttccctcccagccagaccctgccgtctctccctctgggtcctcctgcccacatgtcaggaatctctgcctggacggggtcctcactccccaccgaggcagctccaggggacctggagggcttcaagcttgggggctcagacacctggggaccacagtatgatgagctgccgcactacccaggcatcgtggatggccccgcagccctggctagcttcccagagacagtgcccgcagtaccagggccctatggcccgcaccggcctccccagcccctgcccccaggcttggacagcgacggcctgaagagggagaaggatgagatctatggacacccgctcttccccctcttggccctggtctttgagaaatgtgaactggctacatgctctccccgtgacggggccggagctgggctggggacaccccctggaggtgacgtctgctcctctgattccttcaacgaggacatcgctgcctttgccaagcaggttcgctctgagaggcccctcttctcctccaacccagaactggacaatctgatgatccaggccatccaggtgctgcggttccacctgctggagctggagaaggtccacgacctgtgcgacaacttctgtcaccgctacatcacctgcctcaagggaaagatgcccatcgacctggtcatcgaggatcgggacggcggctgcagggaggacttcgaggactacccagcctcctgccccagcctcccagaccagaataatatgtggattcgagaccatgaggatagtgggtctgtacatttggggaccccaggtccatccagtgggggcctggcctcccagagtggggacaactccagtgaccaaggagacgggctggacaccagcgtggcctctcccagttctggtggagaagatgaggacttggaccaggagcgacggcgaaacaagaagagggggatcttccccaaggtggccaccaacatcatgcgagcctggttgttccagcacctctcgcacccgtacccctcggaggagcagaagaaacagctggcgcaggacacggggctcaccatcctgcaagtcaacaactggttcattaacgcccggagacgcatcgtgcaacctatgatcgatcaatccaaccgcacagggcagggtgcagccttcagcccagagggccagcccatcgggggctataccgagacgcagccacacgtggccgtccggcctccgggatcagtggggatgagtttgaacttggaaggagaatggcattatcta

SEQ ID NO: 6220 - DNA, 1074 bp, Homo sapiens
  source 1..1074: mol_type = genomic DNA
atggcccggaggtatgatgagctgccgcactacccaggcatcgtggatggccccgcagccctggctagcttcccagagacagtgcccgcagtaccagggccctatggcccgcaccggcctccccagcccctgcccccaggcttggacagcgacggcctgaagagggagaaggatgagatctatggacacccgctcttccccctcttggccctggtctttgagaaatgtgaactggctacatgctctccccgtgacggggccggagctgggctggggacaccccctggaggtgacgtctgctcctctgattccttcaacgaggacatcgctgcctttgccaagcaggttcgctctgagaggcccctcttctcctccaacccagaactggacaatctgatgatccaggccatccaggtgctgcggttccacctgctggagctggagaagggaaagatgcccatcgacctggtcatcgaggatcgggacggcggctgcagggaggacttcgaggactacccagcctcctgccccagcctcccagaccagaataatatgtggattcgagaccatgaggatagtgggtctgtacatttggggaccccaggtccatccagtgggggcctggcctcccagagtggggacaactccagtgaccaaggagacgggctggacaccagcgtggcctctcccagttctggtggagaagatgaggacttggaccaggagcgacggcgaaacaagaagagggggatcttccccaaggtggccaccaacatcatgcgagcctggttgttccagcacctctcgcacccgtacccctcggaggagcagaagaaacagctggcgcaggacacggggctcaccatcctgcaagtcaacaactggttcattaacgcccggagacgcatcgtgcaacctatgatcgatcaatccaaccgcacagggcagggtgcagccttcagcccagagggccagcccatcgggggctataccgagacgcagccacacgtggccgtccggcctccgggatcagtggggatgagtttgaacttggaaggagaatggcattatcta

SEQ ID NO: 6221 - DNA, 1125 bp, Homo sapiens
  source 1..1125: mol_type = genomic DNA
atggcccggaggtatgatgagctgccgcactacccaggcatcgtggatggccccgcagccctggctagcttcccagagacagtgcccgcagtaccagggccctatggcccgcaccggcctccccagcccctgcccccaggcttggacagcgacggcctgaagagggagaaggatgagatctatggacacccgctcttccccctcttggccctggtctttgagaaatgtgaactggctacatgctctccccgtgacggggccggagctgggctggggacaccccctggaggtgacgtctgctcctctgattccttcaacgaggacatcgctgcctttgccaagcaggttcgctctgagaggcccctcttctcctccaacccagaactggacaatctgatgatccaggccatccaggtgctgcggttccacctgctggagctggagaaggtccacgacctgtgcgacaacttctgtcaccgctacatcacctgcctcaagggaaagatgcccatcgacctggtcatcgaggatcgggacggcggctgcagggaggacttcgaggactacccagcctcctgccccagcctcccagaccagaataatatgtggattcgagaccatgaggatagtgggtctgtacatttggggaccccaggtccatccagtgggggcctggcctcccagagtggggacaactccagtgaccaaggagacgggctggacaccagcgtggcctctcccagttctggtggagaagatgaggacttggaccaggagcgacggcgaaacaagaagagggggatcttccccaaggtggccaccaacatcatgcgagcctggttgttccagcacctctcgcacccgtacccctcggaggagcagaagaaacagctggcgcaggacacggggctcaccatcctgcaagtcaacaactggttcattaacgcccggagacgcatcgtgcaacctatgatcgatcaatccaaccgcacagggcagggtgcagccttcagcccagagggccagcccatcgggggctataccgagacgcagccacacgtggccgtccggcctccgggatcagtggggatgagtttgaacttggaaggagaatggcattatcta

SEQ ID NO: 6222 - DNA, 1842 bp, Homo sapiens
  source 1..1842: mol_type = genomic DNA
atgacgaccctggactccaacaacaacacaggtggcgtcatcacctacattggctccagtggctcctccccaagccgcaccagccctgaatccctctatagtgacaactccaatggcagcttccagtccctgacccaaggctgtcccacctacttcccaccatcccccactggctccctcacccaagacccggctcgctcctttgggagcattccacccagcctgagtgatgacggctccccttcttcctcatcttcctcgtcgtcatcctcctcctccttctataatgggagcccccctgggagtctacaagtggccatggaggacagcagccgagtgtcccccagcaagagcaccagcaacatcaccaagctgaatggcatggtgttactgtgtaaagtgtgtggggacgttgcctcgggcttccactacggtgtgcacgcctgcgagggctgcaagggctttttccgtcggagcatccagcagaacatccagtacaaaaggtgtctgaagaatgagaattgctccatcgtccgcatcaatcgcaaccgctgccagcaatgtcgcttcaagaagtgtctctctgtgggcatgtctcgagacgctgtgcgttttgggcgcatccccaaacgagagaagcagcggatgcttgctgagatgcagagtgccatgaacctggccaacaaccagttgagcagccagtgcccgctggagacttcacccacccagcaccccaccccaggccccatgggcccctcgccaccccctgctccggtcccctcacccctggtgggcttctcccagtttccacaacagctgacgcctcccagatccccaagccctgagcccacagtggaggatgtgatatcccaggtggcccgggcccatcgagagatcttcacctacgcccatgacaagctgggcagctcacctggcaacttcaatgccaaccatgcatcaggtagccctccagccaccaccccacatcgctgggaaaatcagggctgcccacctgcccccaatgacaacaacaccttggctgcccagcgtcataacgaggccctaaatggtctgcgccaggctccctcctcctaccctcccacctggcctcctggccctgcacaccacagctgccaccagtccaacagcaacgggcaccgtctatgccccacccacgtgtatgcagccccagaaggcaaggcacctgccaacagtccccggcagggcaactcaaagaatgttctgctggcatgtcctatgaacatgtacccgcatggacgcagtgggcgaacggtgcaggagatctgggaggatttctccatgagcttcacgcccgctgtgcgggaggtggtagagtttgccaaacacatcccgggcttccgtgacctttctcagcatgaccaagtcaccctgcttaaggctggcacctttgaggtgctgatggtgcgctttgcttcgttgttcaacgtgaaggaccagacagtgatgttcctaagccgcaccacctacagcctgcaggagcttggtgccatgggcatgggagacctgctcagtgccatgttcgacttcagcgagaagctcaactccctggcgcttaccgaggaggagctgggcctcttcaccgcggtggtgcttgtctctgcagaccgctcgggcatggagaattccgcttcggtggagcagctccaggagacgctgctgcgggctcttcgggctctggtgctgaagaaccggcccttggagacttcccgcttcaccaagctgctgctcaagctgccggacctgcggaccctgaacaacatgcattccgagaagctgctgtccttccgggtggacgcccag

SEQ ID NO: 6223 - DNA, 720 bp, Homo sapiens
  source 1..720: mol_type = genomic DNA
atggctaccgctgaatctcgcgctctgcaattcgctgaaggtgctgctttcccggcttatcgtgctccgcatgctggtggtgctctgctcccaccgccatctccggctgctgctctcctgccggctccaccggctggtccgggtccggctactttcgctggttttctgggtcgtgatccgggtccagctccaccaccgccggcttctctcggttctccggctccgccgaagggtgctgctgctccatctgcttctcaacgtcgtaaacgtacctccttttctgctgagcaactccaactcctcgaactggtttttcgtcgtactcgttatccggatattcatctgcgtgaacgtctcgctgctctgactctcctgccggaatctcgtattcaactgctgttctccccgctgtttcaagtttggtttcaaaatcgtcgcgctaaatcccgtcgccaatctggtaagtcttttcagccgctggcacgtccagaaatcattctgaatcattgcgcaccgggtaccgagaccaagtgcctcaaaccgcaactcccgctggaagttgacgttaattgtctcccggagccgaatggtgtaggtggtggtatttccgattcctcttctcagggccaaaacttcgagacttgctctccgctgtccgaggatatcggctctaaactcgattcttgggaagagcatattttctccgctttcggcaatttc

SEQ ID NO: 6224 - DNA, 696 bp, Homo sapiens
  source 1..696: mol_type = genomic DNA
atggctaccgctgaatctcgcgctctgcaattcgctgaaggtgctgctttcccggcttatcgtgctccgcatgctggtggtgctctgctcccaccgccatctccggctgctgctctcctgccggctccaccggctggtccgggtccggctactttcgctggttttctgggtcgtgatccgggtccagctccaccaccgccggcttctctcggttctccggctccgccgaagggtgctgctgctccatctgcttctcaacgtcgtaaacgtacctccttttctgctgagcaactccaactcctcgaactggtttttcgtcgtactcgttatccggatattcatctgcgtgaacgtctcgctgctctgactctcctgccggaatctcgtattcaagtttggtttcaaaatcgtcgcgctaaatcccgtcgccaatctggtaagtcttttcagccgctggcacgtccagaaatcattctgaatcattgcgcaccgggtaccgagaccaagtgcctcaaaccgcaactcccgctggaagttgacgttaattgtctcccggagccgaatggtgtaggtggtggtatttccgattcctcttctcagggccaaaacttcgagacttgctctccgctgtccgaggatatcggctctaaactcgattcttgggaagagcatattttctccgctttcggcaatttc

SEQ ID NO: 6225 - DNA, 1152 bp, Homo sapiens
  source 1..1152: mol_type = genomic DNA
atggcagggatcttagcctggttctggaacgagaggttttggctcccgcacaatgtcacctgggcggacctgaagaacacggaggaggccaccttcccgcaggctgaggacctctatctcgcttttcccctggccttctgtatcttcatggtgcggctcatcttcgagagatttgtagccaaaccgtgcgccatagccctcaacattcaggccaatggaccacaaattgctccgcccaatgccattctggaaaaggtcttcactgcaattacaaagcatcctgatgaaaagagattggaaggcctctccaagcaactggactgggatgttcgaagcattcagcgctggtttcgacaaagacgcaatcaggagaagccaagcacgctgacgaggttctgtgagagcatgtggagattttcattttacctttatgtatttacctacggagtcagattcctgaaaaagaccccctggttgtggaatacgaggcattgctggtacaactacccctatcagccactcacaactgaccttcactactattacatcctggagctgtcgttttattggtctttgatgttttctcagttcactgatatcaaaagaaaggactttggcattatgttcctgcaccaccttgtatctattttcttgattaccttttcatatgtcaacaatatggcccgagtaggaacgctggtcctttgtcttcatgattcagctgatgctcttctggaggctgccaaaatggcaaattatgccaagtttcagaaaatgtgtgatctcctgtttgttatgtttgccgtggtttttatcaccacacgactgggtatatttcctctctgggtgttaaataccacattatttgaaagctgggagatcgttggaccttacccttcctggtgggtttttaacctactgctattgctagtacaagggttgaactgcttctggtcttacttgattgtgaaaatagcttgcaaagctgtttcaagaggcaaggtgtccaaggatgatcgaagtgatattgagtctagctcagatgaggaggactcagaacctccgggaaagaatccccacactgcgacaaccaccaatgggaccagtggtaccaacgggtatctcctgactggctcctgctccatggatgat

SEQ ID NO: 6226 - DNA, 1182 bp, Homo sapiens
  source 1..1182: mol_type = genomic DNA
atgctgtccagtttcaacgagtggttttggcaggacaggttctggttaccacccaatgtcacgtggacagagctagaagaccgggatggccgtgtctacccccacccccaggacttgttggcagccctgcccctggcgctggtcctcctggccatgcgccttgcctttgagagattcattggcctgcccctgagccggtggctgggtgtgagggatcagaccaggaggcaagtgaagcccaacgccacgctggagaaacacttcctcacggaagggcacaggcccaaggagccccagctgtctctcctggccgcccagtgtggcctcacgctgcagcagacccagcgatggttccggagacgccggaaccaggatcgaccccagctgaccaagaagttctgtgaggccagctggaggtttctcttctacctgtcctccttcgtgggcggcctctcggtcctgtaccacgagtcatggctgtgggcaccagtaatgtgctgggacaggtacccaaaccagactctgaagccatccctgtactggtggtacctcttggagctgggtttctacctctcactgctaatcaggctgccctttgatgtcaagcgcaaggatttcaaggagcaggtgatacaccacttcgtggcggtcatcctgatgaccttctcctacagtgccaacctgctgcgcattggctctctggtgctgctgttacacgattcctctgactacctgctggaggcctgtaagatggtcaactacatgcagtatcagcaagtgtgcgacgctctcttcctcatcttctcctttgtcttcttctacacccgactggtcctctttcccacccagatcctctacaccacatactacgagtccatcagcaacaggggccccttcttcggctactacttcttcaacgggcttctgatgttgctgcagctgctgcacgtgttctggtcttgcctcattctgcgcatgctctatagcttcatgaagaagggccagatggagaaggacattcgtagtgatgtagaagaatcagactccagtgaggaggcggcggcggcccaggaacctctgcagctaaagaacggggcagctggagggcccaggccagcccccactgatggccctcggagccgggtggccgggcgtctgaccaacaggcacacaacagccaca

SEQ ID NO: 6227 - DNA, 1176 bp, Homo sapiens
  source 1..1176: mol_type = genomic DNA
atggcgacagcagcgcagggacccctaagcttgctgtggggctggctgtggagcgagcgcttctggctacccgagaacgtgagctgggctgatctggaggggccggccgacggctacggttacccccgcggccggcacatcctctcggtgttcccgctggcggcgggcatcttcttcgtgaggctgctcttcgagcgatttattgccaaaccctgtgcactctgtattggcatcgaggacagtggtccttatcaggcccaacccaatgccatccttgaaaaggtgttcatatctattaccaagtatcctgataagaaaaggctggagggcctgtcaaagcagctggattggaatgtccgaaaaatccaatgctggtttcgccatcggaggaatcaggacaagcccccaacgcttactaaattctgtgaaagcatgtggagattcacattttatttatgtatattctgctatggaattagatttctctggtcgtcaccttggttctgggacatccgacagtgctggcataactatccatttcagcctctttcaagtgggctttatcactattatatcatggaattggccttctattggtcccttatgttttctcagtttacagacattaaaagaaaggacttcctgatcatgtttgtgcatcacttggtcaccattgggcttatctccttctcctacatcaacaatatggttcgagtgggaactctgatcatgtgtctacatgatgtctcagacttcttgctggaggcagccaaactggccaattatgccaagtatcagcggctctgtgacaccctttttgtgatcttcagtgctgtttttatggttacacgactaggaatctatccattctggattctgaacacgaccctctttgagagttgggagataatcgggccttatgcttcatggtggctcctcaatggcctgctgctgaccctacagcttctgcatgtcatctggtcctacctaattgcacggattgctttgaaagccttgatcaggggaaaggtatcgaaggatgatcgcagtgatgtggagagcagctcagaggaagaagatgtgaccacctgcacaaaaagtccctgtgacagtagctccagcaatggtgccaatcgggtgaatggtcacatgggaggcagctactgggctgaagag

SEQ ID NO: 6228 - DNA, 1002 bp, Homo sapiens
  source 1..1002: mol_type = genomic DNA
atgatgaaaccaagacccaagagatttattgccaaaccctgtgcactctgtattggcatcgaggacagtggtccttatcaggcccaacccaatgccatccttgaaaaggtgttcatatctattaccaagtatcctgataagaaaaggctggagggcctgtcaaagcagctggattggaatgtccgaaaaatccaatgctggtttcgccatcggaggaatcaggacaagcccccaacgcttactaaattctgtgaaagcatgtggagattcacattttatttatgtatattctgctatggaattagatttctctggtcgtcaccttggttctgggacatccgacagtgctggcataactatccatttcagcctctttcaagtgggctttatcactattatatcatggaattggccttctattggtcccttatgttttctcagtttacagacattaaaagaaaggacttcctgatcatgtttgtgcatcacttggtcaccattgggcttatctccttctcctacatcaacaatatggttcgagtgggaactctgatcatgtgtctacatgatgtctcagacttcttgctggaggcagccaaactggccaattatgccaagtatcagcggctctgtgacaccctttttgtgatcttcagtgctgtttttatggttacacgactaggaatctatccattctggattctgaacacgaccctctttgagagttgggagataatcgggccttatgcttcatggtggctcctcaatggcctgctgctgaccctacagcttctgcatgtcatctggtcctacctaattgcacggattgctttgaaagccttgatcaggggaaaggtatcgaaggatgatcgcagtgatgtggagagcagctcagaggaagaagatgtgaccacctgcacaaaaagtccctgtgacagtagctccagcaatggtgccaatcgggtgaatggtcacatgggaggcagctactgggctgaagag

SEQ ID NO: 6229 - DNA, 1815 bp, Homo sapiens
  source 1..1815: mol_type = genomic DNA
atggctgctgggcagcgggaagcgaggccccaggtgtcactgacgtttgaggatgtggctgtgctgtttacccgagatgagtggagaaagctggccccttctcagagaaacttgtaccgggatgtgatgctggagaactataggaacctggtctcactggggctcccatttaccaaaccaaaagtgatctccctgttgcagcaaggagaagatccctgggaggtggagaaagacggttctggcgtctcctctctaggatcgaagagcagtcataaaaccacaaagtcaacgcaaacacaagactcttcatttcagggactgatactgaaaagatccaacaggaatgtaccttgggatttgaaattagaaaagccttacatatatgaaggcagattagagaaaaagcaggataaaaagggaagttttcagatagtttcagccacccacaaaaaaatccccactatagaaagaagccataaaaatactgaattgagccaaaacttcagcccaaagtcagtgcttattaggcaacagatacttcccagagaaaaaacaccaccaaaatgtgaaatacaaggaaacagcctcaaacagaattcacaattacttaatcaaccaaaaattacagcagataaacgctataaatgtagtctgtgtgaaaaaaccttcattaacacttcatcccttcgtaaacatgagaaaaaccatagtggagagaaactatttaagtgtaaagaatgttcaaaagcctttagccaaagttcagctcttattcaacatcaaataacgcatactggagagaaaccctacatatgtaaagaatgtgggaaagcctttactctcagtacatccctttataaacatctaagaacccatactgtggagaaatcctacagatgtaaagaatgtggtaaatccttcagccgaaggtcaggcctttttatacatcaaaaaattcatgctgaagaaaacccttgtaagtataatccgggtaggaaggcatctagttgcagcacatccctttctggatgtcaaagaattcattctagaaagaagtcctacttatgtaatgaatgtggcaacacctttaagtctagctcatcccttcgttatcatcagagaattcacactggagagaagccttttaaatgtagtgaatgtgggagagccttcagccagagtgcctctcttattcaacatgaaagaattcacaccggagaaaagccctatagatgcaatgaatgtgggaaaggctttacttctatttcacgacttaatagacaccgaatcattcatactggagagaagttttataattgtaatgaatgtggtaaagccttaagctcccactcaacacttattattcacgagcgaattcatactggagaaaaaccatgtaaatgtaaagtatgtggaaaagccttcagacagagttcagctctcattcaacatcagagaatgcatactggagaaagaccctataaatgtaacgagtgtgggaaaacattcaggtgtaactcatcacttagtaatcaccagagaattcatactggagagaaaccatatcgatgtgaggaatgtgggatatcttttggccaaagttcagctcttattcagcatcgaaggattcatacaggagaaaaaccctttaaatgtaatacatgtggaaaaacttttagacaaagctcatcacgtattgcacatcagagaattcatactggagagaaaccctatgaatgtaatacatgtgggaaacttttcaaccataggtcatcccttactaatcattataaaattcatatcgaagaggacccc

SEQ ID NO: 6230 - DNA, 1149 bp, Homo sapiens
  source 1..1149: mol_type = genomic DNA
atgttttggacgtttaaagaatggttctggttggaaagattctggcttcctccaacaataaagtggtcagatcttgaggatcacgatggactcgtctttgtaaaaccttctcatttatacgtgacaattccatatgcttttctcttgctgattatcagacgtgtatttgaaaaatttgttgcttcacctctagcaaaatcatttggcattaaagagacagttcgaaaggttacaccaaatactgtcttagagaattttttcaaacattccacaaggcaaccattgcaaactgatatttatggactggcaaagaagtgtaacttgacggagcgccaggtggaaagatggtttaggagtcggcggaatcaagagaggccttccaggctgaagaaattccaggaagcttgctggagatttgcattttacttaatgatcactgttgctggaattgcgtttctttatgataaaccttggctatatgacttatgggaggtttggaatggctatcccaaacagccactgctgccatcccagtactggtactacattttagaaatgagtttttattggtctctgttatttagacttggctttgatgtcaagagaaaggattttctagctcatatcatccaccacctggctgctattagtctgatgagcttctcttggtgtgctaattatattcgcagtgggaccctcgtgatgattgtacacgatgtggctgacatttggctggagtctgctaagatgttttcttatgctggatggacgcagacctgtaacaccctgtttttcatcttctccaccatatttttcatcagccgcctcattgtttttcctttctggattttatattgcacgctgatcttgcctatgtatcacctcgagcctttcttttcatacatcttcctcaacctacagctcatgatcttgcaggtccttcacctttactggggttattacatcttgaagatgctcaacagatgtatattcatgaagagcatccaggatgtgaggagtgatgacgaggattatgaagaggaagaggaagaggaagaagaagaggctaccaaaggcaaagagatggattgtttaaagaacggcctcagggctgagaggcacctcattcccaatggccagcatggccat

SEQ ID NO: 6231 - DNA, 1662 bp, Homo sapiens
  source 1..1662: mol_type = genomic DNA
atggctgtggatctgctgtctgctcaggagcctgtgacattcagggatgtggccgtgttcttcagccaggacgagtggttgcacctggactctgcccagagggccttgtaccgggaggtgatgctggagaactacagcagcctggtctcactggggattccattttcaatgccaaagttgattcatcagttgcagcaaggagaagatccctgcatggtggaaagagaagtcccttcagatacccgtctaggtttcaagacttggcttgaaacagaagcattgcctcatagacaggacatttttatagaagaaacatctcagggaatggtaaagaaagaatccattaaggatggtcactgggacattaactttgaagaagctgtggaatttgagagcgagatagaagaagagcaagagaagaaacctcttagacaaatgatagattcgcatgagaaaaccatcagtgaagatggaaaccatacaagtcttgaattggggaaaagcttatttacaaatacagctcttgtcacacaacagagtgttcctatagaaaggatacccaatatgtattatacatttgggaaagattttaaacagaattttgatctcatgaaatgcttccagatttacccaggaggaaaacctcacatctgtaatgaatgtgggaagagcttcaagcagaatctgcatcttattgaacatcagagaattcatacaggtgagaaaccctacaaatgtaatgagtgtgaaaaaaccttcagccacagatcatcccttctttctcatcagagaattcatactggagagaaaccttacaagtgtaatgaatgtgagaaggcatttagcaacagttcaacccttatcaaacatctgagagtgcatactggagagaaaccgtatcgatgtagggaatgtggtaaagcctttagccagtgttcaaccctcactgtacatcagagaattcatactggagagaaactctataaatgcggcgaatgtgagaaggccttcaactgtagagcaaaacttcacaggcatcaaagaatccatacaggtgagaaaccctataaatgtagtgagtgtgggaagggatacagccagtttacatctctagctgaacatcagaggtttcatactggagaacaactgtatacatgcttggaatgtgggagaaccttcacacgtattgtaacccttatcgaacatcagcgaattcacactggacaaaaaccttatcagtgcaacgaatgtgagaaagccttcaaccagtattcatcctttaatgaacatcggaaaattcatactggggaaaaactttatacatgtgaggaatgtgggaaagcctttggttgcaaatctaacctttataggcatcagagaattcatactggagagaaaccgtatcagtgtaatcagtgtggaaaggccttcagccagtattcatttttaaccgaacatgagaggatccacactggagagaaactgtataaatgtatggaatgtgggaaagcctacagttacagatcaaacctttgtagacacaaaaaagttcacacgaaagagaaactctataagtggaaggaatatgggaaacctttcatctgcagctcctcacttacccagtatcagagattttttaaaggagataaagcctatgaggtt

SEQ ID NO: 6232 - DNA, 1836 bp, Homo sapiens
  source 1..1836: mol_type = genomic DNA
atggctgctgggcagcgggaagcgaggccccaggtgtcactgacattcgaggacgtggctgtgctctttacctgggatgagtggagaaagctggctccttctcagagaaacttgtaccgggatgtgatgctggagaactataggaacctggtctcactgggactctcatttaccaaaccaaaagtcatctccctgttgcagcaaggagaagatccctgggaggtggagaaagacagttctggtgtctcctctctaggatgtaagagcacacctaaaatgacaaagtcaactcaaactcaggattcatttcaggagcagataaggaaaagattgaaaagggatgaaccctggaacttcatatcagaaagatcctgcatatatgaagagaaattaaagaaacagcaggacaaaaatgaaaatttacaaataatttcagttgcccatacaaaaatccttactgtagatagaagccataaaaatgttgaatttggccaaaacttctacctgaaatcagtcttcattaagcaacagagatttgctaaagaaaaaactccatcaaaatgtgaaatacaaagaaatagtttcaagcagaattcaaatttacttaaccaatcaaaaatcaaaacagcagagaaacgctataaatgcagtacatgtgaaaaagccttcattcacaattcatcccttcgtaaacatcagaaaaaccacactggagaaaaattatttaaatgtaaagaatgtttaaaagctttcagccaaagttctgctcttattcaacatcaaagaactcatacaggagagaaaccctatatatgtaaagaatgtgggaaagccttcagccatagtgcatccctttgtaagcatttaaggacccatactgtggagaaatgctatagatgtaaagaatgtggtaaatccttcagtcgaaggtctgggctttttatacatcaaaaaatccatgctcaagaaaatccccataaatacaatccaggcaggaaggcatccagttacagcacttccctttctggaagtcagaaaattcatctcagaaagaagtcctacttatgtaatgaatgtggcaacacctttaagtctagctcatcccttcgttatcatcagagaattcacactggagagaagccttttaaatgtagtgaatgtgggagagccttcagccagagtgcctctcttattcaacatgaaagaattcacaccggagaaaagccctatagatgcaatgaatgtgggaaaggctttacttctatttcacgacttaatagacaccgaataattcatactggagagaaattgtataattgtaatgaatgtggtaaagccttaagctcccactcaacacttattattcatgagcgaattcatactggagaaaaaccatgtaaatgtaaagtatgtggaaaagccttcagacagagttccgctctcattcaacatcagagaatgcatactggagaaagaccctataagtgtaacgaatgtgacaaaacattcaggtgtaactcatcgcttagtaatcaccagagaattcatactggagagaaaccatatcgatgtttagaatgtgggatgtcttttggccaaagtgcagctcttatacaacatcagaggattcatacaggagaaaaaccctttaaatgtaatacatgtggaaaaacttttagacaaagctcatcacttattgcacatcaaagaattcatactggagagaaaccctatgaatgtaatgcatgtgggaaactctttagccagaggtcatcccttactaatcattataaaattcacattgaagaggactccttaaaagccgatttgcatgtg

SEQ ID NO: 6233 - DNA, 1236 bp, Homo sapiens
  source 1..1236: mol_type = genomic DNA
atggagcggatccccagcgcgcaaccaccccccgcctgcctgcccaaagcaccgggactggagcacggagacctaccagggatgtaccctgcccacatgtaccaagtgtacaagtcaagacggggaataaagcggagcgaggacagcaaggagacctacaaattgccgcaccggctcatcgagaaaaagagacgtgaccggattaacgagtgcatcgcccagctgaaggatctcctacccgaacatctcaaacttacaactttgggtcacttggaaaaagcagtggttcttgaacttaccttgaagcatgtgaaagcactaacaaacctaattgatcagcagcagcagaaaatcattgccctgcagagtggtttacaagctggtgagctgtcagggagaaatgtcgaaacaggtcaagagatgttctgctcaggtttccagacatgtgcccgggaggtgcttcagtatctggccaagcacgagaacactcgggacctgaagtcttcgcagcttgtcacccacctccaccgggtggtctcggagctgctgcagggtggtacctccaggaagccatcagacccagctcccaaagtgatggacttcaaggaaaaacccagctctccggccaaaggttcggaaggtcctgggaaaaactgcgtgccagtcatccagcggactttcgctcactcgagtggggagcagagcggcagcgacacggacacagacagtggctatggaggagaatcggagaagggcgacttgcgcagtgagcagccgtgcttcaaaagtgaccacggacgcaggttcacgatgggagaaaggatcggcgcaattaagcaagagtccgaagaaccccccacaaaaaagaaccggatgcagctttcggatgatgaaggccatttcactagcagtgacctgatcagctccccgttcctgggcccacacccacaccagcctcctttctgcctgcccttctacctgatcccaccttcagcgactgcctacctgcccatgctggagaagtgctggtatcccacctcagtgccagtgctatacccaggcctcaacgcctctgccgcagccctctctagcttcatgaacccagacaagatctcggctcccttgctcatgccccagagactcccttctcccttgccagctcatccgtccgtcgactcttctgtcttgctccaagctctgaagccaatcccccctttaaacttagaaaccaaagac

SEQ ID NO: 6234 - DNA, 1446 bp, Homo sapiens
  source 1..1446: mol_type = genomic DNA
atggacgaaggaattcctcatttgcaagagagacagttactggaacatagagattttataggactggactattcctctttgtatatgtgtaaacccaaaaggagcatgaaacgagacgacaccaaggatacctacaaattaccgcacagattaatagaaaagaaaagaagagaccgaattaatgaatgcattgctcagctgaaagatttactgcctgaacatctgaaattgacaactctgggacatctggagaaagctgtagtcttggaattaactttgaaacacttaaaagctttaaccgccttaaccgagcaacagcatcagaagataattgctttacagaatggggagcgatctctgaaatcgcccattcagtccgacttggatgcgttccactcgggatttcaaacatgcgccaaagaagtcttgcaatacctctcccggtttgagagctggacacccagggagccgcggtgtgtccagctgatcaaccacttgcacgccgtggccacccagttcttgcccaccccgcagctgttgactcaacaggtccctctgagcaaaggcaccggcgctccctcggccgccgggtccgcggccgccccctgcctggagcgcgcggggcagaagctggagcccctcgcctactgcgtgcccgtcatccagcggactcagcccagcgccgagctcgccgccgagaacgacacggacaccgacagcggctacggcggcgaagccgaggcccggccggaccgcgagaaaggcaaaggcgcgggggcgagccgcgtcaccatcaagcaggagcctcccggggaggactcgccggcgcccaagaggatgaagctggattcccgcggcggcggcagcggcggcggcccggggggcggcgcggcggcggcggcagccgcgcttctggggcccgaccctgccgccgcggccgcgctgctgagacccgacgccgccctgctcagctcgctggtggcgttcggcggaggcggaggcgcgcccttcccgcagcccgcggccgccgcggcccccttctgcctgcccttctgcttcctctcgccttctgcagctgccgcctacgtgcagcccttcctggacaagagcggcctggagaagtatctgtacccggcggcggctgccgccccgttcccgctgctataccccggcatccccgccccggcggcagccgcggcagccgccgccgccgctgccgccgccgccgccgcgttcccctgcctgtcctcggtgttgtcgccccctcccgagaaggcgggcgccgccgccgcgaccctcctgccgcacgaggtggcgccccttggggcgccgcacccccagcacccgcacggccgcacccacctgcccttcgccgggccccgcgagccggggaacccggagagctctgctcaggaagatccctcgcagccaggaaaggaagctccc

SEQ ID NO: 6235 - DNA, 1491 bp, Homo sapiens
  source 1..1491: mol_type = genomic DNA
atgagaacacaaattgaagtgatcccttgcaaaatctgtggggacaagtcgtctgggatccactacggggttatcacctgtgaggggtgcaagggcttcttccgccggagccagcgctgtaacgcggcctactcctgcacccgtcagcagaactgccccatcgaccgcaccagccgaaaccgatgccagcactgccgcctgcagaaatgcctggcgctgggcatgtcccgagatgctgtcaagttcggccgcatgtccaagaagcagagggacagcctgcatgcagaagtgcagaaacagctgcagcagcggcaacagcagcaacaggaaccagtggtcaagacccctccagcaggggcccaaggagcagataccctcacctacaccttggggctcccagacgggcagctgcccctgggctcctcgcctgacctgcctgaggcttctgcctgtccccctggcctcctgaaagcctcaggctctgggccctcatattccaacaacttggccaaggcagggctcaatggggcctcatgccaccttgaatacagccctgagcggggcaaggctgagggcagagagagcttctatagcacaggcagccagctgacccctgaccgatgtggacttcgttttgaggaacacaggcatcctgggcttggggaactgggacagggcccagacagctacggcagccccagtttccgcagcacaccggaggcaccctatgcctccctgacagagatagagcacctggtgcagagcgtctgcaagtcctacagggagacatgccagctgcggctggaggacctgctgcggcagcgctccaacatcttctcccgggaggaagtgactggctaccagaggaagtccatgtgggagatgtgggaacggtgtgcccaccacctcaccgaggccattcagtacgtggtggagttcgccaagaggctctcaggctttatggagctctgccagaatgaccagattgtgcttctcaaagcaggagcaatggaagtggtgctggttaggatgtgccgggcctacaatgctgacaaccgcacggtcttttttgaaggcaaatacggtggcatggagctgttccgagccttgggctgcagcgagctcatcagctccatctttgacttctcccactccctaagtgccttgcacttttccgaggatgagattgccctctacacagcccttgttctcatcaatgcccatcggccagggctccaagagaaaaggaaagtagaacagctgcagtacaatctggagctggcctttcatcatcatctctgcaagactcatcgccaaagcatcctggcaaagctgccacccaaggggaagcttcggagcctgtgtagccagcatgtggaaaggctgcagatcttccagcacctccaccccatcgtggtccaagccgctttccctccactctacaaggagctcttcagcactgaaaccgagtcacctgtggggctgtccaag

SEQ ID NO: 6236 - DNA, 1377 bp, Homo sapiens
  source 1..1377: mol_type = genomic DNA
atgcgagcacaaattgaagtgataccatgcaaaatttgtggcgataagtcctctgggatccactacggagtcatcacatgtgaaggctgcaagggattctttaggaggagccagcagaacaatgcttcttattcctgcccaaggcagagaaactgtttaattgacagaacgaacagaaaccgttgccaacactgccgactgcagaagtgtcttgccctaggaatgtcaagagatgctgtgaagtttgggaggatgtccaagaagcaaagggacagcctgtatgctgaggtgcagaagcaccagcagcggctgcaggaacagcggcagcagcagagtggggaggcagaagcccttgccagggtgtacagcagcagcattagcaacggcctgagcaacctgaacaacgagaccagcggcacttatgccaacgggcacgtcattgacctgcccaagtctgagggttattacaacgtcgattccggtcagccgtcccctgatcagtcaggacttgacatgactggaatcaaacagataaagcaagaacctatctatgacctcacatccgtacccaacttgtttacctatagctctttcaacaatgggcagttagcaccagggataaccatgactgaaatcgaccgaattgcacagaacatcattaagtcccatttggagacatgtcaatacaccatggaagagctgcaccagctggcgtggcagacccacacctatgaagaaattaaagcatatcaaagcaagtccagggaagcactgtggcaacaatgtgccatccagatcactcacgccatccaatacgtggtggagtttgcaaagcggataacaggcttcatggagctctgtcaaaatgatcaaattctacttctgaagtcaggttgcttggaagtggttttagtgagaatgtgccgtgccttcaacccattaaacaacactgttctgtttgaaggaaaatatggaggaatgcaaatgttcaaagccttaggttctgatgacctagtgaatgaagcatttgactttgcaaagaatttgtgttccttgcagctgaccgaggaggagatcgctttgttctcatctgctgttctgatatctccagaccgagcctggcttatagaaccaaggaaagtccagaagcttcaggaaaaaatttattttgcacttcaacatgtgattcagaagaatcacctggatgatgagaccttggcaaagttaatagccaagataccaaccatcacggcagtttgcaacttgcacggggagaagctgcaggtatttaagcaatctcatccagagatagtgaatacactgtttcctccgttatacaaggagctctttaatcctgactgtgccaccggctgcaaa

SEQ ID NO: 6237 - DNA, 1668 bp, Homo sapiens
  source 1..1668: mol_type = genomic DNA
atgaatgagggggccccaggagacagtgacttagagactgaggcaagagtgccgtggtcaatcatgggtcattgtcttcgaactggacaggccagaatgtctgccacacccacacctgcaggtgaaggagccagaagggatgaactttttgggattctccaaatactccatcagtgtatcctgtcttcaggtgatgcttttgttcttactggcgtctgttgttcctggaggcagaatggcaagccaccatattcacaaaaggaagataaggaagtacaaactggatacatgaatgctcaaattgaaattattccatgcaagatctgtggagacaaatcatcaggaatccattatggtgtcattacatgtgaaggctgcaagggctttttcaggagaagtcagcaaagcaatgccacctactcctgtcctcgtcagaagaactgtttgattgatcgaaccagtagaaaccgctgccaacactgtcgattacagaaatgccttgccgtagggatgtctcgagatgctgtaaaatttggccgaatgtcaaaaaagcagagagacagcttgtatgcagaagtacagaaacaccggatgcagcagcagcagcgcgaccaccagcagcagcctggagaggctgagccgctgacgcccacctacaacatctcggccaacgggctgacggaacttcacgacgacctcagtaactacattgacgggcacacccctgaggggagtaaggcagactccgccgtcagcagcttctacctggacatacagccttccccagaccagtcaggtcttgatatcaatggaatcaaaccagaaccaatatgtgactacacaccagcatcaggcttctttccctactgttcgttcaccaacggcgagacttccccaactgtgtccatggcagaattagaacaccttgcacagaatatatctaaatcgcatctggaaacctgccaatacttgagagaagagctccagcagataacgtggcagacctttttacaggaagaaattgagaactatcaaaacaagcagcgggaggtgatgtggcaattgtgtgccatcaaaattacagaagctatacagtatgtggtggagtttgccaaacgcattgatggatttatggaactgtgtcaaaatgatcaaattgtgcttctaaaagcaggttctctagaggtggtgtttatcagaatgtgccgtgcctttgactctcagaacaacaccgtgtactttgatgggaagtatgccagccccgacgtcttcaaatccttaggttgtgaagactttattagctttgtgtttgaatttggaaagagtttatgttctatgcacctgactgaagatgaaattgcattattttctgcatttgtactgatgtcagcagatcgctcatggctgcaagaaaaggtaaaaattgaaaaactgcaacagaaaattcagctagctcttcaacacgtcctacagaagaatcaccgagaagatggaatactaacaaagttaatatgcaaggtgtctaccttaagagccttatgtggacgacatacagaaaagctaatggcatttaaagcaatatacccagacattgtgcgacttcattttcctccattatacaaggagttgttcacttcagaatttgagccagcaatgcaaattgatggg

SEQ ID NO: 6238 - DNA, 1404 bp, Homo sapiens
  source 1..1404: mol_type = genomic DNA
atgatgtattttgtgatcgcagcgatgaaagctcaaattgaaattattccatgcaagatctgtggagacaaatcatcaggaatccattatggtgtcattacatgtgaaggctgcaagggctttttcaggagaagtcagcaaagcaatgccacctactcctgtcctcgtcagaagaactgtttgattgatcgaaccagtagaaaccgctgccaacactgtcgattacagaaatgccttgccgtagggatgtctcgagatgctgtaaaatttggccgaatgtcaaaaaagcagagagacagcttgtatgcagaagtacagaaacaccggatgcagcagcagcagcgcgaccaccagcagcagcctggagaggctgagccgctgacgcccacctacaacatctcggccaacgggctgacggaacttcacgacgacctcagtaactacattgacgggcacacccctgaggggagtaaggcagactccgccgtcagcagcttctacctggacatacagccttccccagaccagtcaggtcttgatatcaatggaatcaaaccagaaccaatatgtgactacacaccagcatcaggcttctttccctactgttcgttcaccaacggcgagacttccccaactgtgtccatggcagaattagaacaccttgcacagaatatatctaaatcgcatctggaaacctgccaatacttgagagaagagctccagcagataacgtggcagacctttttacaggaagaaattgagaactatcaaaacaagcagcgggaggtgatgtggcaattgtgtgccatcaaaattacagaagctatacagtatgtggtggagtttgccaaacgcattgatggatttatggaactgtgtcaaaatgatcaaattgtgcttctaaaagcaggttctctagaggtggtgtttatcagaatgtgccgtgcctttgactctcagaacaacaccgtgtactttgatgggaagtatgccagccccgacgtcttcaaatccttaggttgtgaagactttattagctttgtgtttgaatttggaaagagtttatgttctatgcacctgactgaagatgaaattgcattattttctgcatttgtactgatgtcagcagatcgctcatggctgcaagaaaaggtaaaaattgaaaaactgcaacagaaaattcagctagctcttcaacacgtcctacagaagaatcaccgagaagatggaatactaacaaagttaatatgcaaggtgtctaccttaagagccttatgtggacgacatacagaaaagctaatggcatttaaagcaatatacccagacattgtgcgacttcattttcctccattatacaaggagttgttcacttcagaatttgagccagcaatgcaaattgatggg

SEQ ID NO: 6239 - DNA, 1644 bp, Homo sapiens
  source 1..1644: mol_type = genomic DNA
atgaatgagggggccccaggagacagtgacttagagactgaggcaagagtgccgtggtcaatcatgggtcattgtcttcgaactggacaggccagaatgtctgccacacccacacctgcaggtgaaggagccagaagctcttcaacctgtagctccctgagcaggctgttctggtctcaacttgagcacataaactgggatggagccacagccaagaactttattaatttaagggagttcttctcttttctgctccctgcattgagaaaagctcaaattgaaattattccatgcaagatctgtggagacaaatcatcaggaatccattatggtgtcattacatgtgaaggctgcaagggctttttcaggagaagtcagcaaagcaatgccacctactcctgtcctcgtcagaagaactgtttgattgatcgaaccagtagaaaccgctgccaacactgtcgattacagaaatgccttgccgtagggatgtctcgagatgctgtaaaatttggccgaatgtcaaaaaagcagagagacagcttgtatgcagaagtacagaaacaccggatgcagcagcagcagcgcgaccaccagcagcagcctggagaggctgagccgctgacgcccacctacaacatctcggccaacgggctgacggaacttcacgacgacctcagtaactacattgacgggcacacccctgaggggagtaaggcagactccgccgtcagcagcttctacctggacatacagccttccccagaccagtcaggtcttgatatcaatggaatcaaaccagaaccaatatgtgactacacaccagcatcaggcttctttccctactgttcgttcaccaacggcgagacttccccaactgtgtccatggcagaattagaacaccttgcacagaatatatctaaatcgcatctggaaacctgccaatacttgagagaagagctccagcagataacgtggcagacctttttacaggaagaaattgagaactatcaaaacaagcagcgggaggtgatgtggcaattgtgtgccatcaaaattacagaagctatacagtatgtggtggagtttgccaaacgcattgatggatttatggaactgtgtcaaaatgatcaaattgtgcttctaaaagcaggttctctagaggtggtgtttatcagaatgtgccgtgcctttgactctcagaacaacaccgtgtactttgatgggaagtatgccagccccgacgtcttcaaatccttaggttgtgaagactttattagctttgtgtttgaatttggaaagagtttatgttctatgcacctgactgaagatgaaattgcattattttctgcatttgtactgatgtcagcagatcgctcatggctgcaagaaaaggtaaaaattgaaaaactgcaacagaaaattcagctagctcttcaacacgtcctacagaagaatcaccgagaagatggaatactaacaaagttaatatgcaaggtgtctaccttaagagccttatgtggacgacatacagaaaagctaatggcatttaaagcaatatacccagacattgtgcgacttcattttcctccattatacaaggagttgttcacttcagaatttgagccagcaatgcaaattgatggg

SEQ ID NO: 6240 - DNA, 1965 bp, Homo sapiens
  source 1..1965: mol_type = genomic DNA
atgagtgctcttcttcaggatccaatgatagctggacaagtcagtaagcccttgctgtcagtgcggagtgaaatgaatgcggagttgagaggtgaggacaaggctgctacttcagacagcgagctgaatgagcccctgcttgcgcctgtggaatcaaatgacagcgaggacactcccagcaagctcttcggggctagaggaaacccagcattatcagacccaggcactcctgaccaacaccaggccagtcagacccaccccccatttccagttgggccacagccacttctgacggcacagcagttagcttctgctgtggccggcgtgatgccgggaggccccccagccctcaaccagccaatcctcattcccttcaacatggcgggacagctaggaggccagcaaggactggttctcacactgccaacagcgaatctcaccaacatccaagggctggtggcagcagctgcagccggaggcattatgactctgccactgcaaaatctacaagctacctcatccctgaactcccagctccagcagctccagctccagctccagcagcagcagcagcagcagcagcagcagcctcccccgtcaaccaaccagcacccgcaaccagccccacaggcgccctcgcagtcccagcagcagccgctgcagcccaccccaccccagcagccaccacccgcctctcagcagccgccagctcctacatctcagctgcaacaggcgcctcagccccagcagcaccaaccccactcccactcccagaaccagaaccaaccatctccaacccagcagagctccagccccccgcagaaacctagtcagtctccaggacatggcctgccttcaccgctcacgccacccaatcctctacagctggttaataatccactagcaagtcaggctgcagcggctgcagcagccatgagctccatagcaagctcacaggcctttggcaatgccctctccagtcttcagggggtcacaggtcaactagttactaatgcacaaggacagattatcgggaccattccactgatgcctaatccagggccatcgagccaagcagcaagcggcactcagggcttgcaagtgcagccaatcaccccccagctcctcacaaacgcccagggccagatcatcgccacagtcattgggaaccagatcctgcccgtgatcaacacccagggcatcacgctgtcacccatcaagcccggccagcagctccaccaaccctcccagacgtcagtgggtcaagcagcctcccaaggcaaccttctgcacctggctcacagccaagcatccatgtctcaaagtcccgtccggcaggcttcctcttcttcctcctcatcctcctcttcttcagctttgagcgtgggccagttagtcagcaatcctcaaacggcagcgggtgaggtggatggggttaatctggaggagatccgagaatttgccaaagcttttaaaatccggcgcctgtcccttggcctgacccagactcaggtgggacaggctctcagtgctacagagggccccgcgtacagccagtcggccatctgcaggtttgaaaagctggacatcacccctaaaagtgcccagaagatcaagccggtgcttgagcggtggatggctgaggctgaggcccgccatcgagcaggtatgcagaacctgaccgagtttatcgggagtgaaccatccaaaaagcgcaagcggcgcacctccttcacaccccaggcccttgagatcctcaatgcccactttgagaagaacacacacccttctgggcaggaaatgaccgaaattgctgagaagctgaactatgaccgagaagtagttagagtttggttctgcaataagaggcaagccctgaagaacacaattaaacgcttaaaacagcacgagccggccacggcagtccctttggagcccttaacagactctctggaagaaaactcc

SEQ ID NO: 6241 - DNA, 2073 bp, Homo sapiens
  source 1..2073: mol_type = genomic DNA
atgagtgctcttcttcaggatccaatgatagctggacaagtcagtaagcccttgctgtcagtgcggagtgaaatgaatgcggagttgagaggtgaggacaaggctgctacttcagacagcgagctgaatgagcccctgcttgcgcctgtggaatcaaatgacagcgaggacactcccagcaagctcttcggggctagaggaaacccagcattatcagacccaggcactcctgaccaacaccaggccagtcagacccaccccccatttccagttgggccacagccacttctgacggcacagcagttagcttctgctgtggccggcgtgatgccgggaggccccccagccctcaaccagccaatcctcattcccttcaacatggcgggacagctaggaggccagcaaggactggttctcacactgccaacagcgaatctcaccaacatccaagggctggtggcagcagctgcagccggaggcattatgactctgccactgcaaaatctacaagctacctcatccctgaactcccagctccagcagctccagctccagctccagcagcagcagcagcagcagcagcagcagcctcccccgtcaaccaaccagcacccgcaaccagccccacaggcgccctcgcagtcccagcagcagccgctgcagcccaccccaccccagcagccaccacccgcctctcagcagccgccagctcctacatctcagctgcaacaggcgcctcagccccagcagcaccaaccccactcccactcccagaaccagaaccaaccatctccaacccagcagagctccagccccccgcagaaacctagtcagtctccaggacatggcctgccttcaccgctcacgccacccaatcctctacagctggttaataatccactagcaagtcaggctgcagcggctgcagcagccatgagctccatagcaagctcacaggcctttggcaatgccctctccagtcttcagggggtcacaggtcaactagttactaatgcacaaggacagattatcgggaccattccactgatgcctaatccagggccatcgagccaagcagcaagcggcactcagggcttgcaagtgcagccaatcaccccccagctcctcacaaacgcccagggccagatcatcgccacagtcattgggaaccagatcctgcccgtgatcaacacccagggcatcacgctgtcacccatcaagcccggccagcagctccaccaaccctcccagacgtcagtgggtcaagcagcctcccaaggcaaccttctgcacctggctcacagccaagcatccatgtctcaaagtcccgtccggcaggcttcctcttcttcctcctcatcctcctcttcttcagctttgagcgtgggccagttagtcagcaatcctcaaacggcagcgggtgaggtggatggggttaatctggaggagatccgagaatttgccaaagcttttaaaatccggcgcctgtcccttggcctgacccagactcaggtgggacaggctctcagtgctacagagggccccgcgtacagccagtcggccatctgcagacacaccatcctgagaagccactttttcctaccacaggaagcccaagagaacactatagctagcagtctgacagccaaactgaaccctggccttttgtatcctgccaggtttgaaaagctggacatcacccctaaaagtgcccagaagatcaagccggtgcttgagcggtggatggctgaggctgaggcccgccatcgagcaggtatgcagaacctgaccgagtttatcgggagtgaaccatccaaaaagcgcaagcggcgcacctccttcacaccccaggcccttgagatcctcaatgcccactttgagaagaacacacacccttctgggcaggaaatgaccgaaattgctgagaagctgaactatgaccgagaagtagttagagtttggttctgcaataagaggcaagccctgaagaacacaattaaacgcttaaaacagcacgagccggccacggcagtccctttggagcccttaacagactctctggaagaaaactcc

SEQ ID NO: 6242 - DNA, 1833 bp, Homo sapiens
  source 1..1833: mol_type = genomic DNA
atggatcctggagccgggtcagagacatctctgactgtcaatgagcaggtcatcgtgatgtcaggtcatgagaccatccgagtgctggaagtcggagtggatgcccaactccctgctgaggaagagagcaaaggactggagggtgtggccgccgagggctcccagagcggagaccctgctgaagccagtcaagctgctggtgaagctgggccagacaacctgggctcctctgcagaggcaactgtgaagtcacccccggggatccctccgagccctgccactgccattgccaccttcagccaagccccaagccagcctcaggcatcgcagaccctgacgccactggctgtacaagctgccccccaggtcttgactcaggaaaacttagccacagttctgacaggagttatggttccagcaggggcagttactcaacctcttcttatccccatcagtattgcaggtcaagtggctggtcagcaggggctggccgtgtggacaattcctacagcaactgtggctgccctcccaggactgaccgctgcttctcctacggggggagtgttcaagccacctttagccggtctccaagcagctgctgtgctgaacaccgctcttccggcaccggtacaagctgccgcaccagtacaggcctcctcgacggcccaaccccggccaccagcccagccccagacgctgttccagacccagccgctgctgcagaccacacctgccatcctcccgcagcccactgctgccaccgctgctgcccctacccccaagccagtggacacccccccacagatcaccgtccagcctgcaggcttcgcatttagcccaggaatcatcagtgctgcttccctcgggggacagacccagatcctggggtccctcactacagctccagtcattaccagcgccattcccagcatgccagggatcagcagtcagatcctcaccaatgctcagggacaggttattggaacccttccatgggtagtgaactcagctagtgtggcggccccagcaccagcccaaagcctgcaggtccaggccgtgaccccccagctgttgttgaacgcccagggccaggtgattgcgaccctggctagcagccccctgcctccacctgtggctgtccggaagccaagcacacctgagtcccctgctaagagtgaggtgcagcccatccagcccacaccaaccgtgccccagcctgctgtggtcattgccagcccagctccagccgccaagccatctgcctctgctcctatcccaattacctgctcagagacccccaccgtcagccagttggtgtccaagccacatactccaagtctggatgaggatgggatcaacttagaagagatccgggagtttgccaagaactttaagatccggcggctctcgctgggccttacacagacccaggtgggtcaggctctgactgcaacggaaggtccagcctacagccagtcagccatctgccggttcgagaagctagacatcacacccaagagtgcccagaagctaaagccggtgctggaaaagtggctaaacgaagctgaactgcggaaccaggaaggccagcagaacctgatggagtttgtgggaggcgagccctccaagaaacgcaaacgccgcacctccttcaccccccaggccatagaggctctcaatgcctattttgagaagaacccactgcccacaggccaggagatcactgaaattgctaaggagctcaactacgaccgtgaggtagtgcgggtctggttctgcaatcggcgccagacgctcaagaacaccagcaagctgaacgtctttcagatccct

SEQ ID NO: 6243 - DNA, 1878 bp, Homo sapiens
  source 1..1878: mol_type = genomic DNA
atgaatgttgaagtagtaaaagtcatgccccaggacttagtgacattcaaggatgtggcaatagatttttcccaggaagaatggcaatggatgaaccctgctcagaagcgtttatacaggagtatgatgttggagaactatcagagcctggtatcacttggtctttgcatttctaagccatatgtgatctccttattggagcaagggagagagccttgggagatgacgagtgagatgacaagaagcccattctcagattgggaatctatatatgtgacacaggaattacctctgaagcagttcatgtatgatgatgcatgcatggagggaattactagctatggacttgagtgttccacttttgaagaaaattggaaatgggaagacctttttgagaagcagatgggaagtcatgagatgtttagcaagaaagaaataatcactcataaagaaaccatcactaaggaaacagaattcaaatatactaaatttgggaaatgtatccatctggaaaacatagaagagagtatttataatcacacatcagataaaaaaagcttctccaaaaattctatggtaataaaacacaagaaagtctatgtaggaaagaagctttttaaatgtaatgaatgtgacaaaaccttcacccatagctcatcccttactgttcattttagaattcatactggtgaaaaaccatatgcatgtgaggaatgtggaaaagccttcaagcaaaggcaacaccttgctcaacatcacagaacacatactggagagaaactctttgaatgtaaagaatgtaggaaagccttcaaacaaagtgaacaccttattcagcatcaaagaattcatactggagaaaaaccatataaatgtaaggaatgcagaaaagccttcagacagcctgcacaccttgctcagcatcagagaattcatactggagagaaaccctatgaatgtaaagaatgtggcaaagccttcagtgatggctcgtcttttgctcgacatcagagatgtcacactggcaaaagaccctatgaatgtattgagtgtgggaaggcttttaggtataacacatcttttattcgtcactggaggagttatcatactggagagaagccttttaattgcattgattgtgggaaagccttcagtgttcacataggacttattctgcataggagaattcatacaggagagaaaccttacaaatgtggtgtgtgtggaaaaaccttcagctcgggttcatcccgtactgtacatcagagaattcatacaggagagaaaccttatgaatgtgatatatgtgggaaagattttagccatcatgcatcactcactcagcatcaaagagtacattctggagagaaaccgtatgaatgcaaggaatgtgggaaagcctttaggcagaatgtacaccttgttagtcatttgagaattcatactggtgaaaaaccctatgaatgtaaagaatgtggaaaagcttttagaatcagttcacagctggctactcatcagagaattcatactggagagaagccttatgaatgtattgaatgtggaaatgctttcaaacagagatcacaccttgcccaacatcagaaaactcatacaggagagaaaccttatgagtgtaatgaatgcgggaaagccttcagccaaacttccaatcttactcaacatcaaagaattcatactggagagaaaccctataaatgtactgaatgtggaaaggcttttagtgatagctcatcctgtgctcagcatcaaagactccacactggccaaaggccctatcagtgttttgaatgtgggaaggcgttcagaagaaagttatccttaatttgtcatcaaagaagtcatactggagaagaacct

SEQ ID NO: 6244 - DNA, 2151 bp, Homo sapiens
  source 1..2151: mol_type = genomic DNA
atgaagagccaggaagaggtagaggtggcaggaattaaactttgtaaagccatgtccctgggttcagtgactttcacagatgtggccatagacttttcccaagatgaatgggagtggctgaatcttgctcagagaagtttgtacaagaaggtgatgttagaaaactacaggaacctagtttcagtgggtctttgcatttctaaaccagatgtgatctccttactggagcaagagaaagacccttgggtgataaaaggagggatgaacagaggcctgtgcccagacttggagtgtgtgtgggtgaccaaatcattatctttaaaccaggatatttatgaagaaaaattacccccggcaatcataatggaaagacttaaaagctatgaccttgaatgttcaacattagggaaaaactggaaatgtgaagacttgtttgagagggagcttgtaaaccagaagacacattttaggcaagagaccatcactcatatagatactcttattgaaaaaagagatcactctaacaaatctgggacagtttttcatctgaatacattatcttatataaaacagatttttcccatggaagagagaatatttaattttcatacagataagaaaagcttaaaaacacattcagttgtgaaaaaacacaagcaagaccgtggagaaaagaaacttttaaaatgtaatgactgtgagaaaatattcagcaaaatctcaacccttactcttcaccaaagaattcatacaggagagaaaccctatgaatgtattgaatgtggaaaggcctttagccagagtgcccaccttgctcaacatcagagaatacacacaggagaaaaaccttttgaatgtactgaatgtgggaaagccttcagccagaatgctcatcttgttcaacaccagagagttcatactggagagaaaccttatcagtgtaagcagtgtaataaagcattcagccagcttgcacaccttgctcaacatcagagggtccacactggagagaaaccctatgaatgtattgaatgtgggaaggcttttagtgattgctcatccctagctcatcatcgaaggattcacactgggaaaagaccttatgaatgtattgactgtgggaaagctttcaggcagaatgcttctcttatacgtcatcggcgatattatcatactggagagaaaccctttgactgtattgattgtgggaaggctttcactgatcacataggacttattcagcataagagaactcatactggagagagaccttacaaatgtaatgtgtgtgggaaggcttttagccatggctcatctctgacagtacatcagagaattcatacaggagagaaaccttatgaatgcaatatctgtgagaaagccttcagccatcgtgggtctcttactcttcatcagagagttcatactggagagaaaccctatgaatgtaaagaatgtgggaaagctttccggcagagcacgcatctggctcatcatcagagaattcatactggagagaaaccttatgaatgtaaggaatgcagcaaaaccttcagccagaatgcacacctcgcgcaacatcagaaaatacacactggggagaaaccttatgaatgtaaggaatgtggtaaggccttcagtcagattgcacaccttgttcagcaccagagagttcatactggtgagaagccttacgaatgtattgaatgtgggaaggcctttagtgatggctcatatcttgttcaacatcagagactccacagtggcaaaagaccgtatgaatgtcttgaatgtgggaaggcattcaggcagagggcatccttgatttgtcatcagagatgtcatactggtgagaaaccttatgaatgtaatgtttgtgggaaagcctttagccatcgtaaatcccttactctgcatcagagaattcatacaggagagaaaccttatgagtgtaaggaatgtagcaaagccttcagccaggttgcccatcttactctacataagagaattcatactggagaaaggccctatgagtgtaaagaatgtggaaaagccttcaggcagagtgtacatcttgctcatcatcagcgaattcataccggagagtcatcagttattctctcctctgccctcccataccaccaagtccta

SEQ ID NO: 6245 - DNA, 3453 bp, Homo sapiens
  source 1..3453: mol_type = genomic DNA
atggaggtggtggacgagacggaggcgctgcagcgcttcttcgaaggccacgacatcaacggtgccctggagccctccaacatagacaccagcatcctggaggagtacatcagcaaggaggatgcctccgacctctgcttccctgacatctctgctccagccagctcggcctcctactcccacgggcagcctgcgatgcctggctccagcggggtccaccacctgagcccccctgggggtggaccctccccggggcgccatggtcccctcccacccccgggctacggcaccccgctgaactgcaacaacaacaacggcatgggcgctgcccccaagcccttcccggggggcaccgggccccccatcaaggctgagcccaaggctccctatgccccaggcacactgccggactctcccccagactcgggctccgaggcctactccccccagcaggtgaatgagccccacctcctgcgcacgataacccctgagacactgtgccacgtgggagtgccctcccgcctggagcatccgcccccacctccagcccacttgccaggccccccgccacccccaccacccccacctcactaccctgtcctgcagcgggatctgtacatgaaggccgagcccccgatcccccactacgctgccatggggcaggggctggtgcccactgatcttcaccacacccagcagtcccagatgctgcaccagctcctgcagcagcacggagctgagctccctacacacccctccaagaagaggaagcactctgaatccccccccagcaccctcaatgcccagatgctgaatggaatgatcaaacaggagcctgggaccgtgacagccctgcctctgcaccccactcgagccccatcgccaccctggcctccccagggtccgctctccccgggccctggttccttgcctctcagcattgcccgtgtccagacaccgccttggcacccgccaggtgccccctccccaggcctcctgcaggacagtgacagcctcagtggctcctacctggaccccaactaccagtccatcaagtggcagcctcatcagcagaacaagtgggcgaccctgtacgatgctaactacaaggagctgcccatgctcacctaccgcgtggatgcggacaagggcttcaacttttcggtgggcgacgacgcctttgtgtgccagaagaagaaccacttccaggtgacagtgtacatcggcatgctgggcgagcccaagtacgtcaagacgcccgagggcctcaagcccctcgactgcttctatctgaagctgcacggagtgaagctggaggccctgaaccagtccattaacatcgagcagtcccagtcagaccggagcaagcggcccttcaacccggtcacggtcaatctgccccctgagcaggtcacgaaggtgactgtggggcggctgcacttcagcgagaccaccgctaacaacatgcgtaagaagggcaagcccaacccggaccagaggtacttcatgctggtggtggccctccaggctcatgcacagaaccagaactacacgctggccgcccagatctcagagcgcatcattgtgcgggcctccaacccaggccagttcgagagcgacagcgatgtgttgtggcagcgggcacaggtgcccgacaccgtcttccaccacggccgcgtgggcatcaacacagaccggccggatgaggcgctggttgtgcacgggaatgtcaaggtcatgggctcgcttatgcacccctccgacctgcgcgccaaggaacacgtgcaggaggtggacaccaccgagcaattgaagaggatctcgcgcatgcggctggtgcactacagatacaagcccgagttcgccgccagcgcgggcatcgaggccaccgcgccagagacaggtgtcatcgctcaggaggtgaaggagatcttgcctgaggctgtgaaagacaccggagacatggtctttgccaatgggaaaaccatagagaacttcctggtggtgaacaaggagcgcatcttcatggagaacgtaggggccgtgaaggagctgtgcaagctgacagacaacctggagacgcgcattgatgagctggagcgctggagccacaagctggccaagctgcggcggctcgacagcctcaagtccaccggcagctcgggcgccttcagccatgcagggagccagttcagtcgggcgggcagcgtcccccacaagaagaggccccccaaggtggccagcaagtcatcgtccgtggttccggaccaggcctgcatcagccagcgcttcctgcagggaaccatcattgccctggtggtggtcatggccttcagcgtggtgtccatgtccacactgtacgtgctgagcctgcgcacagaggaggacctggtagacactgatggctcttttgccgtgtccacttcctgtctcctggccctgctccggccccagccccctggggggagtgaggccttgtgcccatggtccagccagagctttgggaccacgcagctccgacagtcccccttgaccacggggctaccaggcatacagccctctttgctgctggtgaccaccagcctcaccagctcggccccaggttctgctgtccgcaccttggacatgtgttccagccacccctgccctgtcatctgctgttcctcacccactaccaaccctaccactggtcctagtcttggccccagctttaaccctggccatgttctcagcccaagtcccagccccagcaccaaccgctcaggccccagccagatggcccttctgccagtcaccaacatcagagccaagtcctggggtctttcagtcaatggcattggccactccaagcatcacaagagtctggagcctctggccagccctgcagtccccttccctggggggcagggcaaagccaagaacagtcccagccttggtttccatggccgggcccgccgaggggccctccagtccagcgtgggccctgctgagcccacctgggcccagggccagtcagcctctctccttgcagagccagtgccctccctgacctccatccaggtgctggagaattcgatgtccatcacctcccagtactgtgctccaggggatgcctgcaggcctgggaacttcacctaccacatccctgtcagtagtggcaccccactgcacctcagcctgactctgcagatgaactcctcctcccccgtgtctgtggtgctgtgcagcctgaggtcaaaggaggaaccatgtgaggaggggagccttccacagagtctccacacccaccaggacacccagggcacctctcaccggtggccaataaccatcctgtccttccgtgaattcacctaccacttccgggtggcactgctgggtcaggccaactgcagttcagaggctctcgcccagccagccacagactaccacttccacttctaccgcctgtgtgac

SEQ ID NO: 6246 - DNA, 3333 bp, Homo sapiens
  source 1..3333: mol_type = genomic DNA
atgcactggcttccagcaggccacgacatcaacggtgccctggagccctccaacatagacaccagcatcctggaggagtacatcagcaaggaggatgcctccgacctctgcttccctgacatctctgctccagccagctcggcctcctactcccacgggcagcctgcgatgcctggctccagcggggtccaccacctgagcccccctgggggtggaccctccccggggcgccatggtcccctcccacccccgggctacggcaccccgctgaactgcaacaacaacaacggcatgggcgctgcccccaagcccttcccggggggcaccgggccccccatcaaggctgagcccaaggctccctatgccccaggcacactgccggactctcccccagactcgggctccgaggcctactccccccagcaggtgaatgagccccacctcctgcgcacgataacccctgagacactgtgccacgtgggagtgccctcccgcctggagcatccgcccccacctccagcccacttgccaggccccccgccacccccaccacccccacctcactaccctgtcctgcagcgggatctgtacatgaaggccgagcccccgatcccccactacgctgccatggggcaggggctggtgcccactgatcttcaccacacccagcagtcccagatgctgcaccagctcctgcagcagcacggagctgagctccctacacacccctccaagaagaggaagcactctgaatccccccccagcaccctcaatgcccagatgctgaatggaatgatcaaacaggagcctgggaccgtgacagccctgcctctgcaccccactcgagccccatcgccaccctggcctccccagggtccgctctccccgggccctggttccttgcctctcagcattgcccgtgtccagacaccgccttggcacccgccaggtgccccctccccaggcctcctgcaggacagtgacagcctcagtggctcctacctggaccccaactaccagtccatcaagtggcagcctcatcagcagaacaagtgggcgaccctgtacgatgctaactacaaggagctgcccatgctcacctaccgcgtggatgcggacaagggcttcaacttttcggtgggcgacgacgcctttgtgtgccagaagaagaaccacttccaggtgacagtgtacatcggcatgctgggcgagcccaagtacgtcaagacgcccgagggcctcaagcccctcgactgcttctatctgaagctgcacggagtgaagctggaggccctgaaccagtccattaacatcgagcagtcccagtcagaccggagcaagcggcccttcaacccggtcacggtcaatctgccccctgagcaggtcacgaaggtgactgtggggcggctgcacttcagcgagaccaccgctaacaacatgcgtaagaagggcaagcccaacccggaccagaggtacttcatgctggtggtggccctccaggctcatgcacagaaccagaactacacgctggccgcccagatctcagagcgcatcattgtgcgggcctccaacccaggccagttcgagagcgacagcgatgtgttgtggcagcgggcacaggtgcccgacaccgtcttccaccacggccgcgtgggcatcaacacagaccggccggatgaggcgctggttgtgcacgggaatgtcaaggtcatgggctcgcttatgcacccctccgacctgcgcgccaaggaacacgtgcaggaggtggacaccaccgagcaattgaagaggatctcgcgcatgcggctggtgcactacagatacaagcccgagttcgccgccagcgcgggcatcgaggccaccgcgccagagacaggtgtcatcgctcaggaggtgaaggagatcttgcctgaggctgtgaaagacaccggagacatggtctttgccaatgggaaaaccatagagaacttcctggtggtgaacaaggagcgcatcttcatggagaacgtaggggccgtgaaggagctgtgcaagctgacagacaacctggagacgcgcattgatgagctggagcgctggagccacaagctggccaagctgcggcggctcgacagcctcaagtccaccggcagctcgggcgccttcagccatgcagggagccagttcagtcgggcgggcagcgtcccccacaagaagaggccccccaaggtggccagcaagtcatcgtccgtggttccggaccaggcctgcatcagccagcgcttcctgcagggaaccatcattgccctggtggtggtcatggccttcagcgtggtgtccatgtccacactgtacgtgctgagcctgcgcacagaggaggacctggtagacactgatggcaggtccagccagagctttgggaccacgcagctccgacagtcccccttgaccacggggctaccaggcatacagccctctttgctgctggtgaccaccagcctcaccagctcggccccaggttctgctgtccgcaccttggacatgtgttccagccacccctgccctgtcatctgctgttcctcacccactaccaaccctaccactggtcctagtcttggccccagctttaaccctggccatgttctcagcccaagtcccagccccagcaccaaccgctcaggccccagccagatggcccttctgccagtcaccaacatcagagccaagtcctggggtctttcagtcaatggcattggccactccaagcatcacaagagtctggagcctctggccagccctgcagtccccttccctggggggcagggcaaagccaagaacagtcccagccttggtttccatggccgggcccgccgaggggccctccagtccagcgtgggccctgctgagcccacctgggcccagggccagtcagagccagtgccctccctgacctccatccaggtgctggagaattcgatgtccatcacctcccagtactgtgctccaggggatgcctgcaggcctgggaacttcacctaccacatccctgtcagtagtggcaccccactgcacctcagcctgactctgcagatgaactcctcctcccccgtgtctgtggtgctgtgcagcctgaggtcaaaggaggaaccatgtgaggaggggagccttccacagagtctccacacccaccaggacacccagggcacctctcaccggtggccaataaccatcctgtccttccgtgaattcacctaccacttccgggtggcactgctgggtcaggccaactgcagttcagaggctctcgcccagccagccacagactaccacttccacttctaccgcctgtgtgac

SEQ ID NO: 6247 - DNA, 2016 bp, Homo sapiens
  source 1..2016: mol_type = genomic DNA
atgactgcaaccacagaagtagcagatgatgaggttactgaggggactgtgacacagatacagattttgcagaatgagcaactagatgaaatatctcccttgggtaacgaggaagtttcagcagttagccaagcatggtttacaactaaagaagataaggattctctgactaataaaggacataaatggaagcaggggatgtggtccaaggaagaaattgatattttgatgaacaatattgaacgctatcttaaggcacgcggaataaaagatgctacagaaatcatctttgagatgtcaaaagacgaaagaaaagatttctacaggactatagcatggggtctgaaccggcctttgtttgcagtttatagaagagtgcttcgcatgtatgatgacagaaaccatgtgggaaaatatacacctgaagaaattgagaagctcaaggagctccggataaagcatggcaatgactgggcaacaataggggcggcgctaggaagaagtgcatcttctgtcaaagatcggtgccgactgatgaaggatacttgcaacacagggaagtggacagaagaagaagaaaagagacttgcagaagtggttcatgagttgacaagcactgagccaggtgacatagtcacacagggtgtgtcttgggcagctgtggctgaacgagtcggtacccgctcagaaaagcaatgtcgttctaaatggctcaactacctgaattggaaacagagtgggggtactgaatggaccaaggaagatgaaatcaatctcatcctcaggatagcagaacttgatgtagctgatgaaaatgacattaactgggatctgttagctgagggatggagtagtgtccgttcaccacaatggctacgaagtaaatggtggaccatcaaaaggcaaattgcaaaccataaggatgtttcgttccctgtcttaataaaaggtcttaaacagttacatgagaaccaaaaaaacaacccaacgcttttggagaataaatcaggatctggagttccaaacagtaataccaattccagtgtgcagcatgttcagataagagttgcccgcttggaagataatacagccatctcttctagccccatggcagcattgcagattccagtccagatcacccatgtttcttcagcagactctcctgctaccgttgactcagaaacaataacactaaacagtggaacactacagacatttgagattcttccctctttccatctacagcccactggcactccaggcacctacctacttcaaacaagctcaagccaaggccttcccctaactctgactgctagtcccacagtaaccctgacagctgctgctcctgcttctcctgaacagattattgttcatgctttatccccagaacatttgttgaacacaagtgataatgttacagtgcagtgtcacacaccaagagtcatcattcagactgttgccacagaggacatcacttcttccatatcccaagcagaactgacagtcgatagtgatattcagtcatctgattttcctgagcctccagacgccctagaagcagacactttcccagatgaaattcatcaccctaagatgactgtggagccatcatttaatgatgctcatgtatccaaattcagtgaccaaaatagcacagaactgatgaatagtgttatggtcagaacagaagaagaaatctctgacaccgaccttaaacaagaggaatcaccctctgatttagccagtgcttatgttactgagggtttagagtctcccactatagaagaacaagttgatcaaacaattgatgatgaaacaatacttatcgttccttcaccacatggctttatccaggcatctgatgttatagatactgaatctgtcttgcctttgacaacactaacagatcccatactccaacatcatcaggaagaatcaaatatcattggatcatccttgggcagtcctgtttcagaagattcaaaggatgtcgaagatttggtaaactgtcat

SEQ ID NO: 6248 - DNA, 2280 bp, Homo sapiens
  source 1..2280: mol_type = genomic DNA
atgagcacagtggaagaggattctgacacagtaacagtagaaactgtgaactctgtgactttgactcaggacacagaagggaatctcattcttcactgccctcagaatgaagcggatgaaatagactcagaagatagtattgaacctccacataaaaggctttgtttgtcctctgaggatgatcagagtattgatgattctactccttgcatatcagttgttgcacttccactttcagaaaatgatcagagctttgaagtgaccatgactgcaaccacagaagtagcagatgatgaggttactgaggggactgtgacacagatacagattttgcagaatgagcaactagatgaaatatctcccttgggtaacgaggaagtttcagcagttagccaagcatggtttacaactaaagaagataaggattctctgactaataaaggacataaatggaagcaggggatgtggtccaaggaagaaattgatattttgatgaacaatattgaacgctatcttaaggcacgcggaataaaagatgctacagaaatcatctttgagatgtcaaaagacgaaagaaaagatttctacaggactatagcatggggtctgaaccggcctttgtttgcagtttatagaagagtgcttcgcatgtatgatgacagaaaccatgtgggaaaatatacacctgaagaaattgagaagctcaaggagctccggataaagcatggcaatgactgggcaacaataggggcggcgctaggaagaagtgcatcttctgtcaaagatcggtgccgactgatgaaggatacttgcaacacagggaagtggacagaagaagaagaaaagagacttgcagaagtggttcatgagttgacaagcactgagccaggtgacatagtcacacagggtgtgtcttgggcagctgtggctgaacgagtcggtacccgctcagaaaagcaatgtcgttctaaatggctcaactacctgaattggaaacagagtgggggtactgaatggaccaaggaagatgaaatcaatctcatcctcaggatagcagaacttgatgtagctgatgaaaatgacattaactgggatctgttagctgagggatggagtagtgtccgttcaccacaatggctacgaagtaaatggtggaccatcaaaaggcaaattgcaaaccataaggatgtttcgttccctgtcttaataaaaggtcttaaacagttacatgagaaccaaaaaaacaacccaacgcttttggagaataaatcaggatctggagttccaaacagtaataccaattccagtgtgcagcatgttcagataagagttgcccgcttggaagataatacagccatctcttctagccccatggcagcattgcagattccagtccagatcacccatgtttcttcagcagactctcctgctaccgttgactcagaaacaataacactaaacagtggaacactacagacatttgagattcttccctctttccatctacagcccactggcactccaggcacctacctacttcaaacaagctcaagccaaggccttcccctaactctgactgctagtcccacagtaaccctgacagctgctgctcctgcttctcctgaacagattattgttcatgctttatccccagaacatttgttgaacacaagtgataatgttacagtgcagtgtcacacaccaagagtcatcattcagactgttgccacagaggacatcacttcttccatatcccaagcagaactgacagtcgatagtgatattcagtcatctgattttcctgagcctccagacgccctagaagcagacactttcccagatgaaattcatcaccctaagatgactgtggagccatcatttaatgatgctcatgtatccaaattcagtgaccaaaatagcacagaactgatgaatagtgttatggtcagaacagaagaagaaatctctgacaccgaccttaaacaagaggaatcaccctctgatttagccagtgcttatgttactgagggtttagagtctcccactatagaagaacaagttgatcaaacaattgatgatgaaacaatacttatcgttccttcaccacatggctttatccaggcatctgatgttatagatactgaatctgtcttgcctttgacaacactaacagatcccatactccaacatcatcaggaagaatcaaatatcattggatcatccttgggcagtcctgtttcagaagattcaaaggatgtcgaagatttggtaaactgtcat

SEQ ID NO: 6249 - DNA, 1371 bp, Homo sapiens
  source 1..1371: mol_type = genomic DNA
atgctgggagcggtgaagatggaagggcacgagccgtccgactggagcagctactatgcagagcccgagggctactcctccgtgagcaacatgaacgccggcctggggatgaacggcatgaacacgtacatgagcatgtcggcggccgccatgggcagcggctcgggcaacatgagcgcgggctccatgaacatgtcgtcgtacgtgggcgctggcatgagcccgtccctggcggggatgtcccccggcgcgggcgccatggcgggcatgggcggctcggccggggcggccggcgtggcgggcatggggccgcacttgagtcccagcctgagcccgctcggggggcaggcggccggggccatgggcggcctggccccctacgccaacatgaactccatgagccccatgtacgggcaggcgggcctgagccgcgcccgcgaccccaagacctacaggcgcagctacacgcacgcaaagccgccctactcgtacatctcgctcatcaccatggccatccagcagagccccaacaagatgctgacgctgagcgagatctaccagtggatcatggacctcttccccttctaccggcagaaccagcagcgctggcagaactccatccgccactcgctctccttcaacgactgtttcctgaaggtgccccgctcgcccgacaagcccggcaagggctccttctggaccctgcaccctgactcgggcaacatgttcgagaacggctgctacctgcgccgccagaagcgcttcaagtgcgagaagcagctggcgctgaaggaggccgcaggcgccgccggcagcggcaagaaggcggccgccggagcccaggcctcacaggctcaactcggggaggccgccgggccggcctccgagactccggcgggcaccgagtcgcctcactcgagcgcctccccgtgccaggagcacaagcgagggggcctgggagagctgaaggggacgccggctgcggcgctgagccccccagagccggcgccctctcccgggcagcagcagcaggccgcggcccacctgctgggcccgccccaccacccgggcctgccgcctgaggcccacctgaagccggaacaccactacgccttcaaccacccgttctccatcaacaacctcatgtcctcggagcagcagcaccaccacagccaccaccaccaccaaccccacaaaatggacctcaaggcctacgaacaggtgatgcactaccccggctacggttcccccatgcctggcagcttggccatgggcccggtcacgaacaaaacgggcctggacgcctcgcccctggccgcagatacctcctactaccagggggtgtactcccggcccattatgaactcctct

SEQ ID NO: 6250 - DNA, 1389 bp, Homo sapiens
  source 1..1389: mol_type = genomic DNA
atgcactcggcttccagtatgctgggagcggtgaagatggaagggcacgagccgtccgactggagcagctactatgcagagcccgagggctactcctccgtgagcaacatgaacgccggcctggggatgaacggcatgaacacgtacatgagcatgtcggcggccgccatgggcagcggctcgggcaacatgagcgcgggctccatgaacatgtcgtcgtacgtgggcgctggcatgagcccgtccctggcggggatgtcccccggcgcgggcgccatggcgggcatgggcggctcggccggggcggccggcgtggcgggcatggggccgcacttgagtcccagcctgagcccgctcggggggcaggcggccggggccatgggcggcctggccccctacgccaacatgaactccatgagccccatgtacgggcaggcgggcctgagccgcgcccgcgaccccaagacctacaggcgcagctacacgcacgcaaagccgccctactcgtacatctcgctcatcaccatggccatccagcagagccccaacaagatgctgacgctgagcgagatctaccagtggatcatggacctcttccccttctaccggcagaaccagcagcgctggcagaactccatccgccactcgctctccttcaacgactgtttcctgaaggtgccccgctcgcccgacaagcccggcaagggctccttctggaccctgcaccctgactcgggcaacatgttcgagaacggctgctacctgcgccgccagaagcgcttcaagtgcgagaagcagctggcgctgaaggaggccgcaggcgccgccggcagcggcaagaaggcggccgccggagcccaggcctcacaggctcaactcggggaggccgccgggccggcctccgagactccggcgggcaccgagtcgcctcactcgagcgcctccccgtgccaggagcacaagcgagggggcctgggagagctgaaggggacgccggctgcggcgctgagccccccagagccggcgccctctcccgggcagcagcagcaggccgcggcccacctgctgggcccgccccaccacccgggcctgccgcctgaggcccacctgaagccggaacaccactacgccttcaaccacccgttctccatcaacaacctcatgtcctcggagcagcagcaccaccacagccaccaccaccaccaaccccacaaaatggacctcaaggcctacgaacaggtgatgcactaccccggctacggttcccccatgcctggcagcttggccatgggcccggtcacgaacaaaacgggcctggacgcctcgcccctggccgcagatacctcctactaccagggggtgtactcccggcccattatgaactcctct

SEQ ID NO: 6251 - DNA, 1350 bp, Homo sapiens
  source 1..1350: mol_type = genomic DNA
atggctgcttccaagacccagggggctgtcgcccgaatgcaggaagaccgtgatgggagctgcagcacagtcgggggtgtaggttatggggacagtaaggattgtatcctggagccgctttccctgccagaaagtccaggtggcaccaccactttagaaggttctccatctgtgccttgtattttctgtgaagaacattttcctgtggctgaacaagacaaacttctgaagcacatgattattgagcataagattgtcatagctgatgtcaagttggttgctgatttccaaaggtacattttatattggaggaaaaggttcactgaacagcccatcacagatttttgtagtgtaataagaattaattccactgctccatttgaagaacaagagaattattttttgttatgtgacgttttaccagaagatagaattcttagagaagagcttcagaaacagagactgagagaaattctggaacaacagcagcaagaacgaaatgataccaattttcatggcgtttgtatgttttgcaatgaagaattccttggaaacagatctgttattttgaaccacatggccagagaacatgctttcaacattggattgccagacaacattgtaaactgcaatgaatttttgtgtacattacagaaaaagcttgacaatttgcagtgcttgtactgtgagaagaccttcagggacaaaaatacacttaaagatcacatgaggaaaaaacagcatcgtaagattaatcctaagaacagagaatatgacagattttatgtcatcaattatttggaacttggaaaatcgtgggaagaagttcagttggaagatgatcgggagttgctggaccatcaggaagatgactggtctgattgggaagaacaccctgcctctgcagtctgcttattttgtgaaaagcaagcagaaacaattgagaagttgtatgtccacatggaggatgcacacgaatttgatcttctcaaaataaagtcagaacttggattaaatttctatcagcaagtgaaactggtcaattttattcggaggcaagttcaccaatgcagatgttatggctgccatgtgaagttcaaatccaaagcagacttaagaactcacatggaagaaactaaacacacttcgctgctccccgatagaaagacgtgggatcaactggagtattattttccaacctatgaaaatgacactctcctgtgtacactatctgacagtgaaagtgacctgacagctcaggaacaaaatgaaaatgttcccatcatcagtgaagatacatctaaactgtatgctttgaaacaaagcagtattttgaaccagttgctacta

SEQ ID NO: 6252 - DNA, 1842 bp, Homo sapiens
  source 1..1842: mol_type = genomic DNA
atgaagcgggaccggctgggccgcttcctgtctcctgggtcgtcccgacagtgcggggcctcggacggcggcggcggcgtcagccggactcggggccgcccttcccttagcggtgggccgagggtggacggggcgacggcgcggcgcgcctggggcccggtggggtcctgcggggacgcgggcgaggacggcgcggacgaggcaggagcaggccgggctctcgccatgggtcactgtcgcctctgccacgggaagttttcctcgagaagcctgcgcagcatctccgagagggcgcctggagcgagcatggagaggccatccgcagaggagcgcgtgctcgtacgggacttccagcgcctgcttggtgtggctgtccgccaggaccccaccttgtctccgtttgtctgcaagagctgccacgcccagttctaccagtgccacagccttctcaagtccttcctgcagagggtcaacgcctccccggctggtcgccggaagccttgtgcaaaggtcggtgcccagcccccaacaggggcagaggagggagcgtgtctggtggatctgatcacatccagcccccagtgcctgcacggcttggtggggtgggtgcatggacatgcggccagctgcggggccctgccccaccttcagaggacactgtcctccgagtactgcggcgtcatccaggtcgtgtggggctgcgaccagggccacgactacaccatggataccagctccagctgcaaggccttcttgctggacagtgcgctggcagtcaagtggccatgggacaaagagacggcgccacggctgccccagcaccgagggtggaaccctggggatgcccctcagacctcccagggtagagggacagggaccccagttggggctgagaccaagaccctgcccagcacggatgtggcccagcctccttcggacagcgacgcggtggggcccaggtcgggcttcccacctcagccaagcctgcccctttgcagggccccagggcagttgggtgagaagcagcttccatcttcaacctcggatgatcgggtaaaagacgagttcagtgacctttctgagggagacgtcttgagtgaagatgaaaatgacaagaagcaaaatgcccagtcttcggacgagtcctttgagccttacccagaaaggaaagtctctggtaagaagagtgaaagcaaagaagccaagaagtctgaagaaccaagaattcggaagaagccgggacccaagcccggatggaagaagaagcttcgttgtgagagggaggagcttcccaccatctacaagtgtccttaccagggctgcacggccgtgtaccgaggcgctgacggcatgaagaagcacatcaaggagcaccacgaggaggtccgggagcggccctgcccccaccctggctgcaacaaggttttcatgatcgaccgctacctgcagcgccacgtgaagctcatccacacagaggtgcggaactatatctgtgacgaatgtggacaaaccttcaagcagcggaagcaccttctcgtccaccaaatgcgacattcgggagccaagcctttgcagtgtgaggtctgtgggttccagtgcaggcagcgggcatccctcaagtaccacatgaccaaacacaaggctgagactgagctggactttgcctgtgaccagtgtggccggcggtttgagaaggcccacaacctcaatgtacacatgtccatggtgcacccgctgacacagacccaggacaaggccctgcccctggaggcggaaccaccacctgggccaccgagcccctctgtgaccacagagggccaggcggtgaagcccgaacccacc

SEQ ID NO: 6253 - DNA, 1617 bp, Homo sapiens
  source 1..1617: mol_type = genomic DNA
atgggtcactgtcgcctctgccacgggaagttttcctcgagaagcctgcgcagcatctccgagagggcgcctggagcgagcatggagaggccatccgcagaggagcgcgtgctcgtacgggacttccagcgcctgcttggtgtggctgtccgccaggaccccaccttgtctccgtttgtctgcaagagctgccacgcccagttctaccagtgccacagccttctcaagtccttcctgcagagggtcaacgcctccccggctggtcgccggaagccttgtgcaaaggtcggtgcccagcccccaacaggggcagaggagggagcgtgtctggtggatctgatcacatccagcccccagtgcctgcacggcttggtggggtgggtgcatggacatgcggccagctgcggggccctgccccaccttcagaggacactgtcctccgagtactgcggcgtcatccaggtcgtgtggggctgcgaccagggccacgactacaccatggataccagctccagctgcaaggccttcttgctggacagtgcgctggcagtcaagtggccatgggacaaagagacggcgccacggctgccccagcaccgagggtggaaccctggggatgcccctcagacctcccagggtagagggacagggaccccagttggggctgagaccaagaccctgcccagcacggatgtggcccagcctccttcggacagcgacgcggtggggcccaggtcgggcttcccacctcagccaagcctgcccctttgcagggccccagggcagttgggtgagaagcagcttccatcttcaacctcggatgatcgggtaaaagacgagttcagtgacctttctgagggagacgtcttgagtgaagatgaaaatgacaagaagcaaaatgcccagtcttcggacgagtcctttgagccttacccagaaaggaaagtctctggtaagaagagtgaaagcaaagaagccaagaagtctgaagaaccaagaattcggaagaagccgggacccaagcccggatggaagaagaagcttcgttgtgagagggaggagcttcccaccatctacaagtgtccttaccagggctgcacggccgtgtaccgaggcgctgacggcatgaagaagcacatcaaggagcaccacgaggaggtccgggagcggccctgcccccaccctggctgcaacaaggttttcatgatcgaccgctacctgcagcgccacgtgaagctcatccacacagaggtgcggaactatatctgtgacgaatgtggacaaaccttcaagcagcggaagcaccttctcgtccaccaaatgcgacattcgggagccaagcctttgcagtgtgaggtctgtgggttccagtgcaggcagcgggcatccctcaagtaccacatgaccaaacacaaggctgagactgagctggactttgcctgtgaccagtgtggccggcggtttgagaaggcccacaacctcaatgtacacatgtccatggtgcacccgctgacacagacccaggacaaggccctgcccctggaggcggaaccaccacctgggccaccgagcccctctgtgaccacagagggccaggcggtgaagcccgaacccacc

SEQ ID NO: 6254 - DNA, 987 bp, Homo sapiens
  source 1..987: mol_type = genomic DNA
atgatgagtcatccgtgtgtgtctcttttgggcgttcctgttttaaatcctgccttggtccctcacctggcacaaggacaagtgctactggtgtcagacccatcgcccaacactgatcctgctaagtactctgaaagcacctccgcgacccgacaccagatgaagggggaagatgcccagccacaggagatggcgtccacaagcttcccaagggccagtggtcccagtcctgaattcagacagcacggggactctgacgggaagagagggagcccacagaatctgcccatagaacatcattttgcttgtaaagagtgtggggacacctttcggcttaaagtcctgcttgtccagcaccagagagtccacagtgaggagaagggctgggaatgtggcgactgcgggaaggtctttaggggggtggcggagtttaatgagcacaggaaaagccacgtagctgcggagccccagcccggccccagtagggccctggagaatgccgcggagaagagggagcagatggagagggaggcaaagcccttcgagtgcgaggagtgcggaaaacggtttaagaagaatgcaggcctgagtcagcatctgagggtccacagcagagagaagccctttgattgcgaggaatgcgggcggtcgttcaaagtcaacacccacctcttccgacatcagaaacttcacacttcggaaaagcctttcgcctgcaaggcgtgcagcagggatttcctggatcgccaggagcttctcaagcaccagcgcatgcacactggccacctgcccttcgactgcgacgactgcggcaagtccttccgaggggtcaacgggctggccgagcaccagcgcatccacagtggggccaagccatacgggtgtccccactgcggcaagctcttccgaaggagctcggagctcaccaagcaccggcggatccacacgggcgagaagccctacgcctgcggccttccgtgggccctc

SEQ ID NO: 6255 - DNA, 1959 bp, Homo sapiens
  source 1..1959: mol_type = genomic DNA
atggcctccaggcttccgacggcctggtcctgtgaaccagtgacctttgaagatgtaacactgggttttaccccggaagagtggggactgctggacctcaaacagaagtccctgtacagggaagtgatgctggagaactacaggaacctggtctcagtggaacatcagctttccaaaccagatgtggtatctcagttagaggaggcagaagatttctggccagtggagagaggaattcctcaagacaccattccagagtatcctgagctccagctggaccctaaattggatcctcttcctgctgagagtcccctaatgaacattgaggttgttgaggtcctcacactgaaccaggaggtggctggtccccggaatgcccagatccaggccctatatgctgaagatggaagcctgagtgcagatgcccccagtgagcaggtccaacagcagggcaagcatccaggtgaccctgaggccgcgcgccagaggttccggcagttccgttataaggacatgacaggtccccgggaggccctggaccagctccgagagctgtgtcaccagtggctacagcctaaggcacgctccaaggagcagatcctggagctgctggtgctggagcagttcctaggtgcactgcctgtgaagctccggacatgggtggaatcgcagcacccagagaactgccaagaggtggtggccctggtagagggtgtgacctggatgtctgaggaggaagtacttcctgcaggacaacctgccgagggcaccacctgctgcctcgaggtcactgcccagcaggaggagaagcaggaggatgcagccatctgcccagtgacagtgctccctgaggagccagtgaccttccaggatgtggctgtggacttcagccgggaggagtgggggctgctgggcccgacacagaggaccgagtaccgcgatgtgatgctggagacctttgggcacctggtctctgtggggtgggagactacactggaaaataaagagttagctccaaattctgacattcctgaggaagaaccagcccccagcctgaaagtacaagaatcctcaagggattgtgccttgtcctctacattagaagataccttgcagggtggggtccaggaagtccaagacacagtgttgaagcagatggagtctgctcaggaaaaagaccttcctcagaagaagcactttgacaaccgtgagtcccaggcaaacagtggtgctcttgacacaaaccaagtttcgctccagaaaattgacaaccctgagtcccaggcaaacagtggcgctcttgacacaaaccaagttttgctccacaaaattcctcctagaaaacgattgcgcaaacgtgactcacaagttaaaagtatgaaacataattcacgtgtaaaaattcatcagaagagctgtgaaaggcaaaaggccaaggaaggcaatggttgtaggaaaaccttcagtcggagtactaaacagattacgtttataagaattcacaaggggagccaagtttgccgatgcagtgaatgtggtaaaatattccggaacccaagatacttttctgtgcataagaaaatccataccggagagaggccctatgtgtgtcaagactgtgggaaaggatttgttcagagctcttccctcacacagcatcagagagttcattctggagagagaccatttgaatgtcaggagtgtgggaggaccttcaatgatcgctcagccatctcccagcacctgaggactcacactggcgctaagccctacaagtgtcaggactgtggaaaagccttccgccagagctcccacctcatcagacatcagaggactcacaccggggagcgcccatatgcatgcaacaaatgtggaaaggccttcacccagagctcacaccttattgggcaccagagaacccacaataggacaaagcgaaagaagaaacagcctacctca

SEQ ID NO: 6256 - DNA, 1644 bp, Homo sapiens
  source 1..1644: mol_type = genomic DNA
atgaacattgaggttgttgaggtcctcacactgaaccaggaggtggctggtccccggaatgcccagatccaggccctatatgctgaagatggaagcctgagtgcagatgcccccagtgagcaggtccaacagcagggcaagcatccaggtgaccctgaggccgcgcgccagaggttccggcagttccgttataaggacatgacaggtccccgggaggccctggaccagctccgagagctgtgtcaccagtggctacagcctaaggcacgctccaaggagcagatcctggagctgctggtgctggagcagttcctaggtgcactgcctgtgaagctccggacatgggtggaatcgcagcacccagagaactgccaagaggtggtggccctggtagagggtgtgacctggatgtctgaggaggaagtacttcctgcaggacaacctgccgagggcaccacctgctgcctcgaggtcactgcccagcaggaggagaagcaggaggatgcagccatctgcccagtgacagtgctccctgaggagccagtgaccttccaggatgtggctgtggacttcagccgggaggagtgggggctgctgggcccgacacagaggaccgagtaccgcgatgtgatgctggagacctttgggcacctggtctctgtggggtgggagactacactggaaaataaagagttagctccaaattctgacattcctgaggaagaaccagcccccagcctgaaagtacaagaatcctcaagggattgtgccttgtcctctacattagaagataccttgcagggtggggtccaggaagtccaagacacagtgttgaagcagatggagtctgctcaggaaaaagaccttcctcagaagaagcactttgacaaccgtgagtcccaggcaaacagtggtgctcttgacacaaaccaagtttcgctccagaaaattgacaaccctgagtcccaggcaaacagtggcgctcttgacacaaaccaagttttgctccacaaaattcctcctagaaaacgattgcgcaaacgtgactcacaagttaaaagtatgaaacataattcacgtgtaaaaattcatcagaagagctgtgaaaggcaaaaggccaaggaaggcaatggttgtaggaaaaccttcagtcggagtactaaacagattacgtttataagaattcacaaggggagccaagtttgccgatgcagtgaatgtggtaaaatattccggaacccaagatacttttctgtgcataagaaaatccataccggagagaggccctatgtgtgtcaagactgtgggaaaggatttgttcagagctcttccctcacacagcatcagagagttcattctggagagagaccatttgaatgtcaggagtgtgggaggaccttcaatgatcgctcagccatctcccagcacctgaggactcacactggcgctaagccctacaagtgtcaggactgtggaaaagccttccgccagagctcccacctcatcagacatcagaggactcacaccggggagcgcccatatgcatgcaacaaatgtggaaaggccttcacccagagctcacaccttattgggcaccagagaacccacaataggacaaagcgaaagaagaaacagcctacctca

SEQ ID NO: 6257 - DNA, 1833 bp, Homo sapiens
  source 1..1833: mol_type = genomic DNA
atgctggagaactacaggaacctggtctcagtggaacatcagctttccaaaccagatgtggtatctcagttagaggaggcagaagatttctggccagtggagagaggaattcctcaagacaccattccagagtatcctgagctccagctggaccctaaattggatcctcttcctgctgagagtcccctaatgaacattgaggttgttgaggtcctcacactgaaccaggaggtggctggtccccggaatgcccagatccaggccctatatgctgaagatggaagcctgagtgcagatgcccccagtgagcaggtccaacagcagggcaagcatccaggtgaccctgaggccgcgcgccagaggttccggcagttccgttataaggacatgacaggtccccgggaggccctggaccagctccgagagctgtgtcaccagtggctacagcctaaggcacgctccaaggagcagatcctggagctgctggtgctggagcagttcctaggtgcactgcctgtgaagctccggacatgggtggaatcgcagcacccagagaactgccaagaggtggtggccctggtagagggtgtgacctggatgtctgaggaggaagtacttcctgcaggacaacctgccgagggcaccacctgctgcctcgaggtcactgcccagcaggaggagaagcaggaggatgcagccatctgcccagtgacagtgctccctgaggagccagtgaccttccaggatgtggctgtggacttcagccgggaggagtgggggctgctgggcccgacacagaggaccgagtaccgcgatgtgatgctggagacctttgggcacctggtctctgtggggtgggagactacactggaaaataaagagttagctccaaattctgacattcctgaggaagaaccagcccccagcctgaaagtacaagaatcctcaagggattgtgccttgtcctctacattagaagataccttgcagggtggggtccaggaagtccaagacacagtgttgaagcagatggagtctgctcaggaaaaagaccttcctcagaagaagcactttgacaaccgtgagtcccaggcaaacagtggtgctcttgacacaaaccaagtttcgctccagaaaattgacaaccctgagtcccaggcaaacagtggcgctcttgacacaaaccaagttttgctccacaaaattcctcctagaaaacgattgcgcaaacgtgactcacaagttaaaagtatgaaacataattcacgtgtaaaaattcatcagaagagctgtgaaaggcaaaaggccaaggaaggcaatggttgtaggaaaaccttcagtcggagtactaaacagattacgtttataagaattcacaaggggagccaagtttgccgatgcagtgaatgtggtaaaatattccggaacccaagatacttttctgtgcataagaaaatccataccggagagaggccctatgtgtgtcaagactgtgggaaaggatttgttcagagctcttccctcacacagcatcagagagttcattctggagagagaccatttgaatgtcaggagtgtgggaggaccttcaatgatcgctcagccatctcccagcacctgaggactcacactggcgctaagccctacaagtgtcaggactgtggaaaagccttccgccagagctcccacctcatcagacatcagaggactcacaccggggagcgcccatatgcatgcaacaaatgtggaaaggccttcacccagagctcacaccttattgggcaccagagaacccacaataggacaaagcgaaagaagaaacagcctacctca

SEQ ID NO: 6258 - DNA, 1863 bp, Homo sapiens
  source 1..1863: mol_type = genomic DNA
atggcctccaggcttccgacggcctggtcctgtgaaccagtgacctttgaagatgtaacactgggttttaccccggaagagtggggactgctggacctcaaacagaagtccctgtacagggaagtgatgctggagaactacaggaacctggtctcagtggagtatcctgagctccagctggaccctaaattggatcctcttcctgctgagagtcccctaatgaacattgaggttgttgaggtcctcacactgaaccaggaggtggctggtccccggaatgcccagatccaggccctatatgctgaagatggaagcctgagtgcagatgcccccagtgagcaggtccaacagcagggcaagcatccaggtgaccctgaggccgcgcgccagaggttccggcagttccgttataaggacatgacaggtccccgggaggccctggaccagctccgagagctgtgtcaccagtggctacagcctaaggcacgctccaaggagcagatcctggagctgctggtgctggagcagttcctaggtgcactgcctgtgaagctccggacatgggtggaatcgcagcacccagagaactgccaagaggtggtggccctggtagagggtgtgacctggatgtctgaggaggaagtacttcctgcaggacaacctgccgagggcaccacctgctgcctcgaggtcactgcccagcaggaggagaagcaggaggatgcagccatctgcccagtgacagtgctccctgaggagccagtgaccttccaggatgtggctgtggacttcagccgggaggagtgggggctgctgggcccgacacagaggaccgagtaccgcgatgtgatgctggagacctttgggcacctggtctctgtggggtgggagactacactggaaaataaagagttagctccaaattctgacattcctgaggaagaaccagcccccagcctgaaagtacaagaatcctcaagggattgtgccttgtcctctacattagaagataccttgcagggtggggtccaggaagtccaagacacagtgttgaagcagatggagtctgctcaggaaaaagaccttcctcagaagaagcactttgacaaccgtgagtcccaggcaaacagtggtgctcttgacacaaaccaagtttcgctccagaaaattgacaaccctgagtcccaggcaaacagtggcgctcttgacacaaaccaagttttgctccacaaaattcctcctagaaaacgattgcgcaaacgtgactcacaagttaaaagtatgaaacataattcacgtgtaaaaattcatcagaagagctgtgaaaggcaaaaggccaaggaaggcaatggttgtaggaaaaccttcagtcggagtactaaacagattacgtttataagaattcacaaggggagccaagtttgccgatgcagtgaatgtggtaaaatattccggaacccaagatacttttctgtgcataagaaaatccataccggagagaggccctatgtgtgtcaagactgtgggaaaggatttgttcagagctcttccctcacacagcatcagagagttcattctggagagagaccatttgaatgtcaggagtgtgggaggaccttcaatgatcgctcagccatctcccagcacctgaggactcacactggcgctaagccctacaagtgtcaggactgtggaaaagccttccgccagagctcccacctcatcagacatcagaggactcacaccggggagcgcccatatgcatgcaacaaatgtggaaaggccttcacccagagctcacaccttattgggcaccagagaacccacaataggacaaagcgaaagaagaaacagcctacctca

SEQ ID NO: 6259 - DNA, 2409 bp, Homo sapiens
  source 1..2409: mol_type = genomic DNA
atggaaattccgaaactgctgccagcccgtggtacgctgcaaggcggcggtggtggcggtatcccagccggtggtggtcgtgttcatcgcggtccggatagcccagccggtcaagttccgacccgtcgtctgctgctgctgcgtggtccacaagatggcggtccgggccgtcgccgcgaagaagccagcaccgccagtcgtggtccgggtccaagtctgctggccccacgcaccgatcagccaagtggcggcggcggtggtggtggcgatgatttttttctcgttctcctggatccagttggcggtgatgttgaaactgctggttctggccaagctgctggtccggttctgcgtgaagaagctgaagaaggtccaggtctgcaaggtggtgaatctggtgctaacccggctggtccgaccgctctgggtccgcgttgtctctccgcggttcccactccggccccgatctccgcccccggccccgccgcggccttcgcgggcacagtcactatccacaaccaggacctgctgttgcgctttgagaacggcgtcctcaccctggccacgcccccaccacacgcctgggagccaggggccgctcctgcccagcagcccgggtgtctgatcgccccgcaagctgggttcccgcatgccgcgcacccgggtgactgcccagagctgccgccagacctcctgctagctgagccggccgaacccgcgccagctccggcgcctgaggaggaggcggagggcccggccgccgccctgggcccccgcggaccgctgggctccggcccaggcgtggtgctgtacttgtgccccgaggcgcagtgcgggcaaaccttcgccaagaagcaccagctgaaggtgcacctgctgacgcacagcagcagccagggccagaggcccttcaaatgccccctgggtggctgcggctggaccttcaccacctcttacaagctcaagaggcacctgcagtcgcacgacaaactgcggccctttggctgcccggcagagggctgtggcaagagcttcaccacagtgtacaacctcaaggcgcacatgaagggccatgagcaggagaactcattcaaatgcgaggtgtgcgaggagagcttccccacgcaggccaaactcagcgcccaccagcgcagccacttcgaaccggagaggccttaccagtgcgcgttttctggctgcaagaagacatttatcacagtgagtgctctgttttcccataaccgcgcccatttcagggaacaggaactgttttcctgctcttttcctggctgcagcaaacaatatgacaaggcttgtaggctgaaaattcacctgcggagtcacaccggcgagagacctttcctttgtgactttgatggctgtggctggaacttcactagcatgtccaaactcttaaggcacaaaagaaagcacgacgatgaccggaggttcatgtgccctgtggaaggctgtgggaaatctttcacgagggcggaacatctgaaaggccacagcataacccacctgggcacaaagcctttcgtgtgtcctgtggcaggctgctgtgccaggttctctgctcgcagtagcctctacattcactccaagaaacacctgcaggatgtggacacttggaaaagccgttgcccgatctcctcttgtaataaactcttcacatccaagcacagcatgaagacgcacatggttaaaaggcataaggtgggccaggatctcttagctcagctagaagcagcaaattctctcacacccagcagtgaacttaccagccagagacagaatgatctcagtgatgcagagatagtgtctctcttctctgatgtacctgacagtacttctgctgcattgctggacacagcattggtgaactctggaatcttgactattgatgtggcttctgtgagctcgactctggcagggcacctccctgctaataataataattccgtagggcaggctgtggaccctccgtccttgatggccaccagcgaccctcctcaaagtctggatacctctctcttttttggaacggcggccactggttttcagcagagctccttaaatatggatgaggtctcaagtgtaagtgtggggccattgggatctctggactctttggccatgaaaaactccagtccagagcctcaggctttgacacccagcagtaagctaacagtggacacagatgctctgactccttcgagcaccctttgtgaaaacagtgtctcagaactactgacaccaaccaaagcggagtggaacgtacatcctgactctgacttctttggacaggagggagaaacccagtttggattccccaatgcagcaggaaaccatggttctcagaaagaaacagatcttatcactgtgactggcagctcatttttggta

SEQ ID NO: 6260 - DNA, 897 bp, Homo sapiens
  source 1..897: mol_type = genomic DNA
atgatggcgtatatgaacccggggccccactattctgtcaacgccttggccctaagtggccccagtgtggatctgatgcaccaggctgtgccctacccaagcgcccccaggaagcagcggcgggagcgcaccaccttcacccggagccaactggaggagctggaggcactgtttgccaagacccagtacccagacgtctatgcccgtgaggaggtggctctgaagatcaatctgcctgagtccagggttcaggtttggttcaagaaccggagggctaaatgcaggcagcagcgacagcagcagaaacagcagcagcagcccccagggggccaggccaaggcccggcctgccaagaggaaggcgggcacgtccccaagaccctccacagatgtgtgtccagaccctctgggcatctcagattcctacagtccccctctgcccggcccctcaggctccccaaccacggcagtggccactgtgtccatctggagcccagcctcagagtcccctttgcctgaggcgcagcgggctgggctggtggcctcagggccgtctctgacctccgccccctatgccatgacctacgccccggcctccgctttctgctcttccccctccgcctatgggtctccgagctcctatttcagcggcctagacccctacctttctcccatggtgccccagctagggggcccggctcttagccccctctctggcccctccgtgggaccttccctggcccagtcccccacctccctatcaggccagagctatggcgcctacagccccgtggatagcttggaattcaaggaccccacgggcacctggaaattcacctacaatcccatggaccctctggactacaaggatcagagtgcctggaagtttcagatcttg

SEQ ID NO: 6261 - DNA, 2397 bp, Homo sapiens
  source 1..2397: mol_type = genomic DNA
atggaaatcccgaagctgctcccggctcgcgggacactacagggcggcggcggcggcggtatccccgcgggtggcggccgagtccaccgaggccctgactcgccggctggccaggtccccacgcgccgcctcctgctgccccggggcccccaagatggcgggcccgggcggcggcgcgaggaggccagcacggcatcacggggccctggcccaagcctgttcgcgccgaggccccatcaacctagcggcggcggcgacgacttcttcctggtgctgcttgacccggtgggtggcgacgtggagaccgcgggctccggtcaggccgcagggcctgtgttgagggaggaggccaaggcgggcccggggctccagggggacgagagcggcgcgaaccccgcgggctgctctgcgcagggcccccactgcctgtccgcggttcccactccggccccgatctccgcccccggccccgccgcggccttcgcgggcacagtcactatccacaaccaggacctgctgttgcgctttgagaacggcgtcctcaccctggccacgcccccaccacacgcctgggagccaggggccgctcctgcccagcagcccaggtgtctgatcgccccccaagctgggttcccgcaagccgcgcacccgggtgactgcccagagctgcggtccgacctcctgctagccgagcccgcagaacccgcgcctgctccggcgccccaggaggaggcggagggcctggccgccgccctgggcccccgcggactgctgggctctggtccaggcgtggtgctgtacctgtgccccgaggcgctgtgcgggcaaaccttcgccaagaagcaccagctgaagatgcacctgctgacgcacagcagcagccagggccagaggcccttcaaatgccccctgggtggctgcggctggaccttcaccacctcttacaagctcaagaggcacctgcagtcgcacgataaactgcggcccttcggctgccctgcggagggctgtggcaagagcttcaccaccgtgtacaacctcaaggcgcacatgaagggccatgagcaggagaactcgttcaaatgtgaggtgtgcgaggagagcttccccacgcaggccaaactcggcgcccaccagcgcagccacttcgaacccgagaggccttaccagtgcgcgttttctggctgcaagaagacatttatcacagtgagtgctctgttttcccataaccgcgcccatttcagggaacaggaactgttttcctgctctttccctggctgcagcaagcaatatgacaaggcttgtaggctgaaaattcacctgcggagtcacaccggcgagagacctttcctttgtgactttgatggctgtggctggaacttcaccagcatgtccaaactcttaaggcacaaaaggaagcacgacgatgaccggaggttcatgtgccctgtggaaggctgtgggaaatctttcacgagggccgaacatctgaaaggccacagcattacccacctgggcacaaagcctttcgtgtgtcctgtggcaggctgctgtgccaggttctctgctcgcagtagcctctacattcactccaagaaacacctgcaggatgtggacacttggaaaagccgttgcccgatctcctcttgtaataaactcttcacatccaagcacagcatgaagacgcacatggttaaaaggcataaggtgggccaggatctcttagctcagctagaagcagcaaattctcttacacccagcagtgaacttaccagccagagacagaatgatctcagtgatgcagagatagtgtctctcttctctgatgtacctgacagtacttctgctgcattgctggacacagcattggtgaactctggaatcttgactattgatgtggcttctgtgagctcgactctggcagggcacctccctgctaataataataattccgtagggcaggctgtggaccctccgtccttgatggccaccagcgaccctcctcaaagtctggatacctctctcttttttggaacggcggccactggttttcagcagagctccttaaatatggatgaggtctcaagtgtaagtgtggggccattgggatctctggactctttggccatgaaaaactccagtccagagcctcaggctttgacacccagcagtaagctaacagtggacacagatactctgactccttcgagcaccctttgtgaaaacagtgtctcagaactactgacaccagccaaagcggagtggagcgtacatcctaactctgacttctttggacaggagggagaaacccagtttggattccccaatgcagcaggaaaccatggttctcagaaagaaagaaatcttatcactgtgactggcagctcatttttggta

SEQ ID NO: 6262 - DNA, 1902 bp, Homo sapiens
  source 1..1902: mol_type = genomic DNA
atggcgacttcgaacaatccgcggaaattcagcgagaagatcgcgctgcacaatcagaagcaggcggaggagacggcggccttcgaggaggtcatgaaggacctgagcctgacgcgggccgcgcggctccagctccagaaatcccagtacctgcaactgggccccagccgaggccagtactatggcgggtccctgcccaacgtgaaccagatcgggagtggcaccatggacctgcccttccagacccccttccaatcctcgggcctggacaccagccggaccacccggcaccatgggctggtggacagggtgtaccgggagcgtggccggctcggctccccacaccgccggcccctgtcagtggacaaacacggacggcaggccgacagctgcccctatggcaccatgtacctctcaccacccgcggacaccagctggagaaggaccaattctgactccgccctgcaccagagcacaatgacgcccacgcagccagaatcctttagcagtgggtcccaggacgtgcaccagaaaagagtcttactgttaacagtcccaggaatggaagagaccacatcagaggcagacaaaaacctttccaagcaagcatgggacaccaagaagacggggtccaggcccaagtcctgtgaggtccccggaatcaacatcttcccgtctgccgaccaggaaaacactacagccctgatccccgccacccacaacacaggggggtccctgcccgacctgaccaacatccacttcccctccccgctcccgaccccgctggaccccgaggagcccaccttccctgcactgagcagctccagcagcaccggcaacctcgcggccaacctgacgcacctgggcatcggtggcgccggccagggaatgagcacacctggctcctctccacagcaccgcccagctggcgtcagccccctgtccctgagcacagaggcaaggcgtcagcaggcatcgcccaccctgtccccgctgtcacccatcactcaggctgtagccatggacgccctgtctctggagcagcagctgccctacgccttcttcacccaggcgggctcccagcagccaccgccgcagccccagcccccgccgcctcctccacccgcgtcccagcagccaccacccccgccacccccacaggcgcccgtccgcctgccccctggtggccccctgttgcccagcgccagcctgactcgtgggccacagccgcccccgcttgcagtcacggtaccgtcctctctcccccagtcccccccagagaaccctggccagccatcgatggggatcgacatcgcctcggcgccggctctgcagcagtaccgcactagcgccggctccccggccaaccagtctcccacctcgccagtctccaatcaaggcttctccccagggagctccccgcaacacacttccaccctgggcagcgtgtttggggacgcgtactatgagcagcagatggcggccaggcaggccaatgctctgtcccaccagctggagcagttcaacatgatggagaacgccatcagctccagcagcctgtacagcccgggctccacactcaactactcgcaggcggccatgatgggcctcacgggcagccacgggagcctgccggactcgcagcaactgggatacgccagccacagtggcatccccaacatcatcctcacagtgacaggagagtccccccccagcctctctaaagaactgaccagctctctggccggggtcggcgacgtcagcttcgactccgacagccagtttcccctggacgaactcaagatcgaccccctgaccctcgacggactgcacatgctcaacgaccccgacatggttctggccgacccagccaccgaggacaccttccggatggaccgcctg

SEQ ID NO: 6263 - DNA, 1950 bp, Homo sapiens
  source 1..1950: mol_type = genomic DNA
atggcgacttcgaacaatccgcggaaattcagcgagaagatcgcgctgcacaatcagaagcaggcggaggagacggcggccttcgaggaggtcatgaaggacctgagcctgacgcgggccgcgcggctccagctccagaaatcccagtacctgcaactgggccccagccgaggccagtactatggcgggtccctgcccaacgtgaaccagatcgggagtggcaccatggacctgcccttccagcccagcggatttctgggggaggccctggcagcggctcctgtctctctgacccccttccaatcctcgggcctggacaccagccggaccacccggcaccatgggctggtggacagggtgtaccgggagcgtggccggctcggctccccacaccgccggcccctgtcagtggacaaacacggacggcaggccgacagctgcccctatggcaccatgtacctctcaccacccgcggacaccagctggagaaggaccaattctgactccgccctgcaccagagcacaatgacgcccacgcagccagaatcctttagcagtgggtcccaggacgtgcaccagaaaagagtcttactgttaacagtcccaggaatggaagagaccacatcagaggcagacaaaaacctttccaagcaagcatgggacaccaagaagacggggtccaggcccaagtcctgtgaggtccccggaatcaacatcttcccgtctgccgaccaggaaaacactacagccctgatccccgccacccacaacacaggggggtccctgcccgacctgaccaacatccacttcccctccccgctcccgaccccgctggaccccgaggagcccaccttccctgcactgagcagctccagcagcaccggcaacctcgcggccaacctgacgcacctgggcatcggtggcgccggccagggaatgagcacacctggctcctctccacagcaccgcccagctggcgtcagccccctgtccctgagcacagaggcaaggcgtcagcaggcatcgcccaccctgtccccgctgtcacccatcactcaggctgtagccatggacgccctgtctctggagcagcagctgccctacgccttcttcacccaggcgggctcccagcagccaccgccgcagccccagcccccgccgcctcctccacccgcgtcccagcagccaccacccccgccacccccacaggcgcccgtccgcctgccccctggtggccccctgttgcccagcgccagcctgactcgtgggccacagccgcccccgcttgcagtcacggtaccgtcctctctcccccagtcccccccagagaaccctggccagccatcgatggggatcgacatcgcctcggcgccggctctgcagcagtaccgcactagcgccggctccccggccaaccagtctcccacctcgccagtctccaatcaaggcttctccccagggagctccccgcaacacacttccaccctgggcagcgtgtttggggacgcgtactatgagcagcagatggcggccaggcaggccaatgctctgtcccaccagctggagcagttcaacatgatggagaacgccatcagctccagcagcctgtacagcccgggctccacactcaactactcgcaggcggccatgatgggcctcacgggcagccacgggagcctgccggactcgcagcaactgggatacgccagccacagtggcatccccaacatcatcctcacagtgacaggagagtccccccccagcctctctaaagaactgaccagctctctggccggggtcggcgacgtcagcttcgactccgacagccagtttcccctggacgaactcaagatcgaccccctgaccctcgacggactgcacatgctcaacgaccccgacatggttctggccgacccagccaccgaggacaccttccggatggaccgcctg

SEQ ID NO: 6264 - DNA, 1854 bp, Homo sapiens
  source 1..1854: mol_type = genomic DNA
atggccgcctcgccgggctcgggcagcgccaacccgcggaagttcagtgagaagatcgcgctgcacacgcagagacaggccgaggagacgcgggccttcgagcagctcatgaccgacctcaccctgtcgcgggttcaatttcagaagcttcagcaactgcgccttacacagtaccatggaggatccttaccaaatgtgagccagctgcggagcagtgcgtcagagtttcagccgtcatttcaccaagctgataatgttcggggaacccgccatcacgggctggtggagaggccatccaggaaccgcttccaccccctccaccgaaggtctggggacaagccagggcgacaatttgatggtagtgcttttggagccaattattcctcacagcctctggatgagagttggccaaggcagcagcctccttggaaagacgaaaagcatcctgggttcaggctgacatctgcacttaacaggaccaattctgattctgctcttcacacgagtgctctgagtaccaagccccaggacccctatggaggagggggccagtcggcctggcctgccccatacatgggtttctgtgatggtgagaataatggacatggggaagtagcatctttccctggcccattgaaagaagagaatctgttaaatgttccgaagccactgccaaaacaactgtgggagaccaaggagattcagtccctgtcaggacgccctcgatcctgtgatgttggaggtggcaatgcttttccacataatggtcaaaacctaggcctctcacccttcttggggaccttgaacactggagggtcattgccagatctaaccaacctccactactcgacacccctgccagcctccctggacaccaccgaccaccactttggcagtatgagtgtggggaatagtgtgaacaacatcccagctgctatgacccacctgggtataagaagctcctctggtctccagagttctcggagtaacccctccatccaagccacgctcaataagactgtgctttcctcttccttaaataaccacccacagacatctgttcccaacgcatctgctcttcacccttcgctccgtctgttttcccttagcaacccatctctttccaccacaaacctgagcggcccgtctcggcgtcggcagcctcccgtcagccctctcacgctttctcctggccctgaagcacatcaaggtttcagcagacagctgtcttcaaccagcccactggccccatatcctacctcccagatggtgtcctcagaccgaagccaactttcctttctgcccacagaagctcaagcccaggtgtcgccgccacccccttaccctgcaccccaggagctcacccagcccctcctgcagcagccccgcgcccctgaggcccctgcccagcagccccaggcagcctcctcactgccacagtcagactttcagcttctcccggcccagggctcatctttgaccaacttcttcccagatgtgggttttgaccagcagtccatgaggccaggccctgcctttcctcaacaggtgcctctggtgcaacaaggttcccgagaactgcaggactcttttcatttgagaccaagcccgtattccaactgcgggagtctcccgaacaccatcctgccagactccagcaccagcctgttcaaagacctcaacagtgcgctggcaggcctgcctgaggtcagcctgaacgtggacactccatttccactggaagaggagctgcagattgaacccctgagcctggacggactcaacatgttaagtgactccagcatgggcctgctggacccctctgttgaagagacgtttcgagctgacagactg

SEQ ID NO: 6265 - DNA, 1857 bp, Homo sapiens
  source 1..1857: mol_type = genomic DNA
atggccgcctcgccgggctcgggcagcgccaacccgcggaagttcagtgagaagatcgcgctgcacacgcagagacaggccgaggagacgcgggccttcgagcagctcatgaccgacctcaccctgtcgcgggttcaatttcagaagcttcagcaactgcgccttacacagtaccatggaggatccttaccaaatgtgagccagctgcggagcagtgcgtcagagtttcagccgtcatttcaccaagctgataatgttcggggaacccgccatcacgggctggtggagaggccatccaggaaccgcttccaccccctccaccgaaggtctggggacaagccagggcgacaatttgatggtagtgcttttggagccaattattcctcacagcctctggatgagagttggccaaggcagcagcctccttggaaagacgaaaagcatcctgggttcaggctgacatctgcacttaacaggaccaattctgattctgctcttcacacgagtgctctgagtaccaagccccaggacccctatggaggagggggccagtcggcctggcctgccccatacatgggtttctgtgatggtgagaataatggacatggggaagtagcatctttccctggcccattgaaagaagagaatctgttaaatgttccgaagccactgccaaaacaactgtgggagaccaaggagattcagtccctgtcaggacgccctcgatcctgtgatgttggaggtggcaatgcttttccacataatggtcaaaacctaggcctctcacccttcttggggaccttgaacactggagggtcattgccagatctaaccaacctccactactcgacacccctgccagcctccctggacaccaccgaccaccactttggcagtatgagtgtggggaatagtgtgaacaacatcccagctgctatgacccacctgggtataagaagctcctctggtctccagagttctcggagtaacccctccatccaagccacgctcaataagactgtgctttcctcttccttaaataaccacccacagacatctgttcccaacgcatctgctcttcacccttcgctccgtctgttttcccttagcaacccatctctttccaccacaaacctgagcggcccgtctcggcgtcggcagcctcccgtcagccctctcacgctttctcctggccctgaagcacatcaaggtttcagcagacagctgtcttcaaccagcccactggccccatatcctacctcccagatggtgtcctcagaccgaagccaactttcctttctgcccacagaagctcaagcccaggtgtcgccgccacccccttaccctgcaccccaggagctcacccagcccctcctgcagcagccccgcgcccctgaggcccctgcccagcagccccaggcagcctcctcactgccacagtcagactttcagcttctcccggcccagggctcatctttgaccaacttcttcccagatgtgggttttgaccagcagtccatgaggccaggccctgcctttcctcaacaggtgcctctggtgcaacaaggttcccgagaactgcaggactcttttcatttgagaccaagcccgtattccaactgcgggagtctcccgaacaccatcctgccagaagactccagcaccagcctgttcaaagacctcaacagtgcgctggcaggcctgcctgaggtcagcctgaacgtggacactccatttccactggaagaggagctgcagattgaacccctgagcctggacggactcaacatgttaagtgactccagcatgggcctgctggacccctctgttgaagagacgtttcgagctgacagactg

SEQ ID NO: 6266 - DNA, 3048 bp, Homo sapiens
  source 1..3048: mol_type = genomic DNA
atggtgctgcccacctgccccatggcggagttcgcgctgccgcggcacagcgcggtcatggagcgccttcgccggcgcatcgagctgtgccggcgccaccacagcacctgcgaggcccgctacgaggccgtgtcgcccgagcgcctggagctggagcgccaacacaccttcgccctgcaccagcgctgcatccaggccaaggccaagcgcgccgggaagcacaggcagccgcccgccgccacggccccggcgcccgccgccccggccccgcgcctggacgccgctgacggccccgagcacggccgcccggccacgcatcttcatgatacagttaagaggaatcttgacagcgccacttcccctcagaatggcgatcaacagaatggctacggggacctctttcctgggcataagaagactcgccgggaggcccctctgggagttgccatctcttccaatggactgcctccagcctcccccctcggtcagtctgacaagccttctggagccgacgccctgcagtccagtgggaagcactctctggggctagactctctcaacaaaaagcgtctggctgactccagccttcacttgaatggaggcagtaaccccagtgagtcatttcctctgagcctgaataaagaactgaagcaggagcctgtcgaagacctgccttgcatgatcactgggactgtcggctccatatcgcaaagcaacctcatgccagacctcaaccttaacgagcaggagtggaaggagctcatcgaggagctgaacaggtcggtgcccgatgaagacatgaaggacctgtttaatgaggacttcgaggagaagaaggacccagagtcttctggctctgccacacaaacccccttggcacaggacattaatattaagacggaattctctccagcagcctttgagcaagaacagttaggctctccacaagtgagggccgggtctgcagggcagacctttctggggccttcctctgcccctgtgagtacagattcccccagcctagggggctcccaaaccttattccacacctctggtcagccccgggcggacaatcccagtccaaacctgatgccggcatcagcccaggcccagaacgcacaaagagcccttgcaggtgtggtattgcccagtcagggcccaggaggggcctcagagctgtcctctgcccaccagctccagcagatcgctgccaagcagaagcgcgagcagatgctccagaacccacagcaggccaccccggcaccagccccgggccagatgtccacatggcagcagacggggccctcccacagttccttagatgtcccttaccccatggagaagcctgccagcccttccagctacaagcaagacttcactaactccaaactgctcatgatgcctagtgtgaataagagttcccctcggcccggaggcccctacctccagcccagccatgtgaacctgctgagtcaccagccaccgagtaacttgaatcagaactccgcgaataaccaggggtctgtgctggactacggcaatacaaaacccctttctcattacaaagcggactgtgggcaaggcagcccggggtctggccagagcaagccagccctgatggcttatcttccccagcagctgtcccatataagtcacgagcagaactccctgtttctgatgaagccaaagccaggaaatatgcctttccgatcactggttccacctggccaggagcagaacccttccagtgtccctgtgcaagcccaggctaccagtgttgggacccagccgcctgccgtgtccgtggccagctcccacaacagctccccctatctcagcagccagcaacaggccgctgtaatgaagcagcatcagttgcttttggaccaacagaaacaaagggagcagcagcaaaagcatttacagcaacagcagttccttcagaggcaacagcaccttctcgcggaacaggagaagcaacagtttcagcgccatctgacccgcccaccaccccagtaccaagacccgacacaaggcagcttcccacagcaggttggacagttcacagggtcctctgctgccgtgcccggcatgaacaccttgggtccatccaactccagctgtcctcgagtgttccctcaggctgggaatctgatgccaatgggccctggacatgcttcagtttcctctctccccacaaactcaggccaacaggaccggggtgtggctcagttccctggctcccaaaacatgcctcagagcagcctctatggcatggcttctggcataacccagatagttgcccagcccccgccacaggccaccaatggacatgcccacattccacggcagaccaacgtgggccagaacacctccgtctcagctgcctatgggcagaactctctgggaagctctggcctctcccagcagcacaataaggggaccctgaaccctggtttaacaaagccaccggtcccaagggtgtcaccagccatgggaggccagaattcctcctggcagcatcagggaatgccgaacctcagtggccagaccccagggaacagcaacgtgagtcccttcactgcagcctccagtttccacatgcagcagcaggcccacctgaaaatgtctagcccgcaattctcccaggcagtgcccaacaggcccatggctcccatgagctcagcagctgccgtggggtccttgctacccccagtgagtgcacagcagaggaccagcgcccctgccccagcaccacccccaacagcccctcagcagggcttgcctggcctgagcccagcagggcctgagctgggggccttcagccagagccctgcctcacagatgggcggtcgggcggggctgcactgcacccaggcctaccctgtgcggaccgcgggccaggagctgccttttgcctatagcgggcagccaggtggcagtgggctctctagtgtggctggacacaccgatctgatcgactccctgctgaagaacaggacttcagaggagtggatgagtgatttggacgacctgttagggtctcag

SEQ ID NO: 6267 - DNA, 1146 bp, Homo sapiens
  source 1..1146: mol_type = genomic DNA
atgaggaaactatttgagaaatatggaaaggcaggcgaagtcttcattcataaggataaaggatttggctttatccgcttggaaacccgaaccctagcggagattgccaaagtggagctggacaatatgccactccgtggaaagcagctgcgtgtgcgctttgcctgccatagtgcatcccttacagttcgaaaccttcctcagtatgtgtccaacgaactgctggaagaagccttttctgtgtttggccaggtagagagggctgtagtcattgtggatgatcgaggaaggccctcaggaaaaggcattgttgagttctcagggaagccagctgctcggaaagctctggacagatgcagtgaaggctccttcctgctaaccacatttcctcgtcctgtgactgtggagcccatggaccagttagatgatgaagagggacttccagagaagctggttataaaaaaccagcaatttcacaaggaacgagagcagccacccagatttgcacagcctggctcctttgagtatgaatatgccatgcgctggaaggcactcattgagatggagaagcagcagcaggaccaagtggaccgcaacatcaaggaggctcgtgagaagctggagatggagatggaagctgcacgccatgagcaccaggtcatgctaatgagacaggatttgatgaggcgccaagaagaacttcggaggatggaagagctgcacaaccaagaggtgcaaaaacgaaagcaactggagctcaggcaggaggaagagcgcaggcgccgtgaagaagagatgcggcggcagcaagaagaaatgatgcggcgacagcaggaaggattcaagggaaccttccctgatgcgagagagcaggagattcggatgggtcagatggctatgggaggtgctatgggcataaacaacagaggtgccatgccccctgctcctgtgccagctggtaccccagctcctccaggacctgccactatgatgccggatggaactttgggattgaccccaccaacaactgaacgctttggtcaggctgctacaatggaaggaattggggcaattggtggaactcctcctgcattcaaccgtgcagctcctggagctgaatttgccccaaacaaacgtcgccgatac

SEQ ID NO: 6268 - DNA, 1413 bp, Homo sapiens
  source 1..1413: mol_type = genomic DNA
atgcagagtaataaaacttttaacttggagaagcaaaaccatactccaagaaagcatcatcaacatcaccaccagcagcagcaccaccagcagcaacagcagcagccgccaccaccgccaatacctgcaaatgggcaacaggccagcagccaaaatgaaggcttgactattgacctgaagaattttagaaaaccaggagagaagaccttcacccaacgaagccgtctttttgtgggaaatcttcctcccgacatcactgaggaagaaatgaggaaactatttgagaaatatggaaaggcaggcgaagtcttcattcataaggataaaggatttggctttatccgcttggaaacccgaaccctagcggagattgccaaagtggagctggacaatatgccactccgtggaaagcagctgcgtgtgcgctttgcctgccatagtgcatcccttacagttcgaaaccttcctcagtatgtgtccaacgaactgctggaagaagccttttctgtgtttggccaggtagagagggctgtagtcattgtggatgatcgaggaaggccctcaggaaaaggcattgttgagttctcagggaagccagctgctcggaaagctctggacagatgcagtgaaggctccttcctgctaaccacatttcctcgtcctgtgactgtggagcccatggaccagttagatgatgaagagggacttccagagaagctggttataaaaaaccagcaatttcacaaggaacgagagcagccacccagatttgcacagcctggctcctttgagtatgaatatgccatgcgctggaaggcactcattgagatggagaagcagcagcaggaccaagtggaccgcaacatcaaggaggctcgtgagaagctggagatggagatggaagctgcacgccatgagcaccaggtcatgctaatgagacaggatttgatgaggcgccaagaagaacttcggaggatggaagagctgcacaaccaagaggtgcaaaaacgaaagcaactggagctcaggcaggaggaagagcgcaggcgccgtgaagaagagatgcggcggcagcaagaagaaatgatgcggcgacagcaggaaggattcaagggaaccttccctgatgcgagagagcaggagattcggatgggtcagatggctatgggaggtgctatgggcataaacaacagaggtgccatgccccctgctcctgtgccagctggtaccccagctcctccaggacctgccactatgatgccggatggaactttgggattgaccccaccaacaactgaacgctttggtcaggctgctacaatggaaggaattggggcaattggtggaactcctcctgcattcaaccgtgcagctcctggagctgaatttgccccaaacaaacgtcgccgatac

SEQ ID NO: 6269 - DNA, 1698 bp, Homo sapiens
  source 1..1698: mol_type = genomic DNA
atgccaaggggattcctggtgaagcgaactaaacggacaggcggcttgtaccgagttcgccttgcggagcgtgtcttccctctgctggggccccagggggcgccgcccttcttggaggaggctcccagcgcctccttgcccggcgcggagcgggcgacaccccccacccgagaggaaccaggaaaggggttgacggcggaggcggcccgggaacagtcggggtcgccatgtcgggcggctggggtgagcccggggacgggcgggcgggaaggcgcggagtggcgggcgggtggcagggaaggtcccgggcccagccccagccccagccccagtccagcgaagccggcaggcgcagagctgcgtcgggcgttcctggagcgctgcctcagctcgcccgtctccgccgagtctttccccgggggcgccgccgccgtggccgctttctcctgctccgtggcgccagcagccgcaccgaccccgggggagcagtttctgctgccgcttcgggcgccgttcccagagcccgcgcttcagccggaccctgcgcccctctcggccgcccttcagagtctgaagcgggcggccggcggcgagcgccgcggcaaggcacccacggactgcgcgtctggacccgcggccgcgggaatcaagaagccaaaggccatgaggaagttgagctttgccgatgaggtgaccacatcccctgtcctgggcctgaagatcaaggaggaggagcccggagcgccgtcccggggcttggggggcagccgcacgccactgggggagttcatctgccagctgtgcaaggagcagtacgcagaccccttcgcgctggcccagcaccgctgctcccgcatcgtgcgcgtagagtaccgctgccctgagtgcgacaaggtgttcagctgtcctgcgaacctggcctcccatcgccgctggcataagccgcgtcctgcggctgcaaacgccgccacagtctcctccgccgacgggaagccgccttcttcgtcgtcttcgtcctcccgggactccggggccattgcatcttttctggcggagggaaaggagaacagccgaatagagcggactgcggatcagcacccgcaggccagggacagctccggggcggatcagcacccggacagcgccccgaggcagggcctccaggtgctgacgcatccagagccaccgctgcctcagggcccctacacggagggggtgttggggcgccgggtacctgtgccgggcagtaccagtggtggcaggggatccgagattttcgtgtgcccatattgccacaaaaagtttcgtcgccaagcctatctgcgcaagcacctgagcactcacgaggcgggctcggcccgtgcgctagcgccgggctttggctccgaacgcggtgccccacttgccttcgcttgcccattgtgcggagcgcacttccctacagcagatatcagggagaagcaccggctgtggcatgctgtccgcgaggagctgctcctgcccgctctggcgggggctcctcccgaaacgtcgggccctagcgggccatctgacgggagtgcccagcaaattttctcgtgcaagcactgcccgtccactttttttagctctccagggctgacccggcacatcaataagtgccacccctcagaaagccggcaagtgctgctgctgcagatgccactgcggcctggctgc

SEQ ID NO: 6270 - DNA, 1707 bp, Homo sapiens
  source 1..1707: mol_type = genomic DNA
atgtccaaggatttggtgacatttggggatgtggctgtaaatttctctcaagaggaatgggaatggctgaaccctgctcagaggaatttgtacaggaaagtgatgttggagaactacaggagcttggtatcattgggagtttctgtttctaagccagatgtgatctcattattggagcaaggaaaagagccctggatggtgaagaaggagggaacaagaggcccatgccctgattgggagtatgtatttaaaaacagtgaattttcatcaaagcaagagacatatgaagaatcatccaaagttgtgacagtgggagcaagacatcttagttatagccttgactatcccagtttgagagaagactgtcaaagtgaggactggtataagaaccagctgggaagtcaagaggtacatcttagtcaattaatcatcactcataaagaaatccttccagaagttcaaaataaagaatataacaaatcttggcaaacattccaccaggatacaatctttgatatacaacagagttttcccaccaaagaaaaagcacataagcatgaaccacaaaagaaaagttaccgaaaaaaatctgttgaaatgaaacataggaaagtctatgtagaaaagaaacttttgaaatgtaatgattgtgagaaagtcttcaaccagagctcatcccttactcttcatcagagaattcatactggagagaaaccctatgcatgtgttgaatgtgggaaaacgttcagccagagtgcaaacttggcgcaacataagagaatacatactggagagaaaccctatgaatgtaaagaatgtaggaaagccttcagccagaatgcacacctggcccaacatcagagagttcatactggagagaaaccttatcagtgtaaagaatgtaaaaaagccttcagccagattgcacacctgactcagcatcagagagttcatactggagagagacctttcgaatgtattgaatgtggaaaggcctttagtaatggttcatttcttgctcagcatcagagaattcatacaggagagaaaccttatgtgtgtaatgtgtgtgggaaagcctttagccatcgtggatacctaattgtacatcagagaattcatactggagagagaccctacgaatgtaaggaatgtaggaaagccttcagccagtatgcacaccttgctcaacatcagagagttcatactggagaaaaaccttatgaatgtaaagtatgtaggaaagccttcagccaaattgcataccttgatcaacatcagagggttcatactggagagaaaccctatgaatgtattgaatgtgggaaggcctttagcaatagttcatcacttgcacaacatcagagaagtcatactggagaaaaaccctatatgtgtaaggaatgtaggaaaacatttagccagaatgcaggccttgctcaacatcagagaattcatactggagagaaaccttatgaatgtaatgtttgtgggaaagcatttagctatagtggatctcttactctacatcagagaattcatactggagaaagaccctatgaatgtaaagattgcaggaaatctttcaggcagcgtgcacatcttgctcatcatgagagaattcatactatggagtcattcttgactctttcctctccctcaccctccacatcaaatcagttgccaagacctgtaggtttcatctcc

SEQ ID NO: 6271 - DNA, 1530 bp, Homo sapiens
  source 1..1530: mol_type = genomic DNA
atgccccgcggcttcctggtgaagcgcagcaagaagtccacgcccgtttcctaccgggtccgcggcggcgaggacggcgaccgcgcactgctgctctcgcccagctgcgggggcgcccgcgccgagcccccggcgccgagcccggtccccgggccgctgccgccgccgccgcccgcggagcgcgcccatgcagcgctcgccgccgcgcttgcctgcgcgcctgggccgcagccacccccgcagggcccgcgggccgcgcacttcggcaaccccgaggctgcgcaccccgcgccgctctacagtcccacgcggcccgtgagccgcgagcacgagaagcacaagtacttcgaacgcagcttcaacctgggctcgccggtctcggccgagtccttccccacgcccgccgcgctgctcggagggggcggcggcggcggcgcgagcggagctggcggaggcggcacctgcggcggcgacccgctgctcttcgcgcccgccgagctcaagatgggcacggcgttctcggctggcgccgaggcggcccgcggcccgggccccggccccccactgccccctgccgccgccctgcggcccccgggaaagcggcccccgccccctaccgccgcggagccgcccgccaaggcagtcaaggccccgggcgccaagaagcccaaggccatccgcaagctgcacttcgaggacgaggtgaccacgtcgcccgtgctggggctcaagatcaaggagggcccggtggaggcgccgcggggccgcgcggggggcgcggcgcggccgctgggcgagttcatctgccagctgtgcaaggaggagtacgccgacccgttcgcgctggcgcagcacaaatgctcgcgcatcgtgcgtgtggagtaccgctgtcccgagtgcgccaaggtcttcagctgcccggccaacctggcctcgcaccgccgctggcacaaaccgcggcccgcgcccgccgccgcccgcgcgccggagccagaagcagcagccagggctgaggcgcgggaggcacccggcggcggcagcgaccgggacacgccgagccccggcggcgtgtccgagtcgggctccgaggacgggctctacgagtgccatcactgcgccaagaagttccgccgccaggcctacctacgcaagcacctgctggcgcaccaccaggcgctgcaggccaagggcgcgccgctagcgcccccggccgaggacctactggccttgtaccccgggcccgacgagaaggcgccccaggaggcggccggcgacggcgagggggccggcgtgctgggcctgagtgcgtccgccgagtgccacctgtgcccagtgtgcggagagtcgttcgccagcaagggcgctcaggagcgccacctgcgcctgctgcacgccgcccaggtgttcccctgcaagtactgcccggccaccttctacagctcgcccggccttacgcggcacatcaacaagtgccacccatccgaaaacagacaggtgatcctcctgcaggtgcccgtgcgcccggcctgc

SEQ ID NO: 6272 - DNA, 1215 bp, Homo sapiens
  source 1..1215: mol_type = genomic DNA
atggcaaaatatgtcagtctcactgaagctaacgaagaactcaaggtcttaatggacgagaaccagaccagccgccccgtggccgttcacacctccaccgtgaacccgctcgggaagcagctcttgccgaaaacctttggacagtccagtgtcaacattgaccagcaagtggtaattggtatgcctcagagaccagcagcatcaaacatccctgtggtaggaagcccaaacccacccagcactcactttgcctctcagaaccagcattcctactcctcacctccttgggccgggcagcacaacaggaaaggagagaagaatggcatgggcctgtgccgtctttccatgaaggtctgggagacggtgcagaggaaagggaccacttcctgccaggaagtggtgggcgagctggtcgccaagttcagagctgccagcaaccacgcctcaccaaacgagtcagcttatgacgtgaaaaacataaaacggcgcacctacgatgccttaaacgtgctgatggccatgaatatcatctccagggagaaaaagaagatcaagtggattggtctgaccaccaactcggctcagaactgtcagaacttacgggtggaaagacagaagagacttgaaagaataaagcagaaacagtctgaacttcaacaacttattctacagcaaattgctttcaagaacctggtgctgagaaaccagtatgtggaggagcaggtcagccagcggccgctgcccaactcagtcatccacgtgcccttcatcatcatcagcagtagcaagaagaccgtcatcaactgcagcatctccgacgacaaatcagaatatctgtttaagtttaacagctcctttgaaatccacgatgacacagaagtgctgatgtggatgggcatgacttttgggctagagtccgggagctgctctgccgaagaccttaaaatggccagaaatttggtcccaaaggctctggagccgtacgtgacagaaatggctcagggaacttttggaggtgtgttcacgacggcaggttccaggtctaatggcacgtggctttctgccagtgacctgaccaacattgcgattgggatgctggccacaagctccggtggatctcagtacagtggctccagggtggagaccccagcagtcgaggaggaagaggaggaggacaacaacgatgacgacctcagtgagaatgacgaggatgac

SEQ ID NO: 6273 - DNA, 1047 bp, Homo sapiens
  source 1..1047: mol_type = genomic DNA
atgttggaccccaaatgtgatagaaaacgggctagaaaatttatagactctgatttttcagaaagtaaacgaagcaaaaaaggagataaaaatgggaaaggcttgagacacttttcaatgaaagtgtgtgagaaagttcaacgaaaaggtacaacatcgtacaatgaagtcgctgatgagctggtgtcagagttcaccaattcaaataaccatttggctgctgattcggcttatgatcagaagaacattaggcgaagagtttatgatgctttaaatgtgctaatggcaatgaacataatttcaaaggaaaaaaaagaaatcaagtggattggcctgcctaccaattctgctcaggaatgtcagaatctggagatagagaagcagaggcggatagaacggataaagcagaagcgggcccagctgcaagaacttctcctacagcaaatcgctttcaaaaacctggtacagagaaatcgacaaaatgagcagcaaaaccagggcccgccggctctgaactctaccattcagctgccattcataatcatcaatacaagcagaaaaacagtcatagattgcagcatctccagtgacaagtttgagtatcttttcaattttgacaacacctttgagatccatgatgacatagaagtactaaagcggatgggaatgtcgtttggcctggagtcaggcaaatgctctctggaggatctgaaacttgcgaaatccctggtgccaaaggctttagaaggttatatcacagatatctccacaggaccttcttggttaaatcagggactacttctgaactctacccaatcagtttcaaatttagacctgaccactggtgccaccttaccccagtcaagtgtaaaccaagggttatgcttggatgcagaagtggccttagcaactgggcagttcctggccccaaacagtcaccagtccagcagtgcggcctctcactgctccgagtcccgaggcgagaccccctgttcgttcaatgatgaagatgaggaagatgatgaggaggattcctcctccccagaa

SEQ ID NO: 6274 - DNA, 930 bp, Homo sapiens
  source 1..930: mol_type = genomic DNA
atgaaagtgtgtgagaaagttcaacgaaaaggtacaacatcgtacaatgaagtcgctgatgagctggtgtcagagttcaccaattcaaataaccatttggctgctgattcggcttatgatcagaagaacattaggcgaagagtttatgatgctttaaatgtgctaatggcaatgaacataatttcaaaggaaaaaaaagaaatcaagtggattggcctgcctaccaattctgctcaggaatgtcagaatctggagatagagaagcagaggcggatagaacggataaagcagaagcgggcccagctgcaagaacttctcctacagcaaatcgctttcaaaaacctggtacagagaaatcgacaaaatgagcagcaaaaccagggcccgccggctctgaactctaccattcagctgccattcataatcatcaatacaagcagaaaaacagtcatagattgcagcatctccagtgacaagtttgagtatcttttcaattttgacaacacctttgagatccatgatgacatagaagtactaaagcggatgggaatgtcgtttggcctggagtcaggcaaatgctctctggaggatctgaaacttgcgaaatccctggtgccaaaggctttagaaggttatatcacagatatctccacaggaccttcttggttaaatcagggactacttctgaactctacccaatcagtttcaaatttagacctgaccactggtgccaccttaccccagtcaagtgtaaaccaagggttatgcttggatgcagaagtggccttagcaactgggcagttcctggccccaaacagtcaccagtccagcagtgcggcctctcactgctccgagtcccgaggcgagaccccctgttcgttcaatgatgaagatgaggaagatgatgaggaggattcctcctccccagaa

SEQ ID NO: 6275 - DNA, 1155 bp, Homo sapiens
  source 1..1155: mol_type = genomic DNA
atgattataagcacaccacagagactaaccagttcaggaagtgttctgattgggagtccatatacccctgcaccagcaatggttactcagacacacatagcagaagctactggctgggtccctggtgatagaaaacgggctagaaaatttatagactctgatttttcagaaagtaaacgaagcaaaaaaggagataaaaatgggaaaggcttgagacacttttcaatgaaagtgtgtgagaaagttcaacgaaaaggtacaacatcgtacaatgaagtcgctgatgagctggtgtcagagttcaccaattcaaataaccatttggctgctgattcggcttatgatcagaagaacattaggcgaagagtttatgatgctttaaatgtgctaatggcaatgaacataatttcaaaggaaaaaaaagaaatcaagtggattggcctgcctaccaattctgctcaggaatgtcagaatctggagatagagaagcagaggcggatagaacggataaagcagaagcgggcccagctgcaagaacttctcctacagcaaatcgctttcaaaaacctggtacagagaaatcgacaaaatgagcagcaaaaccagggcccgccggctctgaactctaccattcagctgccattcataatcatcaatacaagcagaaaaacagtcatagattgcagcatctccagtgacaagtttgagtatcttttcaattttgacaacacctttgagatccatgatgacatagaagtactaaagcggatgggaatgtcgtttggcctggagtcaggcaaatgctctctggaggatctgaaacttgcgaaatccctggtgccaaaggctttagaaggttatatcacagatatctccacaggaccttcttggttaaatcagggactacttctgaactctacccaatcagtttcaaatttagacctgaccactggtgccaccttaccccagtcaagtgtaaaccaagggttatgcttggatgcagaagtggccttagcaactgggcagttcctggccccaaacagtcaccagtccagcagtgcggcctctcactgctccgagtcccgaggcgagaccccctgttcgttcaatgatgaagatgaggaagatgatgaggaggattcctcctccccagaa

SEQ ID NO: 6276 - DNA, 1338 bp, Homo sapiens
  source 1..1338: mol_type = genomic DNA
atgacggcaaaaaatgttggtttgacttccacaaatgcagaagtaagaggatttatagatcagaatctcagtccaacaaaaggcaacatttcatttgttgcatttccagtttccaataccaactcacctacaaagattttaccaaaaaccttaggaccaataaatgtgaatgttggaccccaaatgattataagcacaccacagagactaaccagttcaggaagtgttctgattgggagtccatatacccctgcaccagcaatggttactcagacacacatagcagaagctactggctgggtccctggtgatagaaaacgggctagaaaatttatagactctgatttttcagaaagtaaacgaagcaaaaaaggagataaaaatgggaaaggcttgagacacttttcaatgaaagtgtgtgagaaagttcaacgaaaaggtacaacatcgtacaatgaagtcgctgatgagctggtgtcagagttcaccaattcaaataaccatttggctgctgattcggcttatgatcagaagaacattaggcgaagagtttatgatgctttaaatgtgctaatggcaatgaacataatttcaaaggaaaaaaaagaaatcaagtggattggcctgcctaccaattctgctcaggaatgtcagaatctggagatagagaagcagaggcggatagaacggataaagcagaagcgggcccagctgcaagaacttctcctacagcaaatcgctttcaaaaacctggtacagagaaatcgacaaaatgagcagcaaaaccagggcccgccggctctgaactctaccattcagctgccattcataatcatcaatacaagcagaaaaacagtcatagattgcagcatctccagtgacaagtttgagtatcttttcaattttgacaacacctttgagatccatgatgacatagaagtactaaagcggatgggaatgtcgtttggcctggagtcaggcaaatgctctctggaggatctgaaacttgcgaaatccctggtgccaaaggctttagaaggttatatcacagatatctccacaggaccttcttggttaaatcagggactacttctgaactctacccaatcagtttcaaatttagacctgaccactggtgccaccttaccccagtcaagtgtaaaccaagggttatgcttggatgcagaagtggccttagcaactgggcagttcctggccccaaacagtcaccagtccagcagtgcggcctctcactgctccgagtcccgaggcgagaccccctgttcgttcaatgatgaagatgaggaagatgatgaggaggattcctcctccccagaa

SEQ ID NO: 6277 - DNA, 1254 bp, Homo sapiens
  source 1..1254: mol_type = genomic DNA
atgcaaccagaaggcatcatctttgaagcagagaataaaccctcaccaggcactgaatctgccggcactttcattttggacctctcagcaacctccagaacaattataagcacaccacagagactaaccagttcaggaagtgttctgattgggagtccatatacccctgcaccagcaatggttactcagacacacatagcagaagctactggctgggtccctggtgatagaaaacgggctagaaaatttatagactctgatttttcagaaagtaaacgaagcaaaaaaggagataaaaatgggaaaggcttgagacacttttcaatgaaagtgtgtgagaaagttcaacgaaaaggtacaacatcgtacaatgaagtcgctgatgagctggtgtcagagttcaccaattcaaataaccatttggctgctgattcggcttatgatcagaagaacattaggcgaagagtttatgatgctttaaatgtgctaatggcaatgaacataatttcaaaggaaaaaaaagaaatcaagtggattggcctgcctaccaattctgctcaggaatgtcagaatctggagatagagaagcagaggcggatagaacggataaagcagaagcgggcccagctgcaagaacttctcctacagcaaatcgctttcaaaaacctggtacagagaaatcgacaaaatgagcagcaaaaccagggcccgccggctctgaactctaccattcagctgccattcataatcatcaatacaagcagaaaaacagtcatagattgcagcatctccagtgacaagtttgagtatcttttcaattttgacaacacctttgagatccatgatgacatagaagtactaaagcggatgggaatgtcgtttggcctggagtcaggcaaatgctctctggaggatctgaaacttgcgaaatccctggtgccaaaggctttagaaggttatatcacagatatctccacaggaccttcttggttaaatcagggactacttctgaactctacccaatcagtttcaaatttagacctgaccactggtgccaccttaccccagtcaagtgtaaaccaagggttatgcttggatgcagaagtggccttagcaactgggcagttcctggccccaaacagtcaccagtccagcagtgcggcctctcactgctccgagtcccgaggcgagaccccctgttcgttcaatgatgaagatgaggaagatgatgaggaggattcctcctccccagaa

SEQ ID NO: 6278 - DNA, 1230 bp, Homo sapiens
  source 1..1230: mol_type = genomic DNA
atggcaaaagatgccggtctaattgaagccaacggagaactcaaggtcttcatagaccagaaccttagtcccgggaaaggcgtggtgtccctcgtggccgttcacccctccaccgtcaacccgctcgggaagcagctcttgccaaaaacctttggacagtccaatgtcaacattgcccagcaagtggtaattggtacgcctcagagaccggcagcgtcaaacaccctggtggtaggaagcccacacacccccagcactcactttgcctctcagaaccagccttccgactcctcaccttggtctgccgggaagcgcaacaggaaaggagagaagaatggcaagggcctacggcatttctccatgaaggtctgcgagaaggtgcagaggaaagggaccacttcctacaacgaagtggcagacgagctggttgcggagttcagtgctgccgacaaccacatcttaccaaacgagtcagcttatgaccagaaaaacataagacggcgcgtctacgatgccttaaacgtgctaatggccatgaacatcatctccaaggagaagaaggagatcaagtggattggtctgcccaccaactcggctcaggaatgtcagaacttagaggtggaaagacagaggagacttgaaagaataaaacagaaacagtctcaacttcaagaacttattctacagcaaattgccttcaagaacctggtgcagagaaaccggcatgcggagcagcaggccagccggccaccgccacccaactcagtcatccacctgcccttcatcatcgtcaacaccagcaagaagacggtcatcgactgcagcatctccaatgacaaatttgagtatctgtttaattttgacaacacatttgaaatccacgatgacatagaagtgctgaagcggatgggcatggcttgcgggctggagtcggggagctgctctgccgaagaccttaaaatggccagaagtctggtccccaaggctctggagccatacgtgacagaaatggctcagggaactgttggaggcgtgttcatcacgacggcaggttccacgtctaacggcacaaggttctctgccagtgacctgaccaacggtgcagatgggatgctggccacaagctccaatgggtctcagtacagcggctccagggtggagactccggtgtcctacgtcggggaggacgacgaggaggacgatgacttcaacgagaatgacgaggacgac

SEQ ID NO: 6279 - DNA, 4818 bp, Homo sapiens
  source 1..4818: mol_type = genomic DNA
atgtattcggcccacaggcccctgatgcccgcgtccagcgcggcctcccgtggcctcggcatgttcgtgtggacgaatgtggaacctcgctctgtggctgtgttcccttggcactccttagtccccttcctggcacccagccagcctgacccctccgtgcagccgagcgaggcccagcaacctgccagccacccagtggcctccaaccagagcaaagaacctgctgagtcggcagctgttgctcatgaacggccaccaggtgggacagggagtgctgaccctgagcggccccctggagccacatgccctgagagcccaggacccggacccccacaccctttgggggtggtggaatctggtaagggtccgcctcccaccacggaggaggaggcctccggccccccaggagagccccggctggacagtgagacagagagtgaccatgatgatgccttcctctccatcatgtctcctgagatccagttgcctctaccgcccggaaaacgtcggacccagtccctcagtgccctacccaaggaacgggactcatcttctgagaaggatggacgcagccccaacaagcgggagaaggaccacatccggcggcccatgaatgccttcatgatcttcagcaagcggcaccgggccctggtccaccagcgtcatcccaaccaggacaaccggaccgtcagcaagatcctgggcgagtggtggtatgccctggggcccaaggagaagcagaagtaccacgacctggccttccaggtgaaggaggcccacttcaaggcccacccagattggaagtggtgcaacaaggaccgaaagaagtccagctcagaggccaagcccacgagcctggggctggcaggagggcacaaggagacgcgggagcggagcatgtcggagacgggcactgctgctgcccctggggtgtcctctgagctcctgtccgttgcagcccagacactcctgagctcagacaccaaggctccggggagcagctcctgtggggcagaacggctacacacagttgggggacctggctcagcccggccccgagctttctcccacagcggggtacacagcctggacggcggagaagtagacagtcaggcgctacaggaactgacgcagatggtgtctggccctgcatcgtactctggcccaaagccttctacccagtatggagctccaggaccctttgcagcccctggtgagggaggtgccttggcggccactgggcggcccccgctgctgcccacccgagcttctcgttctcagcgtgcggccagtgaggacatgacgagtgatgaggagcgcatggtcatctgtgaggaggaaggggatgatgatgtcattgctgacgatggcttcggcaccactgacattgatctcaagtgcaaggagcgggtgaccgacagcgagagtggggacagctctggggaggacccagagggcaacaagggctttggtcggaaggtgttttcacctgtgatccgttcctcctttacccactgccgccccccactggaccctgagcccccagggcccccggatcctcctgtagcctttggcaaaggctatggttccgccccatcctcctctgcgtcctcgcctgcttcctcctcagcctcggcagccacctccttctcactgggctcaggaaccttcaaggcccaggagtctggtcagggcagcacagcgggccccctacggcccccaccccctggggctgggggtccagcgacaccttccaaggcaacccggttcctcccaatggatcctgccaccttccggcgcaagagacccgaaagtgtgggtggcctggagccaccaggcccctcagtcatcgcggcccctcccagcggaggaggaaacatcctgcagacactggtgctgcccccaaacaaggaggagcaagagggcggcggagccagagtgccctccgcccccgccccatcactggcctatggggccccagcagctcccctgtcccgtcctgccgccaccatggtcaccaatgtggtgcggcctgtcagcagcactcctgtgcccatcgcctctaagcccttccccacctctggccgggctgaggcgtctccaaatgacacagcaggtgccaggactgaaatgggcactgggtctcgggtgcctgggggctccccgctgggtgtcagcttagtgtattcggacaagaagtcggcagcagccacctcaccagccccacacttggtggctggacccctgctgggcactgtggggaaggcgcctgccactgtcactaacctactggtgggcaccccggggtatggggcccctgcgccccctgctgtccagttcattgcccagggggcccctggtggtgggaccactgcgggctcaggagcaggtgctgggagtggccccaatgggccagtacccctgggcatcctgcaaccaggtgccctgggcaaggctgggggaatcacccaggtacagtacatcctgcccacgctgccccagcagcttcaggtggcacctgccccagcaccagcccctgggaccaaggcagcggctcccagcggccctgcacccaccaccagcatccgtttcaccctcccaccgggcacttccaccaacggcaaagtcctggctgccactgcacccactcctggcatccccatcctgcagtctgtaccctccgccccaccccccaaagcccagtcagtttctcccgtgcaggccccgcccccgggtggctcagcccagctgctgcctgggaaggtcctagtgcctctggccgcccctagcatgtcagtgcggggtggaggggccggccagccactgccactggtgagcccgcccttctcagtacctgtgcagaatggtgcccagccccccagcaagatcatccagctgaccccggtgcctgtgagcacacccagcggcctggtgccgcccctgagcccagccacactccctggacccacctctcagcctcagaaggtcctgttgccctcctccaccagaatcacctatgtgcagtcagcgggcgggcacgcgctgcccctgggtaccagccctgcgtccagccaggctggaacagtcacctcgtacgggcccacgagctctgtagctctaggcttcacctcgctggggcccagcggccccgccttcgtgcagcccctgctctcaggccaagccccactgctggctcccggtcaggtgggcgtgtcacctgtgcccagtccccagctgccgcctgcctgtgcagcccccggaggtcctgtcataacagcattttactctggcagccctgcacccacctcctcagcacccctggcccagccatcccaggcccccccaagcctggtctacactgtggccaccagcacaaccccacctgcagccaccattctgcccaagggcccgccagcccctgccactgccaccccagccccgactagccctttccccagcgccacaggttccatgacctacagcttagtggcccccaaggcccagcggcccagcccgaaggccccccagaaagtgaaggcagccatcgccagcattcccgtggggtcctttgaggcaggtgcctctgggcggcctggccctgcaccccggcagcctctggagcctggcccagtccgagagccaactgccccagagtctgagcttgaggggcagcccacaccaccagcccctccacccctgccagagacctggactcccacggcccggagcagccccccactgcccccacctgctgaggagcggaccagcgccaagggccctgagaccatggccagcaaattccccagctcatcttcagactggcgcgtccctgggcagggcctggagaatcgtggggagcctcccactcctcccagcccggccccagctccagctgtagcccctggtggcagcagcgagagcagcagtgggcgggcagccggggacaccccggagcgcaaggaggcggctggtactggcaagaaggtgaaggtgcggcccccgcccctgaagaagacctttgactctgtggacaacagggtcctgtcagaagtggacttcgaagagcgctttgctgagttgcctgagtttcggcctgaggaggtgctgccctcccccaccctgcagtctctggccacctcaccccgggccatcctgggctcttaccgcaagaagaggaagaactccacggacctggattcagcacccgaggaccccacctcgcccaagcgcaagatgagaagacgctccagctgcagctcggagcccaacacccccaagagtgccaagtgcgagggggacatcttcacctttgaccgtacaggtacagaagccgaggacgtgcttggggagctagagtatgacaaggtgccatactcctccctgcggcgcaccctggaccagcgccgggccctggtcatgcagctctttcaggaccatggcttcttcccgtcagcccaggccacagccgccttccaggcccgctatgcagacatctttccctccaaggtttgtctgcagttgaagatccgtgaggtgcgccagaagatcatgcaggctgccactcccacggagcagccccctggagctgaggctcctctccctgtaccgccccccactggcaccgctgctgcccctgcccccactcccagccccgcagggggccctgaccccacctcacccagctcggactctggcacggcccaggctgccccgccactgcctccacccccagagtcggggcctggacagcctggctgggagggggctccccagccctcccccccacccccaggtccctccacagctgccacaggcagg

SEQ ID NO: 6280 - DNA, 4824 bp, Homo sapiens
  source 1..4824: mol_type = genomic DNA
atgtattcggcccacaggcccctgatgcccgcgtccagcgcggcctcccgtggcctcggcatgttcgtgtggacgaatgtggaacctcgctctgtggctgtgttcccttggcactccttagtccccttcctggcacccagccagcctgacccctccgtgcagccgagcgaggcccagcaacctgccagccacccagtggcctccaaccagagcaaagaacctgctgagtcggcagctgttgctcatgaacggccaccaggtgggacagggagtgctgaccctgagcggccccctggagccacatgccctgagagcccaggacccggacccccacaccctttgggggtggtggaatctggtaagggtccgcctcccaccacggaggaggaggcctccggccccccaggagagccccggctggacagtgagacagagagtgaccatgatgatgccttcctctccatcatgtctcctgagatccagttgcctctaccgcccggaaaacgtcggacccagtccctcagtgccctacccaaggaacgggactcatcttctgagaaggatggacgcagccccaacaagcgggagaaggaccacatccggcggcccatgaatgccttcatgatcttcagcaagcggcaccgggccctggtccaccagcgtcatcccaaccaggacaaccggaccgtcagcaagatcctgggcgagtggtggtatgccctggggcccaaggagaagcagaagtaccacgacctggccttccaggtgaaggaggcccacttcaaggcccacccagattggaagtggtgcaacaaggaccgaaagaagtccagctcagaggccaagcccacgagcctggggctggcaggagggcacaaggagacgcgggagcggagcatgtcggagacgggcactgctgctgcccctggggtgtcctctgagctcctgtccgttgcagcccagacactcctgagctcagacaccaaggctccggggagcagctcctgtggggcagaacggctacacacagttgggggacctggctcagcccggccccgagctttctcccacagcggggtacacagcctggacggcggagaagtagacagtcaggcgctacaggaactgacgcagatggtgtctggccctgcatcgtactctggcccaaagccttctacccagtatggagctccaggaccctttgcagcccctggtgagggaggtgccttggcggccactgggcggcccccgctgctgcccacccgagcttctcgttctcagcgtgcggccagtgaggacatgacgagtgatgaggagcgcatggtcatctgtgaggaggaaggggatgatgatgtcattgctgacgatggcttcggcaccactgacattgatctcaagtgcaaggagcgggtgaccgacagcgagagtggggacagctctggggaggacccagagggcaacaagggctttggtcggaaggtgttttcacctgtgatccgttcctcctttacccactgccgccccccactggaccctgagcccccagggcccccggatcctcctgtagcctttggcaaaggctatggttccgccccatcctcctctgcgtcctcgcctgcttcctcctcagcctcggcagccacctccttctcactgggctcaggaaccttcaaggcccaggagtctggtcagggcagcacagcgggccccctacggcccccaccccctggggctgggggtccagcgacaccttccaaggcaacccggttcctcccaatggatcctgccaccttccggcgcaagagacccgaaagtgtgggtggcctggagccaccaggcccctcagtcatcgcggcccctcccagcggaggaggaaacatcctgcagacactggtgctgcccccaaacaaggaggagcaagagggcggcggagccagagtgccctccgcccccgccccatcactggcctatggggccccagcagctcccctgtcccgtcctgccgccaccatggtcaccaatgtggtgcggcctgtcagcagcactcctgtgcccatcgcctctaagcccttccccacctctggccgggctgaggcgtctccaaatgacacagcaggtgccaggactgaaatgggcactgggtctcgggtgcctgggggctccccgctgggtgtcagcttagtgtattcggacaagaagtcggcagcagccacctcaccagccccacacttggtggctggacccctgctgggcactgtggggaaggcgcctgccactgtcactaacctactggtgggcaccccggggtatggggcccctgcgccccctgctgtccagttcattgcccagggggcccctggtggtgggaccactgcgggctcaggagcaggtgctgggagtggccccaatgggccagtacccctgggcatcctgcaaccaggtgccctgggcaaggctgggggaatcacccaggtacagtacatcctgcccacgctgccccagcagcttcaggtggcacctgccccagcaccagcccctgggaccaaggcagcggctcccagcggccctgcacccaccaccagcatccgtttcaccctcccaccgggcacttccaccaacggcaaagtcctggctgccactgcacccactcctggcatccccatcctgcagtctgtaccctccgccccaccccccaaagcccagtcagtttctcccgtgcaggccccgcccccgggtggctcagcccagctgctgcctgggaaggtcctagtgcctctggccgcccctagcatgtcagtgcggggtggaggggccggccagccactgccactggtgagcccgcccttctcagtacctgtgcagaatggtgcccagccccccagcaagatcatccagctgaccccggtgcctgtgagcacacccagcggcctggtgccgcccctgagcccagccacactccctggacccacctctcagcctcagaaggtcctgttgccctcctccaccagaatcacctatgtgcagtcagcgggcgggcacgcgctgcccctgggtaccagccctgcgtccagccaggctggaacagtcacctcgtacgggcccacgagctctgtagctctaggcttcacctcgctggggcccagcggccccgccttcgtgcagcccctgctctcagcaggccaagccccactgctggctcccggtcaggtgggcgtgtcacctgtgcccagtccccagctgccgcctgcctgtgcagcccccggaggtcctgtcataacagcattttactctggcagccctgcacccacctcctcagcacccctggcccagccatcccaggcccccccaagcctggtctacactgtggccaccagcacaaccccacctgcagccaccattctgcccaagggcccgccagcccctgccactgccaccccagccccgactagccctttccccagcgccacagcaggttccatgacctacagcttagtggcccccaaggcccagcggcccagcccgaaggccccccagaaagtgaaggcagccatcgccagcattcccgtggggtcctttgaggcaggtgcctctgggcggcctggccctgcaccccggcagcctctggagcctggcccagtccgagagccaactgccccagagtctgagcttgaggggcagcccacaccaccagcccctccacccctgccagagacctggactcccacggcccggagcagccccccactgcccccacctgctgaggagcggaccagcgccaagggccctgagaccatggccagcaaattccccagctcatcttcagactggcgcgtccctgggcagggcctggagaatcgtggggagcctcccactcctcccagcccggccccagctccagctgtagcccctggtggcagcagcgagagcagcagtgggcgggcagccggggacaccccggagcgcaaggaggcggctggtactggcaagaaggtgaaggtgcggcccccgcccctgaagaagacctttgactctgtggacaacagggtcctgtcagaagtggacttcgaagagcgctttgctgagttgcctgagtttcggcctgaggaggtgctgccctcccccaccctgcagtctctggccacctcaccccgggccatcctgggctcttaccgcaagaagaggaagaactccacggacctggattcagcacccgaggaccccacctcgcccaagcgcaagatgagaagacgctccagctgcagctcggagcccaacacccccaagagtgccaagtgcgagggggacatcttcacctttgaccgtacaggtacagaagccgaggacgtgcttggggagctagagtatgacaaggtgccatactcctccctgcggcgcaccctggaccagcgccgggccctggtcatgcagctctttcaggaccatggcttcttcccgtcagcccaggccacagccgccttccaggcccgctatgcagacatctttccctccaaggtttgtctgcagttgaagatccgtgaggtgcgccagaagatcatgcaggctgccactcccacggagcagccccctggagctgaggctcctctccctgtaccgccccccactggcaccgctgctgcccctgcccccactcccagccccgcagggggccctgaccccacctcacccagctcggactctggcacggcccaggctgccccgccactgcctccacccccagagtcggggcctggacagcctggctgggagggggctccccagccctcccccccacccccaggtccctccacagctgccacaggcagg

SEQ ID NO: 6281 - DNA, 1515 bp, Homo sapiens
  source 1..1515: mol_type = genomic DNA
atgaccacgctggccggcgctgtgcccaggatgatgcggccgggcccggggcagaactacccgcgtagcgggttcccgctggaagtgtccactcccctcggccagggccgcgtcaaccagctcggcggtgtttttatcaacggcaggccgctgcccaaccacatccgccacaagatcgtggagatggcccaccacggcatccggccctgcgtcatctcgcgccagctgcgcgtgtcccacggctgcgtctccaagatcctgtgcaggtaccaggagactggctccatacgtcctggtgccatcggcggcagcaagcccaagcaggtgacaacgcctgacgtggagaagaaaattgaggaatacaaaagagagaacccgggcatgttcagctgggaaatccgagacaaattactcaaggacgcggtctgtgatcgaaacaccgtgccgtcagtgagttccatcagccgcatcctgagaagtaaattcgggaaaggtgaagaggaggaggccgacttggagaggaaggaggcagaggaaagcgagaagaaggccaaacacagcatcgacggcatcctgagcgagcgagcctcagcaccccaatcagatgaaggctctgatattgactctgaaccagatttaccactaaagaggaaacagcgcagaagccgaaccaccttcacagcagaacagctggaggaactggagcgtgcttttgagagaactcattaccctgacatttatactagggaggaactggcccagagggcgaagctcaccgaggcccgagtacaggtctggtttagcaaccgccgtgcaagatggaggaagcaagctggggccaatcaactgatggctttcaaccatctcattcccggggggttccctcccactgccatgccgaccttgccaacgtaccagctgtcggagacctcttaccagcccacatctattccacaagctgtgtcagatcccagcagcaccgttcacagacctcaaccgcttcctccaagcactgtacaccaaagcacgattccttccaacccagacagcagctctgcctactgcctccccagcaccaggcatggattttccagctatacagacagctttgtgcctccgtcggggccctccaaccccatgaaccccaccattggcaatggcctctcacctcaggtaatgggactcctgaccaaccacggtggggtacctcatcagccccagactgattacgcgctctcccctctcaccgggggtctggaacctaccaccacggtgtcggccagctgcagtcagagactagaccatatgaagagcttggacagtctgccaacatctcagtcctactgtccacccacctatagcaccacaggctacagtatggaccctgtcacaggctaccaatatgggcagtatggacaaagtgcctttcattatctcaagccagatatcgcttggtttcaaatccttttgaacacgttcgacaaaagcagtggagaagaggaagacctggagcaa

SEQ ID NO: 6282 - DNA, 1437 bp, Homo sapiens
  source 1..1437: mol_type = genomic DNA
atgaccacgctggccggcgctgtgcccaggatgatgcggccgggcccggggcagaactacccgcgtagcgggttcccgctggaagtgtccactcccctcggccagggccgcgtcaaccagctcggcggtgtttttatcaacggcaggccgctgcccaaccacatccgccacaagatcgtggagatggcccaccacggcatccggccctgcgtcatctcgcgccagctgcgcgtgtcccacggctgcgtctccaagatcctgtgcaggtaccaggagactggctccatacgtcctggtgccatcggcggcagcaagcccaagcaggtgacaacgcctgacgtggagaagaaaattgaggaatacaaaagagagaacccgggcatgttcagctgggaaatccgagacaaattactcaaggacgcggtctgtgatcgaaacaccgtgccgtcagtgagttccatcagccgcatcctgagaagtaaattcgggaaaggtgaagaggaggaggccgacttggagaggaaggaggcagaggaaagcgagaagaaggccaaacacagcatcgacggcatcctgagcgagcgagcctcagcaccccaatcagatgaaggctctgatattgactctgaaccagatttaccactaaagaggaaacagcgcagaagccgaaccaccttcacagcagaacagctggaggaactggagcgtgcttttgagagaactcattaccctgacatttatactagggaggaactggcccagagggcgaagctcaccgaggcccgagtacaggtctggtttagcaaccgccgtgcaagatggaggaagcaagctggggccaatcaactgatggctttcaaccatctcattcccggggggttccctcccactgccatgccgaccttgccaacgtaccagctgtcggagacctcttaccagcccacatctattccacaagctgtgtcagatcccagcagcaccgttcacagacctcaaccgcttcctccaagcactgtacaccaaagcacgattccttccaacccagacagcagctctgcctactgcctccccagcaccaggcatggattttccagctatacagacagctttgtgcctccgtcggggccctccaaccccatgaaccccaccattggcaatggcctctcacctcaggtaatgggactcctgaccaaccacggtggggtacctcatcagccccagactgattacgcgctctcccctctcaccgggggtctggaacctaccaccacggtgtcggccagctgcagtcagagactagaccatatgaagagcttggacagtctgccaacatctcagtcctactgtccacccacctatagcaccacaggctacagtatggaccctgtcacaggctaccaatatgggcagtatggacaaagtaagccttggactttt

SEQ ID NO: 6283 - DNA, 1209 bp, Homo sapiens
  source 1..1209: mol_type = genomic DNA
atgaccacgctggccggcgctgtgcccaggatgatgcggccgggcccggggcagaactacccgcgtagcgggttcccgctggaagtgtccactcccctcggccagggccgcgtcaaccagctcggcggtgtttttatcaacggcaggccgctgcccaaccacatccgccacaagatcgtggagatggcccaccacggcatccggccctgcgtcatctcgcgccagctgcgcgtgtcccacggctgcgtctccaagatcctgtgcaggtaccaggagactggctccatacgtcctggtgccatcggcggcagcaagcccaagcaggtgacaacgcctgacgtggagaagaaaattgaggaatacaaaagagagaacccgggcatgttcagctgggaaatccgagacaaattactcaaggacgcggtctgtgatcgaaacaccgtgccgtcagtgagttccatcagccgcatcctgagaagtaaattcgggaaaggtgaagaggaggaggccgacttggagaggaaggaggcagaggaaagcgagaagaaggccaaacacagcatcgacggcatcctgagcgagcgagcctcagcaccccaatcagatgaaggctctgatattgactctgaaccagatttaccactaaagaggaaacagcgcagaagccgaaccaccttcacagcagaacagctggaggaactggagcgtgcttttgagagaactcattaccctgacatttatactagggaggaactggcccagagggcgaagctcaccgaggcccgagtacaggtctggtttagcaaccgccgtgcaagatggaggaagcaagctggggccaatcaactgatggctttcaaccatctcattcccggggggttccctcccactgccatgccgaccttgccaacgtaccagctgtcggagacctcttaccagcccacatctattccacaagctgtgtcagatcccagcagcaccgttcacagacctcaaccgcttcctccaagcactgtacaccaaagcacgattccttccaacccagacagcagctctgcctactgcctccccagcaccaggcatggattttccagctatacagacagctttgtgcctccgtcggggccctccaaccccatgaaccccaccattggcaatggcctctcacctcaggtgcctttcattatctcaagccagatatcgcgtaag

SEQ ID NO: 6284 - DNA, 618 bp, Homo sapiens
  source 1..618: mol_type = genomic DNA
atgaccacgctggccggcgctgtgcccaggatgatgcggccgggcccggggcagaactacccgcgtagcgggttcccgctggaagtgtccactcccctcggccagggccgcgtcaaccagctcggcggtgtttttatcaacggcaggccgctgcccaaccacatccgccacaagatcgtggagatggcccaccacggcatccggccctgcgtcatctcgcgccagctgcgcgtgtcccacggctgcgtctccaagatcctgtgcaggtaccaggagactggctccatacgtcctggtgccatcggcggcagcaagcccaagcaggtgacaacgcctgacgtggagaagaaaattgaggaatacaaaagagagaacccgggcatgttcagctgggaaatccgagacaaattactcaaggacgcggtctgtgatcgaaacaccgtgccgtcagtgagttccatcagccgcatcctgagaagtaaattcgggaaaggtgaagaggaggaggccgacttggagaggaaggaggcagaggaaagcgagaagaaggccaaacacagcatcgacggcatcctgagcgagcgaggaaaggccctggtctccggagtttcctcgcat

SEQ ID NO: 6285 - DNA, 1449 bp, Homo sapiens
  source 1..1449: mol_type = genomic DNA
atgaccacgctggccggcgctgtgcccaggatgatgcggccgggcccggggcagaactacccgcgtagcgggttcccgctggaagtgtccactcccctcggccagggccgcgtcaaccagctcggcggtgtttttatcaacggcaggccgctgcccaaccacatccgccacaagatcgtggagatggcccaccacggcatccggccctgcgtcatctcgcgccagctgcgcgtgtcccacggctgcgtctccaagatcctgtgcaggtaccaggagactggctccatacgtcctggtgccatcggcggcagcaagcccaaggtgacaacgcctgacgtggagaagaaaattgaggaatacaaaagagagaacccgggcatgttcagctgggaaatccgagacaaattactcaaggacgcggtctgtgatcgaaacaccgtgccgtcagtgagttccatcagccgcatcctgagaagtaaattcgggaaaggtgaagaggaggaggccgacttggagaggaaggaggcagaggaaagcgagaagaaggccaaacacagcatcgacggcatcctgagcgagcgagcctcagcaccccaatcagatgaaggctctgatattgactctgaaccagatttaccactaaagaggaaacagcgcagaagccgaaccaccttcacagcagaacagctggaggaactggagcgtgcttttgagagaactcattaccctgacatttatactagggaggaactggcccagagggcgaagctcaccgaggcccgagtacaggtctggtttagcaaccgccgtgcaagatggaggaagcaagctggggccaatcaactgatggctttcaaccatctcattcccggggggttccctcccactgccatgccgaccttgccaacgtaccagctgtcggagacctcttaccagcccacatctattccacaagctgtgtcagatcccagcagcaccgttcacagacctcaaccgcttcctccaagcactgtacaccaaagcacgattccttccaacccagacagcagctctgcctactgcctccccagcaccaggcatggattttccagctatacagacagctttgtgcctccgtcggggccctccaaccccatgaaccccaccattggcaatggcctctcacctcaggtaatgggactcctgaccaaccacggtggggtacctcatcagccccagactgattacgcgctctcccctctcaccgggggtctggaacctaccaccacggtgtcggccagctgcagtcagagactagaccatatgaagagcttggacagtctgccaacatctcagtcctactgtccacccacctatagcaccacaggctacagtatggaccctgtcacaggctaccaatatgggcagtatggacaaagtgcctttcattatctcaagccagatatcgcg

SEQ ID NO: 6286 - DNA, 1452 bp, Homo sapiens
  source 1..1452: mol_type = genomic DNA
atgaccacgctggccggcgctgtgcccaggatgatgcggccgggcccggggcagaactacccgcgtagcgggttcccgctggaagtgtccactcccctcggccagggccgcgtcaaccagctcggcggtgtttttatcaacggcaggccgctgcccaaccacatccgccacaagatcgtggagatggcccaccacggcatccggccctgcgtcatctcgcgccagctgcgcgtgtcccacggctgcgtctccaagatcctgtgcaggtaccaggagactggctccatacgtcctggtgccatcggcggcagcaagcccaagcaggtgacaacgcctgacgtggagaagaaaattgaggaatacaaaagagagaacccgggcatgttcagctgggaaatccgagacaaattactcaaggacgcggtctgtgatcgaaacaccgtgccgtcagtgagttccatcagccgcatcctgagaagtaaattcgggaaaggtgaagaggaggaggccgacttggagaggaaggaggcagaggaaagcgagaagaaggccaaacacagcatcgacggcatcctgagcgagcgagcctcagcaccccaatcagatgaaggctctgatattgactctgaaccagatttaccactaaagaggaaacagcgcagaagccgaaccaccttcacagcagaacagctggaggaactggagcgtgcttttgagagaactcattaccctgacatttatactagggaggaactggcccagagggcgaagctcaccgaggcccgagtacaggtctggtttagcaaccgccgtgcaagatggaggaagcaagctggggccaatcaactgatggctttcaaccatctcattcccggggggttccctcccactgccatgccgaccttgccaacgtaccagctgtcggagacctcttaccagcccacatctattccacaagctgtgtcagatcccagcagcaccgttcacagacctcaaccgcttcctccaagcactgtacaccaaagcacgattccttccaacccagacagcagctctgcctactgcctccccagcaccaggcatggattttccagctatacagacagctttgtgcctccgtcggggccctccaaccccatgaaccccaccattggcaatggcctctcacctcaggtaatgggactcctgaccaaccacggtggggtacctcatcagccccagactgattacgcgctctcccctctcaccgggggtctggaacctaccaccacggtgtcggccagctgcagtcagagactagaccatatgaagagcttggacagtctgccaacatctcagtcctactgtccacccacctatagcaccacaggctacagtatggaccctgtcacaggctaccaatatgggcagtatggacaaagtgcctttcattatctcaagccagatatcgcg

SEQ ID NO: 6287 - DNA, 1221 bp, Homo sapiens
  source 1..1221: mol_type = genomic DNA
atgaccacgctggccggcgctgtgcccaggatgatgcggccgggcccggggcagaactacccgcgtagcgggttcccgctggaagtgtccactcccctcggccagggccgcgtcaaccagctcggcggtgtttttatcaacggcaggccgctgcccaaccacatccgccacaagatcgtggagatggcccaccacggcatccggccctgcgtcatctcgcgccagctgcgcgtgtcccacggctgcgtctccaagatcctgtgcaggtaccaggagactggctccatacgtcctggtgccatcggcggcagcaagcccaagcaggtgacaacgcctgacgtggagaagaaaattgaggaatacaaaagagagaacccgggcatgttcagctgggaaatccgagacaaattactcaaggacgcggtctgtgatcgaaacaccgtgccgtcagtgagttccatcagccgcatcctgagaagtaaattcgggaaaggtgaagaggaggaggccgacttggagaggaaggaggcagaggaaagcgagaagaaggccaaacacagcatcgacggcatcctgagcgagcgagcctcagcaccccaatcagatgaaggctctgatattgactctgaaccagatttaccactaaagaggaaacagcgcagaagccgaaccaccttcacagcagaacagctggaggaactggagcgtgcttttgagagaactcattaccctgacatttatactagggaggaactggcccagagggcgaagctcaccgaggcccgagtacaggtctggtttagcaaccgccgtgcaagatggaggaagcaagctggggccaatcaactgatggctttcaaccatctcattcccggggggttccctcccactgccatgccgaccttgccaacgtaccagctgtcggagacctcttaccagcccacatctattccacaagctgtgtcagatcccagcagcaccgttcacagacctcaaccgcttcctccaagcactgtacaccaaagcacgattccttccaacccagacagcagctctgcctactgcctccccagcaccaggcatggattttccagctatacagacagctttgtgcctccgtcggggccctccaaccccatgaaccccaccattggcaatggcctctcacctcaggtgcctttcattatctcaagccagatatcgcttggtttcaaatccttt

SEQ ID NO: 6288 - DNA, 645 bp, Homo sapiens
  source 1..645: mol_type = genomic DNA
atgaccacgctggccggcgctgtgcccaggatgatgcggccgggcccggggcagaactacccgcgtagcgggttcccgctggaagtgtccactcccctcggccagggccgcgtcaaccagctcggcggtgtttttatcaacggcaggccgctgcccaaccacatccgccacaagatcgtggagatggcccaccacggcatccggccctgcgtcatctcgcgccagctgcgcgtgtcccacggctgcgtctccaagatcctgtgcaggtaccaggagactggctccatacgtcctggtgccatcggcggcagcaagcccaagcaggtgacaacgcctgacgtggagaagaaaattgaggaatacaaaagagagaacccgggcatgttcagctgggaaatccgagacaaattactcaaggacgcggtctgtgatcgaaacaccgtgccgtcagtgagttccatcagccgcatcctgagaagtaaattcgggaaaggtgaagaggaggaggccgacttggagaggaaggaggcagaggaaagcgagaagaaggccaaacacagcatcgacggcatcctgagcgagcgaggtaagcggtggcgccttgggcggcgcacttgctgggtgacttggagggcatcggctagc

SEQ ID NO: 6289 - DNA, 1206 bp, Homo sapiens
  source 1..1206: mol_type = genomic DNA
atggcggcagcagccgctctgagggcgcctgctcagagcagtgtgacctttgaagatgtggctgtaaacttttccctggaggaatggagtcttcttaatgaggctcagagatgcctgtaccgtgacgtgatgctggagaccttgacacttatatcctccctgggttgttggcatggaggggaagatgaggcagcaccttctaagcagagcacgtgtatacatatatacaaagaccagggaggtcatagtggagaaaggccttatgagtgtggggaatataggaaattatttaagaacaagtcctgcctcactgaacccagaagagatcacaaacacaggaatgttcgcactggagaaaggccttatgagtgcagcaaatatgggaaattatttcaccaaaagcctacactccatattcatgagagatttcatactgggcaaaagacctatgagtgcagtgagtgtggaaaatcatttcaccaaagctcttcactcttgcagcgtcagacacttcacactagagaaaggccttatgagtgtattgaatgtgggaaagcctttgctgaaaagtccagtctcattaaccacaggaaagttcactctggagcaaagcgttatgaatgcaatgaatgtgggaagtcctttgcttatacatctagtctcattaaacacaggaggattcacactggagagaggccttatgagtgcagtgaatgtgggagatcctttgctgaaaactccagtcttattaaacacttgagagttcacacaggagaaaggccttatgaatgcgttgagtgtggaaaatcatttcgccgaagctcttcactcttgcagcatcagagagttcacactagagaaaggccttatgaatgtagtgaatgtgggaaatcctttagcttaaggtccaacctcattcaccatcagcgagttcatactggagaaaggcatgagtgcgggcagtgtgggaaatcctttagccgaaaatctagccttattatacatctgagagttcacactggagaaaggccttatgagtgcagtgactgtgggaaatcctttgctgaaaactccagccttattaaacacttgagagttcacactggagaaaggccatatgaatgcattgattgtggaaaatcatttcgccacagttcttcgttccgtcgccatcagagagttcatactggaatgaggccttataag

SEQ ID NO: 6290 - DNA, 1077 bp, Homo sapiens
  source 1..1077: mol_type = genomic DNA
atgctggagaccttgacacttatatcctccctgggttgttggcatggaggggaagatgaggcagcaccttctaagcagagcacgtgtatacatatatacaaagaccagggaggtcatagtggagaaaggccttatgagtgtggggaatataggaaattatttaagaacaagtcctgcctcactgaacccagaagagatcacaaacacaggaatgttcgcactggagaaaggccttatgagtgcagcaaatatgggaaattatttcaccaaaagcctacactccatattcatgagagatttcatactgggcaaaagacctatgagtgcagtgagtgtggaaaatcatttcaccaaagctcttcactcttgcagcgtcagacacttcacactagagaaaggccttatgagtgtattgaatgtgggaaagcctttgctgaaaagtccagtctcattaaccacaggaaagttcactctggagcaaagcgttatgaatgcaatgaatgtgggaagtcctttgcttatacatctagtctcattaaacacaggaggattcacactggagagaggccttatgagtgcagtgaatgtgggagatcctttgctgaaaactccagtcttattaaacacttgagagttcacacaggagaaaggccttatgaatgcgttgagtgtggaaaatcatttcgccgaagctcttcactcttgcagcatcagagagttcacactagagaaaggccttatgaatgtagtgaatgtgggaaatcctttagcttaaggtccaacctcattcaccatcagcgagttcatactggagaaaggcatgagtgcgggcagtgtgggaaatcctttagccgaaaatctagccttattatacatctgagagttcacactggagaaaggccttatgagtgcagtgactgtgggaaatcctttgctgaaaactccagccttattaaacacttgagagttcacactggagaaaggccatatgaatgcattgattgtggaaaatcatttcgccacagttcttcgttccgtcgccatcagagagttcatactggaatgaggccttataag

SEQ ID NO: 6291 - DNA, 2181 bp, Homo sapiens
  source 1..2181: mol_type = genomic DNA
atggaaagtgaagacacaaagaaaacacaagaaatgaagactgacctgaacttattattggagtgtctaaagtatcaaatggacaatgctttttcacaaaaggaagctttggtcactattcattcaatttgtcaacaaaacagtaatgcaagtgtttattttcgggaaattggtggtttgatgtttgtaaaaaatcttgcaaagtcaagtgaacatagcatggtaaaagaagcagccttatatacattaggagctattgcagagaaaaatgtttactgtcagcagactttgtgtacttcagagttgtttgaagacttaacttggttcttatctaatgattcaaacataaatttgaaaagaatgtctgtttatgttattttggttctggtttcaaataataggaccggacaaacacttgtgagagaaacaggttgtattacagttctgtcacggttattcaggacagttatttcaaaacatgagttggatttgtcagataaaaatgttttccagagttatcagttgtggtcttcagtgtgtagtactctgtgtgtctgtgtcaacaatcctcaaaatgatgagaatcaaatgttttgctgttccctttttccacatgctaatgaatggctaaaaaattgcacgacacctgagataattcgccctatttgctcatttattggactcactcttgcaaataacacatatgttcagaaatacttcgtatctgtgggcggactggatgtattgtctcaagttctcatgcagctggaatctgattcacatgagactctttccagtgctaaacttgcagtggttgtgacgaagactgtggatgcatgcattgctgataatcctacttttgggatagtactctccaagtaccacattgtttctaaacttctggcattactgcttcatgaaagtctggattcaggagaaaaatttagcatcatgcttactcttggtcattgcacagaggattgtgaggaaaatcagtatgacctttttaaaaacaatgggcttccactcatgattcaagccttaactgaatcgcagaatgaggaactgaacaaagctgccacatttgtgcttcacaactgcaaaaaaattactgagaaattatctctaagtctaggagaatatccttttgatgaaaatgaaacacagcaattaaaggacataagtgtgaaggagaataatcttgaagagcactggaggaaagcaaaggaaattctacacagaatagaacagcttgaaagagaaggaaatgaggaagaaatacaaagagaaaactatcaggataatatttcatctatgaacataagtattcagaatacatggaaacatctccatgcagatcggattggtcgaggtagcaaagcagaagatgaggataaaagccattctagacagttacagagttataagtcccatggagtcatgtctaaagcatgtacaaatgatgaccaaatgaagacaccgttaaagagcgcaaatccagtccatgcttgttacagggagagtgagcaaaataagactttatataaagccaagtcaagctgcaatcaaaacttacatgaagaaactacttttgaaaagaattttgtttctcaatcaagtgaccatgtttttaaacacccagttcacattgccaaaaatataaagcagcagttaccagtaacagatccatttacattatgttcagatataataaataaagaagtagtcagttttctagcaactcccagttgttccgaaatgttgacgtataggtgctcaggttgcatagcagtagaaaaatccctgaatagccgaaactttagcaagctcttgcactcttgcccataccaatgtgatcgtcacaaagtcattgtggaagctgaagacagatataaaagtgaactaaggaaatcacttatctgtaacaaaaaaattctgctgaccccacgtagaagacaacgactcagtaatgaatctactacccctggaggaataaaaaaaagaagaattcgcaaaaactttactgaagaagaagtaaattaccttttcaatggagttaagaaaatgggaaatcactggaattcaattttgtggtctttcccctttcagcaaggacggaaggctgtggaccttgctcacaaataccacaagctgaccaaacaccccacgtgtgcagcttct

SEQ ID NO: 6292 - DNA, 1908 bp, Homo sapiens
  source 1..1908: mol_type = genomic DNA
atggcggcggaagaggaggctgcggcgggaggtaaagtgttgagagaggagaaccagtgcattgctcctgtggtttccagccgcgtgagtccagggacaagaccaacagctatggggtctttcagctcacacatgacagagtttccacgaaaacgcaaaggaagtgattcagacccatcccagtcaggaatcatgacagaaaaagtggtggaaaagctttctcagaatccccttacctatcttctttcaacaaggatagaaatatcagcctccagtggcagcagagtggaagatggtgaacaccaagttaaaatgaaggccttcagagaagctcatagccaaactgaaaagcggaggagagataaaatgaataacctgattgaagaactgtctgcaatgatccctcagtgcaaccccatggcgcgtaaactggacaaacttacagttttaagaatggctgttcaacacttgagatctttaaaaggcttgacaaattcttatgtgggaagtaattatagaccatcatttcttcaggataatgagctcagacatttaatccttaagactgcagaaggcttcttatttgtggttggatgtgaaagaggaaaaattctcttcgtttctaagtcagtctccaaaatacttaattatgatcaggctagtttgactggacaaagcttatttgacttcttacatccaaaagatgttgccaaagtaaaggaacaactttcttcttttgatatttcaccaagagaaaagctaatagatgccaaaactggtttgcaagttcacagtaatctccacgctggaaggacacgtgtgtattctggctcaagacgatcttttttctgtcggataaagagttgtaaaatctctgtcaaagaagagcatggatgcttacccaactcaaagaagaaagagcacagaaaattctatactatccattgcactggttacttgagaagctggcctccaaatattgttggaatggaagaagaaaggaacagtaagaaagacaacagtaattttacctgccttgtggccattggaagattacagccatatattgttccacagaacagtggagagattaatgtgaaaccaactgaatttataacccggtttgcagtgaatggaaaatttgtctatgtagatcaaagggcaacagcgattttaggatatctgcctcaggaacttttgggaacttcttgttatgaatattttcatcaagatgaccacaataatttgactgacaagcacaaagcagttctacagagtaaggagaaaatacttacagattcctacaaattcagagcaaaagatggctcttttgtaactttaaaaagccaatggtttagtttcacaaatccttggacaaaagaactggaatatattgtatctgtcaacactttagttttgggacatagtgagcctggagaagcatcatttttaccttgtagctctcaatcatcagaagaatcctctagacagtcctgtatgagtgtacctggaatgtctactggaacagtacttggtgctggtagtattggaacagatattgcaaatgaaattctggatttacagaggttacagtcttcttcataccttgatgattcgagtccaacaggtttaatgaaagatactcatactgtaaactgcaggagtatgtcaaataaggagttgtttccaccaagtccttctgaaatgggggagctagaggctaccaggcaaaaccagagtactgttgctgtccacagccatgagccactcctcagtgatggtgcacagttggatttcgatgccctatgtgacaatgatgacacagccatggctgcatttatgaattacttagaagcagaggggggcctgggagaccctggggacttcagtgacatccagtggaccctc

SEQ ID NO: 6293 - DNA, 1866 bp, Homo sapiens
  source 1..1866: mol_type = genomic DNA
atggcggcggaagaggaggctgcggcgggaggtaaagtgttgagagaggagaaccagtgcattgctcctgtggtttccagccgcgtgagtccagggacaagaccaacagctatggggtctttcagctcacacatgacagagtttccacgaaaacgcaaaggaagtgattcagacccatcccagtcaggaatcatgacagaaaaagtggtggaaaagctttctcagaatccccttacctatcttctttcaacaaggatagaaatatcagcctccagtggcagcagagaagctcatagccaaactgaaaagcggaggagagataaaatgaataacctgattgaagaactgtctgcaatgatccctcagtgcaaccccatggcgcgtaaactggacaaacttacagttttaagaatggctgttcaacacttgagatctttaaaaggcttgacaaattcttatgtgggaagtaattatagaccatcatttcttcaggataatgagctcagacatttaatccttaagactgcagaaggcttcttatttgtggttggatgtgaaagaggaaaaattctcttcgtttctaagtcagtctccaaaatacttaattatgatcaggctagtttgactggacaaagcttatttgacttcttacatccaaaagatgttgccaaagtaaaggaacaactttcttcttttgatatttcaccaagagaaaagctaatagatgccaaaactggtttgcaagttcacagtaatctccacgctggaaggacacgtgtgtattctggctcaagacgatcttttttctgtcggataaagagttgtaaaatctctgtcaaagaagagcatggatgcttacccaactcaaagaagaaagagcacagaaaattctatactatccattgcactggttacttgagaagctggcctccaaatattgttggaatggaagaagaaaggaacagtaagaaagacaacagtaattttacctgccttgtggccattggaagattacagccatatattgttccacagaacagtggagagattaatgtgaaaccaactgaatttataacccggtttgcagtgaatggaaaatttgtctatgtagatcaaagggcaacagcgattttaggatatctgcctcaggaacttttgggaacttcttgttatgaatattttcatcaagatgaccacaataatttgactgacaagcacaaagcagttctacagagtaaggagaaaatacttacagattcctacaaattcagagcaaaagatggctcttttgtaactttaaaaagccaatggtttagtttcacaaatccttggacaaaagaactggaatatattgtatctgtcaacactttagttttgggacatagtgagcctggagaagcatcatttttaccttgtagctctcaatcatcagaagaatcctctagacagtcctgtatgagtgtacctggaatgtctactggaacagtacttggtgctggtagtattggaacagatattgcaaatgaaattctggatttacagaggttacagtcttcttcataccttgatgattcgagtccaacaggtttaatgaaagatactcatactgtaaactgcaggagtatgtcaaataaggagttgtttccaccaagtccttctgaaatgggggagctagaggctaccaggcaaaaccagagtactgttgctgtccacagccatgagccactcctcagtgatggtgcacagttggatttcgatgccctatgtgacaatgatgacacagccatggctgcatttatgaattacttagaagcagaggggggcctgggagaccctggggacttcagtgacatccagtggaccctc

SEQ ID NO: 6294 - DNA, 1620 bp, Homo sapiens
  source 1..1620: mol_type = genomic DNA
atggcggcggaagaggaggctgcggcgggaggtgaggttgccggtggcgaggcgacggccccaggtaaagtgttgagagaggagaaccagtgcattgctcctgtggtttccagccgcgtgagtccagggacaagaccaacagctatggggtctttcagctcacacatgacagagtttccacgaaaacgcaaaggaagtgattcagacccatcccaagaagctcatagccaaactgaaaagcggaggagagataaaatgaataacctgattgaagaactgtctgcaatgatccctcagtgcaaccccatggcgcgtaaactggacaaacttacagttttaagaatggctgttcaacacttgagatctttaaaaggcttgacaaattcttatgtgggaagtaattatagaccatcatttcttcaggataatgagctcagacatttaatccttaagactgcagaaggcttcttatttgtggttggatgtgaaagaggaaaaattctcttcgtttctaagtcagtctccaaaatacttaattatgatcaggctagtttgactggacaaagcttatttgacttcttacatccaaaagatgttgccaaagtaaaggaacaactttcttcttttgatatttcaccaagagaaaagctaatagatgccaaaactggtttgcaagttcacagtaatctccacgctggaaggacacgtgtgtattctggctcaagacgatcttttttctgtcggataaagagttgtaaaatctctgtcaaagaagagcatggatgcttacccaactcaaagaagaaagagcacagaaaattctatactatccattgcactggttacttgagaagctggcctccaaatattgttggaatggaagaagaaaggaacagtaagaaagacaacagtaattttacctgccttgtggccattggaagattacagccatatattgttccacagaacagtggagagattaatgtgaaaccaactgaatttataacccggtttgcagtgaatggaaaatttgtctatgtagatcaaagggcaacagcgattttaggatatctgcctcaggaacttttgggaacttcttgttatgaatattttcatcaagatgaccacaataatttgactgacaagcacaaagcagttctacagagtaaggagaaaatacttacagattcctacaaattcagagcaaaagatggctcttttgtaactttaaaaagccaatggtttagtttcacaaatccttggacaaaagaactggaatatattgtatctgtcaacactttagttttgggacatagtgagcctggagaagcatcatttttaccttgtagctctcaatcatcagaagaatcctctagacagtcctgtatgagtgtacctggaatgtctactggaacagtacttggtgctggtagtattggaacagatattgcaaatgaaattctggatttacagaggttacagtcttcttcataccttgatgattcgagtccaacaggtttaatgaaagatactcatactgtaaactgcaggagtgtgatggtgcacagttggatttcgatgccctatgtgacaatgatgacacagccatggctgcattta

SEQ ID NO: 6295 - DNA, 2211 bp, Homo sapiens
  source 1..2211: mol_type = genomic DNA
atggaacagttccgccacttgccaatgcctttccactggaagcaggaagaactcaagtttaagacaggcttgcggaggctgcagcaccgagtaggggagatccaccttctccgagaagccctgcagaagggggctgaggctggccaagtgtctctgcacagcttgatagaaactcctgctaatgggactgggccaagtgaggccctggccatgctactgcaggagaccactggagagctagaggcagccaaagccctagtgctgaagaggatccagatttggaaacggcagcagcagctggcagggaatggcgcaccgtttgaggagagcctggccccactccaggagaggtgtgaaagcctggtggacatttattcccagctacagcaggaggtaggggcggctggtggggagcttgagcccaagacccgggcatcgctgactggccggctggatgaagtcctgagaaccctcgtcaccagttgcttcctggtggagaagcagcccccccaggtactgaagactcagaccaagttccaggctggagttcgattcctgttgggcttgaggttcctgggggccccagccaagcctccgctggtcagggccgacatggtgacagagaagcaggcgcgggagctgagtgtgcctcagggtcctggggctggagcagaaagcactggagaaatcatcaacaacactgtgcccttggagaacagcattcctgggaactgctgctctgccctgttcaagaacctgcttctcaagaagatcaagcggtgtgagcggaagggcactgagtctgtcacagaggagaagtgcgctgtgctcttctctgccagcttcacacttggccccggcaaactccccatccagctccaggccctgtctctgcccctggtggtcatcgtccatggcaaccaagacaacaatgccaaagccactatcctgtgggacaatgccttctctgagatggaccgcgtgccctttgtggtggctgagcgggtgccctgggagaagatgtgtgaaactctgaacctgaagttcatggctgaggtggggaccaaccgggggctgctcccagagcacttcctcttcctggcccagaagatcttcaatgacaacagcctcagtatggaggccttccagcaccgttctgtgtcctggtcgcagttcaacaaggagatcctgctgggccgtggcttcaccttttggcagtggtttgatggtgtcctggacctcaccaaacgctgtctccggagctactggtctgaccggctgatcattggcttcatcagcaaacagtacgttactagccttcttctcaatgagcccgacggaacctttctcctccgcttcagcgactcagagattgggggcatcaccattgcccatgtcatccggggccaggatggctctccacagatagagaacatccagccattctctgccaaagacctgtccattcgctcactgggggaccgaatccgggatcttgctcagctcaaaaatctctatcccaagaagcccaaggatgaggctttccggagccactacaagcctgaacagatgggtaaggatggcaggggttatgtcccagctaccatcaagatgaccgtggaaagggaccaaccacttcctaccccagagctccagatgcctaccatggtgccttcttatgaccttggaatggcccctgattcctccatgagcatgcagcttggcccagatatggtgccccaggtgtacccaccacactctcactccatccccccgtatcaaggcctctccccagaagaatcagtcaacgtgttgtcagccttccaggagcctcacctgcagatgccccccagcctgggccagatgagcctgccctttgaccagcctcacccccagggcctgctgccgtgccagcctcaggagcatgctgtgtccagccctgaccccctgctctgctcagatgtgaccatggtggaagacagctgcctgagccagccagtgacagcgtttcctcagggcacttggattggtgaagacatattccctcctctgctgcctcccactgaacaggacctcactaagcttctcctggaggggcaaggggagtcggggggagggtccttgggggcacagcccctcctgcagccctcccactatgggcaatctgggatctcaatgtcccacatggacctaagggccaaccccagttgg

SEQ ID NO: 6296 - DNA, 2166 bp, Homo sapiens
  source 1..2166: mol_type = genomic DNA
atggcccaatggaatcagctacagcagcttgacacacggtacctggagcagctccatcagctctacagtgacagcttcccaatggagctgcggcagtttctggccccttggattgagagtcaagattgggcatatgcggccagcaaagaatcacatgccactttggtgtttcataatctcctgggagagattgaccagcagtatagccgcttcctgcaagagtcgaatgttctctatcagcacaatctacgaagaatcaagcagtttcttcagagcaggtatcttgagaagccaatggagattgcccggattgtggcccggtgcctgtgggaagaatcacgccttctacagactgcagccactgcggcccagcaagggggccaggccaaccaccccacagcagccgtggtgacggagaagcagcagatgctggagcagcaccttcaggatgtccggaagagagtgcaggatctagaacagaaaatgaaagtggtagagaatctccaggatgactttgatttcaactataaaaccctcaagagtcaaggagacatgcaagatctgaatggaaacaaccagtcagtgaccaggcagaagatgcagcagctggaacagatgctcactgcgctggaccagatgcggagaagcatcgtgagtgagctggcggggcttttgtcagcgatggagtacgtgcagaaaactctcacggacgaggagctggctgactggaagaggcggcaacagattgcctgcattggaggcccgcccaacatctgcctagatcggctagaaaactggataacgtcattagcagaatctcaacttcagacccgtcaacaaattaagaaactggaggagttgcagcaaaaagtttcctacaaaggggaccccattgtacagcaccggccgatgctggaggagagaatcgtggagctgtttagaaacttaatgaaaagtgcctttgtggtggagcggcagccctgcatgcccatgcatcctgaccggcccctcgtcatcaagaccggcgtccagttcactactaaagtcaggttgctggtcaaattccctgagttgaattatcagcttaaaattaaagtgtgcattgacaaagactctggggacgttgcagctctcagaggatcccggaaatttaacattctgggcacaaacacaaaagtgatgaacatggaagaatccaacaacggcagcctctctgcagaattcaaacacttgaccctgagggagcagagatgtgggaatgggggccgagccaattgtgatgcttccctgattgtgactgaggagctgcacctgatcacctttgagaccgaggtgtatcaccaaggcctcaagattgacctagagacccactccttgccagttgtggtgatctccaacatctgtcagatgccaaatgcctgggcgtccatcctgtggtacaacatgctgaccaacaatcccaagaatgtaaacttttttaccaagcccccaattggaacctgggatcaagtggccgaggtcctgagctggcagttctcctccaccaccaagcgaggactgagcatcgagcagctgactacactggcagagaaactcttgggacctggtgtgaattattcagggtgtcagatcacatgggctaaattttgcaaagaaaacatggctggcaagggcttctccttctgggtctggctggacaatatcattgaccttgtgaaaaagtacatcctggccctttggaacgaagggtacatcatgggctttatcagtaaggagcgggagcgggccatcttgagcactaagcctccaggcaccttcctgctaagattcagtgaaagcagcaaagaaggaggcgtcactttcacttgggtggagaaggacatcagcggtaagacccagatccagtccgtggaaccatacacaaagcagcagctgaacaacatgtcatttgctgaaatcatcatgggctataagatcatggatgctaccaatatcctggtgtctccactggtctatctctatcctgacattcccaaggaggaggcattcggaaagtattgtcggccagagagccaggagcatcctgaagctgacccaggtagcgctgccccatacctgaagaccaagtttatctgtgtgacaccattcattgatgcagtttggaaa

SEQ ID NO: 6297 - DNA, 2307 bp, Homo sapiens
  source 1..2307: mol_type = genomic DNA
atggcccaatggaatcagctacagcagcttgacacacggtacctggagcagctccatcagctctacagtgacagcttcccaatggagctgcggcagtttctggccccttggattgagagtcaagattgggcatatgcggccagcaaagaatcacatgccactttggtgtttcataatctcctgggagagattgaccagcagtatagccgcttcctgcaagagtcgaatgttctctatcagcacaatctacgaagaatcaagcagtttcttcagagcaggtatcttgagaagccaatggagattgcccggattgtggcccggtgcctgtgggaagaatcacgccttctacagactgcagccactgcggcccagcaagggggccaggccaaccaccccacagcagccgtggtgacggagaagcagcagatgctggagcagcaccttcaggatgtccggaagagagtgcaggatctagaacagaaaatgaaagtggtagagaatctccaggatgactttgatttcaactataaaaccctcaagagtcaaggagacatgcaagatctgaatggaaacaaccagtcagtgaccaggcagaagatgcagcagctggaacagatgctcactgcgctggaccagatgcggagaagcatcgtgagtgagctggcggggcttttgtcagcgatggagtacgtgcagaaaactctcacggacgaggagctggctgactggaagaggcggcaacagattgcctgcattggaggcccgcccaacatctgcctagatcggctagaaaactggataacgtcattagcagaatctcaacttcagacccgtcaacaaattaagaaactggaggagttgcagcaaaaagtttcctacaaaggggaccccattgtacagcaccggccgatgctggaggagagaatcgtggagctgtttagaaacttaatgaaaagtgcctttgtggtggagcggcagccctgcatgcccatgcatcctgaccggcccctcgtcatcaagaccggcgtccagttcactactaaagtcaggttgctggtcaaattccctgagttgaattatcagcttaaaattaaagtgtgcattgacaaagactctggggacgttgcagctctcagaggatcccggaaatttaacattctgggcacaaacacaaaagtgatgaacatggaagaatccaacaacggcagcctctctgcagaattcaaacacttgaccctgagggagcagagatgtgggaatgggggccgagccaattgtgatgcttccctgattgtgactgaggagctgcacctgatcacctttgagaccgaggtgtatcaccaaggcctcaagattgacctagagacccactccttgccagttgtggtgatctccaacatctgtcagatgccaaatgcctgggcgtccatcctgtggtacaacatgctgaccaacaatcccaagaatgtaaacttttttaccaagcccccaattggaacctgggatcaagtggccgaggtcctgagctggcagttctcctccaccaccaagcgaggactgagcatcgagcagctgactacactggcagagaaactcttgggacctggtgtgaattattcagggtgtcagatcacatgggctaaattttgcaaagaaaacatggctggcaagggcttctccttctgggtctggctggacaatatcattgaccttgtgaaaaagtacatcctggccctttggaacgaagggtacatcatgggctttatcagtaaggagcgggagcgggccatcttgagcactaagcctccaggcaccttcctgctaagattcagtgaaagcagcaaagaaggaggcgtcactttcacttgggtggagaaggacatcagcggtaagacccagatccagtccgtggaaccatacacaaagcagcagctgaacaacatgtcatttgctgaaatcatcatgggctataagatcatggatgctaccaatatcctggtgtctccactggtctatctctatcctgacattcccaaggaggaggcattcggaaagtattgtcggccagagagccaggagcatcctgaagctgacccaggcgctgccccatacctgaagaccaagtttatctgtgtgacaccaacgacctgcagcaataccattgacctgccgatgtccccccgcactttagattcattgatgcagtttggaaataatggtgaaggtgctgaaccctcagcaggagggcagtttgagtccctcacctttgacatggagttgacctcggagtgcgctacctcccccatg

SEQ ID NO: 6298 - DNA, 2541 bp, Homo sapiens
  source 1..2541: mol_type = genomic DNA
atggcgcagtgggaaatgctgcagaatcttgacagcccctttcaggatcagctgcaccagctttactcgcacagcctcctgcctgtggacattcgacagtacttggctgtctggattgaagaccagaactggcaggaagctgcacttgggagtgatgattccaaggctaccatgctattcttccacttcttggatcagctgaactatgagtgtggccgttgcagccaggacccagagtccttgttgctgcagcacaatttgcggaaattctgccgggacattcaggatcctacccagttggctgagatgatctttaacctccttctggaagaaaaaagaattttgatccaggctcagagggcccaattggaacaaggagagccagttctcgaaacacctgtggagagccagcaacatgagattgaatcccggatcctggatttaagggctatgatggagaagctggtaaaatccatcagccaactgaaagaccagcaggatgtcttctgcttccgatataagatccaggccaaagggaagacaccctctctggacccccatcagaccaaagagcagaagattctgcaggaaactctcaatgaactggacaaaaggagaaaggaggtgctggatgcctccaaagcactgctaggccgattaactaccctaatcgagctactgctgccaaagttggaggagtggaaggcccagcagcaaaaagcctgcatcagagctcccattgaccacgggttggaacagctggagacatggttcacagctggagcaaagctgttgtttcacctgaggcagctgctgaaggagctgaagggactgagttgcctggttagctatcaggatgaccctctgaccaaaggggtggacctacgcaacgcccaggtcacagagttgctacagcgtctgctccacagagcctttgtggtagaaacccagccctgcatgccccaaactccccatcgacccctcatcctcaagactggcagcaagttcaccgtccgaacaaggctgctggtgagactccaggaaggcaatgagtcactgactgtggaagtctccattgacaggaatcctcctcaattacaaggcttccggaagttcaacattctgacttcaaaccagaaaactttgacccccgagaaggggcagagtcagggtttgatttgggactttggttacctgactctggtggagcaacgttcaggtggttcaggaaagggcagcaataaggggccactaggtgtgacagaggaactgcacatcatcagcttcacggtcaaatatacctaccagggtctgaagcaggagctgaaaacggacaccctccctgtggtgattatttccaacatgaaccagctctcaattgcctgggcttcagttctctggttcaatttgctcagcccaaaccttcagaaccagcagttcttctccaacccccccaaggccccctggagcttgctgggccctgctctcagttggcagttctcctcctatgttggccgaggcctcaactcagaccagctgagcatgctgagaaacaagctgttcgggcagaactgtaggactgaggatccattattgtcctgggctgacttcactaagcgagagagccctcctggcaagttaccattctggacatggctggacaaaattctggagttggtacatgaccacctgaaggatctctggaatgatggacgcatcatgggctttgtgagtcggagccaggagcgccggctgctgaagaagaccatgtctggcacctttctactgcgcttcagtgaatcgtcagaagggggcattacctgctcctgggtggagcaccaggatgatgacaaggtgctcatctactctgtgcaaccgtacacgaaggaggtgctgcagtcactcccgctgactgaaatcatccgccattaccagttgctcactgaggagaatatacctgaaaacccactgcgcttcctctatccccgaatcccccgggatgaagcttttgggtgctactaccaggagaaagttaatctccaggaacggaggaaatacctgaaacacaggctcattgtggtctctaatagacaggtggatgaactgcaacaaccgctggagcttaagccagagccagagctggagtcattagagctggaactagggctggtgccagagccagagctcagcctggacttagagccactgctgaaggcagggctggatctggggccagagctagagtctgtgctggagtccactctggagcctgtgatagagcccacactatgcatggtatcacaaacagtgccagagccagaccaaggacctgtatcacagccagtgccagagccagatttgccctgtgatctgagacatttgaacactgagccaatggaaatcttcagaaactgtgtaaagattgaagaaatcatgccgaatggtgacccactgttggctggccagaacaccgtggatgaggtttacgtctcccgccccagccacttctacactgatggacccttgatgccttctgacttc

SEQ ID NO: 6299 - DNA, 2553 bp, Homo sapiens
  source 1..2553: mol_type = genomic DNA
atggcgcagtgggaaatgctgcagaatcttgacagcccctttcaggatcagctgcaccagctttactcgcacagcctcctgcctgtggacattcgacagtacttggctgtctggattgaagaccagaactggcaggaagctgcacttgggagtgatgattccaaggctaccatgctattcttccacttcttggatcagctgaactatgagtgtggccgttgcagccaggacccagagtccttgttgctgcagcacaatttgcggaaattctgccgggacattcagcccttttcccaggatcctacccagttggctgagatgatctttaacctccttctggaagaaaaaagaattttgatccaggctcagagggcccaattggaacaaggagagccagttctcgaaacacctgtggagagccagcaacatgagattgaatcccggatcctggatttaagggctatgatggagaagctggtaaaatccatcagccaactgaaagaccagcaggatgtcttctgcttccgatataagatccaggccaaagggaagacaccctctctggacccccatcagaccaaagagcagaagattctgcaggaaactctcaatgaactggacaaaaggagaaaggaggtgctggatgcctccaaagcactgctaggccgattaactaccctaatcgagctactgctgccaaagttggaggagtggaaggcccagcagcaaaaagcctgcatcagagctcccattgaccacgggttggaacagctggagacatggttcacagctggagcaaagctgttgtttcacctgaggcagctgctgaaggagctgaagggactgagttgcctggttagctatcaggatgaccctctgaccaaaggggtggacctacgcaacgcccaggtcacagagttgctacagcgtctgctccacagagcctttgtggtagaaacccagccctgcatgccccaaactccccatcgacccctcatcctcaagactggcagcaagttcaccgtccgaacaaggctgctggtgagactccaggaaggcaatgagtcactgactgtggaagtctccattgacaggaatcctcctcaattacaaggcttccggaagttcaacattctgacttcaaaccagaaaactttgacccccgagaaggggcagagtcagggtttgatttgggactttggttacctgactctggtggagcaacgttcaggtggttcaggaaagggcagcaataaggggccactaggtgtgacagaggaactgcacatcatcagcttcacggtcaaatatacctaccagggtctgaagcaggagctgaaaacggacaccctccctgtggtgattatttccaacatgaaccagctctcaattgcctgggcttcagttctctggttcaatttgctcagcccaaaccttcagaaccagcagttcttctccaacccccccaaggccccctggagcttgctgggccctgctctcagttggcagttctcctcctatgttggccgaggcctcaactcagaccagctgagcatgctgagaaacaagctgttcgggcagaactgtaggactgaggatccattattgtcctgggctgacttcactaagcgagagagccctcctggcaagttaccattctggacatggctggacaaaattctggagttggtacatgaccacctgaaggatctctggaatgatggacgcatcatgggctttgtgagtcggagccaggagcgccggctgctgaagaagaccatgtctggcacctttctactgcgcttcagtgaatcgtcagaagggggcattacctgctcctgggtggagcaccaggatgatgacaaggtgctcatctactctgtgcaaccgtacacgaaggaggtgctgcagtcactcccgctgactgaaatcatccgccattaccagttgctcactgaggagaatatacctgaaaacccactgcgcttcctctatccccgaatcccccgggatgaagcttttgggtgctactaccaggagaaagttaatctccaggaacggaggaaatacctgaaacacaggctcattgtggtctctaatagacaggtggatgaactgcaacaaccgctggagcttaagccagagccagagctggagtcattagagctggaactagggctggtgccagagccagagctcagcctggacttagagccactgctgaaggcagggctggatctggggccagagctagagtctgtgctggagtccactctggagcctgtgatagagcccacactatgcatggtatcacaaacagtgccagagccagaccaaggacctgtatcacagccagtgccagagccagatttgccctgtgatctgagacatttgaacactgagccaatggaaatcttcagaaactgtgtaaagattgaagaaatcatgccgaatggtgacccactgttggctggccagaacaccgtggatgaggtttacgtctcccgccccagccacttctacactgatggacccttgatgccttctgacttc

SEQ ID NO: 6300 - DNA, 2250 bp, Homo sapiens
  source 1..2250: mol_type = genomic DNA
atgtctcagtggtacgaacttcagcagcttgactcaaaattcctggagcaggttcaccagctttatgatgacagttttcccatggaaatcagacagtacctggcacagtggttagaaaagcaagactgggagcacgctgccaatgatgtttcatttgccaccatccgttttcatgacctcctgtcacagctggatgatcaatatagtcgcttttctttggagaataacttcttgctacagcataacataaggaaaagcaagcgtaatcttcaggataattttcaggaagacccaatccagatgtctatgatcatttacagctgtctgaaggaagaaaggaaaattctggaaaacgcccagagatttaatcaggctcagtcggggaatattcagagcacagtgatgttagacaaacagaaagagcttgacagtaaagtcagaaatgtgaaggacaaggttatgtgtatagagcatgaaatcaagagcctggaagatttacaagatgaatatgacttcaaatgcaaaaccttgcagaacagagaacacgagaccaatggtgtggcaaagagtgatcagaaacaagaacagctgttactcaagaagatgtatttaatgcttgacaataagagaaaggaagtagttcacaaaataatagagttgctgaatgtcactgaacttacccagaatgccctgattaatgatgaactagtggagtggaagcggagacagcagagcgcctgtattggggggccgcccaatgcttgcttggatcagctgcagaactggttcactatagttgcggagagtctgcagcaagttcggcagcagcttaaaaagttggaggaattggaacagaaatacacctacgaacatgaccctatcacaaaaaacaaacaagtgttatgggaccgcaccttcagtcttttccagcagctcattcagagctcgtttgtggtggaaagacagccctgcatgccaacgcaccctcagaggccgctggtcttgaagacaggggtccagttcactgtgaagttgagactgttggtgaaattgcaagagctgaattataatttgaaagtcaaagtcttatttgataaagatgtgaatgagagaaatacagtaaaaggatttaggaagttcaacattttgggcacgcacacaaaagtgatgaacatggaggagtccaccaatggcagtctggcggctgaatttcggcacctgcaattgaaagaacagaaaaatgctggcaccagaacgaatgagggtcctctcatcgttactgaagagcttcactcccttagttttgaaacccaattgtgccagcctggtttggtaattgacctcgagacgacctctctgcccgttgtggtgatctccaacgtcagccagctcccgagcggttgggcctccatcctttggtacaacatgctggtggcggaacccaggaatctgtccttcttcctgactccaccatgtgcacgatgggctcagctttcagaagtgctgagttggcagttttcttctgtcaccaaaagaggtctcaatgtggaccagctgaacatgttgggagagaagcttcttggtcctaacgccagccccgatggtctcattccgtggacgaggttttgtaaggaaaatataaatgataaaaattttcccttctggctttggattgaaagcatcctagaactcattaaaaaacacctgctccctctctggaatgatgggtgcatcatgggcttcatcagcaaggagcgagagcgtgccctgttgaaggaccagcagccggggaccttcctgctgcggttcagtgagagctcccgggaaggggccatcacattcacatgggtggagcggtcccagaacggaggcgaacctgacttccatgcggttgaaccctacacgaagaaagaactttctgctgttactttccctgacatcattcgcaattacaaagtcatggctgctgagaatattcctgagaatcccctgaagtatctgtatccaaatattgacaaagaccatgcctttggaaagtattactccaggccaaaggaagcaccagagccaatggaacttgatggccctaaaggaactggatatatcaagactgagttgatttctgtgtctgaagttcacccttctagacttcagaccacagacaacctgctccccatgtctcctgaggagtttgacgaggtgtctcggatagtgggctctgtagaattcgacagtatgatgaacacagta

SEQ ID NO: 6301 - DNA, 2967 bp, Homo sapiens
  source 1..2967: mol_type = genomic DNA
atggctcgtccggttcagctggctccgggttctctggctctggttctgtgccgtctggaagctcagaaagctgctggtgctgctgaagaaccgggtggtcgtgctgttttccgtgctttccgtcgtgctaacgctcgttgcttctggaacgctcgtctggctcgtgctgcttctcgtctggctttccagggttggctgcgtcgtggtgttctgctggttcgtgctccgccggcttgcctgcaggttctgcgtgacgcttggcgtcgtcgtgctctgcgtccgccgcgtggtttccgtatccgtgctgttggtgacgttttcccggttcagatgaacccgatcacccagtctcagttcgttccgctgggtgaagttctgtgctgcgctatctctgacatgaacaccgctcagatcgttgttacccaggaatctctgctggaacgtctgatgaaacactacccgggtatcgctatcccgtctgaagacatcctgtacaccaccctgggtaccctgatcaaagaacgtaaaatctaccacaccggtgaaggttacttcatcgttaccccgcagacctacttcatcaccaacaccaccacccaggaaaacaaacgtatgctgccgtctgatgaaagtcgcctgatgccagcttccatgacatatctggtgagcatggagagctgtgcagagtcagcccaagagaatgctgcccccatatcccactgtcagtcttgccagtgtttccgggacatgcacactcaggatgttcaggaagcaccagttgctgcagaagtgactaggaagagtcacagaggtcttggggaatccgtatcttgggtacagaatggggcagtttcagtgtctgcggagcaccacatttgtgagagcaccaaacctttaccatacacaagagataaagaaaaaggcaagaagtttggttttagtctcttatggcgcagcttatctagaaaggagaagcccaaaacagaacacagcagtttctctgctcagttcccacctgaagaatggcccgtccgagatgaagatgacttggacaatatccctcgagatgttgaacatgagataatcaaacgaattaaccccattttgactgttgacaatttaatcaaacacactgtcctaatgcaaaaatacgaagaacagaaaaaatataatagccagggcacttccactgacatgctgacaatcgggcataagtatccttcaaaagagggggttaagaaaaggcagggtctgtctgcaaaacctcaagggcagggccattctcgaagggatagacacaaagccaggaatcagggaagtgagtttcagccaggaagcattagactggagaaacaccccaagctccctgctacacagcccatccccagaattaaaagcccaaatgaaatggtaggtcagaaaccacttggtgagattacaacagtgctaggttcccatttgatttacaaaaagcgaatcagtaatcctttccagggtttgtctcaccgaggaagcacaatatccaaagggcacaaaattcagaagacgagtgatctgaaacccagccagactggaccaaaggaaaagcctttccaaaagcctaggtccttggattcctcaagaatctttgatggtaaagccaaagagccatatgctgaacaacctaatgataaaatggaagcagaatccatttacataaatgaccctactgtcaaacccatcaatgatgacttcagaggtcacctcttcagtcaccctcaacagagcatgttgcaaaatgatggtaaatgctgtccctttatggaaagcatgttgagatatgaagtgtatggtggagaaaatgaggtaattcctgaagtcttgaggaaaagtcattcccactttgacaaattaggggagaccaaacagactccgcatagtctgccatcacgaggtgcctccttttcagaccgaacaccctctgcttgtagattagtggataacacaatacaccagtttcaaaatcttggccttttggattacccagttggcgtgaaccctttaagacaagctgcaagacaagacaaagactcagaagaattattgagaaaaggatttgtccaggatgcagagactacaagcctagaaaatgaacagctttctaacgatgaccaggccttgtatcagaatgaagtggaagatgatgatggtgcctgtagttcattatatctagaggaggatgacatttctgagaatgacgacttacgtcaaatgctgcctggccacagtcagtattccttcacaggtggaagccagggaaatcatttaggaaaacaaaaagtgattgagagatctctgaccgagtacaacagcacaatggagagggttgagtctcaggtgcttaaaagaaatgaatgctacaaacccactgggctgcatgctaccccaggtgaaagccaagaacctaacctctctgctgaaagttgtggcctaaattcaggggcccagtttggttttaactacgaagaagaacccagtgttgctaaatgtgtacaggcctcagcacctgctgatgaaagaatctttgattactatagcgcaagaaaagccagttttgaagctgaagtcatacaagacactattggtgacacaggaaagaagccagctagctggagtcagagtcctcagaatcaggaaatgagaaaacatttcccacaaaagttccaacttttcaacacttcacatatgccagtgttggctcaggatgtccaatatgaacacagtcacttggaagggacagaaaatcacagcatggcaggagatagtggaatagattctccacggacacagagtctgggatctaataattcagtcattttggatggactaaaaagaagacagaattttctgcaaaatgtcgaaggcacaaagagcagtcaaccactcacatctaattccttactaccgctaactccagtcataaacgtt

SEQ ID NO: 6302 - DNA, 681 bp, Homo sapiens
  source 1..681: mol_type = genomic DNA
atggctcgtccggttcagctggctccgggttctctggctctggttctgtgccgtctggaagctcagaaagctgctggtgctgctgaagaaccgggtggtcgtgctgttttccgtgctttccgtcgtgctaacgctcgttgcttctggaacgctcgtctggctcgtgctgcttctcgtctggctttccagggttggctgcgtcgtggtgttctgctggttcgtgctccgccggcttgcctgcaggttctgcgtgacgcttggcgtcgtcgtgctctgcgtccgccgcgtggtttccgtatccgtgctgttggtgacgttttcccggttcagatgaacccgatcacccagtctcagttcgttccgctgggtgaagttctgtgctgcgctatctctgacatgaacaccgctcagatcgttgttacccaggaatctctgctggaacgtctgatgaaacactacccgggtatcgctatcccgtctgaagacatcctgtacaccaccctgggtaccctgatcaaagaacgtaaaatctaccacaccggtgaaggttacttcatcgttaccccgcagacctacttcatcaccaacaccaccacccaggaaaacaaacgtatgctgccgtctgacgaatctcgtctgatgccggcttctatgacctacctggacaccgaatctggtatc

SEQ ID NO: 6303 - DNA, 507 bp, Homo sapiens
  source 1..507: mol_type = genomic DNA
atggctcgtccggttcaactcgctccaggttctctcgctctggttctctgtcgtctcgaagctcaaaaagctgctggtgctgctgaagaaccgggcggtcgtgctgtttttcgtgcatttcgccgtgctaatgctcgttgtttttggaatgctcgtctcgctcgtgctgcttctcgtctcgcttttcaaggttggctccgtcgtggtgttctcctcgttcgtgctccgccggcttgtctccaagttctccgtgacgcttggcgtcgtcgtgctctccgtccaccacgtggttttcgtattcgtgctgttggcgacgttttcccggttcagatgaacccgatcacccagtcccaatttgttccgctgggcgaggtactgtgttgcgcaatctccgacatgaacaccgcacaaatcgttgttacccaagagtctctgctggaacgcctgatgaagcactatccgggtcatcgtgtttgggacctgatcatccaatctttctggatggat

SEQ ID NO: 6304 - DNA, 2082 bp, Homo sapiens
  source 1..2082: mol_type = genomic DNA
atggagaataaaagcctggagagctcccagacagacctgaagctggtggcccacccccgcgccaagagcaaggtgtggaagtatttcggcttcgacaccaacgccgagggatgcatcctgcagtggaagaaaatctactgccgcatctgcatggcccagatcgcctactccggaaacacctccaacctgtcctaccacctggagaagaaccaccccgaggaattctgcgagttcgtcaagagcaacacggagcagatgcgtgaagccttcgccaccgccttctccaagctgaagcccgagtcgtcccagcagcccgggcaggacgcgctggccgtcaaggccggccacggctacgacagcaagaagcagcaggagctgacggccgccgtgctgggcctcatctgcgaggggctgtacccagcctccatcgtggacgagcccaccttcaaggtgctgctgaagacggccgacccccggtatgagctgcccagccggaagtacatctctaccaaggccatccctgagaagtacggggccgtccgggaggtgatcctgaaggagctggccgaggccacctggtgtggcatctccaccgacatgtggaggagtgagaatcagaaccgcgcctacgtcacgctggccgcccacttcctgggcctgggcgcccccaactgcctgtccatgggctcccgctgcctgaagaccttcgaggtgcccgaagagaacacggcggagaccatcacgcgagtgctctatgaggtcttcatcgagtggggcatcagcgccaaggtcttcggggccaccaccaactatggcaaggacatcgtgaaggcgtgctccctgctggacgtcgcagtgcacatgccctgcctgggccacaccttcaatgccggcatccagcaggccttccagctcccgaagctgggggcgctgctgtcgcgctgccgcaaactggtggagtacttccagcagtctgccgtggccatgtacatgctctatgagaagcagaagcagcagaacgtggcccactgcatgctggtgagcaaccgcgtctcctggtgggggagcacgctggccatgctgcagcgcctcaaggagcagcagttcgtcatcgccggggtcttggtggaggacagcaacaaccaccacctcatgctggaggccagcgagtgggccaccatcgaggggctggtggagctcctgcagcccttcaagcaggtggccgagatgctgtcggcctccaggtaccccaccatcagcatggtgaagccgctgctgcacatgctcctgaacaccacgctcaacatcaaggagaccgactccaaggagctcagcatggccaaggaggtcatcgccaaggagctttccaagacctaccaggagacgcccgagatcgacatgtttctcaacgtggccaccttcctggacccccgctacaagaggctgcccttcctctccgccttcgagcggcagcaggtggagaatcgcgtggtggaagaggccaagggcctgctggacaaggtcaaagacggcggctaccggccggctgaggacaagatcttcccggtgcccgaggagcctcccgtcaagaagctcatgcggacatccacgccgccgcccgccagcgtcatcaacaacatgctggccgagatcttctgccagacaggcggcgtggaggaccaggaagagtggcatgcccaggtggtggaggagctgagcaacttcaagtcccagaaggtgcttggcctcaacgaagaccccctcaagtggtggtcagaccgcctggccctcttccccctgctgcccaaggtgctgcagaagtactggtgcgtgacggccacgcgcgtcgcccctgagcgtctcttcggatccgccgccaacgtggtcagcgccaagaggaaccggctggctcccgcgcacgtggacgagcaggtgtttctgtatgagaacgcccggagtggggcagaggcggaacccgaggaccaggacgagggggagtggggcctggaccaggagcaggtgttctccttgggggatggcgtcagcggcggtttctttggcattagggacagcagcttcctg

SEQ ID NO: 6305 - DNA, 654 bp, Homo sapiens
  source 1..654: mol_type = genomic DNA
atgatgaggcgggaagacgaggaagaggagggaacaatgatgaaggcaaaaggggacttagagatgaaggaggaggaagagattagtgagacaggagaactggttggcccttttgtgagtgctatgcccactccaatgccccacaacaagggcacccggttctctgaggcatgggaatatttccacctagctcctgctcgtgctgggcaccatcccaaccagtatgccacctgccgcctgtgtggcaggcaggtgagccgtggccctggggtcaacgtgggcaccactgcactgtggaagcatctgaaaagcatgcacagagaggagctggagaagagtggccatggtcaggctgggcagcgccaggatccaaggccccacgggccccagctccccacaggcattgagggtaactggggtaggctcctggagcaggtgggcaccatggctttgtgggccagccaaagggaaaaggaggtgcttaggagggaaagggcagtggaatggcgggagagggctgtggaaaaaagggagcgagccctggaggaggtggaaagggccatcctggagatgaagtggaaggtgagggctgagaaggaggcatgccagcgggagaaagagctgcctgcagcagtacatcccttccattttgtt

SEQ ID NO: 6306 - DNA, 702 bp, Homo sapiens
  source 1..702: mol_type = genomic DNA
atgaggagtggcgagccggcctgcaccatggaccaggcccgcgggctggacgacgcggcggcgcggggcggtcagtgtccgggactggggccggcgccgacgccgacgcctcccggccgcctgggggcgccatactccgaggcctggggctacttccacctggcgccggggcgccccgggcatccgtcgggccactgggccacctgccgtctgtgcggggagcaggtgggccgcggcccgggcttccacgcggggacctcggcgttgtggaggcacctgaggagcgcgcaccggcgggagctggagagcagcggcgccgggagctccccacctgccgcgccctgcccgccgccgcccggccccgctgcggcccccgagggcgactgggcgcgcctgctggaacagatgggcgcgctggccgtgcgcggcagccggcgggagcgggagctggagcggcgcgagctggccgtggagcagggcgagcgcgccctggagcggaggcggagggcgctgcaggaggaagagcgcgccgcggcccaggcgcgccgggaactgcaggccgagcgggaggcgctgcaggcgcggctgcgggatgtgagccgccgtgagggcgccctgggctgggcccccgctgcgccgccgccgctcaaggacgaccccgagggtgacagggacggctgcgtcatcacaaaggtcctcctg

SEQ ID NO: 6307 - DNA, 3513 bp, Homo sapiens
  source 1..3513: mol_type = genomic DNA
atggagaataacttgaaaacttgtcccaaagaggacggtgatttcgtttctgataaaataaagtttaaaatagaagaggaagatgatgatggaattcctcctgatagtttggaaagaatggactttaaaagcgagcaggaggacatgaagcagacagacagcggtggggagcgagcgggcctcggtgggacgggttgcagctgcaagcccccggggaagtacttgtctgcagagagtgaggatgactatggcgcgctgttctcccagtacagcagcaccctatacgacgtggccatggaggccgtgacccagagcctcctttccagccggaacatgagctccaggaagaagtctccagcctggaagcatttttttatctctccccgagacagcactaaagcaatatgcatgtactgtgtgaaggagttcagcagaggcaaaaacgagaaagacttgagtaccagttgtctcatgaggcacgtgaggcgcgcacacccgaccgtgctcattcaggaaaatggcagtgtgtctgccgtgtcctcgttcccctctccctcactcctgcttccaccacagcctgcggacgcgggtgacctcagcaccatcctctcacccatcaaacttgtccagaaagtggcgtctaagatcccgtcccccgatcgaataacagaggagtctgtgtctgtagtttcttctgaagaaatctcctctgacatgtccgtttcggagaagtgcggcagagaagaagccctggtggggtcgtctccccacctccctgctctccattacgatgaacctgcagagaacttagcggagaagagccttccacttccaaagagcacctctgggtccaggagaaggtccgctgtctggaagcacttctacctgtcgccactggacaactccaaagctgtctgcattcactgcatgaacgagttcagccgggggaagaatgggaaggacctgggcacgagctgcctcatcaggcacatgtggagggcacaccgcgccatcgtgttgcaggagaacgggggcacgggcatcccgccactgtactccacccctcccactctgctgccttccttgctgccgccggagggggagctcagctctgtgtcctcgtctccagtaaagccggtcagagagtccccttcggcctcctcctcccctgacaggctgactgaggacttgcagtctcacttgaaccctggagatgggctgatggaagacgtggcggccttctcatcttccgatgacataggggaggcctcggcgtcctctcctgagaagcagcaggctgatgggctgagtcctagattgtttgaatctggcgccatcttccagcagaataaaaaggtcatgaaaagactgaagtcggaggtctggcatcacttctccctggcccccatggacagcctcaaggccgagtgtcggtactgcggctgtgccatcagccgggggaagaagggtgatgtgggcaccagctgcctgatgagacatctctaccggcgccatccagaagttgtcgggagccagaagggcttcctgggtgcaagtctggcaaactctccgtatgccactttggcctctgcagaaagttcctcttccaaattgactgacttgccaacagtggtcacaaaaaacaatcaagttatgtttcctgttaatagcaaaaagacctcgaagctgtggaatcatttttctatttgctccgcagactccacaaaagtcgtgtgcttgcactgtggccggaccatcagccgggggaagaagccgactaacttgggtaccagctgtcttctgagacatttacagcggttccatagcaacgtgctgaaaactgaggtctcggagacggctcggccctcctctccggacacccgggtgccgcggggcacagaattatcaggcgcttcctcttttgatgacaccaatgagaagttttacgattctcacccagttgccaaaaaaatcacaagtctcatagctgaaatgattgcacttgacctccagccatattcttttgtagacaacgttggctttaacaggctgcttgaatacttgaaacctcagtactccctccccgccccttcctacttctccaggacagctatcccaggtatgtatgataatgtgaagcagataattatgtcccaccttaaggaagctgagagtggtgtgatccacttcacgtctggaatatggatgagtaaccagacccgtgagtacctgaccctcacggcccactgggtttccttcgagtcgccagcccggccgcgctgtgacgaccaccactgctcggcgctgttggacgtgtcgcaggtggactgcgactacagtggcaacagcattcagaagcagctggagtgctggtgggaagcgtgggtgacctccaccggccttcaggtgggcatcaccgtcaccgacaacgccagcatcgggaagacgctgaacgagggggagcactcgagcgtgcagtgcttcagccatacggtgaacctgatcgtcagcgaggccattaagagccagcggatggtgcagaacctgctgagcctcgcccggaagatctgcgagcgggtgcaccggtcgcccaaggcgaaggagaaactggccgagctgcagagggagtacgcgctgcctcagcatcacctcatccaggacgtcccgtccaagtggagcacttccttccacatgctcgagcggctcattgagcagaaaagggccattaacgagatgtccgtcgagtgtaacttccgagagctgatcagctgcgaccagtgggaggtcatgcagtccgtgtgccgtgcgctaaagcccttcgaggctgcgagccgggagatgagcacgcagatgtccaccctcagccaggtcatccccatggtacacatcctcaacaggaaggtggagatgctcttcgaggagacgatgggcatcgacaccatgctgcgctctctgaaggaggccatggtgagccgcctgtctgccaccctccacgacccgcggtacgtcttcgccacgctgctggatcctcgctacaaggcctccctgtttacggaggaggaggcggagcagtacaaacaggatttaatcagggaactcgaactcatgaattctacctcagaggacgtggctgcctcccacaggtgtgatgctggctccccgtcgaaagactctgccgcagaggagaacctgtggtcacttgtggccaaggtgaagaagaaagacccaagagaaaagctgcctgaagccatggtgcttgcgtatctggaggaggaggtgcttgaacacagctgtgacccgctcacctactggaacctgaagaaggcgtcctggccggggctgtccgcgctggccgtcagatttttgggctgccccccaagcatcgtcccttcagaaaagctgttcaacacacccactgagaacggtagccttggccaatccaggctcatgatggaacattttgaaaaacttatctttttgaaagtgaatcttcccttaatatactttcagtat

SEQ ID NO: 6308 - DNA, 2937 bp, Homo sapiens
  source 1..2937: mol_type = genomic DNA
atgagtgtatgtactctaagtgtaccagtttcttcactctctcctggcagaagatgcaacacttttagtgattctgggattctgggatgtgttcctattaattctaatacagatgaagaagatgtggtagaggaaaagatggtagcagaaggagtgaataaagaggcaaaacagcctgctaaaaagaaaagaaagaagggtttgcgaattaaggggaaaaggcgtcgaaaaaaattgattcttgccaaaaagtttagtaaggatttgggatctgggaggcctgttgcagatgcccctgctttgttagcttccaatgaccctgagcaggatgaagaaagtctttttgagagcaatatagaaaaacagatctatctacctagtactagagccaagacctccattgtgtggcacttctttcatgttgacccccagtacacctggcgggccatttgtaacctctgtgagaaaagcgtcagcaggggtaaaccaggtagccatcttggtacatctactcttcaacgacatctgcaagcaaggcattcacctcattggaccagggccaacaagtttggagttgctagtggagaggaggactttaccttggatgtgtctttatctccctcttctggaagcaatggaagctttgaatatattcctactgatccattagatgataatagaatgggcaagaagcatgataaatcagcatctgatgccctaagggcagaaagagggagatttctcatcaaaagtaacattgtcaagcatgctttaattcctggaactagagccaagacatctgccgtttggaattttttttacactgatcctcagcacatctcaagagctgtgtgtaatatatgtaaaagaagtgtgagccggggtaggccagggtcccacttagggacttcaacacttcaacgacacctgcaagccacacatcctatccattgggctgttgccaacaaagacagtggtgctgttgcaaatggattagatgaagctgagactgagagaagtgatctcttgagtgataccttgcatggagaaaagtctacaggcagccaagatttaacagctgaggaccttagtgactctgattcagatgaacctatgttagaggttgaaaacagatctgaaagtcctattcccgttgcagagcaaggcactctgatgcgtgcgcaggagagagaaacaacatgttgtggaaatccagtctcaagtcacataagtcaggcaattatccaaatgattgtggaggatatgcatccttacaactatttctcaaccccagcctttcagaggttcatgcagattgtggcccctgattataggttgccatcagagacttactttttcactaaggctgtacctcagttatatgattgtgtcagagaaaaaattttcttaactttagagaatgttcaaagccaaaagatacacctgactgttgacatatggacccatgacccatccactgactattttattgtgactgtacactgggtttctttggaaactgcgtcttttctcaataatggcaggatccccgattttagaaagtgggcagtgctttgtgttacaggtttggctaaagactgtttgataaccaatattttacaagaattaaatgaccagattggtctgtggctttctccaaatttccttatccctagcttcattgtttctgacaattcctctaatgtggtacatgcaatcaaagatggtggttttacccatgtgccatgcttcctgcattgtttaaatatggtcattcaggactttttctgcgagcacaaaagcattgagaatatgttagtggctgccaggaaaacttgtcatcattttagtcattcggtcaaggcccgtcagatactgcaagagttccaaaatgatcaccaacttccatggaagaatttgaagcaggacgaaactggccattggatttctactttttatatgttaaaatggctcttggagcattgctactcagttcaccatagtcttggtagagccagtggagttgtgctcacctcccttcagtggactctaatgacttatgtttgtgatattcttaagccatttgaggaggctacccagaaagtgagcgtgaagaccgcaggattgaatcaggtgctacccctaatccatcatctactcctttccctgcagaaactcagagaagattttcaagtcagaggtattactcaggccctcaatctggtggatagtttatctctgaaacttgaaacagataccctactaagtgccatgcttaaatccaagccctgtatcttggctactttgttagatccttgctttaaaaacagtttggaagacttttttcctcaaggtgctgatttagaaacttataagcagttccttgcagaagaggtctgtaattatatggaatcttcaccagagatctgccaaattccaacttcagaagcttcttgtccctcagttacagtgggagctgattcatttacctcatctctaaaagaaggcacctccagttcaggttctgttgatagctcagctgtagacaatgttgcccttggaagcaaaagcttcatgttcccttctgctgtagcagttgtggatgagtacttcaaagagaagtattcagagttctcaggaggtgatgaccctttaatttactggcagaggaagataagcatatggccggctttgacccaggttgccatccagtatctaagttgccccatgtgtagttggcaatctgaatgtatctttactaaaaatagccactttcatccaaaacagatcatgagcctggactttgacaatatagaacaactgatgtttctgaaaatgaacttgaaaaatgttaactacgattattctacgttggttctgagctgggatcctgagcagaatgaagttgttcaaagcagtgaaaaagaaatactgcct

SEQ ID NO: 6309 - DNA, 5547 bp, Homo sapiens
  source 1..5547: mol_type = genomic DNA
atggcggtctccaggctagatcgcctttttattttactggatactggcactactcctgttacaagaaaagctgctgcacagcaacttggagaagtggtgaagcttcatccccatgaactaaataatctcctgtctaaagtgttgatatatttaaggagtgcaaattgggatacccggattgcagcaggacaagctgttgaagctatagtgaaaaatgtacctgagtggaatccagtgccgagaaccagacaagaacctacttccgaaagttctatggaagattcacctactacagagcgattgaattttgacagatttgatatatgtagattgttacaacatggtgcatcactcctgggatctgctggtgccgaatttgaagtccaagatgaaaaatcaggtgaagtggatcctaaagagaggatagcacgccaacgaaaattattacagaagaaacttggccttaatatgggagaagcaattggaatgagtactgaagaacttttcaatgatgaggatttggattataccccaacttcagcatcctttgttaacaaacaacctactcttcaggcagctgaattgattgactcagagtttcgagcaggaatgagcaatagacaaaagaacaaagctaaaagaatggccaagttatttgcaaaacagagatccagggatgcagtggaaactaatgagaagagcaatgatagcactgatggggagccagaagaaaagagacggaaaatagcaaatgttgttattaatcagtctgcaaatgattccaaagtcttgattgataatattccagacagctcttccttaattgaagagacaaatgaatggcctttggaaagcttttgtgaagaactttgcaatgacctttttaatccctcctgggaggttcgacatggtgcaggcactggacttagggaaattcttaaagctcatgggaaaagtggtggtaaaatgggtgacagcactttagaagagatgattcagcagcatcaagagtggttggaagacttggttattagactcctttgtgtttttgcattagacagatttggagactttgtttctgatgaagttgtggcaccagttcgtgaaacttgtgctcaaacattaggtgtggttttaaaacacatgaacgaaacaggagttcataagactgtggatgtgctgctaaaattacttacacaagaacaatgggaagttagacatggtggtctgctgggaataaaatatgctttggcagtccgtcaggatgtaattaatactttattgcctaaagttttaactagaataattgaaggactccaggatcttgatgatgatgtcagagctgttgctgcagcatcattagtgcctgtagtagaaagccttgtctatcttcagacacaaaaggtgcccttcattataaatacattgtgggatgctcttctggaattagatgatctaacagcttcaacaaatagtattatgactctcctttcatccttgttaacttaccctcaggtccaacaatgcagtattcagcagtcactgacagttttagttccacgtgtctggccttttttgcatcacactatatcatcagttcgaagagcagcattggaaactctgtttacgttattatcaacacaggaccagaactcttcatcttggcttatacctatactgcctgatatgctccgacacatttttcagttctgtgttttggaaagcagccaggaaattctggaccttattcacaaggtttggatggaactgttgagtaaggcttcagttcagtatgtggtagcagctgcttgcccatggatgggtgcttggctttgcttgatgatgcagccttctcatttacctatcgatttaaatatgttgctagaagtaaaagctagagccaaggaaaaaacaggtggtaaggtgcgccaaggccaaagccagaataaagaagtacttcaggagtatattgcaggtgccgacaccatcatggaagacccagccaccagggattttgtagttatgcgggccagaatgatggcagccaagttgttaggagcactttgttgctgtatttgtgatccaggtgtaaatgtggtaactcaagaaattaaaccagctgaatccctgggccagttactactcttccatttgaactccaagtctgctttacagaggattagtgtagctttggtaatctgtgaatgggctgctttacaaaaggagtgtaaagctgttaccttagctgtgcagccgcgtttacttgatatcctttcagaacatttatattatgacgaaattgccgttccattcacacgaatgcagaatgaatgtaaacaacttatatcatcattagctgatgtacatattgaagttggtaatcgagtaaacaacaatgttttaacaatagatcaagctagtgacttggtcactactgtttttaatgaagccacatcatctttcgatttaaatcctcaagtgttacaacagttagatagtaaacgacagcaggtccaaatgacagttacagagaccaaccaggagtggcaagtgttgcagttgagagtgcatacttttgctgcctgtgcagttgtgagcttgcagcagcttccggagaaattaaatcctatcataaaaccattaatggagacaattaaaaaagaagagaatacactagtgcaaaactatgcagctcagtgcatagctaaactccttcagcagtgcacaacaaggacgccctgtcccaattcaaaaattattaaaaacctctgtagctcactttgtgtggacccatatctaactccttgtgtcacatgtccagtaccaacacaaagtggccaggaaaattctaaaggatccacctcagaaaaagatggaatgcaccatactgtcaccaagcacagaggtataattacactctacaggcaccagaaagctgcctttgctatcacaagtaggcgaggtcctacccccaaagcagtaaaagctcaaatagcagatcttcctgcaggaagtagtggaaatattcttgttgaacttgatgaggcccagaagccttacctggtacaacggagaggagctgaatttgctttgacaactatagtaaagcattttggtggtgaaatggcagtgaagttgccacatctctgggatgctatggttggcccattgaggaatacaatcgacataaataattttgatggaaaatccctcctggataagggagatagccctgctcaagaattggtgaattctctgcaggtttttgaaacagcagcagcttcaatggattctgagcttcatcccttgttggtccagcatttgccacatctttatatgtgccttcaataccccagtactgcagtgaggcacatggctgctcgttgtgtaggtgtcatgagcaaaatagctaccatggaaacaatgaatatttttttggagaaggttcttccgtggctgggagcaattgatgacagtgtcaaacaagagggtgcaattgaagcacttgcctgtgtaatggaacaactagatgttggtattgttccatatattgtccttttagttgttcctgtattaggaagaatgagtgatcagacagacagtgtgagattcatggccacgcagtgctttgcaacgctaattagactcatgccacttgaggcaggcattccagaccctccaaacatgtcagcagaattaatccaattgaaagccaaggagcgacactttttggagcaattgttagatgggaaaaaattggaaaattataaaattccagtaccaatcaatgctgaactcagaaaatatcagcaggatggtgtgaactggttagcatttcttaataagtataaacttcatggaattctgtgtgatgacatgggtttaggaaaaactttacagtccatctgcattctagcaggagatcattgtcatagggcccaggaatatgcaagatcaaaattagcagaatgtatgccacttccttccttagtggtttgtccgccaacattaacaggccattgggtggatgaagtaggtaaattttgctctagagaatatctcaacccgttgcattacactggacctcccactgaaagaataaggttacagcaccaagtaaaaaggcacaatctaatagtggcttcatatgatgttgtgaggaatgacatagatttctttagaaatattaaatttaactactgcattcttgatgaaggccatgtcatcaaaaatggaaaaacaaagttgtcaaaagcagtaaaacaactgactgctaattataggattattctttctggaacaccaatccagaacaacgttttggagctgtggtcattatttgatttcctcatgccaggatttttgggtactgaacgccagtttgctgctcgatatggtaaacctatattagcaagtagggatgctcgaagctccagtcgagagcaagaagcaggtgttcttgctatggatgcgctgcaccgccaagtactaccgtttcttttgagaagaatgaaagaagatgttttgcaggatcttccacctaaaattattcaagactattattgtactcttagtcctctccaggttcagctctatgaagattttgctaagtctcgtgccaagtgtgatgttgatgaaacagtttcttcagctacactttctgaagaaactgaaaaaccaaagcttaaagctacaggccacgtattccaggcattacagtacttacgtaaactgtgcaaccatccagcattagtcttaacacctcaacatccagaattcaagaccactgccgaaaaactggcagttcagaattcttctctacatgatattcaacatgcccctaagctctcagctttgaaacaattgctgttggactgcggtttgggaaatggcagcacttccgagagtggcacagagtctgttgtggcccagcacaggatactgatattctgtcagctgaaaagcatgcttgatatagtagagcatgatctcctcaaacctcacttgccctctgtcacttatttgagattagatggcagcatacctcctggtcagaggcattccattgtttcccggtttaataatgatccatctatagacgttctgttacttaccactcacgttggtggcctgggacttaatttgacaggcgctgacacagtagtatttgtggagcatgactggaatcctatgcgagatctacaagccatggaccgggcccatcgcattgggcagaaacgtgtggttaacgtataccgattgataaccagaggaacattggaagaaaaaataatggggttgcagaaattcaagatgaacatagcgaatactgttattagccaagagaattctagtttgcagagcatggggactgatcagcttcttgatctgtttactcttgataaggatggcaaagcagaaaaagctgacacctctacttctgggaaagcaagtatgaaatcaattcttgaaaacctgagtgatctttgggatcaagagcagtatgattcagagtacagcctggaaaattttatgcattctctcaag

SEQ ID NO: 6310 - DNA, 1146 bp, Homo sapiens
  source 1..1146: mol_type = genomic DNA
atgctgacccgcctgttcagcgagcccggccttctctcggacgtgcccaagttcgccagctggggcgacggcgaagacgacgagccgaggagcgacaagggcgacgcgccgccaccgccaccgcctgcgcccgggccaggggctccggggccagcccgggcggccaagccagtccctctccgtggagaagaggggacggaggccacgttggccgaggtcaaggaggaaggcgagctggggggagaggaggaggaggaagaggaggaggaagaaggactggacgaggcggagggcgagcggcccaagaagcgcgggcccaagaagcgcaagatgaccaaggcgcgcttggagcgctccaagcttcggcggcagaaggcgaacgcgcgggagcgcaaccgcatgcacgacctgaacgcagccctggacaacctgcgcaaggtggtgccctgctactccaagacgcagaagctgtccaagatcgagacgctgcgcctagccaagaactatatctgggcgctctcggagatcctgcgctccggcaagcggccagacctagtgtcctacgtgcagactctgtgcaagggtctgtcgcagcccaccaccaatctggtggccggctgtctgcagctcaactctcgcaacttcctcacggagcaaggcgccgacggtgccggccgcttccacggctcgggcggcccgttcgccatgcacccctacccgtacccgtgctcgcgcctggcgggcgcacagtgccaggcggccggcggcctgggcggcggcgcggcgcacgccctgcggacccacggctactgcgccgcctacgagacgctgtatgcggcggcaggcggtggcggcgcgagcccggactacaacagctccgagtacgagggcccgctcagccccccgctctgtctcaatggcaacttctcactcaagcaggactcctcgcccgaccacgagaaaagctaccactactctatgcactactcggcgctgcccggttcgcggcccacgggccacgggctagtcttcggctcgtcggctgtgcgcgggggcgtccactcggagaatctcttgtcttacgatatgcaccttcaccacgaccggggccccatgtacgaggagctcaatgcgttttttcataac

SEQ ID NO: 6311 - DNA, 993 bp, Homo sapiens
  source 1..993: mol_type = genomic DNA
atgtcaaaaacttttgtaaaatccaaggagatgggagagctagtcaacacaccatcctggatggataaaggtctgggctcccaaaatgaggtgaaggaggaagagagcagaccaggtacttatgggatgctcagcagcttaactgaagagcatgacagtattgaggaagaagaagaagaggaagaagatggggagaaacctaagagaaggggtcccaagaaaaagaagatgaccaaagctcgccttgagagattcagggctcgaagagtcaaggctaatgccagagaacggacccggatgcatggcctgaatgacgccctggataacctgaggcgagtcatgccatgctactctaaaacccaaaaactttccaagatagagactcttagactggccaggaactatatttgggctttatctgaagtcctggagactggccagacacctgaagggaaaggctttgtggagatgctgtgtaaagggctctctcagcccacaagcaacctggtggctggatgtctccaactgggccctcagtctgtcctcctggagaagcacgaggataaatctcctatttgtgactctgccatctctgtccacaacttcaactatcagtctccggggcttcctagccctccttatggtcatatggaaacacatctccttcatctcaagccccaagtattcaagagtttgggagaatcgtcctttgggagccatctgcctgactgcagtacacccccttatgagggcccactcactccacccctgagcatcagtgggaacttctccttgaagcaagatgggtctcctgacctagaaaaatcctacagcttcatgccacattacccttcttcaagtctaagctcagggcatgtgcattcaactccttttcaggctggtaccccccgttatgatgttcctatagacatgtcctatgattcctacccccatcatggtattgggacccaactcaatacagtcttcactgag

SEQ ID NO: 6312 - DNA, 420 bp, Homo sapiens
  source 1..420: mol_type = genomic DNA
atgcggcaaccgtatctcagttctcgcgaggtttcgtcttcccggaagcgttggaggacattccctgttgactgcgtcgcgatgtgtggcgactgtgtggagaaggaatatcccaaccggggtaatacctgcctggagaatggatctttcttactgaactttacaggctgtgcagtgtgcagtaagcgggattttatgctgatcacaaacaaatccttgaaagaagaagatggagaagaaatagttacctatgatccagatttgtgtaagaattgtcatcatgtaatagccagacatgagtatacattcagtatcatggatgaatttcaggagtataccatgctgtgtctgttatgcggcaaagccgaagatactatcagtattctccctgatgacccccgacaaatgactctcttattc

SEQ ID NO: 6313 - DNA, 417 bp, Homo sapiens
  source 1..417: mol_type = genomic DNA
atgcggcaaccgtatctcagttctcgcgaggtttcgtcttcccggaagcgttggaggacattccctgttgactgcgtcgcgatgtgtggcgactgtgtggagaaggaatatcccaaccggggtaatacctgcctggagaatggatctttcttactgaactttacaggctgtgcagtgtgcagtaagcgggattttatgctgatcacaaacaaatccttgaaagaagaagatggagaagaaatagttacctatgatcatttgtgtaagaattgtcatcatgtaatagccagacatgagtatacattcagtatcatggatgaatttcaggagtataccatgctgtgtctgttatgcggcaaagccgaagatactatcagtattctccctgatgacccccgacaaatgactctcttattc

SEQ ID NO: 6314 - DNA, 315 bp, Homo sapiens
  source 1..315: mol_type = genomic DNA
atgcggcaaccgtatctcagttctcgcgaggtttcgtcttcccggaagcgttggaggacattccctgttgactgcgtcgcgatgtgtggcgactgtgtggagaaggaatatcccaaccggggtaatacctgcctggagaatggatctttcttactgaactttacaggctgtgcagtgtgcagtaagcgggattttatgctgatcacaaacaaatccttgaaagaagaagatggagaagaaatagttacctatgatcgagtataccatgctgtgtctgttatgcggcaaagccgaagatactatcagtattctccc

SEQ ID NO: 6315 - DNA, 1506 bp, Homo sapiens
  source 1..1506: mol_type = genomic DNA
atggaaactcttcaggaatccttaaacacattacttaaacagctagaagaagaaaagaagactcttgaaagtcaagtgaaatactatgcacttaaactggaacaagaatcaaaggcttaccagaagatcaacaatgaacgccgtacatacctagctgaaatgtctcagggttctggtttacatcaagtttctaaaaggcaacaggtggatcaactgcctaggatgcaagagaatctagtgaaaaccctcctcttaaaagaagaattggaccctttaaaggcaaaaatagacatcttattagttggagatgtcactgtgggctacctggctgatactgtacagaaactatttgcaaacatagcagaagtcaccatcaccatcagtgacacgaaggaggcagcagcgcttttggatgattgcatattcaacatggttctcttgaaggtgccttcttcactaagtgccgaggagctggaagccatcaagttaattagatttggcaaaaagaaaaatacacattcactgtttgtttttataatccctgaaaattttaaaggttgtatttcagggcatggaatggatattgctttaactgaaccactgacaatggaaaaaatgagtaatgtggtaaaatactggacaacatgtccctcaaacactgttaagactgaaaacgcaactgggcctgaagaacttggattgcccctgcagaggtcctacagcgaacacctgggatattttcctactgatctatttgcctgctctgaatctttaaggaatggcaatgggcttgaattaaatgcttcgttgtcagagttcgagaaaaacaaaaagatctctcttcttcattcaagcaaggaaaaactaagaagggaaagaatcaaatattgctgtgagcagctgcgtactctcttgccgtatgtaaaagggagaaagaatgatgcggcttcagttcttgaggcaacagttgattatgtgaaatatatccgggagaaaatctctccagccgttatggcccagattacagaagcacttcagagcaacatgaggttttgtaagaaacaacaaacacccattgagctgtctctcccaggcactgtcatggcacagcgggaaaacagtgtgatgagcacttactcccctgagagagggctccaattcctgactaatacgtgctggaatgggtgctccactcctgatgcagagagctccttggatgaagctgtgagagttccatcaagctccgcctcagagaatgctattggtgatccatataaaactcacatttccagtgcagcgctgtctctgaattccttgcatactgtcagatattattctaaagtcaccccttcctacgatgcaactgctgtaacaaatcagaacatttcaattcatttaccttcagccatgcccccggtctcaaagcttctccctcggcactgcacttctgggttgggccagacgtgcactacacatcccaactgtctgcaacagttttgggcgtat

SEQ ID NO: 6316 - DNA, 900 bp, Homo sapiens
  source 1..900: mol_type = genomic DNA
atgcattcactaaagaaagtgacttttgaagatgtagctattgacttcacccaggaagagtgggccatgatggacacatccaagagaaagctgtacagagatgtgatgctggaaaatatcagtcacctggtgtccctcgggtaccagataagcaaatcctatataattttgcagctggagcaaggaaaagagctgtggcgggaaggaagagaatttcttcaagaccagaatccagacagggaaagtgcccttaagaaaaaacacatgatatccatgcatcctatcaccagaaaagacgcatccaccagtatgacaatggagaactctctcattctggaggatccttttgaatgtaatgattcgggagaagattgcactcacagttccacaataactcagcgtttgttaactcacagtggaaagaaaccctatgtcagcaaacagtgtggaaaatctcttcgtaatcttttctcccctaaaccacataaacaaattcatactaaaggtaaatcatatcaatgtaatctatgtgaaaaggcctatactaattgctttcgccttagacggcacaagatgactcacactggagagaggccatatgcatgtcatctatgtggaaaagccttcactcagtgttctcaccttagaagacatgagaaaactcacacgggagagagaccatataagtgtcatcaatgtgggaaagcctttattcaatcctttaaccttcgaagacatgagagaactcaccttggaaaaaagtgttatgaatgtgataaaagtgggaaagcctttagtcaaagctctggctttagaggaaacaaaataattcacactggagagaaaccacatgcttgtcttctatgtgggaaggccttcagtctgtcttccgaccttaga

SEQ ID NO: 6317 - DNA, 1362 bp, Homo sapiens
  source 1..1362: mol_type = genomic DNA
atgactaaaagagaagcagaggagctgatagaaattgagattgatggaacagagaaagcagagtgcacagaagaaagcattgtagaacaaacctacgcgccagctgaatgtgtaagccaggccatagacatcaatgaaccaataggcaatttaaagaaactgctagaaccaagactacagtgttctttggatgctcatgaaatttgtctgcaagatatccagctggatccagaacgaagtttatttgaccaaggagtaaaaacagatggaactgtacagcttagtgtacaggtaatttcttaccaaggaattgaaccaaagttaaacatccttgaaattgttaaacctgcggacactgttgaggttgttattgatccagatgcccaccatgctgaatcagaagcacatcttgttgaagaagctcaagtgataactcttgatggcacaaaacacatcacaaccatttcagatgaaacttcagaacaagtgacaagatgggctgctgcactggaaggctataggaaagaacaagaacgccttgggataccctatgatcccatacagtggtccacagaccaagtcctgcattgggtggtttgggtaatgaaggaattcagcatgaccgatatagacctcaccacactcaacatttcggggagagaattatgtagtctcaaccaagaagatttttttcagcgggttcctcggggagaaattctctggagtcatctggaacttctccgaaaatatgtattggcaagtcaagaacaacagatgaatgaaatagttacaattgatcaacctgtgcaaattattccagcatcagtgcaatctgctacacctactaccattaaagttataaatagtagtgcgaaagcagccaaagtacaaagagcgccgaggatttcaggagaagatagaagctcacctgggaacagaacaggaaacaatggccaaatccaactatggcagtttttgctagaacttcttactgataaggacgctcgagactgcatttcttgggttggtgatgaaggtgaatttaagctaaatcagcctgaactggttgcacagaaatggggacagcgtaaaaataagcctacgatgaactatgagaaactcagtcgtgcattaagatattattacgatggggacatgatttgtaaagttcaaggcaagagatttgtgtacaagtttgtctgtgacttgaagactcttattggatacagtgcagcggagttgaaccgtttggtcacagaatgtgaacagaagaaacttgcaaagatgcagctccatggaattgcccagccagtcacagcagtagctctggctactgcttctctgcaaacggaaaaggataat

SEQ ID NO: 6318 - DNA, 4386 bp, Homo sapiens
  source 1..4386: mol_type = genomic DNA
atgtaccaaccagaagacgacaacaacagtgacgtgaccagcgacgacgacatgacccggaacagaagagagtcctcaccacctcactcagtccattctttcagtgaccgggactgggaccggaggggcagaagcagagacatggagccacgagaccgctggtcccacaccaggaacccaagaagcaggatgcctccgcgggatctttcccttcctgtggtggcgaaaacaagctttgaaatggacagagaggacgacagggactccagggcttatgagtcccgatctcaggatgctgaatcataccaaaatgtggtggacctcgctgaggacaggaaacctcacaacacaatccaggacaacatggaaaactacaggaagctgctctccctcgtgcagcttgctgaagacgatggccactcccacatgacgcagggccactcatcaagatccaagagaagtgcctacccaagcaccagtcgaggtctaaaaactatgcctgaagccaaaaaatcaacccaccggcgggggatttgtgaagatgaatcttcccacggagtgataatggaaaaattcatcaaggatgtgtcacgcagttccaaatcgggaagagcaagggagtcaagcgaccggtcacagagattccccagaatgtcagatgataactggaaggacatttcattgaacaagagggagtcagtgatccagcagcgggtttatgaagggaatgcatttaggggaggctttaggtttaattcaacccttgtttccagaaagagagttcttgaaagaaagaggcgctatcattttgacacagatgggaagggctcgattcacgatcaaaaaggctgtcccaggaagaagccctttgaatgtggtagtgagatgagaaaagccatgagcgtgagcagcctgagcagcctcagctccccctcctttaccgagtcacagccaattgattttggggcaatgccatatgtatgtgatgagtgtgggaggtcgttcagtgtcatctcagaatttgttgagcaccagatcatgcatactagagagaacctctatgagtatggtgagtcctttatccacagtgtggctgtcagtgaagttcagaaaagtcaggttggagggaaacgttttgaatgtaaggactgtggagagaccttcaataagagtgccgccttggctgaacatcggaagattcatgctagaggttatcttgtggaatgtaagaatcaggaatgtgaggaagccttcatgcctagccccacctttagtgagcttcagaaaatatatggcaaagacaaattctacgagtgcagggtgtgtaaggaaaccttccttcatagttctgccctgattgagcaccagaaaatccactttggggatgacaaagataatgagcgtgaacatgaacgtgaacgtgaacgtgagcgcggggaaacctttaggcccagcccagcccttaatgagtttcagaaaatgtatggtaaagagaaaatgtacgaatgtaaggtgtgtggggagactttccttcatagctcatccctgaaagaacatcagaaaatccatactagagggaacccatttgaaaacaagggtaaagtgtgtgaggaaacctttattcctggtcagtcccttaaaaggcgtcagaaaacttacaataaggagaagctctgtgactttacagatggccgggatgccttcatgcaaagctcagagctcagtgagcatcagaaaattcattctcgaaagaacctctttgaaggcagagggtatgagaaatctgtcattcatagtgggccattcactgaatctcagaagagtcatactataacaagacctcttgaaagtgatgaggacgaaaaggcgttcaccattagctctaacccctatgaaaaccagaagattcccactaaggaaaatgtctatgaggcaaaatcatatgagaggtctgttattcatagcttagcctctgtggaagctcagaaaagtcacagtgtagcagggcccagtaaaccaaaagtaatggcagagtctaccattcagagcttcgatgctatcaaccatcagagagttcgtgctggagggaacacctctgaaggaagggaatacagtaggtctgttatccatagcttagtggcttccaaacctccaagaagtcacaatggaaatgaattggtggaatctaatgagaagggagaatcctccatttatatctcagaccttaatgataagcgacagaagattcctgccagagagaacccttgtgaagggggcagtaagaatcgcaactatgaagactctgtcatacagagtgtattccgtgccaaacctcagaaaagtgttcctggagagggatctggtgagtttaagaaggatggcgaattctctgttcccagctcaaatgtccgtgaataccagaaggctcgtgctaaaaagaaatacattgagcataggagcaatgagacctctgtaattcactctctgccttttggtgaacaaacatttcgccctcgagggatgctctatgaatgtcaggagtgtggggagtgctttgctcatagctctgacctcactgagcaccagaagattcatgatagggagaagccctctggaagcagaaactatgaatggtctgtcattcgcagcttggcccctactgaccctcaaacaagttacgcccaagagcagtatgctaaagagcaagcgcggaacaaatgtaaggacttcagacaattttttgctaccagcgaagacctcaacacaaaccagaaaatctatgaccaagagaagtctcatggcgaggagtctcaaggcgagaatactgatggggaggagacccacagcgaggagacccatggtcaggagacaattgaagaccctgtcattcaaggctcagacatggaagaccctcagaaggatgaccctgatgacaaaatctatgaatgtgaggactgtggcctgggctttgtggatctcacagacctcacagaccatcagaaagtccacagcaggaagtgcctggttgacagtcgggagtacacacattctgtaattcacacccattccatcagcgagtatcagagagattacactggagagcagctgtatgaatgtccaaagtgtggggaatcttttattcatagctcattccttttcgagcatcagagaatccatgaacaagaccagttgtattccatgaaggggtgtgatgatggttttattgccctcttgcccatgaagccacggaggaatcgtgctgcagagaggaatcctgctcttgctgggtcggccattcgatgccttttgtgtggacaaggcttcattcatagctctgcccttaatgagcatatgagacttcatagggaagatgatttactggagcagagccagatggctgaggaagctatcattccaggcttagccctcactgagtttcagagaagtcagaccgaagagagactctttgaatgtgcagtctgtggagaatctttcgtcaacccagcagaacttgcagatcacgtaactgttcataagaatgagccctatgagtacgggtcctcctatactcacacctcatttcttactgagcccctcaaaggagctataccattctatgaatgcaaggattgtggtaagtcctttattcatagcacagtcctcactaaacataaggagcttcatctggaagaagaagaagaagatgaagcagcagcagctgcagcagcagcagcccaggaagttgaagccaatgtccatgttccacaagtagttctgaggattcagggcttaaacgtagaggctgctgagccagaagtggaggctgccgagccagaagtggaggctgctgagccagaagtggaggctgctgagccaaacggagaggctgaagggccagatggagaggctgcagagcccattggagaggctggacagccaaatggagaggccgagcagccaaatggggatgctgatgagccagatggtgcaggtattgaagacccagaagaaagagctgaagagccagagggaaaagctgaagagccagagggagatgccgacgagcctgacggtgtgggaattgaagacccagaagaaggtgaagatcaagagattcaggtagaagaaccatactatgactgccatgaatgcacagaaaccttcacttccagcacagcattcagtgaacacctgaaaactcatgccagcatgatcatatttgagcctgcaaatgcctttggggagtgctcaggctacatcgaacgtgccagcaccagcacaggtggtgccaatcaagctgatgagaagtacttcaaatgtgacgtctgtgggcagctcttcaatgaccgcctgtccctcgccagacaccagaatacccacactggc

SEQ ID NO: 6319 - DNA, 4764 bp, Homo sapiens
  source 1..4764: mol_type = genomic DNA
atgctgcctccaaagcacttgtctgccaccaaacctaagaagtcctgggccccaaatctgtatgagctagacagtgacttgactaaggagccggatgtcatcataggagaaggtccaactgactctgagttttttcatcagaggtttcggaacctaatctatgtggaatttgttgggcctcggaagaccctgatcaaactccgaaacctctgcctcgattggttgcagccggagacccgcaccaaggaggagatcatcgagctcttggtccttgagcagtacctgaccatcatccctgaaaagctcaagccttgggtgcgagcaaaaaagccggagaactgtgagaagctcgtcactctgctggagaattacaaggagatgtaccaaccagaagacgacaacaacagtgacgtgaccagcgacgacgacatgacccggaacagaagagagtcctcaccacctcactcagtccattctttcagtgaccgggactgggaccggaggggcagaagcagagacatggagccacgagaccgctggtcccacaccaggaacccaagaagcaggatgcctccgcgggatctttcccttcctgtggtggcgaaaacaagctttgaaatggacagagaggacgacagggactccagggcttatgagtcccgatctcaggatgctgaatcataccaaaatgtggtggacctcgctgaggacaggaaacctcacaacacaatccaggacaacatggaaaactacaggaagctgctctccctcgtgcagcttgctgaagacgatggccactcccacatgacgcagggccactcatcaagatccaagagaagtgcctacccaagcaccagtcgaggtctaaaaactatgcctgaagccaaaaaatcaacccaccggcgggggatttgtgaagatgaatcttcccacggagtgataatggaaaaattcatcaaggatgtgtcacgcagttccaaatcgggaagagcaagggagtcaagcgaccggtcacagagattccccagaatgtcagatgataactggaaggacatttcattgaacaagagggagtcagtgatccagcagcgggtttatgaagggaatgcatttaggggaggctttaggtttaattcaacccttgtttccagaaagagagttcttgaaagaaagaggcgctatcattttgacacagatgggaagggctcgattcacgatcaaaaaggctgtcccaggaagaagccctttgaatgtggtagtgagatgagaaaagccatgagcgtgagcagcctgagcagcctcagctccccctcctttaccgagtcacagccaattgattttggggcaatgccatatgtatgtgatgagtgtgggaggtcgttcagtgtcatctcagaatttgttgagcaccagatcatgcatactagagagaacctctatgagtatggtgagtcctttatccacagtgtggctgtcagtgaagttcagaaaagtcaggttggagggaaacgttttgaatgtaaggactgtggagagaccttcaataagagtgccgccttggctgaacatcggaagattcatgctagaggttatcttgtggaatgtaagaatcaggaatgtgaggaagccttcatgcctagccccacctttagtgagcttcagaaaatatatggcaaagacaaattctacgagtgcagggtgtgtaaggaaaccttccttcatagttctgccctgattgagcaccagaaaatccactttggggatgacaaagataatgagcgtgaacatgaacgtgaacgtgaacgtgagcgcggggaaacctttaggcccagcccagcccttaatgagtttcagaaaatgtatggtaaagagaaaatgtacgaatgtaaggtgtgtggggagactttccttcatagctcatccctgaaagaacatcagaaaatccatactagagggaacccatttgaaaacaagggtaaagtgtgtgaggaaacctttattcctggtcagtcccttaaaaggcgtcagaaaacttacaataaggagaagctctgtgactttacagatggccgggatgccttcatgcaaagctcagagctcagtgagcatcagaaaattcattctcgaaagaacctctttgaaggcagagggtatgagaaatctgtcattcatagtgggccattcactgaatctcagaagagtcatactataacaagacctcttgaaagtgatgaggacgaaaaggcgttcaccattagctctaacccctatgaaaaccagaagattcccactaaggaaaatgtctatgaggcaaaatcatatgagaggtctgttattcatagcttagcctctgtggaagctcagaaaagtcacagtgtagcagggcccagtaaaccaaaagtaatggcagagtctaccattcagagcttcgatgctatcaaccatcagagagttcgtgctggagggaacacctctgaaggaagggaatacagtaggtctgttatccatagcttagtggcttccaaacctccaagaagtcacaatggaaatgaattggtggaatctaatgagaagggagaatcctccatttatatctcagaccttaatgataagcgacagaagattcctgccagagagaacccttgtgaagggggcagtaagaatcgcaactatgaagactctgtcatacagagtgtattccgtgccaaacctcagaaaagtgttcctggagagggatctggtgagtttaagaaggatggcgaattctctgttcccagctcaaatgtccgtgaataccagaaggctcgtgctaaaaagaaatacattgagcataggagcaatgagacctctgtaattcactctctgccttttggtgaacaaacatttcgccctcgagggatgctctatgaatgtcaggagtgtggggagtgctttgctcatagctctgacctcactgagcaccagaagattcatgatagggagaagccctctggaagcagaaactatgaatggtctgtcattcgcagcttggcccctactgaccctcaaacaagttacgcccaagagcagtatgctaaagagcaagcgcggaacaaatgtaaggacttcagacaattttttgctaccagcgaagacctcaacacaaaccagaaaatctatgaccaagagaagtctcatggcgaggagtctcaaggcgagaatactgatggggaggagacccacagcgaggagacccatggtcaggagacaattgaagaccctgtcattcaaggctcagacatggaagaccctcagaaggatgaccctgatgacaaaatctatgaatgtgaggactgtggcctgggctttgtggatctcacagacctcacagaccatcagaaagtccacagcaggaagtgcctggttgacagtcgggagtacacacattctgtaattcacacccattccatcagcgagtatcagagagattacactggagagcagctgtatgaatgtccaaagtgtggggaatcttttattcatagctcattccttttcgagcatcagagaatccatgaacaagaccagttgtattccatgaaggggtgtgatgatggttttattgccctcttgcccatgaagccacggaggaatcgtgctgcagagaggaatcctgctcttgctgggtcggccattcgatgccttttgtgtggacaaggcttcattcatagctctgcccttaatgagcatatgagacttcatagggaagatgatttactggagcagagccagatggctgaggaagctatcattccaggcttagccctcactgagtttcagagaagtcagaccgaagagagactctttgaatgtgcagtctgtggagaatctttcgtcaacccagcagaacttgcagatcacgtaactgttcataagaatgagccctatgagtacgggtcctcctatactcacacctcatttcttactgagcccctcaaaggagctataccattctatgaatgcaaggattgtggtaagtcctttattcatagcacagtcctcactaaacataaggagcttcatctggaagaagaagaagaagatgaagcagcagcagctgcagcagcagcagcccaggaagttgaagccaatgtccatgttccacaagtagttctgaggattcagggcttaaacgtagaggctgctgagccagaagtggaggctgccgagccagaagtggaggctgctgagccagaagtggaggctgctgagccaaacggagaggctgaagggccagatggagaggctgcagagcccattggagaggctggacagccaaatggagaggccgagcagccaaatggggatgctgatgagccagatggtgcaggtattgaagacccagaagaaagagctgaagagccagagggaaaagctgaagagccagagggagatgccgacgagcctgacggtgtgggaattgaagacccagaagaaggtgaagatcaagagattcaggtagaagaaccatactatgactgccatgaatgcacagaaaccttcacttccagcacagcattcagtgaacacctgaaaactcatgccagcatgatcatatttgagcctgcaaatgcctttggggagtgctcaggctacatcgaacgtgccagcaccagcacaggtggtgccaatcaagctgatgagaagtacttcaaatgtgacgtctgtgggcagctcttcaatgaccgcctgtccctcgccagacaccagaatacccacactggc

SEQ ID NO: 6320 - DNA, 4392 bp, Homo sapiens
  source 1..4392: mol_type = genomic DNA
atgtaccaaccagaagacgacaacaacagtgacgtgaccagcgacgacgacatgacccggaacagaagagagtcctcaccacctcactcagtccattctttcagtggtgaccgggactgggaccggaggggcagaagcagagacatggagccacgagaccgctggtcccacaccaggaacccaagaagcaggatgcctccgcgggatctttcccttcctgtggtggcgaaaacaagctttgaaatggacagagaggacgacagggactccagggcttatgagtcccgatctcaggatgctgaatcataccaaaatgtggtggacctcgctgaggacaggaaacctcacaacacaatccaggacaacatggaaaactacaggaagctgctctccctcggagtgcagcttgctgaagacgatggccactcccacatgacgcagggccactcatcaagatccaagagaagtgcctacccaagcaccagtcgaggtctaaaaactatgcctgaagccaaaaaatcaacccaccggcgggggatttgtgaagatgaatcttcccacggagtgataatggaaaaattcatcaaggatgtgtcacgcagttccaaatcgggaagagcaagggagtcaagcgaccggtcacagagattccccagaatgtcagatgataactggaaggacatttcattgaacaagagggagtcagtgatccagcagcgggtttatgaagggaatgcatttaggggaggctttaggtttaattcaacccttgtttccagaaagagagttcttgaaagaaagaggcgctatcattttgacacagatgggaagggctcgattcacgatcaaaaaggctgtcccaggaagaagccctttgaatgtggtagtgagatgagaaaagccatgagcgtgagcagcctgagcagcctcagctccccctcctttaccgagtcacagccaattgattttggggcaatgccatatgtatgtgatgagtgtgggaggtcgttcagtgtcatctcagaatttgttgagcaccagatcatgcatactagagagaacctctatgagtatggtgagtcctttatccacagtgtggctgtcagtgaagttcagaaaagtcaggttggagggaaacgttttgaatgtaaggactgtggagagaccttcaataagagtgccgccttggctgaacatcggaagattcatgctagaggttatcttgtggaatgtaagaatcaggaatgtgaggaagccttcatgcctagccccacctttagtgagcttcagaaaatatatggcaaagacaaattctacgagtgcagggtgtgtaaggaaaccttccttcatagttctgccctgattgagcaccagaaaatccactttggggatgacaaagataatgagcgtgaacatgaacgtgaacgtgaacgtgagcgcggggaaacctttaggcccagcccagcccttaatgagtttcagaaaatgtatggtaaagagaaaatgtacgaatgtaaggtgtgtggggagactttccttcatagctcatccctgaaagaacatcagaaaatccatactagagggaacccatttgaaaacaagggtaaagtgtgtgaggaaacctttattcctggtcagtcccttaaaaggcgtcagaaaacttacaataaggagaagctctgtgactttacagatggccgggatgccttcatgcaaagctcagagctcagtgagcatcagaaaattcattctcgaaagaacctctttgaaggcagagggtatgagaaatctgtcattcatagtgggccattcactgaatctcagaagagtcatactataacaagacctcttgaaagtgatgaggacgaaaaggcgttcaccattagctctaacccctatgaaaaccagaagattcccactaaggaaaatgtctatgaggcaaaatcatatgagaggtctgttattcatagcttagcctctgtggaagctcagaaaagtcacagtgtagcagggcccagtaaaccaaaagtaatggcagagtctaccattcagagcttcgatgctatcaaccatcagagagttcgtgctggagggaacacctctgaaggaagggaatacagtaggtctgttatccatagcttagtggcttccaaacctccaagaagtcacaatggaaatgaattggtggaatctaatgagaagggagaatcctccatttatatctcagaccttaatgataagcgacagaagattcctgccagagagaacccttgtgaagggggcagtaagaatcgcaactatgaagactctgtcatacagagtgtattccgtgccaaacctcagaaaagtgttcctggagagggatctggtgagtttaagaaggatggcgaattctctgttcccagctcaaatgtccgtgaataccagaaggctcgtgctaaaaagaaatacattgagcataggagcaatgagacctctgtaattcactctctgccttttggtgaacaaacatttcgccctcgagggatgctctatgaatgtcaggagtgtggggagtgctttgctcatagctctgacctcactgagcaccagaagattcatgatagggagaagccctctggaagcagaaactatgaatggtctgtcattcgcagcttggcccctactgaccctcaaacaagttacgcccaagagcagtatgctaaagagcaagcgcggaacaaatgtaaggacttcagacaattttttgctaccagcgaagacctcaacacaaaccagaaaatctatgaccaagagaagtctcatggcgaggagtctcaaggcgagaatactgatggggaggagacccacagcgaggagacccatggtcaggagacaattgaagaccctgtcattcaaggctcagacatggaagaccctcagaaggatgaccctgatgacaaaatctatgaatgtgaggactgtggcctgggctttgtggatctcacagacctcacagaccatcagaaagtccacagcaggaagtgcctggttgacagtcgggagtacacacattctgtaattcacacccattccatcagcgagtatcagagagattacactggagagcagctgtatgaatgtccaaagtgtggggaatcttttattcatagctcattccttttcgagcatcagagaatccatgaacaagaccagttgtattccatgaaggggtgtgatgatggttttattgccctcttgcccatgaagccacggaggaatcgtgctgcagagaggaatcctgctcttgctgggtcggccattcgatgccttttgtgtggacaaggcttcattcatagctctgcccttaatgagcatatgagacttcatagggaagatgatttactggagcagagccagatggctgaggaagctatcattccaggcttagccctcactgagtttcagagaagtcagaccgaagagagactctttgaatgtgcagtctgtggagaatctttcgtcaacccagcagaacttgcagatcacgtaactgttcataagaatgagccctatgagtacgggtcctcctatactcacacctcatttcttactgagcccctcaaaggagctataccattctatgaatgcaaggattgtggtaagtcctttattcatagcacagtcctcactaaacataaggagcttcatctggaagaagaagaagaagatgaagcagcagcagctgcagcagcagcagcccaggaagttgaagccaatgtccatgttccacaagtagttctgaggattcagggcttaaacgtagaggctgctgagccagaagtggaggctgccgagccagaagtggaggctgctgagccagaagtggaggctgctgagccaaacggagaggctgaagggccagatggagaggctgcagagcccattggagaggctggacagccaaatggagaggccgagcagccaaatggggatgctgatgagccagatggtgcaggtattgaagacccagaagaaagagctgaagagccagagggaaaagctgaagagccagagggagatgccgacgagcctgacggtgtgggaattgaagacccagaagaaggtgaagatcaagagattcaggtagaagaaccatactatgactgccatgaatgcacagaaaccttcacttccagcacagcattcagtgaacacctgaaaactcatgccagcatgatcatatttgagcctgcaaatgcctttggggagtgctcaggctacatcgaacgtgccagcaccagcacaggtggtgccaatcaagctgatgagaagtacttcaaatgtgacgtctgtgggcagctcttcaatgaccgcctgtccctcgccagacaccagaatacccacactggc

SEQ ID NO: 6321 - DNA, 1641 bp, Homo sapiens
  source 1..1641: mol_type = genomic DNA
atggcacgtttaacaaaaagacgacaggcggatacaaaagctatccagcatctttgggcagccattgagattatacggaaccagaagcagattgccaacattgaccgtattacaaagtatatgtctcgagtccacggtatgcaccctaaagagaccacccgtcagctgagcttagctgtgaaagatggtcttattgtcgaaactctaacagtgggctgcaaaggttcaaaagctggtattgaacaagaaggatattggttgccaggagatgagattagcattaagaagaagaatacaaacaaacaggagatgggcacatacctcagattcattgtctcccgcatgaaggagagggctatagatcttaataaaaaggggaaggacaataaacacccgatgtacaggaggctggtgcactcagctgtggacgttcccaccattcaagagaaagtgaatgaagggaaataccgaagttatgaagagttcaaagctgatgcccaattgcttctccacaataccgtgattttctatggagacagtgagcaagctgacattgcgaggatgctatataaagacacatgtcatgagctggatgaactgcagctttgcaagaattgcttttacttgtcaaatgctcgtcctgacaactggttctgttatccttgtatacctaatcatgagctggtttgggctaaaatgaaaggttttgggttttggccagccaaagtcatgcagaaagaagacaatcaagtcgacgttcgcttctttggccaccaccaccagagggcctggattccttctgaaaacattcaagatatcacagtcaacattcatcggctgcacgtgaagcgcagtatgggttggaaaaaggcctgtgatgagctggagctgcatcagcgtttcctacgagaagggagattttggaaatctaagaatgaggaccgaggtgaggaagaggcagaatccagtatctcctccaccagtaatgagcagctaaaggtcactcaagaaccaagagcaaagaaaggacgacgtaatcaaagtgtggagcccaaaaaggaagaaccagagcctgaaacagaagcagtaagttctagccaggaaatacccacgatgcctcagcccatcgaaaaagtctccgtgtcaactcagacaaagaagttaagtgcctcttcaccaagaatgctgcatcggagcacccagaccacaaacgacggcgtgtgtcagagcatgtgccatgacaaatacaccaagatcttcaatgacttcaaagaccggatgaagtcggaccacaagcgggagacagagcgtgttgtccgagaagctctggagaagctgcgttctgaaatggaagaagaaaagagacaagctgtaaataaagctgtagccaacatgcagggtgagatggacagaaaatgtaagcaagtaaaggaaaagtgtaaggaagaatttgtagaagaaatcaagaagctggcaacacagcacaagcaactgatttctcagaccaagaagaagcagtggtgctacaactgtgaggaggaggccatgtaccactgctgctggaacacatcctactgctccatcaagtgccagcaggagcactggcacgcggagcacaagcgcacctgccgccggaaaaga

SEQ ID NO: 6322 - DNA, 1704 bp, Homo sapiens
  source 1..1704: mol_type = genomic DNA
atggcacgtttaacaaaaagacgacaggcggatacaaaagctatccagcatctttgggcagccattgagattatacggaaccagaagcagattgccaacattgaccgtattacaaagtatatgtctcgagtccacggtatgcaccctaaagagaccacccgtcagctgagcttagctgtgaaagatggtcttattgtcgaaactctaacagtgggctgcaaaggttcaaaagctggtattgaacaagaaggatattggttgccaggagatgagattgactgggaaacagaaaatcatgactggtattgttttgaatgccatttgcctggagaggtgttgatatgtgacctgtgttttcgtgtgtatcattccaagtgtttgtctgatgagttcaggcttagagacagcagtagtccctggcagtgcccagtttgcaggagcattaagaagaagaatacaaacaaacaggagatgggcacatacctcagattcattgtctcccgcatgaaggagagggctatagatcttaataaaaaggggaaggacaataaacacccgatgtacaggaggctggtgcactcagctgtggacgttcccaccattcaagagaaagtgaatgaagggaaataccgaagttatgaagagttcaaagctgatgcccaattgcttctccacaataccgtgattttctatggagcagacagtgagcaagctgacattgcgaggatgctatataaagacacatgtcatgagctggatgaactgcagctttgcaagaattgcttttacttgtcaaatgctcgtcctgacaactggttctgttatccttgtatacctaatcatgagctggtttgggctaaaatgaaaggttttgggttttggccagccaaagtcatgcagaaagaagacaatcaagtcgacgttcgcttctttggccaccaccaccagagggcctggattccttctgaaaacattcaagatatcacagtcaacattcatcggctgcacgtgaagcgcagtatgggttggaaaaaggcctgtgatgagctggagctgcatcagcgtttcctacgagaagggagattttggaaatctaagaatgaggaccgaggtgaggaagaggcagaatccagtatctcctccaccagtaatgagcagctaaaggtcactcaagaaccaagagcaaagaaaggacgacgtaatcaaagtgtggagcccaaaaaggaagaaccagagcctgaaacagaagcagtaagttctagccaggaaatacccacgatgcctcagcccatcgaaaaagtctccgtgtcaactcagacaaagaagttaagtgcctcttcaccaagaatgctgcatcggagcacccagaccacaaacgacggcgtgtgtcagagcatgtgccatgacaaatacaccaagatcttcaatgacttcaaagaccggatgaagtcggaccacaagcgggagacagagcgtgttgtccgagaagctctggagaagctgcgttctgaaatggaagaagaaaagagacaagctgtaaataaagctgtagccaacatgcagggtgagatggacagaaaatgtaagcaagtaaaggaaaagtgtaaggaagaatttgtagaagaaatcaagaagctggcaacacagcacaagcaactgatttctcagaccaagaagaagcagtgggtaaataccagtcttttt

SEQ ID NO: 6323 - DNA, 1551 bp, Homo sapiens
  source 1..1551: mol_type = genomic DNA
atggcacgtttaacaaaaagacgacaggcggatacaaaagctatccagcatctttgggcagccattgagattatacggaaccagaagcagattgccaacattgaccgtattacaaagtatatgtctcgagtccacggtatgcaccctaaagagaccacccgtcagctgagcttagctgtgaaagatggtcttattgtcgaaactctaacagtgggctgcaaaggttcaaaagctggtattgaacaagaaggatattggttgccaggagatgagattagcattaagaagaagaatacaaacaaacaggagatgggcacatacctcagattcattgtctcccgcatgaaggagaggaaagtgaatgaagggaaataccgaagttatgaagagttcaaagctgatgcccaattgcttctccacaataccgtgattttctatggagcagacagtgagcaagctgacattgcgaggatgctatataaagacacatgtcatgagctggatgaactgcagctttgcaagaattgcttttacttgtcaaatgctcgtcctgacaactggttctgttatccttgtatacctaatcatgagctggtttgggctaaaatgaaaggttttgggttttggccagccaaagtcatgcagaaagaagacaatcaagtcgacgttcgcttctttggccaccaccaccagagggcctggattccttctgaaaacattcaagatatcacagtcaacattcatcggctgcacgtgaagcgcagtatgggttggaaaaaggcctgtgatgagctggagctgcatcagcgtttcctacgagaagggagattttggaaatctaagaatgaggaccgaggtgaggaagaggcagaatccagtatctcctccaccagtaatgagcagctaaaggtcactcaagaaccaagagcaaagaaaggacgacgtaatcaaagtgtggagcccaaaaaggaagaaccagagcctgaaacagaagcagtaagttctagccaggaaatacccacgatgcctcagcccatcgaaaaagtctccgtgtcaactcagacaaagaagttaagtgcctcttcaccaagaatgctgcatcggagcacccagaccacaaacgacggcgtgtgtcagagcatgtgccatgacaaatacaccaagatcttcaatgacttcaaagaccggatgaagtcggaccacaagcgggagacagagcgtgttgtccgagaagctctggagaagctgcgttctgaaatggaagaagaaaagagacaagctgtaaataaagctgtagccaacatgcagggtgagatggacagaaaatgtaagcaagtaaaggaaaagtgtaaggaagaatttgtagaagaaatcaagaagctggcaacacagcacaagcaactgatttctcagaccaagaagaagcagtggtgctacaactgtgaggaggaggccatgtaccactgctgctggaacacatcctactgctccatcaagtgccagcaggagcactggcacgcggagcacaagcgcacctgccgccggaaaaga

SEQ ID NO: 6324 - DNA, 1806 bp, Homo sapiens
  source 1..1806: mol_type = genomic DNA
atggcacgtttaacaaaaagacgacaggcggatacaaaagctatccagcatctttgggcagccattgagattatacggaaccagaagcagattgccaacattgaccgtattacaaagtatatgtctcgagtccacggtatgcaccctaaagagaccacccgtcagctgagcttagctgtgaaagatggtcttattgtcgaaactctaacagtgggctgcaaaggttcaaaagctggtattgaacaagaaggatattggttgccaggagatgagattgactgggaaacagaaaatcatgactggtattgttttgaatgccatttgcctggagaggtgttgatatgtgacctgtgttttcgtgtgtatcattccaagtgtttgtctgatgagttcaggcttagagacagcagtagtccctggcagtgcccagtttgcaggagcattaagaagaagaatacaaacaaacaggagatgggcacatacctcagattcattgtctcccgcatgaaggagagggctatagatcttaataaaaaggggaaggacaataaacacccgatgtacaggaggctggtgcactcagctgtggacgttcccaccattcaagagaaagtgaatgaagggaaataccgaagttatgaagagttcaaagctgatgcccaattgcttctccacaataccgtgattttctatggagcagacagtgagcaagctgacattgcgaggatgctatataaagacacatgtcatgagctggatgaactgcagctttgcaagaattgcttttacttgtcaaatgctcgtcctgacaactggttctgttatccttgtatacctaatcatgagctggtttgggctaaaatgaaaggttttgggttttggccagccaaagtcatgcagaaagaagacaatcaagtcgacgttcgcttctttggccaccaccaccagagggcctggattccttctgaaaacattcaagatatcacagtcaacattcatcggctgcacgtgaagcgcagtatgggttggaaaaaggcctgtgatgagctggagctgcatcagcgtttcctacgagaagggagattttggaaatctaagaatgaggaccgaggtgaggaagaggcagaatccagtatctcctccaccagtaatgagcagctaaaggtcactcaagaaccaagagcaaagaaaggacgacgtaatcaaagtgtggagcccaaaaaggaagaaccagagcctgaaacagaagcagtaagttctagccaggaaatacccacgatgcctcagcccatcgaaaaagtctccgtgtcaactcagacaaagaagttaagtgcctcttcaccaagaatgctgcatcggagcacccagaccacaaacgacggcgtgtgtcagagcatgtgccatgacaaatacaccaagatcttcaatgacttcaaagaccggatgaagtcggaccacaagcgggagacagagcgtgttgtccgagaagctctggagaagctgcgttctgaaatggaagaagaaaagagacaagctgtaaataaagctgtagccaacatgcagggtgagatggacagaaaatgtaagcaagtaaaggaaaagtgtaaggaagaatttgtagaagaaatcaagaagctggcaacacagcacaagcaactgatttctcagaccaagaagaagcagtggtgctacaactgtgaggaggaggccatgtaccactgctgctggaacacatcctactgctccatcaagtgccagcaggagcactggcacgcggagcacaagcgcacctgccgccggaaaaga

SEQ ID NO: 6325 - DNA, 1755 bp, Homo sapiens
  source 1..1755: mol_type = genomic DNA
atggtgatttttacatcattacacagatatgtcattttcattagttgtatcattgttataaactggtatatgtctcgagtccacggtatgcaccctaaagagaccacccgtcagctgagcttagctgtgaaagatggtcttattgtcgaaactctaacagtgggctgcaaaggttcaaaagctggtattgaacaagaaggatattggttgccaggagatgagattgactgggaaacagaaaatcatgactggtattgttttgaatgccatttgcctggagaggtgttgatatgtgacctgtgttttcgtgtgtatcattccaagtgtttgtctgatgagttcaggcttagagacagcagtagtccctggcagtgcccagtttgcaggagcattaagaagaagaatacaaacaaacaggagatgggcacatacctcagattcattgtctcccgcatgaaggagagggctatagatcttaataaaaaggggaaggacaataaacacccgatgtacaggaggctggtgcactcagctgtggacgttcccaccattcaagagaaagtgaatgaagggaaataccgaagttatgaagagttcaaagctgatgcccaattgcttctccacaataccgtgattttctatggagcagacagtgagcaagctgacattgcgaggatgctatataaagacacatgtcatgagctggatgaactgcagctttgcaagaattgcttttacttgtcaaatgctcgtcctgacaactggttctgttatccttgtatacctaatcatgagctggtttgggctaaaatgaaaggttttgggttttggccagccaaagtcatgcagaaagaagacaatcaagtcgacgttcgcttctttggccaccaccaccagagggcctggattccttctgaaaacattcaagatatcacagtcaacattcatcggctgcacgtgaagcgcagtatgggttggaaaaaggcctgtgatgagctggagctgcatcagcgtttcctacgagaagggagattttggaaatctaagaatgaggaccgaggtgaggaagaggcagaatccagtatctcctccaccagtaatgagcagctaaaggtcactcaagaaccaagagcaaagaaaggacgacgtaatcaaagtgtggagcccaaaaaggaagaaccagagcctgaaacagaagcagtaagttctagccaggaaatacccacgatgcctcagcccatcgaaaaagtctccgtgtcaactcagacaaagaagttaagtgcctcttcaccaagaatgctgcatcggagcacccagaccacaaacgacggcgtgtgtcagagcatgtgccatgacaaatacaccaagatcttcaatgacttcaaagaccggatgaagtcggaccacaagcgggagacagagcgtgttgtccgagaagctctggagaagctgcgttctgaaatggaagaagaaaagagacaagctgtaaataaagctgtagccaacatgcagggtgagatggacagaaaatgtaagcaagtaaaggaaaagtgtaaggaagaatttgtagaagaaatcaagaagctggcaacacagcacaagcaactgatttctcagaccaagaagaagcagtggtgctacaactgtgaggaggaggccatgtaccactgctgctggaacacatcctactgctccatcaagtgccagcaggagcactggcacgcggagcacaagcgcacctgccgccggaaaaga

SEQ ID NO: 6326 - DNA, 1701 bp, Homo sapiens
  source 1..1701: mol_type = genomic DNA
atggcacgtttaacaaaaagacgacaggcggatacaaaagctatccagcatctttgggcagccattgagattatacggaaccagaagcagattgccaacattgaccgtattacaaagtatatgtctcgagtccacggtatgcaccctaaagagaccacccgtcagctgagcttagctgtgaaagatggtcttattgtcgaaactctaacagtgggctgcaaaggttcaaaagctggtattgaacaagaaggatattggttgccaggagatgagattgactgggaaacagaaaatcatgactggtattgttttgaatgccatttgcctggagaggtgttgatatgtgacctgtgttttcgtgtgtatcattccaagtgtttgtctgatgagttcaggcttagagacagcagtagtccctggcagtgcccagtttgcaggagcattaagaagaagaatacaaacaaacaggagatgggcacatacctcagattcattgtctcccgcatgaaggagagggctatagatcttaataaaaaggggaaggacaataaacacccgatgtacaggaggctggtgcactcagctgtggacgttcccaccattcaagagaaagtgaatgaagggaaataccgaagttatgaagagttcaaagctgatgcccaattgcttctccacaataccgtgattttctatggagacagtgagcaagctgacattgcgaggatgctatataaagacacatgtcatgagctggatgaactgcagctttgcaagaattgcttttacttgtcaaatgctcgtcctgacaactggttctgttatccttgtatacctaatcatgagctggtttgggctaaaatgaaaggttttgggttttggccagccaaagtcatgcagaaagaagacaatcaagtcgacgttcgcttctttggccaccaccaccagagggcctggattccttctgaaaacattcaagatatcacagtcaacattcatcggctgcacgtgaagcgcagtatgggttggaaaaaggcctgtgatgagctggagctgcatcagcgtttcctacgagaagggagattttggaaatctaagaatgaggaccgaggtgaggaagaggcagaatccagtatctcctccaccagtaatgagcagctaaaggtcactcaagaaccaagagcaaagaaaggacgacgtaatcaaagtgtggagcccaaaaaggaagaaccagagcctgaaacagaagcagtaagttctagccaggaaatacccacgatgcctcagcccatcgaaaaagtctccgtgtcaactcagacaaagaagttaagtgcctcttcaccaagaatgctgcatcggagcacccagaccacaaacgacggcgtgtgtcagagcatgtgccatgacaaatacaccaagatcttcaatgacttcaaagaccggatgaagtcggaccacaagcgggagacagagcgtgttgtccgagaagctctggagaagctgcgttctgaaatggaagaagaaaagagacaagctgtaaataaagctgtagccaacatgcagggtgagatggacagaaaatgtaagcaagtaaaggaaaagtgtaaggaagaatttgtagaagaaatcaagaagctggcaacacagcacaagcaactgatttctcagaccaagaagaagcagtgggtaaataccagtcttttt

SEQ ID NO: 6327 - DNA, 1644 bp, Homo sapiens
  source 1..1644: mol_type = genomic DNA
atggcacgtttaacaaaaagacgacaggcggatacaaaagctatccagcatctttgggcagccattgagattatacggaaccagaagcagattgccaacattgaccgtattacaaagtatatgtctcgagtccacggtatgcaccctaaagagaccacccgtcagctgagcttagctgtgaaagatggtcttattgtcgaaactctaacagtgggctgcaaaggttcaaaagctggtattgaacaagaaggatattggttgccaggagatgagattagcattaagaagaagaatacaaacaaacaggagatgggcacatacctcagattcattgtctcccgcatgaaggagagggctatagatcttaataaaaaggggaaggacaataaacacccgatgtacaggaggctggtgcactcagctgtggacgttcccaccattcaagagaaagtgaatgaagggaaataccgaagttatgaagagttcaaagctgatgcccaattgcttctccacaataccgtgattttctatggagcagacagtgagcaagctgacattgcgaggatgctatataaagacacatgtcatgagctggatgaactgcagctttgcaagaattgcttttacttgtcaaatgctcgtcctgacaactggttctgttatccttgtatacctaatcatgagctggtttgggctaaaatgaaaggttttgggttttggccagccaaagtcatgcagaaagaagacaatcaagtcgacgttcgcttctttggccaccaccaccagagggcctggattccttctgaaaacattcaagatatcacagtcaacattcatcggctgcacgtgaagcgcagtatgggttggaaaaaggcctgtgatgagctggagctgcatcagcgtttcctacgagaagggagattttggaaatctaagaatgaggaccgaggtgaggaagaggcagaatccagtatctcctccaccagtaatgagcagctaaaggtcactcaagaaccaagagcaaagaaaggacgacgtaatcaaagtgtggagcccaaaaaggaagaaccagagcctgaaacagaagcagtaagttctagccaggaaatacccacgatgcctcagcccatcgaaaaagtctccgtgtcaactcagacaaagaagttaagtgcctcttcaccaagaatgctgcatcggagcacccagaccacaaacgacggcgtgtgtcagagcatgtgccatgacaaatacaccaagatcttcaatgacttcaaagaccggatgaagtcggaccacaagcgggagacagagcgtgttgtccgagaagctctggagaagctgcgttctgaaatggaagaagaaaagagacaagctgtaaataaagctgtagccaacatgcagggtgagatggacagaaaatgtaagcaagtaaaggaaaagtgtaaggaagaatttgtagaagaaatcaagaagctggcaacacagcacaagcaactgatttctcagaccaagaagaagcagtggtgctacaactgtgaggaggaggccatgtaccactgctgctggaacacatcctactgctccatcaagtgccagcaggagcactggcacgcggagcacaagcgcacctgccgccggaaaaga

SEQ ID NO: 6328 - DNA, 1305 bp, Homo sapiens
  source 1..1305: mol_type = genomic DNA
atagcgtccaacagctggaacgccagcagcagccccggggaggcccgggaggatgggcccgagggcctggacaaggggctggacaacgatgcggagggcgtgtggagcccggacatcgagcagagcttccaggaggccctggccatctacccgccctgcggccggcggaagatcatcctgtcagacgagggcaagatgtacggccgaaatgagttgattgcacgctatattaaactgaggacggggaagactcggacgagaaaacaggtgtccagccacatacaggttctagctcggaagaaggtgcgggagtaccaggttggcatcaaggccatgaacctggaccaggtctccaaggacaaagcccttcagagcatggcgtccatgtcctctgcccagatcgtctctgccagtgtcctgcagaacaagttcagcccaccttcccctctgccccaggccgtcttctccacttcctcgcggttctggagcagcccccctctcctgggacagcagcctggaccctctcaggacatcaagccctttgcacagccagcctaccccatccagccgcccctgccgccgacgctcagcagttatgagcccctggccccgctcccctcagctgctgcctctgtgcctgtgtggcaggaccgtaccattgcctcctcccggctgcggctcctggagtattcagccttcatggaggtgcagcgagaccctgacacgtacagcaaacacctgtttgtgcacatcggccagacgaaccccgccttctcagacccacccctggaggcagtagatgtgcgccagatctatgacaaattccccgagaaaaagggaggattgaaggagctctatgagaaggggccccctaatgccttcttccttgtcaagttctgggccgacctcaacagcaccatccaggagggcccgggagccttctatggggtcagctctcagtacagctctgctgatagcatgaccatcagcgtctccaccaaggtgtgctcctttggcaaacaggtggtagagaaggtggagactgagtatgccaggctggagaacgggcgctttgtgtaccgtatccaccgctcgcccatgtgcgagtacatgatcaacttcatccacaagctgaagcacctgcccgagaagtacatgatgaacagcgtgctggagaacttcaccatcctgcaggtggtcacgagccgggactcccaggagaccctgcttgtcattgcttttgtcttcgaagtctccaccagtgagcacggggcccagcaccatgtctacaagctcgtcaaagac

SEQ ID NO: 6329 - DNA, 1353 bp, Homo sapiens
  source 1..1353: mol_type = genomic DNA
atgggggaaccccgggctggggccgccctggacgatggcagcggctggacgggcagtgaggaaggcagtgaggagggtaccggcggcagtgagggggctgggggtgacgggggcccggatgcagagggggtgtggagcccagacattgagcagagcttccaggaggccctggccatctatccaccctgcggccgccggaaaataattttgtctgatgaaggcaagatgtatggtcggaatgaactgatcgcccgctacatcaagctgagaacggggaagacccgaactcgaaaacaggtttctagtcacatccaggttttggcccgaaggaaatcaagggaaatccagtccaagttgaaggctctgaacgtggaccaggtttccaaggacaaggctttccagacaatggcaaccatgtcctctgcccagctcatctccgcgccttctctgcaggccaaactgggtcccactggtcctcaggcctctgagcttttccagttttggtctggaggatctgggcccccctggaatgttccagatgtgaagccattctcacagacaccgttcaccttgtcactgactcccccatctactgacctcccagggtacgagcccccccaagccctctcacccctgcccccacctaccccatcgcccccagcctggcaggctcggggcctgggcaccgcccggttgcagctggtagagttctcagccttcgtggaaccgccagatgcagttgattcttaccagaggcacctgttcgtgcacatcagccagcactgccccagccccggagcgccgccgctcgagagtgtggacgtccggcagatctacgacaaattccctgagaaaaagggtggcctccgagagctatatgatcgtggccccccccatgccttcttcctggtcaagttctgggcggacctgaactggggcccaagtggtgaggaggcaggggccggtggcagcatcagcagtggtggcttctacggagtgagcagccagtatgagagcctggaacacatgaccctcacctgttcctccaaggtctgctcttttggcaagcaggtggtggagaaggtggagacggaacgggcccagctggaggacggcagatttgtgtaccgcctgctgcgctcgcccatgtgcgagtacctggtgaatttcttgcacaagttgcggcagctgcctgagcgatacatgatgaacagcgtcctggaaaacttcaccatcctccaggtggtgacaaacagagacacccaggaactgctgctctgcaccgcctatgtcttcgaggtctccaccagcgagcgtggggcccagcatcacatttaccgcctggtcagggac

SEQ ID NO: 6330 - DNA, 1350 bp, Homo sapiens
  source 1..1350: mol_type = genomic DNA
atgggggaaccccgggctggggccgccctggacgatggcagcggctggacgggcagtgaggaaggcagtgaggagggtaccggcggcagtgagggggctgggggtgacgggggcccggatgcagagggggtgtggagcccagacattgagcagagcttccaggaggccctggccatctatccaccctgcggccgccggaaaataattttgtctgatgaaggcaagatgtatggtcggaatgaactgatcgcccgctacatcaagctgagaacggggaagacccgaactcgaaaacaggtttctagtcacatccaggttttggcccgaaggaaatcaagggaaatccagtccaagttgaaggaccaggtttccaaggacaaggctttccagacaatggcaaccatgtcctctgcccagctcatctccgcgccttctctgcaggccaaactgggtcccactggtcctcaggtggtccaggcctctgagcttttccagttttggtctggaggatctgggcccccctggaatgttccagatgtgaagccattctcacagacaccgttcaccttgtcactgactcccccatctactgacctcccagggtacgagcccccccaagccctctcacccctgcccccacctaccccatcgcccccagcctggcaggctcggggcctgggcaccgcccggttgcagctggtagagttctcagccttcgtggaaccgccagatgcagttgattcttaccagaggcacctgttcgtgcacatcagccagcactgccccagccccggagcgccgccgctcgagagtgtggacgtccggcagatctacgacaaattccctgagaaaaagggtggcctccgagagctatatgatcgtggccccccccatgccttcttcctggtcaagttctgggcggacctgaactggggcccaagtggtgaggaggcaggggccggtggcagcatcagcagtggtggcttctacggagtgagcagccagtatgagagcctggaacacatgaccctcacctgttcctccaaggtctgctcttttggcaagcaggtggtggagaaggtggagacggaacgggcccagctggaggacggcagatttgtgtaccgcctgctgcgctcgcccatgtgcgagtacctggtgaatttcttgcacaagttgcggcagctgcctgagcgatacatgatgaacagcgtcctggaaaacttcaccatcctccaggtggtgacaaacagagacacccaggaactgctgctctgcaccgcctatgtcttcgaggtctccaccagcgagcgtggggcccagcatcacatttaccgcctggtcagggac

SEQ ID NO: 6331 - DNA, 957 bp, Homo sapiens
  source 1..957: mol_type = genomic DNA
atggcaaccatgtcctctgcccagctcatctccgcgccttctctgcaggccaaactgggtcccactggtcctcaggtggtccaggcctctgagcttttccagttttggtctggaggatctgggcccccctggaatgttccagatgtgaagccattctcacagacaccgttcaccttgtcactgactcccccatctactgacctcccagggtacgagcccccccaagccctctcacccctgcccccacctaccccatcgcccccagcctggcaggctcggggcctgggcaccgcccggttgcagctggtagagttctcagccttcgtggaaccgccagatgcagttgattcttaccagaggcacctgttcgtgcacatcagccagcactgccccagccccggagcgccgccgctcgagagtgtggacgtccggcagatctacgacaaattccctgagaaaaagggtggcctccgagagctatatgatcgtggccccccccatgccttcttcctggtcaagttctgggcggacctgaactggggcccaagtggtgaggaggcaggggccggtggcagcatcagcagtggtggcttctacggagtgagcagccagtatgagagcctggaacacatgaccctcacctgttcctccaaggtctgctcttttggcaagcaggtggtggagaaggtggagacggaacgggcccagctggaggacggcagatttgtgtaccgcctgctgcgctcgcccatgtgcgagtacctggtgaatttcttgcacaagttgcggcagctgcctgagcgatacatgatgaacagcgtcctggaaaacttcaccatcctccaggtggtgacaaacagagacacccaggaactgctgctctgcaccgcctatgtcttcgaggtctccaccagcgagcgtggggcccagcatcacatttaccgcctggtcagggac

SEQ ID NO: 6332 - DNA, 1278 bp, Homo sapiens
  source 1..1278: mol_type = genomic DNA
attgagcccagcagctggagcggcagtgagagccctgccgaaaacatggaaaggatgagtgactctgcagataagccaattgacaatgatgcagaaggggtctggagccccgacatcgagcaaagctttcaggaggccctggctatctatccaccatgtgggaggaggaaaatcatcttatcagacgaaggcaaaatgtatggtaggaatgaattgatagccagatacatcaaactcaggacaggcaagacgaggaccagaaaacaggtgtctagtcacattcaggttcttgccagaaggaaatctcgtgattttcattccaagctaaaggatcagactgcaaaggataaggccctgcagcacatggcggccatgtcctcagcccagatcgtctcggccactgccattcataacaagctggggctgcctgggattccacgcccgaccttcccaggggcgccggggttctggccgggaatgattcaaacagggcagccaggatcctcacaagacgtcaagccttttgtgcagcaggcctaccccatccagccagcggtcacagcccccattccagggtttgagcctgcatcggccccagctccctcagtccctgcctggcaaggtcgctccattggcacaaccaagcttcgcctggtggaattttcagcttttctcgagcagcagcgagacccagactcgtacaacaaacacctcttcgtgcacattgggcatgccaaccattcttacagtgacccattgcttgaatcagtggacattcgtcagatttatgacaaatttcctgaaaagaaaggtggcttaaaggaactgtttggaaagggccctcaaaatgccttcttcctcgtaaaattctgggctgatttaaactgcaatattcaagatgatgctggggctttttatggtgtaaccagtcagtacgagagttctgaaaatatgacagtcacctgttccaccaaagtttgctcctttgggaagcaagtagtagaaaaagtagagacggagtatgcaaggtttgagaatggccgatttgtataccgaataaaccgctccccaatgtgtgaatatatgatcaacttcatccacaagctcaaacacttaccagagaaatatatgatgaacagtgttttggaaaacttcacaattttattggtggtaacaaacagggatacacaagaaactctactctgcatggcctgtgtgtttgaagtttcaaatagtgaacacggagcacaacatcatatttacaggcttgtaaaggac

SEQ ID NO: 6333 - DNA, 915 bp, Homo sapiens
  source 1..915: mol_type = genomic DNA
atggctgccatgtcgtctgcacagatcatctccgccacggccttccacagtagcatggccctcgcccggggccccggccgcccagcagtctcagggttttggcaaggagctttgccaggccaagccggaacgtcccatgatgtgaagcctttctctcagcaaacctatgctgtccagcctccgctgcctctgccagggtttgagtctcctgcagggcccgccccatcgccctctgcgcccccggcacccccatggcagggccgcagcgtggccagctccaagctctggatgttggagttctctgccttcctggagcagcagcaggacccggacacgtacaacaagcacctgttcgtgcacattggccagtccagcccaagctacagcgacccctacctcgaagccgtggacatccgccaaatctatgacaaattcccggagaaaaagggtggactcaaggatctcttcgaacggggaccctccaatgccttttttcttgtgaagttctgggcagacctcaacaccaacatcgaggatgaaggcagctccttctatggggtctccagccagtatgagagccccgagaacatgatcatcacctgctccacgaaggtctgctctttcggcaagcaggtggtggagaaagttgagacagagtatgctcgctatgagaatggacactactcttaccgcatccaccggtccccgctctgtgagtacatgatcaacttcatccacaagctcaagcacctccctgagaagtacatgatgaacagcgtgctggagaacttcaccatcctgcaggtggtcaccaacagagacacacaggagaccttgctgtgcattgcctatgtctttgaggtgtcagccagtgagcacggggctcagcaccacatctacaggctggtgaaagaa

SEQ ID NO: 6334 - DNA, 561 bp, Homo sapiens
  source 1..561: mol_type = genomic DNA
atgccatctctgcctcactcccacagggtaatgttggactcggtgacacacagcaccttcctgcctaatgcatccttctgcgatcccctgatgtcgtggactgatctgttcagcaatgaagagtactaccctgcctttgagcatcagacaggttactccttttttaatgacgctgaagaaagcaaggccaccatcaaagactatgctgattccaactgcttgaaaacaagtggcatcaaaagtcaagactgtcacagtcatagtagaacaagcctccaaagttctcatctatgggaatttgtacgagacctgcttctatctcctgaagaaaactgtggcattctggaatgggaagatagggaacaaggaatttttcgggtggttaaatcggaagccctggcaaagatgtggggacaaaggaagaaaaatgacagaatgacatatgaaaagttgagcagagccctgagatactactataaaacaggaattttggagcgggttgaccgaaggttagtgtacaaatttggaaaaaatgcacacgggtggcaggaagacaagcta

SEQ ID NO: 6335 - DNA, 480 bp, Homo sapiens
  source 1..480: mol_type = genomic DNA
atgttggactcggtgacacacagcaccttcctgcctaatgcatccttctgcgatcccctgatgtcgtggactgatctgttcagcaatgaagagtactaccctgcctttgagcatcagacagatgctgattccaactgcttgaaaacaagtggcatcaaaagtcaagactgtcacagtcatagtagaacaagcctccaaagttctcatctatgggaatttgtacgagacctgcttctatctcctgaagaaaactgtggcattctggaatgggaagatagggaacaaggaatttttcgggtggttaaatcggaagccctggcaaagatgtggggacaaaggaagaaaaatgacagaatgacatatgaaaagttgagcagagccctgagatactactataaaacaggaattttggagcgggttgaccgaaggttagtgtacaaatttggaaaaaatgcacacgggtggcaggaagacaagcta

SEQ ID NO: 6336 - DNA, 795 bp, Homo sapiens
  source 1..795: mol_type = genomic DNA
atgccatctctgcctcactcccacagggtaatgttggactcggtgacacacagcaccttcctgcctaatgcatccttctgcgatcccctgatgtcgtggactgatctgttcagcaatgaagagtactaccctgcctttgagcatcagacagcctgtgactcatactggacatcagtccaccctgaatactggactaagcgccatgtgtgggagtggctccagttctgctgcgaccagtacaagttggacaccaattgcatctccttctgcaacttcaacatcagtggcctgcagctgtgcagcatgacacaggaggagttcgtcgaggcagctggcctctgcggcgagtacctgtacttcatcctccagaacatccgcacacaaggttactccttttttaatgacgctgaagaaagcaaggccaccatcaaagactatgctgattccaactgcttgaaaacaagtggcatcaaaagtcaagactgtcacagtcatagtagaacaagcctccaaagttctcatctatgggaatttgtacgagacctgcttctatctcctgaagaaaactgtggcattctggaatgggaagatagggaacaaggaatttttcgggtggttaaatcggaagccctggcaaagatgtggggacaaaggaagaaaaatgacagaatgacatatgaaaagttgagcagagccctgagatactactataaaacaggaattttggagcgggttgaccgaaggttagtgtacaaatttggaaaaaatgcacacgggtggcaggaagacaagcta

SEQ ID NO: 6337 - DNA, 930 bp, Homo sapiens
  source 1..930: mol_type = genomic DNA
atgagccagcaactgaagaaacgggcaaagacaagacaccagaaaggcctgggtggaagagcccccagtggggctaagcccaggcaaggcaagtcaagccaagacctgcaggcggaaatagaacctgtcagcgcggtgtgggccttatgtgatggctatgtgtgctatgagcctggccctcaggctctcggaggggatgatttctcagactgttacatagaatgcgtcataaggggtgagttttctcaacccatcctggaagaggactcactttttgagtccttggaatacctaaagaaaggatcagaacaacagctttctcaaaaggttttcgaagcaagctcccttgaatgttctttggaatacatgaaaaaaggggtaaagaaagagcttccacaaaagatagttggagagaattcgcttgagtattctgagtacatgacaggcaagaagcttccgcctggaggaatacctggcattgacctatcagatcctaaacagctcgcagaatttgctagaaagaagccccccataaataaagaatatgacagtctgagcgcaatcgcttgtcctcagagtggatgcactaggaagttgaggaatagagctgccctgagaaagcatctcctcattcatggtccccgagaccacgtctgtgcggaatgtgggaaagcgttcgttgagagctcaaaactaaagagacatttcctggttcatactggagagaagccgtttcggtgcacttttgaagggtgcggaaagcgcttctctctggactttaatttgcgtacgcacgtgcgcatccacacgggggagaaacgtttcgtgtgtccctttcaaggctgcaacaggaggtttattcagtcaaataacctgaaagcccacatcctaacgcatgcaaatacgaacaagaatgaacaagagggaaag

SEQ ID NO: 6338 - DNA, 1161 bp, Homo sapiens
  source 1..1161: mol_type = genomic DNA
atggtggtagaaagagatgacggaagcacattaatggaaatagatggcgataaaggcaaacaaggcggtcccacctactacatagatactaatgctctgcgtgttccgagggagaatatggaggccatttcacctctaaaaaatgggatggttgaagactgggatagtttccaagctattttggatcatacctacaaaatgcatgtcaaatcagaagccagtctccatcctgttctcatgtcagaggcaccgtggaatactagagcaaagagagagaaactgacagagttaatgtttgaacactacaacatccctgccttcttcctttgcaaaactgcagttttgacagcatttgctaatggtcgttctactgggctgattttggacagtggagccactcataccactgcaattccagtccacgatggctatgtccttcaacaaggcattgtgaaatcccctcttgctggagactttattactatgcagtgcagagaactcttccaagaaatgaatattgaattggttcctccatatatgattgcatcaaaagaagctgttcgtgaaggatctccagcaaactggaaaagaaaagagaagttgcctcaggttacgaggtcttggcacaattatatgtgtaattgtgttatccaggattttcaagcttcggtacttcaagtgtcagattcaacttatgatgaacaagtggctgcacagatgccaactgttcattatgaattccccaatggctacaattgtgattttggtgcagagcggctaaagattccagaaggattatttgacccttccaatgtaaaggggttatcaggaaacacaatgttaggagtcagtcatgttgtcaccacaagtgttgggatgtgtgatattgacatcagaccaggtctctatggcagtgtaatagtggcaggaggaaacacactaatacagagttttactgacaggttgaatagagagctgtctcagaaaactcctccaagtatgcggttgaaattgattgcaaataatacaacagtggaacggaggtttagctcatggattggcggctccattctagcctctttgggtacctttcaacagatgtggatttccaagcaagaatatgaagaaggagggaagcagtgtgtagaaagaaaatgccct

SEQ ID NO: 6339 - DNA, 8145 bp, Homo sapiens
  source 1..8145: mol_type = genomic DNA
atggcggcggcggcgggcggcggcagttgccccgggcctggctccgcgcggggccgcttcccgggccggccgcggggcgccggcgggggcgggggccgcggcggacggggcaacggggccgaaagagtgcgggtagctctgcggcgcggcggtggcgcgacggggccgggcggagccgagcccggggaggacacggccctgctccgtttgctggggctccgccggggcctgcgccggctccgccgcctgtgggccggcccgcgggtccagcggggccggggacggggtcggggccggggctggggcccgagtcgaggctgcgtgccggaggaggagagcagtgacggggaatccgacgaggaggagtttcagggttttcattcagatgaagatgtggcccccagttccctgcgctctgcgctccgatcccagcgaggtcgagcgccccgaggtcggggtcgcaagcataagacgaccccccttcctcctcctcgcctagcagatgtggctcctacccccccaaagacccctgcccggaaacggggtgaggaaggcacagaacggatggtgcaggcactgactgaacttctccggcgggcccaggcaccccaagcaccccggagccgggcatgtgagccctccaccccccggcggtctcggggacggcccccaggacggccagcaggcccctgcaggaggaagcagcaagcagtagtggtggcagaagcagctgtgacaatccccaaacctgagcccccacctcctgtggttccagtgaaacatcagactggcagctggaaatgcaaggaggggcccggtccaggacctgggacccccaggcgtggaggacagtcaagccgtggaggccgtggaggcaggggccgcggccgaggtggtgggctcccctttgtgatcaagtttgtttcaagggccaaaaaagtaaagatgggacaattgtccttgggactcgaatcaggtcaaggtcaaggtcaacatgaggaaagttggcaggatgtcccccaaagaagagttggatctggacagggagggagcccttgctggaaaaagcaggaacagaagctggatgacgaggaagaagagaagaaagaagaagaagaaaaagacaaggagggagaagagaaggaagaaagagctgtagctgaggagatgatgccagctgcggaaaaggaagaggcaaagctgccaccaccgcctctgactcctccagccccttcacctcctccacccctcccacccccttcgacatctcctccacccccactctgccctccaccaccacccccagtgtccccaccacctctaccatcccctccaccgcctcctgcccaagaggagcaggaggaatcccctcctcctgtggtcccagctacgtgctccaggaagaggggccggcctcccctgactcccagccagcgggcggagcgggaagctgctcgggcagggccagagggcacctctcctcccactccaacccccagcaccgccacgggaggccctccggaagacagtcccaccgtggcccccaaaagcaccaccttcctgaagaatatccggcagtttattatgcctgtggtgagtgcccgctcctcccgtgtcatcaagacaccccggcgatttatggatgaagacccccccaaacccccaaaggtggaggtctcacctgtcctgcgacctcccattaccacctccccacctgttccccaggagccagcaccagtcccctctccaccacgtgccccaactcctccatctaccccagttccactccctgagaagagacggtccatcctaagggaacccacatttcgctggacctcactgacccgggagctgccccctcctcccccagcccctccacctcccccggccccctccccaccccctgctcctgccacctcctcccggaggcccctactccttcgggcccctcagtttaccccaagcgaagcccacctgaagatctacgaatcggtgcttactcctcctcctcttggggctcctgaagcccctgagccagagcctcctcctgccgatgactctccagctgagcctgagcctcgggcagtgggccgcaccaaccacctcagcctgcctcgattcgcccctgtggtcaccactcctgttaaggccgaggtgtcccctcacggggctccagctctgagcaacgggccacagacacaggctcagctactgcagcccctgcaggccttgcaaacccagctcctgccccaggcactaccgccaccacagccacagctgcagccaccgccgtcaccacagcagatgcctcccctggaaaaagcccggattgcgggcgtgggttccttgccgctgtctggggtagaggagaagatgttcagcctcctcaagagagccaaagtgcagctattcaagatcgatcagcagcagcagcagaaggtggcagcttccatgccgctgagccctggagggcagatggaggaggtggccggggctgtcaagcagatctccgacagaggccctgtccggtctgaagatgagtcggtggaagctaagagagagcggccctcaggtcccgagtcccctgtgcaaggtccccgcatcaaacatgtctgccgtcatgctgctgtggccctgggtcaggcccgggccatggtgcctgaagatgtccctcgcctcagtgccctccctctccgggatcggcaggacctcgccacagaggatacatcatcggcgtccgagactgagagtgtcccgtcacggtcccggcggggaaaggtggaggcagcaggccctgggggagaatcagagcccacaggttctggagggaccctggcccacacaccccggcgctcactgccctcccatcacggcaagaagatgcgcatggctcgatgtggacactgtcggggctgcctacgtgtgcaggactgtgggtcctgtgtcaactgcctagacaagcccaagtttgggggccctaacaccaagaagcagtgctgtgtataccggaagtgtgacaaaatagaggctcggaagatggaacgactggctaaaaaaggccggacgatagtgaagacgctgttgccctgggattccgatgaatctcctgaggcctcccctggtcctccaggcccacgccggggggcgggagctggggggccccgggaggaggtggtggcccacccagggcccgaggagcaggactccctcctgcagcgcaagtcagctcggcgctgcgtcaaacagcgaccctcctatgatatcttcgaggattcggatgactcggagcccgggggcccccctgctcctcggcgtcggaccccccgagaaaatgagctgccactgccagaacctgaggagcagagccggccccgcaaacctaccctgcagcctgtgttgcagctcaaggcccgaaggcgcctggacaaggatgctttggcccctggcccctttgcttcttttcccaatggctggactggaaagcagaagtctcccgatggtgtgcaccgcgtccgtgtggattttaaggaggattgtgatttagagaacgtgtggctgatggggggcctgagtgtgctcacctctgtgccagggggccccccgatggtgtgcttgctgtgtgccagcaaaggactccacgagctggtgttctgtcaagtctgctgtgacccattccacccattctgcctggaggaggccgagcggcccctgccccagcatcacgacacctggtgctgccgtcgctgcaaattctgccacgtctgtggacgcaaaggtcgtggatccaagcacctcctggagtgcgagcgctgccgccatgcataccacccggcctgtctggggcccagctatccaacccgggccacgcgcaaacggcgccactggatctgttcagcctgtgtgcgctgtaagagctgtggggcaactccaggcaagaactgggacgtcgagtggtctggagattacagcctctgccccaggtgcacccagctatatgagaaaggaaactactgcccgatctgtacacgctgctatgaagacaacgactatgagagcaagatgatgcagtgcgcacagtgcgatcactgggtgcatgccaagtgcgaggggctctcagatgaagactacgagatcctttcaggactgccagactcggtgctgtacacctgcggaccgtgtgctggggcagcgcagccccgctggcgagaggccctgagcggggccctccaggggggcctgcgccaggtgctccagggcctgctgagctccaaggtggtgggcccactgctgctctgcacccagtgtgggccagatgggaagcaactgcacccaggaccctgcggcctgcaagctgtgagtcagcgcttcgaggatggccactacaagtctgtgcacagcttcatggaggacatggtgggcatcctcatgcggcactcggaggagggagagaccccggaccgccgggctggaggccagatgaaggggctcctgctgaagctgctagaatctgcgttcggctggttcgacgcccacgaccccaagtactggcgacggagtacccggctgccaaacggagtccttcccaatgcggtgttgcccccatccctggatcatgtctatgcgcagtggagacagcaggaaccagagaccccagaatcagggcagcctccaggggatccctcagcagcattccagggcaaggatccggctgccttctcacacctggaggacccccgtcagtgtgcactctgcctcaaatacggggatgcagactccaaggaggcggggcggctcttgtacatcgggcagaacgagtggacacacgtcaactgtgccatctggtcggcggaagtcttcgaggagaacgacggctccctcaagaatgtgcatgctgctgtggcccgagggaggcagatgcgctgcgagctctgcctgaagcctggcgccacggtgggctgctgcctgtcctcctgcctcagcaacttccacttcatgtgtgcccgggccagctactgcatcttccaggatgacaagaaagtcttctgccagaaacacactgatctcctggatggcaaggaaattgtgaaccccgatggttttgatgttctccgccgagtctatgtggacttcgagggcatcaacttcaagcggaagttcttgacggggcttgaacccgatgccatcaacgtgctcattggttccatccgcattgactccctgggtactctgtctgatctctcggactgcgagggacggctcttccccattggctaccagtgctcccgtctgtactggagcacagtggatgctcggaggcgctgctggtatcggtgccgaattctggagtatcggccatgggggccgagggaagagccagctcacctggaggctgcagaggagaaccagaccattgtgcacagccccgccccttcctcagagcccccaggtggtgaggaccccccactggacacagatgttcttgtccctggagctcctgagcgccactcgcccattcagaacctggaccctccactgcggccagattcaggcagcgcccctcctccagccccccgttctttttcgggggctcgaatcaaagtgcccaactactcgccatcccggaggcccttggggggtgtctcctttggccccctgccctcccctggaagtccatcttcactgacccaccacatccccacagtgggagacccggacttcccagctccccccagacgttcccgtcgtcccagccctttggctcccaggccgcctccatcacggtgggcctcccctcctctaaaaacctcccctcagctcagggtgccccctcctacctcagtcgtcacagccctcacacctacctcaggggagctggctccccctggcccggccccatctccaccaccccctgaagacctgggcccagacttcgaggacatggaggtggtgtcaggactgagtgctgctgacctggacttcgcggccagcctgctggggactgagcccttccaggaagagattgtagccgctggggccatggggagcagccacgggggcccgggggacagctccgaggaggagtccagccccacctcccgctacatccacttccctgtgactgtggtgtccgcccctggtctggcccccagcgctacccctggagccccccgcattgaacagctggacggcgtggacgacggcactgacagtgaggctgaggcggtgcagcagcctcggggccagggcacgcctccttcggggccaggagtagtccgggcaggggtccttggggctgcaggggacagggcccggcctcctgaggacctgccatcggaaattgtggattttgtgttgaagaacctagggggtcctggggatggaggtgctggccctagagaggagtcactccccccggcgcctcccctggctaatggcagccagccctcccaaggcctgaccgccagcccagctgaccccacccgcacatttgcctggctcccaggggccccaggggtccgggtgttaagccttggccctgcccctgagccccccaaacccgccacatccaaaatcatacttgtcaacaagctggggcaagtatttgtgaagatggctggggagggtgaacctgtcccacccccagtgaagcagccacctttgccccccaccatttcccccacggctcccacctcctggactctgcccccaggccccctcctcggcgtgctgcccgtggtcggagtggtccgccctgccccgcccccgccaccccctcccctgacgctggtgctgagcagtgggccagccagcccgccccgccaggccatccgcgtcaagagggtgtccactttctccggccggtccccgccagcacctcccccatacaaagccccccggctggatgaagatggagaggcctcagaggatacccctcaggttccagggcttggcagtggcgggtttagccgtgtgaggatgaaaacccccacagtgcgtggggtccttgacctggatcggcctggggagcccgctggggaagaaagtcctgggcccctccaggaacggtcccctttgctgccacttccggaagatggtcctccccaggtccccgatggtcccccagacctgctgcttgagtcccagtggcaccactattcaggtgaggcttcgagctctgaggaagagcctccatccccagatgataaagagaaccaggccccaaaacggactggcccacatctgcgcttcgagatcagcagtgaggatgggttcagcgttgaggcagagagcttggagggggcgtggagaactctgatcgagaaagtgcaagaggcccgagggcatgcccgactcagacatctctcctttagtggaatgagtggggcgagactcctgggcatccaccatgatgctgtcatcttcctggccgagcagctccccggagcccagcgttgccagcactataagttccgttaccaccagcagggagagggccaggaggagccgcccctgaatccccatggggctgctcgggcagaggtctatctccggaagtgcacctttgacatgttcaacttcctggcctcccagcaccgggtgctccctgagggggccacctgtgatgaggaagaggatgaggtgcagctcaggtcaaccagacgtgccaccagcctggagctgcccatggccatgcgttttcgtcaccttaagaagacgtccaaagaagctgtgggtgtctacagatcagccatccacgggcgaggcctgttctgtaagcgcaacatcgacgcgggggagatggtcatcgagtactctggcattgtcatccgctcggtgttgactgacaagcgggagaagttctacgatgggaagggcatcgggtgctatatgttccgcatggatgactttgatgtagtggacgccacgatgcatggcaatgccgcccgcttcatcaaccactcctgtgagcccaactgcttctctcgggtcatccacgtggagggccagaaacacattgttatcttcgccctgcgccgcatcctgcgtggtgaggagctcacctacgactacaagttccccatcgaggatgccagcaacaagctgccctgcaactgtggcgccaagcgctgccgtcggttccttaac

SEQ ID NO: 6340 - DNA, 1374 bp, Homo sapiens
  source 1..1374: mol_type = genomic DNA
atggattcggtagaactttgccttcctgaatctttttccctgcactacgaggaagagcttctctgcagaatgtcaaacaaagatcgacacattgattccagctgttcgtccttcatcaagacggaaccttccagcccagcctccctgacggacagcgtcaaccaccacagccctggtggctcttcagacgccagtgggagctacagttcaaccatgaatggccatcagaacggacttgactcgccacctctctacccttctgctcctatcctgggaggtagtgggcctgtcaggaaactgtatgatgactgctccagcaccattgttgaagatccccagaccaagtgtgaatacatgctcaactcgatgcccaagagactgtgtttagtgtgtggtgacatcgcttctgggtaccactatggggtagcatcatgtgaagcctgcaaggcattcttcaagaggacaattcaaggcaatatagaatacagctgccctgccacgaatgaatgtgaaatcacaaagcgcagacgtaaatcctgccaggcttgccgcttcatgaagtgtttaaaagtgggcatgctgaaagaaggggtgcgtcttgacagagtacgtggaggtcggcagaagtacaagcgcaggatagatgcggagaacagcccatacctgaaccctcagctggttcagccagccaaaaagccatataacaagattgtctcacatttgttggtggctgaaccggagaagatctatgccatgcctgaccctactgtccccgacagtgacatcaaagccctcactacactgtgtgacttggccgaccgagagttggtggttatcattggatgggcgaagcatattccaggcttctccacgctgtccctggcggaccagatgagccttctgcagagtgcttggatggaaattttgatccttggtgtcgtataccggtctctttcgtttgaggatgaacttgtctatgcagacgattatataatggacgaagaccagtccaaattagcaggccttcttgatctaaataatgctatcctgcagctggtaaagaaatacaagagcatgaagctggaaaaagaagaatttgtcaccctcaaagctatagctcttgctaattcagactccatgcacatagaagatgttgaagccgttcagaagcttcaggatgtcttacatgaagcgctgcaggattatgaagctggccagcacatggaagaccctcgtcgagctggcaagatgctgatgacactgccactcctgaggcagacctctaccaaggccgtgcagcatttctacaacatcaaactagaaggcaaagtcccaatgcacaaactttttttggaaatgttggaggccaaggtc

SEQ ID NO: 6341 - DNA, 1410 bp, Homo sapiens
  source 1..1410: mol_type = genomic DNA
atgtggcgagaatgtgattggggtcttggagcagtcaagtctgatctggcctgtgttccttcagctaaaaggcttctctgcagaatgtcaaacaaagatcgacacattgattccagctgttcgtccttcatcaagacggaaccttccagcccagcctccctgacggacagcgtcaaccaccacagccctggtggctcttcagacgccagtgggagctacagttcaaccatgaatggccatcagaacggacttgactcgccacctctctacccttctgctcctatcctgggaggtagtgggcctgtcaggaaactgtatgatgactgctccagcaccattgttgaagatccccagaccaagtgtgaatacatgctcaactcgatgcccaagagactgtgtttagtgtgtggtgacatcgcttctgggtaccactatggggtagcatcatgtgaagcctgcaaggcattcttcaagaggacaattcaaggcaatatagaatacagctgccctgccacgaatgaatgtgaaatcacaaagcgcagacgtaaatcctgccaggcttgccgcttcatgaagtgtttaaaagtgggcatgctgaaagaaggggtgcgtcttgacagagtacgtggaggtcggcagaagtacaagcgcaggatagatgcggagaacagcccatacctgaaccctcagctggttcagccagccaaaaagccattgctctggtctgatcctgcagataacaagattgtctcacatttgttggtggctgaaccggagaagatctatgccatgcctgaccctactgtccccgacagtgacatcaaagccctcactacactgtgtgacttggccgaccgagagttggtggttatcattggatgggcgaagcatattccaggcttctccacgctgtccctggcggaccagatgagccttctgcagagtgcttggatggaaattttgatccttggtgtcgtataccggtctctttcgtttgaggatgaacttgtctatgcagacgattatataatggacgaagaccagtccaaattagcaggccttcttgatctaaataatgctatcctgcagctggtaaagaaatacaagagcatgaagctggaaaaagaagaatttgtcaccctcaaagctatagctcttgctaattcagactccatgcacatagaagatgttgaagccgttcagaagcttcaggatgtcttacatgaagcgctgcaggattatgaagctggccagcacatggaagaccctcgtcgagctggcaagatgctgatgacactgccactcctgaggcagacctctaccaaggccgtgcagcatttctacaacatcaaactagaaggcaaagtcccaatgcacaaactttttttggaaatgttggaggccaaggtc

SEQ ID NO: 6342 - DNA, 1188 bp, Homo sapiens
  source 1..1188: mol_type = genomic DNA
atgtcaaacaaagatcgacacattgattccagctgttcgtccttcatcaagacggaaccttccagcccagcctccctgacggacagcgtcaaccaccacagccctggtggctcttcagacgccagtgggagctacagttcaaccatgaatggccatcagaacggacttgactcgccacctctctacccttctgctcctatcctgggaggtagtgggcctgtcaggaaactgtatgatgactgctccagcaccattgttgaagatccccagaccaagtgtgaatacatgctcaactcgatgcccaagagactgtgtttagtgtgtggtgacatcgcttctgggtaccactatggggtagcatcatgtgaagcctgcaaggcattcttcaagaggacaattcaaggggtgcgtcttgacagagtacgtggaggtcggcagaagtacaagcgcaggatagatgcggagaacagcccatacctgaaccctcagctggttcagccagccaaaaagccatataacaagattgtctcacatttgttggtggctgaaccggagaagatctatgccatgcctgaccctactgtccccgacagtgacatcaaagccctcactacactgtgtgacttggccgaccgagagttggtggttatcattggatgggcgaagcatattccaggcttctccacgctgtccctggcggaccagatgagccttctgcagagtgcttggatggaaattttgatccttggtgtcgtataccggtctctttcgtttgaggatgaacttgtctatgcagacgattatataatggacgaagaccagtccaaattagcaggccttcttgatctaaataatgctatcctgcagctggtaaagaaatacaagagcatgaagctggaaaaagaagaatttgtcaccctcaaagctatagctcttgctaattcagactccatgcacatagaagatgttgaagccgttcagaagcttcaggatgtcttacatgaagcgctgcaggattatgaagctggccagcacatggaagaccctcgtcgagctggcaagatgctgatgacactgccactcctgaggcagacctctaccaaggccgtgcagcatttctacaacatcaaactagaaggcaaagtcccaatgcacaaactttttttggaaatgttggaggccaaggtc

SEQ ID NO: 6343 - DNA, 1269 bp, Homo sapiens
  source 1..1269: mol_type = genomic DNA
atgtccagccaggtggtgggcattgagcctctctacatcaaggcagagccggccagccctgacagtccaaagggttcctcggagacagagaccgagcctcctgtggccctggcccctggtccagctcccactcgctgcctcccaggccacaaggaagaggaggatggggagggggctgggcctggcgagcagggcggtgggaagctggtgctcagctccctgcccaagcgcctctgcctggtctgtggggacgtggcctccggctaccactatggtgtggcatcctgtgaggcctgcaaagccttcttcaagaggaccatccaggggagcatcgagtacagctgtccggcctccaacgagtgtgagatcaccaagcggagacgcaaggcctgccaggcctgccgcttcaccaagtgcctgcgggtgggcatgctcaaggagggagtgcgcctggaccgcgtccggggtgggcggcagaagtacaagcggcggccggaggtggacccactgcccttcccgggccccttccctgctgggcccctggcagtcgctggaggcccccggaagacagcagccccagtgaatgcactggtgtctcatctgctggtggttgagcctgagaagctctatgccatgcctgaccccgcaggccctgatgggcacctcccagccgtggctaccctctgtgacctctttgaccgagagattgtggtcaccatcagctgggccaagagcatcccaggcttctcatcgctgtcgctgtctgaccagatgtcagtactgcagagcgtgtggatggaggtgctggtgctgggtgtggcccagcgctcactgccactgcaggatgagctggccttcgctgaggacttagtcctggatgaagagggggcacgggcagctggcctgggggaactgggggctgccctgctgcaactagtgcggcggctgcaggccctgcggctggagcgagaggagtatgttctactaaaggccttggcccttgccaattcagactctgtgcacatcgaagatgccgaggctgtggagcagctgcgagaagctctgcacgaggccctgctggagtatgaagccggccgggctggccccggagggggtgctgagcggcggcgggcgggcaggctgctgctcacgctaccgctcctccgccagacagcgggcaaagtgctggcccatttctatggggtgaagctggagggcaaggtgcccatgcacaagctgttcttggagatgctcgaggccatgatggac

SEQ ID NO: 6344 - DNA, 1266 bp, Homo sapiens
  source 1..1266: mol_type = genomic DNA
atgtccagccaggtggtgggcattgagcctctctacatcaaggcagagccggccagccctgacagtccaaagggttcctcggagacagagaccgagcctcctgtggccctggcccctggtccagctcccactcgctgcctcccaggccacaaggaagaggaggatggggagggggctgggcctggcgagcagggcggtgggaagctggtgctcagctccctgcccaagcgcctctgcctggtctgtggggacgtggcctccggctaccactatggtgtggcatcctgtgaggcctgcaaagccttcttcaagaggaccatccaggggagcatcgagtacagctgtccggcctccaacgagtgtgagatcaccaagcggagacgcaaggcctgccaggcctgccgcttcaccaagtgcctgcgggtgggcatgctcaaggagggagtgcgcctggaccgcgtccggggtgggcggcagaagtacaagcggcggccggaggtggacccactgcccttcccgggccccttccctgctgggcccctggcagtcgctggaggcccccggaagacagccccagtgaatgcactggtgtctcatctgctggtggttgagcctgagaagctctatgccatgcctgaccccgcaggccctgatgggcacctcccagccgtggctaccctctgtgacctctttgaccgagagattgtggtcaccatcagctgggccaagagcatcccaggcttctcatcgctgtcgctgtctgaccagatgtcagtactgcagagcgtgtggatggaggtgctggtgctgggtgtggcccagcgctcactgccactgcaggatgagctggccttcgctgaggacttagtcctggatgaagagggggcacgggcagctggcctgggggaactgggggctgccctgctgcaactagtgcggcggctgcaggccctgcggctggagcgagaggagtatgttctactaaaggccttggcccttgccaattcagactctgtgcacatcgaagatgccgaggctgtggagcagctgcgagaagctctgcacgaggccctgctggagtatgaagccggccgggctggccccggagggggtgctgagcggcggcgggcgggcaggctgctgctcacgctaccgctcctccgccagacagcgggcaaagtgctggcccatttctatggggtgaagctggagggcaaggtgcccatgcacaagctgttcttggagatgctcgaggccatgatggac

SEQ ID NO: 6345 - DNA, 1524 bp, Homo sapiens
  source 1..1524: mol_type = genomic DNA
atgtcctcggacgacaggcacctgggctccagctgcggctccttcatcaagactgagccgtccagcccgtcctcgggcatcgatgccctcagccaccacagccccagtggctcgtccgacgccagcggcggctttggcctggccctgggcacccacgccaacggtctggactcgccacccatgtttgcaggcgccgggctgggaggcaccccatgccgcaagagctacgaggactgtgccagcggcatcatggaggactcggccatcaagtgcgagtacatgctcaacgccatccccaagcgcctgtgcctcgtgtgcggggacattgcctctggctaccactacggcgtggcctcctgcgaggcttgcaaggccttcttcaagaggactatccaagggaacattgagtacagctgcccggccaccaacgagtgcgagatcaccaaacggaggcgcaagtcctgccaggcctgccgcttcatgaaatgcctcaaagtggggatgctgaaggaaggtgtgcgccttgatcgagtgcgtggaggccgtcagaaatacaagcgacggctggactcagagagcagcccatacctgagcttacaaatttctccacctgctaaaaagccattgaccaagattgtctcatacctactggtggctgagccggacaagctctatgccatgcctccccctggtatgcctgagggggacatcaaggccctgaccactctctgtgacctggcagaccgagagcttgtggtcatcattggctgggccaagcacatcccaggcttctcaagcctctccctgggggaccagatgagcctgctgcagagtgcctggatggaaatcctcatcctgggcatcgtgtaccgctcgctgccctatgacgacaagctggtgtacgctgaggactacatcatggatgaggagcactcccgcctcgcggggctgctggagctctaccgggccatcctgcagctggtacgcaggtacaagaagctcaaggtggagaaggaggagtttgtgacgctcaaggccctggccctcgccaactccgattccatgtacatcgaggatctagaggctgtccagaagctgcaggacctgctgcacgaggcactgcaggactacgagctgagccagcgccatgaggagccctggaggacgggcaagctgctgctgacactgccgctgctgcggcagacggccgccaaggccgtgcagcacttctatagcgtcaaactgcagggcaaagtgcccatgcacaaactcttcctggagatgctggaggccaaggttggccaagagcagcttagaggatctcccaaggatgaaagaatgtcaagccatgatggaaaatgccccttccaatcagctgccttcacaagcagggatcagagcaactccccggggatccccaatccacgcccttctagtccaacccccctcaatgagagaggcaggcagatctcacccagcactaggacaccaggaggccagggaaagcatctctggctcaccatg

SEQ ID NO: 6346 - DNA, 1437 bp, Homo sapiens
  source 1..1437: mol_type = genomic DNA
atgctcttctggcacacgcagcccgagcactacaaccagcacaactccggcagctacctgcgtgatgtgctcgctctgcccatcttcaagcaggaggaaccccagctgtcccccgagaacgaggcccgcctgccacccctgcaatatgtgttgtgtgctgccacgtccccagccgtgaagctgcatgaagagacgctgacctacctcaaccaaggtcagtcttatgaaatccgactactggagaatcggaagctgggagactttcaagatctgaacacaaaatatgtcaagagcatcatccgtgtggtcttccatgaccgccggctgcagtatacggagcaccagcagctggagggctggcggtggagtcggccaggggaccggatcctggacatcgatattccactgtctgttggtatcttggaccccagggccagcccgacccagctgaatgcagtcgagtttttgtgggaccctgcgaagagagcttctgcattcattcaggtacactgcatcagcacagaattcacccccaggaagcacgggggcgagaagggagtgccctttcgagtccagattgacacgtttaagcagaacgagaatggggagtacacggagcacctgcactcagccagctgccagatcaaggtgttcaagccgaagggagccgatcggaaacagaagactgaccgggagaagatggagaaaagaactgcccaagagaaggagaaataccagccgtcctatgaaaccaccatcctcacagagtgctctccatggcccgacgtggcctaccaggtgaacagcgccccgtccccaagctacaatggttctccaaacagctttggcctcggcgaaggcaacgcctctccgacccacccggtggaggccctgcccgtgggcagtgaccacctgctcccatcagcttcgatccaggatgcccagcagtggcttcaccgcaacaggttctcgcagttctgccggctctttgccagcttctcaggtgctgacttgctgaagatgtcccgagatgatttggtccagatctgtggtcccgcagatgggatccggctcttcaacgccatcaaaggccggaatgtgaggccaaagatgaccatttatgtctgtcaggagctggagcagaatcgagtgcccctgcagcagaagcgggacggcagtggagacagcaacctgtctgtgtaccacgccatcttcctggaagagctgaccaccttggagctgattgagaagatcgccaacctgtacagcatctccccccagcacatccaccgagtctaccggcagggccccacgggcatccatgtggtggtgagcaacgagatggtgcagaacttccaagatgaatcctgttttgtcctcagcacaattaaagctgagagcaatgatggctaccacatcatcctgaaatgtggactc

SEQ ID NO: 6347 - DNA, 1338 bp, Homo sapiens
  source 1..1338: mol_type = genomic DNA
atgttggagaactacagaaacctggtctccctgggtgttagtatctctaacccagacctggtcaccagtctggagcaaagaaaagagccctacaatttgaagatacatgaaacagcagccagacccccagctgtgtgttctcatttcacccaaaacctttggacagtgcagggcatagaagattcattccacaaacttataccaaaaggacatgagaaacgtggacatgagaatttaagaaaaacttgtaaaagtataaatgagtgtaaggtgcagaaaggtggttataatagaattaaccaatgcttattaactacccagaaaaaaacaattcaatctaatatatgtgtcaaagtttttcataaattttcaaattcaaacaaagataagataagatatactggagataaaacctttaaatgtaaagaatgtggcaaatcatttcacgtgctctcacgcctaactcaacacaaaagaattcatactggagagaacccctacacatgtgaagaatgtggcaaagcctttaattggtcctcaattcttactaaacataagagaattcatgccagagagaaattctacaagtgtgaagaatgtggtaaaggctttactcggtcctcacaccttactaaacataagagaattcatactggagagaaaccctacatatgtgaaaaatgtggtaaagcttttaaccaatcctcaacccttaatttacataagagaattcattctgcacaaaaatactacaaatgtgaagaatgtggtaaagcctttaagtggtcctcatcccttaatgaacataagagaattcatgctggagagaaacccttctcatgcgaagaatgtggcaatgtctttaccacatcctcagactttgctaaacataagagaattcatacaggagagaaaccctacaaatgtgaagaatgtggaaaatcctttaataggtccacaactcttacgacacataagagaatccatactggagagaaaccctacacatgtgaagaatgtggaaaagcctttaattggtcctcaacccttaatgtacacaagagaattcactctggaaaaaatccctacaaatgtgaagattgtggcaaagcctttaaagtgtttgcaaacctgcataatcataagaaaattcatactggagagaaaccctacatatgtaaacaatgtggcaaagcctttaaacagtcctcacacttgaataaacataagaaaattcacactgtagataaaccctacaaatgtaaagaatgcgggaaagcttttaagcagtactccaaccttcctcaacataagagaactcatactggaggaaaattt

SEQ ID NO: 6348 - DNA, 1686 bp, Homo sapiens
  source 1..1686: mol_type = genomic DNA
atgagcaatcagtaccaggaggagggctgctccgagaggcccgagtgcaaaagtaaatctccaactttgctctcctcctactgcatcgacagcatcctgggccggaggagcccgtgcaaaatgcggttgctgggagccgcgcagagcttgcctgctccgctgaccagccgcgccgacccggaaaaggccgtgcaaggctcccctaagagcagcagcgccccgttcgaggccgagctgcacctgccgcccaagctgcggcgcctgtacggcccgggcgggggccgcctccttcagggtgcggcagcggcggcggcggcggcggcggcggcggcggcagcggccgccacggccacggcgggtccacgcggggaggcccctccgccgccaccgccaaccgcgcggcccggggaacggccggacggcgcaggggccgccgcggcagccgcggccgcggccgccgcggcctgggacacgctcaagatcagccaggcgccgcaggtgagcatcagccgcagcaagtcgtaccgcgagaacggggcgcccttcgtgccgccgccgcccgcgctggacgagctgggcggcccggggggcgtcacgcacccggaggagcgcctcggcgtggccggcggcccgggcagcgccccggctgcgggtggtggcaccggcaccgaggacgacgaggaggagctgctggaggacgaagaagatgaggacgaggaagaggaactgctggaggacgacgaggaggagctgctggaggacgacgcccgcgcgctgctcaaggagccccggcgctgtcctgtggccgccactggcgccgtggccgcagcagctgccgctgcagtggccacagagggcggggagctgtcacccaaggaggagctgctgctgcacccggaagacgctgagggcaaggacggcgaggacagcgtgtgcctctctgcgggcagcgactcggaggaggggctgctgaaacgcaaacagaggcgctaccgcaccacgttcaccagctaccagctggaggaactggagcgggccttccagaagacgcactacccggacgtcttcaccagggaggaactggccatgaggctggacttgaccgaggcccgagtccaggtctggttccagaaccgtcgggccaagtggcgcaagcgggagaaggcaggcgcgcagacccacccccctgggctgcccttcccggggccgctctccgccacccacccgctcagcccctacctggacgccagccccttccctccgcaccacccggcgctcgactccgcttggactgccgctgccgccgccgccgccgccgccttcccgagcctacctccgcctccgggctcggccagcctgccgcccagcggggcgccgctgggcctgagcactttcctcggagcggcagtgttccgacacccagctttcatcagcccggcattcggcaggctcttttccacaatggcccccctgaccagcgcgtcgaccgcggccgcgctcctgagacagcccacacccgccgtggagggcgcagtggcatcgggcgccctggccgacccggccacggcggccgcagacagacgcgcctctagcatagccgcgctgaggctcaaggccaaggagcacgcggcgcagctcacgcagctcaacatcctgccgggcaccagcacgggcaaggaggtgtgc

SEQ ID NO: 6349 - DNA, 1485 bp, Homo sapiens
  source 1..1485: mol_type = genomic DNA
atggctaaaagaccgggaccccctggaagccgagaaatgggactgttgacattcagagacatagctatagaattttctctggcggaatggcaatgcctggatcatgctcagcagaatttatatagagatgtgatgttagagaactacagaaacctggtctccctgggtattgctgtctctaagccagacttgatcacctgtctggagcaaaataaagagccccagaatataaagagaaatgagatggtagccaaacacccagttacatgttctcatttcacccaagaccttcagtcagagcagggcataaaagattcactccaaaaagtgatactgagaagatatggaaaatgtggacaggaggatttacaagtaaaaaaatgctgtaaaagtgtaggtgagtgtgaggtgcacaaaggaggttataattatgttaaccaatgtttgtcagctacccaaaacaaaacatttcagactcataaatgcgtcaaagtctttggtaaattttcaaattccaatagacacaagacaagacatactggaaagaaacatttcaaatgtaaaaacgatggcaaatcattttgcatgctttcacgcctaaatcaacatcagataattcatactagggagaagtcttacaaatgtgaagaatgtggcaaatcctttaactgctcttcaacccttactagacataaaagaattcatactggagagaaaccctacagatgtgaggaatgtggcaaagcttttagctggtctgcatcccttactaaacataagagaattcatactggagagaaaccttacacatgtgaagaacgtggcaaagtctttagccgctcaacacttactaactacaagagaattcatactggagagaaaccctacacatgtgaagaatgtggcaaagcctttagccgctcttcaacacttactaaccacaagagaattcatactggagagagaccctacaaatgtgaagaatgtggcaaagcctttagcttatcctcaacccttaagaaacataagatagttcatactggggagaaactctacacatgtgaagaatgtgggaaagcctttaccttctcctcaactctaaatactcataagaggattcatactggagagaaaccctacacttgtgaagaatgtggcaaagcctttagcttaccctcaaccttcacttaccacaagagaactcatactggagagaaaccctacaaatgtgaagaatgtggcaaagcctttaactgctcctcaacccttaagaaacataagataattcatactggagagaaactctacaaatgtaaagaatgtgggaaagcctttaccttctcctcaactctaaatactcataagaggattcatactggagagaaaccctacaaatgtgaagaatgtgaccaaacttttaagtggcattcaagtcttgctaatcataagaatatgcatactggagagaaaccctacaaatatgaa

SEQ ID NO: 6350 - DNA, 1512 bp, Homo sapiens
  source 1..1512: mol_type = genomic DNA
atggagcggtcacagtgtggcagcagagaccgaggcgttagcggccgacctcacttggcccctgggctagtggtggctgcccctccgcccccgtccccggcgttgccggtaccatcggggatgcaggttcccccagcgttcctgcggccgcccagcctctttctgcgagcagcggccgcggccgccgccgccgctgccgccacctcgggaagcggaggctgcccgccggctcccgggctggagagcggggtaggcgcggtgggctgcggctacccgcggacgcccaagtgcgcccgctgtcgtaaccatggtgtggtgtcagcgctcaagggccacaagcgcttctgccgctggcgggactgcgcgtgtgccaagtgcaccctgatcgccgagcgccagcgcgtcatggccgcccaggtggcgctgcgcaggcagcaggcgcaggaggagagcgaagcccgggggctacagaggctcctgtgctcggggctctcctggccccccggtggtcgggcatccgggggcggcggcagagccgagaatccacagtccacgggcggccctgcggcgggggctgcgctgggactgggtgccttgagacaggccagtggttccgcgacccccgctttcgaagttttccagcaagattatcctgaggaaaaacaagaacaaaaagagagtaaatgtgagtcatgccagaatggacaagaagaactgatctccaaatcccatcagctttacctaggatcatcttctaggtctaatggtgtcattgggaaacaaagtatcgggtcatctatttcagaatactccaacaagcctgatagtatcctgtctcctcatcctggagagcaatcaggaggtgaagagagtcccaggtccttatcatcctctgatctggaatcaggaaatgaaagtgaatgggtcaaagacttgactgcgaccaaggcaagccttccgacagtgtcctcaagaccaagagatcctcttgatatccttactaagattttcccaaattacaggcgcagccggctagaaggcattctacggttctgcaaaggggatgtggtccaagccattgaacaggttttaaatggcaaagaacacaagccagacaacaggaacctagcaaactcagaagaactggaaaacacagcctttcagagagcttcaagttttagtcttgctggaattggttttggaactctaggtaataaatcagctttctctcctcttcaaactacttctgcttcttatggaggtgattcaagtctctacggcgtaaatcctagagtaggtatcagtccattaaggctggcatattcttctgcaggaagagggttatctggttttatgtcaccctacctaacacctgggttagtaccaaccttaccttttcggccagctttggattatgccttttcagggatgattagagattcttcctacctttccagtaaagactcaataacttgtggcagactgtacttcagaccaaatcaggacaatccg

SEQ ID NO: 6351 - DNA, 1992 bp, Homo sapiens
  source 1..1992: mol_type = genomic DNA
atggagggcttcatggactcagggacacagacggacgccgtggtggtgctgtccttggctcaggccgccgtgcttggcctggtctccgaaaatgagctctttggagctaccataagcgccgaggccttctacccggacctggggcccgagctttcaggggcagccatgggagagcccgagccaccaggccccgacgtctaccagctggcctgcaacgggagggccttggaggagccggcggaggaggaggtgctggaggtggaggcagcctgtgagaagcacacccggcggaagacgcggccacctgtgcggttggtgcccaaggtcaagttcgagaaggtggaggaggaggaacaggaggtctatgaggtttctgtgccaggtgacgacaaggacgcagggccagcagaagcccccgccgaggcggccagtggcggctgcgacgccctggtgcagagcagcgccgtcaagatgatcgacctcagcgccttcagccgcaagccccggacgctccggcatctgccccgaaccccgaggccggagctgaacgtggccccatatgaccctcacttcccggccccggcccgggatggcttccccgagcccagcatggcgctgcctgggccagaggccttgcccacagagtgtgggttcgagccaccccacctggcccccctgagtgaccccgaggcccccagcatggagtccccggagcctgtcaagccggaacagggcttcgtgtggcaggaggccagtgagttcgaggctgacacggcgggttcgaccgtggaacgccacaagaaggcccagctggatcggctggacatcaacgtgcagattgacgactcctatctggtggaggcgggcgaccgccagaagcgctggcagtgccgcatgtgcgagaagtcctacacgtccaagtacaacctggtgacgcacatcctgggccacaacggcatcaagccacactcgtgcccacactgcagcaagctcttcaagcagcccagccacctgcagacgcacctgctgacgcaccagggcacccggccccacaagtgccaggtatgccacaaggccttcacgcagaccagccacctcaagcgccacatgctgctgcactcggaggtcaagccctacagctgccacttctgcggccgcggcttcgcctaccccagcgagctcaaggcccacgaagtgaagcatgagagtggccgctgccatgtctgcgtcgagtgcggcctggacttctccaccctgacccagctcaagcgccacctggcctcccaccagggccccaccctctaccagtgcctcgagtgtgacaagtccttccactaccgcagccagttgcagaaccacatgctcaagcaccagaacgtgcgacccttcgtgtgcactgaatgcggcatggagttcagccagattcaccacctcaagcagcactccctcacccacaagggcgtgaaggagttcaagtgcgaggtgtgtggccgggagttcaccctacaggcgaacatgaagcggcacatgctgatccacaccagcgtccggccctaccagtgccacatctgcttcaagacctttgtacagaagcagactctcaagacccacatgattgtacactcgcccgtgaagccattcaaatgcaaggtgtgcgggaagtccttcaaccgcatgtacaacctgctgggccacatgcacctgcacgccggcagcaagcccttcaagtgcccctactgctccagcaagtttaatctcaagggcaacctgagccggcacatgaaggtcaagcatggcgtcatggacatcggcctggacagccaagaccccatgatggagctgacaggcactgacccttcagagctcgacggccagcaggagatggaggacttcgaggagaacgcctacagctatgcgagcgtggacagcagcgccgaggccagtgtcctcactgaacaggccatgaaagagatggcctactacaatgtgcta

SEQ ID NO: 6352 - DNA, 2421 bp, Homo sapiens
  source 1..2421: mol_type = genomic DNA
atggattcaggcggtggaagtcttggattgcacacgccagactctagaatggcccataccatgattatgcaagattttgtggctggaatggctggtactgcacatatcgatggagaccatattgttgtttcagttcctgaagctgttttagtttctgatgttgtcacagatgatgggataactcttgatcatggccttgcagctgaagttgtccatggacctgatatcatcacagagactgatgtagtaacagaaggtgtgattgttcctgaagcggtacttgaagctgatgttgccattgaagaggatttagaggaagatgatggtgatcacatcttgacttctgaactaattacagaaaccgttagggtaccagagcaggttttcgtggctgaccttgttactggtcctaatggacacttagaacatgtggtccaagattgtgtttcaggagtcgactctcccacaatggtatcagaggaggttcttgtaactaattcagatacagaaactgtgattcaagcagctggaggtgttcctggttctacagttactataaaaaccgaagatgatgatgatgatgatgtcaagagcacttctgaagactacttaatgatatctttggatgatgttggagaaaaattagagcatatggggaatacaccattaaaaattggcagtgatggttcacaagaagatgctaaagaagatgggtttggttctgaagttataaaagtgtatatatttaaagcggaggctgaagatgatgttgaaataggtggaacagaaattgtcacagagagtgagtacaccagtggacattcagtagctggagtgcttgaccagagccgaatgcagcgggagaagatggtttacatggcagttaaagattcttctcaagaagaagatgatatcagttgcgctgaaatagcagatgaagtttacatggaagtcattgtaggggaagaggaaggaacttctctccctgagattcagcttgaggactctgatgttaataaaacagttgtccctgttgtctgggctgcggcatatggagatgaaagaagagtttcccgaaggtatgaagattgtcaagcatcaggaaatactttggactcagcattagaaagcagaagtagtacagcagcacagtaccttcaaatttgtgacggcattaatacaaataaagtacttaaacaaaaagccaaaaagaggagaaggggagaaaccaggcagtggcaaacagctgttataataggtcctgatggacagcccctcacagtgtacccttgccatatttgcacaaaaaagtttaaatccaggggattcttaaaaagacacatgaagaatcatcctgatcatttaatgagaaaaaaatatcagtgtacagattgtgactttacaactaacaagaaagtgagtttccataaccacttagaaagccataagctcataaacaaagtcgacaaaacccatgaatttacagaatacacacgaagatacagagaggctagtccactgagttccaataaacttattttaagagacaaggagccgaagatgcacaagtgcaaatactgtgactatgaaactgcagaacaaggactgttaaacaggcatttgttggccgttcacagcaagaattttcctcatgtttgtgttgagtgtgggaagggttttcgacatccttctgaactcaagaaacatatgagaacccatactggtgagaagccatatcagtgtcagtattgtattttcaggtgtgcagatcaatcaaatctgaaaactcacattaagtctaaacatggtaacaatttgccatataaatgtgagcattgtccccaagcatttggtgatgagagggagcttcaacgccatctggatttgtttcaaggacataagacacaccagtgtcctcattgtgaccataagagcaccaattcaagtgaccttaagcggcacatcatatctgtccatactaaggattttcctcacaaatgtgaggtctgtgataaaggttttcatcgtccttctgagctcaaaaagcatagtgatatccataagggtaggaagattcatcagtgcaggcactgtgactttaaaacatccgatccatttattcttagtggccatatcctttcagttcatactaaagatcagccattgaaatgtaaaaggtgcaagagaggattcagacaacaaaatgagctaaaaaaacatatgaagacccatactggaaggaagatttaccaatgtgagtattgtgaatacagcactacagatgcatctggctttaaacgacatgtgatatcaatacatacaaaagactatccacacaggtgtgaattctgcaagaagggattccgaagaccatcagaaaaaaatcagcatattatgaggcaccacaaagaggctcttatg

SEQ ID NO: 6353 - DNA, 2283 bp, Homo sapiens
  source 1..2283: mol_type = genomic DNA
atggattcaggcggtggaagtcttggattgcacacgccagactctagaatggcccataccatgattatgcaagattttgtggctggaatggctggtactgcacatatcgatggagaccatattgttgtttcagttcctgaagctgttttagtttctgatgttgtcacagatgatgggataactcttgatcatggccttgcagctgaagttgtccatggacctgatatcatcacagagactgatgtagtaacagaaggtgtgattgttcctgaagcggtacttgaagctgatgttgccattgaagaggatttagaggaagatgatggtgatcacatcttgacttctgaactaattacagaaaccgttagggtaccagagcaggttttcgtggctgaccttgttactggtcctaatggacacttagaacatgtggtccaagattgtgtttcaggagtcgactctcccacaatggtatcagaggaggttcttgtaactaattcagatacagaaactgtgattcaagcagctggaggtgttcctggttctacagttactataaaaaccgaagatgatgatgatgatgatgtcaagagcacttctgaagactacttaatgatatctttggatgatgttggagaaaaattagagcatatggggaatacaccattaaaaattggcagtgatggttcacaagaagatgctaaagaagatgggtttggttctgaagttataaaagtgtatatatttaaagcggaggctgaagatgatgttgaaataggtggaacagaaattgtcacagagagtgagtacaccagtggacattcagtagctggagtgcttgaccagagccgaatgcagcgggagaagatggtttacatggcagttaaagattcttctcaagaagaagatgatatcagagatgaaagaagagtttcccgaaggtatgaagattgtcaagcatcaggaaatactttggactcagcattagaaagcagaagtagtacagcagcacagtaccttcaaatttgtgacggcattaatacaaataaagtacttaaacaaaaagccaaaaagaggagaaggggagaaaccaggcagtggcaaacagctgttataataggtcctgatggacagcccctcacagtgtacccttgccatatttgcacaaaaaagtttaaatccaggggattcttaaaaagacacatgaagaatcatcctgatcatttaatgagaaaaaaatatcagtgtacagattgtgactttacaactaacaagaaagtgagtttccataaccacttagaaagccataagctcataaacaaagtcgacaaaacccatgaatttacagaatacacacgaagatacagagaggctagtccactgagttccaataaacttattttaagagacaaggagccgaagatgcacaagtgcaaatactgtgactatgaaactgcagaacaaggactgttaaacaggcatttgttggccgttcacagcaagaattttcctcatgtttgtgttgagtgtgggaagggttttcgacatccttctgaactcaagaaacatatgagaacccatactggtgagaagccatatcagtgtcagtattgtattttcaggtgtgcagatcaatcaaatctgaaaactcacattaagtctaaacatggtaacaatttgccatataaatgtgagcattgtccccaagcatttggtgatgagagggagcttcaacgccatctggatttgtttcaaggacataagacacaccagtgtcctcattgtgaccataagagcaccaattcaagtgaccttaagcggcacatcatatctgtccatactaaggattttcctcacaaatgtgaggtctgtgataaaggttttcatcgtccttctgagctcaaaaagcatagtgatatccataagggtaggaagattcatcagtgcaggcactgtgactttaaaacatccgatccatttattcttagtggccatatcctttcagttcatactaaagatcagccattgaaatgtaaaaggtgcaagagaggattcagacaacaaaatgagctaaaaaaacatatgaagacccatactggaaggaagatttaccaatgtgagtattgtgaatacagcactacagatgcatctggctttaaacgacatgtgatatcaatacatacaaaagactatccacacaggtgtgaattctgcaagaagggattccgaagaccatcagaaaaaaatcagcatattatgaggcaccacaaagaggctcttatg

SEQ ID NO: 6354 - DNA, 1896 bp, Homo sapiens
  source 1..1896: mol_type = genomic DNA
atgttacgtgaggaagcagctcagaagaggaaagaaaaggagccaggcatggctcttcctcagggacacttgacttttagggatgtggctatagaattctctttggaggagtggaaatgcctggaccctacgcagagggctttatacagggccatgatgttggagaactacaggaacctgcattctgtggatatctcttccaaatgcatgatgaagaagttctcatcaacagcgcaaggcaatacagaagtggacacagggacattagaaagacatgaaagtcatcacattggagatttttgcttccagaaaattgggaaagatattcatgactttgagtttcaatggcaagaagacaaaagaaatagccatgaagcaactatgacacaaatcaaaaagttgactggtagcaccgacagatatgatcgaaggcatcctggaaacaagcctatcaaagatcagcttggattaagctttcattcgcatcttcctgaactccacatatttcagaccaaagggaaagttggtaatcaagttgagaagtctatcaacgatgcttcctcagttctaacgtcccaaagaatttcttctaggcccaaaatccatatttctaataactatgaaaataatttcttccattcatcattactcacactaaaacaggaagtacacataagagaaaaatctttccaatgtaatgagagtggcaaagcctttaattgtagctcactcttaaggaaacatcagataatctatttaggagggaaacaatataaatgtgatgtatgtggcaaggtctttaatcagaagcgataccttgcatgccatcatagatgtcacactggtgagaaaccttacaagtgtaatgaatgtggcaaggtttttaatcaacaatcaaaccttgcaagtcatcatagacttcatactggagagaaaccttacaaatgtgaagaatgtgacaaagtttttagtcgcaaatcaaatcttgaaagacataggagaattcatactggagagaaaccatacaaatgtaaggtttgtgaaaaggctttcaggcgtgattcacacctcacacaacacactagaattcacactggagagaaaccttacaagtgtaatgagtgtggcaaagcctttagtgggcagtcaacacttattcaccatcaagcaatccatggtatagggaaactttataaatgtaatgattgtcacaaagtcttcagtaatgctacaaccattgcaaatcattggagaatccataatgaagagagatcttacaagtgtaataaatgtggcaaattttttagacgtcgttcatatctcgtagttcattggcgaactcatactggagagaaaccttacaagtgtaatgagtgtggcaagaccttccatcacaattcagcccttgtaattcataaggcaattcatactggagagaaaccttacaagtgtaatgagtgtggcaagaccttccgtcacaattcagcccttgtaattcataaggcaattcatactggagagaaaccttacaagtgtaatgaatgtggcaaggtttttaatcaacaagcaacccttgcacgtcatcatagacttcatactggagagaaaccttacaaatgtgaagaatgtgacacagttttcagtcgcaaatcacaccatgaaacacataagagaattcatactggagagaaaccttacaaatgtgatgattttgacgaggccttcagtcaagcttcatcttatgcaaaacaaaggagaattcatatgggagagaaacatcacaagtgtgatgattgtggcaaagcctttacttcacattcacatcgcattagacatcagagaatccataccggacagaaatcttacaaatgtcataagcgtggcaaggtcttcagt

SEQ ID NO: 6355 - DNA, 1329 bp, Homo sapiens
  source 1..1329: mol_type = genomic DNA
atgccttctcagaatgctgttttttctcaggaggggaacatggaggaggaagaaatgaatgatggctcacagatggtgagatctcaggaatcactgacgtttcaggatgtggccgtggacttcaccagagaggagtgggaccagctgtaccctgcccaaaagaacctctatcgagacgtgatgctggagaactacaggaatctagttgcactggggtatcagctttgtaagccagaggtaatcgcgcagttggagctagaggaagaatgggtgatagaaagagacagcctgctggatactcatccagatggagaaaacagacccgaaatcaaaaagtcaaccacaagccagaatatttctgatgaaaatcaaacccatgagatgataatggagagactcgcaggagacagcttctggtactccatcctaggaggactctgggattttgattaccatccagagtttaaccaagaaaaccacaagagatatttaggacaagtaactttgacccacaaaaagatcacacaggagagaagccttgagtgtaataaatttgcagaaaactgtaatctgaactcaaaccttatgcagcagagaattccttccattaaaatacccctgaattctgacacacagggaaacagcatcaaacataattcagacttgatttactatcagggaaattatgtaagagagactccctatgaatatagtgagtgtggaaaaatcttcaatcaacatattcttcttactgatcatattcatactgcagagaaacccagtgagtgtgggaaggccttcagccacacctcatctcttagccagcctcagatgttgcttacaggagagaagccctataagtgtgatgaatgtggaaaaagattcagccagaggatacatctcattcaacatcagagaattcacacaggagaaaagccttttatatgcaatggatgtgggaaagccttccgtcagcattcatcctttactcaacatctgaggattcatactggagaaaagccctataaatgtaatcaatgtggtaaagcttttagccgcatcacatcccttactgaacatcatagacttcataccggagagaaaccttacgaatgtggtttctgtggcaaagccttcagtcagaggacacatctgaatcaacatgaaagaactcatacaggagagaaaccctataaatgtaatgaatgcgggaaagcctttagccagagtgcacaccttaatcaacacaggaaaatccatactcgggagaaattatgtgaatataaatgtgagcaaactgttcgccacagtccttcatttagcagcaca

SEQ ID NO: 6356 - DNA, 1161 bp, Homo sapiens
  source 1..1161: mol_type = genomic DNA
atggagcgccccccgccccgcgccgccggccgggaccccagtgcgctgcgggccgaggcgccgtggctgcgcgcggagggtccggggccgcgcgccgcgcccgtgacggtgcccacgccgccgcagggctcttccgtgggcggcggcttcgcgggcttggagttcgcgcggccgcaggagtcggagccgcgggcctcggacctgggggccccccggacgtggacgggggcggcggcggggccccggactccgtcggcgcacatccccgtcccagcgcagagagccaccccaggaaaagcccggctggacgaggtcatggctgccgctgcccttacaagcctgtccaccagccctctccttctgggggccccggttgcagccttcagcccagagcctggcctggagccctggaaggaggccctggtgcggcccccaggcagctacagcagcagcagcaacagtggagactggggatgggacctggccagtgaccagtcctctccgtccaccccgtcacccccactgccccccgaggcagcccactttctgtttggggagcccaccctgagaaaaaggaagagcccggcccaggtcatgttccagtgtctgtggaagagctgcgggaaggtgctgagcacggcgtcggcgatgcagagacacatccgcctggtgcacctggggaggcaggcagagcctgagcagagtgatggtgaggaggacttctactacacagagctggatgttggtgtggacacgctgaccgacgggctgtccagcctgactccagtgtcccccacggcctccatgccgcctgccttcccccgcctggagctgccagagctgctggagcccccagccctgcctagtcccctgcggccgcctgccccgcccctgcccccgccccctgtcctgagcaccgttgctaacccccagtcctgtcacagtgaccgtgtctaccagggctgcctgacgcccgcccgcctggagccgcagcccacggaggtcggagcctgcccacccgccttgtcctccaggatcggagtcaccctgaggaagccccgcggcgacgcgaagaagtgccggaaggtgtatggcatggagcgccgggacctctggtgcacagcctgccgctggaagaaagcctgccagcggttcctggac

SEQ ID NO: 6357 - DNA, 1350 bp, Homo sapiens
  source 1..1350: mol_type = genomic DNA
atggcctgggctctgaagctgcctctggccgacgaagtgattgaatccgggttggtgcaggactttgatgctagcctgtccgggatcggccaggaactgggtgctggtgcctatagcatgagtgatgtccttgcattgcccatttttaagcaagaagagtcgagtttgcctcctgataatgagaataaaatcctgccttttcaatatgtgctttgtgctgctacctctccagcagtgaaactccatgatgaaaccctaacgtatctcaatcaaggacagtcttatgaaattcgaatgctagacaataggaaacttggagaacttccagaaattaatggcaaattggtgaagagtatattccgtgtggtgttccatgacagaaggcttcagtacactgagcatcagcagctagagggctggaggtggaaccgacctggagacagaattcttgacatagatatcccgatgtctgtgggtataatcgatcctagggctaatccaactcaactaaatacagtggagttcctgtgggaccctgcaaagaggacatctgtgtttattcagcccaaaggtgcagacagaaagcaaaaaacggatagggaaaaaatggagaaacgaacacctcatgaaaaggagaaatatcagccttcctatgagacaaccatactcacagagtgttctccatggcccgagatcacgtatgtcaataactccccatcacctggcttcaacagttcccatagcagtttttctcttggggaaggaaatggttcaccaaaccaccagccagagccaccccctccagtcacagataacctcttaccaacaaccacacctcaggaagctcagcagtggttgcatcgaaatcgtttttctacattcacaaggcttttcacaaacttctcaggggcagatttattgaaattaactagagatgatgtgatccaaatctgtggccctgcagatggaatcagactttttaatgcattaaaaggccggatggtgcgtccaaggttaaccatttatgtttgtcaggaatcactgcagttgagggagcagcaacaacagcagcagcaacagcagcagaagcatgaggatggagactcaaatggtactttcttcgtttaccatgctatctatctagaagaactaacagctgttgaattgacagaaaaaattgctcagcttttcagcatttccccttgccagatcagccagatttacaagcaggggccaacaggaattcatgtgctcatcagtgatgagatgatacagaactttcaggaagaagcatgttttattctggacacaatgaaagaaaccaatgatagctatcatatcatactgaag

SEQ ID NO: 6358 - DNA, 4182 bp, Homo sapiens
  source 1..4182: mol_type = genomic DNA
atggcagccctgctgagatccgcgcgttggttgctgcgtgccggggcggccccgcgcctcccgctctccctgcgcctcctccctggcggcccgggccggctgcatgccgcctcctatctgcccgccgctcgcgccgggcccgtggccggaggactactgagcccagccaggctgtatgccattgctgccaaagaaaaagatattcaagaggagtccactttttcttctaggaagatttccaatcagtttgattgggctctaatgagactagatctttctgttcgaagaactggccgcattccaaagaagcttctacaaaaagtttttaatgatacctgccgctcaggtggcctaggtggtagtcatgccttgcttctactacgtagttgtggttctctcttgcctgaactaaagcttgaagagagaacagaatttgctcataggatatgggacacacttcagaaattaggtgctgtgtatgatgtgagtcactataatgctttacttaaagtctatcttcaaaatgaatataaattctcaccaactgatttcctggcaaaaatggaggaagcaaacattcaaccaaatcgagtgacataccagagattgattgcttcttattgtaatgtaggagatattgaaggtgccagcaagattcttggatttatgaaaactaaggatctcccagttacagaggcagtattcagtgcccttgtgacagggcatgccagagctggtgatatggagaatgcagaaaacattctcacagtgatgagagatgccggaattgagcctggtccagacacatacctcgcattattgaatgcatatgctgagaagggcgacattgaccatgttaagcagactctggagaaggtggagaagtccgagcttcaccttatggaccgtgatttactgcaaattatttttagcttcagtaaagctgggtatcctcagtatgtctcagaaattttggaaaaagttacatgtgaaagaagatatattccagatgcaatgaacctcattttacttttagtcactgaaaaattggaagatgtagcgttgcaaattttactagcatgccccgtatcaaaggaagatggcccaagtgtctttggcagtttctttttacaacactgtgtgactatgaatacgcctgtggagaagctaacagactactgtaagaagttaaaggaagtccagatgcactcctttcctctgcagttcaccctccattgtgctttactcgccaataaaactgatttggcaaaagccttaatgaaggctgtgaaggaggaaggttttcctatcagacctcactatttctggccattgctagttggacgtcggaaggaaaaaaatgttcaaggtataattgaaatcctcaaaggaatgcaagaattgggagtacatcctgatcaggaaacatatacagattatgtgattccatgctttgatagtgtaaactcagcacgagccattttgcaggaaaatggatgtctgtctgatagtgatatgttttctcaagctggattgagaagtgaagcagcaaatgggaacttagactttgtattatcatttttgaaatcaaatacattgcccatctcgctgcagtctataagaagtagcctactgctaggcttcaggaggtctatgaatataaatctttggagcgagataacagaattgttgtacaaggatggacgttattgccaggagcctcgaggaccgacggaagctgttggctattttctttataacttgattgacagcatgagtgactcagaggtacaggccaaggaggagcatttgagacaatacttccatcagctggagaagatgaatgtaaaaattcctgaaaatatctacagaggcattcgtaatctcctggaaagctaccatgttcctgaattgattaaggatgctcacttgttggttgagagtaagaatttagactttcaaaaaactgtgcaacttacatcatctgaattggagtccacacttgaaacactaaaagctgaaaatcaacctataagagatgtcctaaagcaactcatattagtgctttgttcagaagagaatatgcaaaaagcccttgaattgaaagcaaaatatgaatccgacatggttactggtggctatgcagctttaataaatttatgctgtcgacatgataaagtagaagatgccttgaacttgaaagaagaatttgaccgcttagattcatctgctgtccttgacaccggcaagtatgtaggccttgtaagagtattggcaaagcatggcaagctccaagatgctattaacattctgaaggagatgaaagagaaggatgttcttatcaaagatacaacagccttgtcctttttccacatgctaaatggcgcagctttaagaggtgaaattgaaacagtaaaacagttgcatgaagccatcgtgactctagggttagcagaaccatccaccaacataagtttcccattggtcactgtacacttggaaaagggcgacctatctactgctcttgaggtcgccattgactgctatgaaaagtataaagtattaccaaggattcatgatgtcttgtgtaaactggtagagaaaggcgagactgatctaattcagaaagcaatggactttgtgagccaagaacaaggtgaaatggtgatgctctatgatctcttctttgccttcctacaaacaggaaattacaaagaggccaagaagatcattgagactccagggattagagctcgatctgcaaggcttcagtggttttgtgacagatgtgttgcaaataatcaggttgaaactctggaaaaattagtggagctgacacagaagctatttgaatgtgatagagaccagatgtactacaatctgctaaaactgtataaaataaacggtgactggcaaagagctgatgcagtctggaataaaatccaagaagaaaatgttattcctcgtgaaaagacattaagattattagcagaaatccttagagagggtaaccaggaagttccgtttgacgtacctgagttgtggtatgaagatgaaaaacattccctgaattcttcgtcagcctcaaccacagaacctgatttccagaaagatatattgattgcctgccgattgaaccaaaaaaaaggggcatatgatattttcctgaatgcaaaagagcaaaacattgtgtttaatgctgaaacctacagcaatctcattaaattactgatgtcagaagattattttacacaagcaatggaagtgaaagcattcgcggagacccacatcaagggcttcacactgaacgatgctgccaacagccgcctcatcataacgcaagttaggcgggattatttgaaagaggctgtgacaacactgaaaacagtattggatcagcagcagaccccttctaggttagcagtgacccgtgtcatccaggcattggccatgaagggtgatgttgaaaacatagaagtagttcagaagatgttaaatggactcgaagactccattggactttcaaaaatggttttcatcaataacattgctttggctcaaataaagaataataacatagatgccgcaatagaaaacattgaaaatatgcttacttcagagaataaagtcattgaaccccaatacttcggcttggcatacttattcagaaaagtaatagaggagcagttggaaccagcagttgaaaagataagcatcatggcggagagattggccaatcagtttgcaatttataaacctgtcactgattttttccttcaacttgtggatgcaggcaaggtggatgatgccagagctctcctacagagatgtggtgcaattgctgaacaaaccccgattttgttgttgttcctccttaggaattctaggaaacaaggaaaggcatcaactgtgaaatctgtgttagaattgattcctgaattaaatgaaaaggaagaagcatacaattccctcatgaaaagctatgtctcagagaaagatgtcacatctgctaaagcactgtatgaacatttgactgcaaagaatacaaaattggatgatctgtttctaaagcgttacgcatctttgctgaagtatgctggagagcctgtccctttcattgaaccccctgaaagctttgaattttatgcacagcagctaagaaaattgagggaaaactcttct

SEQ ID NO: 6359 - DNA, 1422 bp, Homo sapiens
  source 1..1422: mol_type = genomic DNA
atggctgctggtctcctcacagctgggccccggggatccacattcttcagcagtgtgacggtagcttttgcacaggaaaggtggaggtgcctcgtgtctactccacgggacaggttcaaggaggggataccaggaaagtccaggagccttgtcctactaggacttccagtttcccagcctggcatgaactcccagttggaacaaagggaaggcgcatggatgctggagggcgaagacctgcgaagtccctctccaggctggaagattatatctggatcaccaccagagcaagccctttctgaagcttcattccaagacccatgtgtagagatgccccctggggattcagaccacgggaccagtgaccttgagaagagcttcaatctgagaccagtcctctctccgcaacagagagtgcccgtggaagcgagacctcgcaaatgtgagacacacaccgagagcttcaagaactcggaaatcctgaaacctcacagagcaaaaccatatgcatgtaatgaatgtggcaaagccttcagttactgttcttccctttctcagcatcagaagagccacactggagagaagccctatgagtgcagtgaatgtgggaaggccttcagccagagctcatctctcattcagcaccagaggattcacactggagagaagccttacaagtgcagtgaatgtggaagagccttcagccagaacgccaacctcaccaaacaccagcgaacccacaccggagagaagccctacagatgcagcgagtgtgagaaagccttcagtgactgctcagctcttgttcagcatcagagaattcataccggagagaagccctacgaatgcagcgactgtgggaaggccttccgtcacagtgcaaacctcacgaaccatcagaggactcacaccggggagaagccctacaagtgcagcgagtgtgggaaggccttcagttactgcgcagcgttcattcagcaccagaggattcacaccggggagaagccctacagatgtgccgcgtgtgggaaggccttcagccagagtgcaaacctcacaaaccatcagaggactcacactggggagaaaccctacaagtgcagcgagtgtgggaaggccttcagccagagtaccaatctcataatccaccaaaagacccacaccggggagaagccatataaatgtaatgaatgtgggaaattcttcagtgagagctcagccctcattcggcatcatataatccacaccggagaaaaaccttatgagtgtaatgagtgtggtaaagcgtttaaccagagctcatcccttagtcagcatcagagaatccacacaggcgtgaaaccctacgaatgcagcgagtgtgggaaggccttccggtgcagctctgccttcgttagacatcagagactccacgccggagag

SEQ ID NO: 6360 - DNA, 1494 bp, Homo sapiens
  source 1..1494: mol_type = genomic DNA
atgctggaggaaggagtactgccttccccaggccctgcccttccccaagaggaaaacacaggagaggaaggaatggctgctggtctcctcacagctgggccccggggatccacattcttcagcagtgtgacggtagcttttgcacaggaaaggtggaggtgcctcgtgtctactccacgggacaggttcaaggaggggataccaggaaagtccaggagccttgtcctactaggacttccagtttcccagcctggcatgaactcccagttggaacaaagggaaggcgcatggatgctggagggcgaagacctgcgaagtccctctccaggctggaagattatatctggatcaccaccagagcaagccctttctgaagcttcattccaagacccatgtgtagagatgccccctggggattcagaccacgggaccagtgaccttgagaagagcttcaatctgagaccagtcctctctccgcaacagagagtgcccgtggaagcgagacctcgcaaatgtgagacacacaccgagagcttcaagaactcggaaatcctgaaacctcacagagcaaaaccatatgcatgtaatgaatgtggcaaagccttcagttactgttcttccctttctcagcatcagaagagccacactggagagaagccctatgagtgcagtgaatgtgggaaggccttcagccagagctcatctctcattcagcaccagaggattcacactggagagaagccttacaagtgcagtgaatgtggaagagccttcagccagaacgccaacctcaccaaacaccagcgaacccacaccggagagaagccctacagatgcagcgagtgtgagaaagccttcagtgactgctcagctcttgttcagcatcagagaattcataccggagagaagccctacgaatgcagcgactgtgggaaggccttccgtcacagtgcaaacctcacgaaccatcagaggactcacaccggggagaagccctacaagtgcagcgagtgtgggaaggccttcagttactgcgcagcgttcattcagcaccagaggattcacaccggggagaagccctacagatgtgccgcgtgtgggaaggccttcagccagagtgcaaacctcacaaaccatcagaggactcacactggggagaaaccctacaagtgcagcgagtgtgggaaggccttcagccagagtaccaatctcataatccaccaaaagacccacaccggggagaagccatataaatgtaatgaatgtgggaaattcttcagtgagagctcagccctcattcggcatcatataatccacaccggagaaaaaccttatgagtgtaatgagtgtggtaaagcgtttaaccagagctcatcccttagtcagcatcagagaatccacacaggcgtgaaaccctacgaatgcagcgagtgtgggaaggccttccggtgcagctctgccttcgttagacatcagagactccacgccggagag

SEQ ID NO: 6361 - DNA, 1092 bp, Homo sapiens
  source 1..1092: mol_type = genomic DNA
atgccccctggggattcagaccacgggaccagtgaccttgagaagagcttcaatctgagaccagtcctctctccgcaacagagagtgcccgtggaagcgagacctcgcaaatgtgagacacacaccgagagcttcaagaactcggaaatcctgaaacctcacagagcaaaaccatatgcatgtaatgaatgtggcaaagccttcagttactgttcttccctttctcagcatcagaagagccacactggagagaagccctatgagtgcagtgaatgtgggaaggccttcagccagagctcatctctcattcagcaccagaggattcacactggagagaagccttacaagtgcagtgaatgtggaagagccttcagccagaacgccaacctcaccaaacaccagcgaacccacaccggagagaagccctacagatgcagcgagtgtgagaaagccttcagtgactgctcagctcttgttcagcatcagagaattcataccggagagaagccctacgaatgcagcgactgtgggaaggccttccgtcacagtgcaaacctcacgaaccatcagaggactcacaccggggagaagccctacaagtgcagcgagtgtgggaaggccttcagttactgcgcagcgttcattcagcaccagaggattcacaccggggagaagccctacagatgtgccgcgtgtgggaaggccttcagccagagtgcaaacctcacaaaccatcagaggactcacactggggagaaaccctacaagtgcagcgagtgtgggaaggccttcagccagagtaccaatctcataatccaccaaaagacccacaccggggagaagccatataaatgtaatgaatgtgggaaattcttcagtgagagctcagccctcattcggcatcatataatccacaccggagaaaaaccttatgagtgtaatgagtgtggtaaagcgtttaaccagagctcatcccttagtcagcatcagagaatccacacaggcgtgaaaccctacgaatgcagcgagtgtgggaaggccttccggtgcagctctgccttcgttagacatcagagactccacgccggagag

SEQ ID NO: 6362 - DNA, 1338 bp, Homo sapiens
  source 1..1338: mol_type = genomic DNA
atggaggttcccccagcaacaaagtttggtgagacctttgcatttgagaacaggttagagtcacaacaagggcttttcccaggggaggacctgggggacccttttcttcaggaaagaggtttggagcaaatggctgtgatctacaaggagatccctcttggtgagcaggacgaagaaaatgatgattacgaggggaatttcagtttgtgctcaagccctgttcagcatcaaagtatccccccaggaaccagaccccaggatgatgagctcttcggacaaaccttcctccagaaatccgacctcagcatgtgtcagataatccacagtgaagagcccagtccatgcgattgtgcagaaacagacagaggggactcaggacctaacgcacctcacagaaccccacaaccagccaagccctatgcgtgtcgagagtgtgggaaggccttcagccagagctcgcacctgctccgacacctggtgatccacactggggagaagccctatgagtgctgtgagtgcgggaaggccttcagccagagctcccacctgctcaggcaccagatcatccacaccggggagaagccctacgagtgccgggagtgtgggaaggccttccgccagagctcagccctcacgcaacaccaaaagatccacaccggaaagaggccctacgagtgcagggaatgcgggaaagatttcagccggagctccagcctcagaaaacacgagagaattcatacaggagagagaccttatcagtgtaaggaatgtgggaaatccttcaaccagagctcaggcctgagccagcatcggaagatccacaccctaaagaaacctcacgagtgcgatctctgtgggaaagccttttgtcacaggtcacacctcatccgacaccagcggatccacactgggaagaaaccatacaaatgcgatgagtgcgggaaggccttcagccagagctccaacctcattgagcaccgcaagacccacactggcgagaagccctacaaatgccagaagtgtgggaaagccttcagccagagctcctccctcattgagcaccagcgcatccacaccggtgagaagccctacgagtgctgtcagtgtggcaaggccttttgccacagctctgcgctgatccagcaccagagaatccacaccggcaagaagccctacacctgcgagtgtggcaaagccttccggcaccggtcagccctcattgagcactataaaacccacaccagagagaagccctacgtgtgcaatctgtgcggcaagtccttccgggggagctcgcacctgattcgccatcagaagattcattctggggagaagcta

SEQ ID NO: 6363 - DNA, 1545 bp, Homo sapiens
  source 1..1545: mol_type = genomic DNA
atggagagcttggggctgcacacggtgacccttagtgatgggacaacagcctacgtccagcaagctgtcaaaggagagaagcttcttgaagggcaggtgatccagctcgaggatgggaccaccgcatacattcaccaggtgacggtacagaaagaagctctctcctttgaggatggtcagcctgtgcagctggaagatggcagcatggcttacatacaccgcacacccagagaaggctatgaccccagcaccctggaagccgtccaactggaagatggctccactgcctacattcaccaccctgtggctgtgccatcggagagcaccatcctggccgtacagacagaggtgggcttggaggacctggcagcagaggatgatgagggcttcagtgcagacgcagtggtggccctggagcagtatgccagcaaggttcttcatgacagccagattccccgtaatggaaaagggcagcaagttggagacagagcattccgctgtggctacaagggctgtgggcgtctctacaccaccgctcatcacttaaaggtgcatgaacgagctcatacaggtgaccgtccatacagatgtgacttccccagctgtggaaaggcctttgccacaggctatggactgaagagccacgttcgtacccacactggtgagaaaccatacaagtgcccagaggagctgtgcagcaaggccttcaagacctcaggagacctgcagaagcatgtccgtacccacactggtgaacgcccgttccagtgcccttttgagggctgtggccgctccttcaccacatctaacatccgcaaggtacatgtgcgcacccacacaggcgagaggccctacacctgcccggagccccactgtggccgcggcttcaccagcgccaccaactataagaatcacgtgcgcatccacacaggggagaagccatacgtttgcacggtgccaggctgcgggaaacgcttcaccgagtactcgagcttgtataagcaccacgtggtgcacacacactgcaagccctacacctgcagcacctgcggcaagacctaccggcagacctccaccttggccatgcacaagcgcagtgcccacggcgagctggaggccacggaggagagcgagcaggccctctatgagcagcagcaacttgaggccgcctctgcagccgaggagagtccgccacccaaacgaccccggatagcttacctttcggaggtgaaggaagagagagatgacatcccagcccaggtggcgatggtgactgaagaagatggggccccccaggtggctctgatcactcaggatggtgcccagcaggtcacaatcattacctctggggctgtggtggctgaggactcaagtgtagcatctcttcgtcatcaacaggtggcactgttggccacagccaacggaacgcacattgcagtgcagctggaggaacagcagaccttagaggaggccatcaatgtggccactgcggccatgcagcaaggggctgtgaccctggagacaacagtgtcggagagtggctgc

SEQ ID NO: 6364 - DNA, 1932 bp, Homo sapiens
  source 1..1932: mol_type = genomic DNA
atggagatccctgccccggagcccgagaagacagctctttcctctcaggatcctgctctttccctgaaagagaatctcgaggatatatcgggttggggtcttcccgaagccaggtccaaggaatcggtgagtttcaaggatgtggctgtggacttcacccaggaggagtggggtcaactagactcccctcagagggccttgtaccgggatgtgatgttggagaactaccagaaccttcttgccctaggacctccactgcacaagccagatgtgatctctcatctggaacgaggcgaggagccatggagcatgcagagggaagtccccagagggccctgtccagaatgggagctgaaggcggtgccctctcaacagcagggcatttgcaaagaagaaccggcccaggagcccatcatggagcggcccctcggcggggcgcaggcgtgggggcgccaggcaggtgctctgcagaggagtcaggctgcgccctgggcgcccgcacctgccatggtctgggacgtccctgtagaggaattccccctcaggtgtcccctcttcgcccagcaacgcgttcccgaggggggacccttgctggacacacgcaagaacgtccaggccactgagggcagaaccaaggcccccgcgagactgtgtgcaggggaaaacgcctccacgccaagtgagccagaaaagttcccccaggtgcgccggcagcgcggggcgggcgccggggagggcgagttcgtgtgcggcgagtgcgggaaggcgttccgccagagctcctccctcacgctgcaccggcgctggcacagccgggagaaggcttacaagtgcgatgaatgcggcaaggccttcacctggagcaccaaccttctggagcaccggcgcatccacaccggcgagaagcccttcttctgcggcgagtgcgggaaggccttcagctgccactcgtccctcaacgtgcaccagcgcatccacacgggcgagcggccctacaagtgcagcgcctgcgagaaggccttcagctgcagctcgctgctcagcatgcacctgcgggtgcacaccggcgagaagccctaccggtgcggcgagtgcggcaaggccttcaaccagcgtacacacctcacacgccaccaccgcatccacacgggcgagaagccctaccagtgcggctcctgcggcaaggccttcacctgccactcatccctcaccgtgcatgagaagatccacagcggggacaagccgttcaagtgcagcgactgcgagaaggccttcaacagccgctcgcgcctcaccctccaccagaggacgcacacgggcgagaagcccttcaagtgcgccgactgcgggaagggcttcagctgccacgcgtacctgctcgtgcaccggcgcatccacagcggcgagaagcccttcaagtgcaacgagtgcggcaaagccttcagctcccacgcctacctcatcgtgcaccggcgcatccacacaggcgagaagcccttcgactgcagccagtgttggaaggccttcagctgccactcgtccctcatcgtgcaccagcgcatccacaccggtgagaagccctacaagtgcagcgagtgcggcagagccttcagccagaaccactgtctcattaaacatcagaaaatccactccggggagaagtcgtttaagtgtgagaaatgtggggagatgttcaactggagctcgcacctcactgagcaccagaggctgcacagcgaggggaagcccttggccatccagttcaacaaacacctgctcagcacatactacgtgcctggcagcctgctgggtgcaggggatgctggactgagggacgtggatcccatcgacgcgctggatgtggcaaagctcttgtgcgtggttccccccagagctggcaggaatttctccctggggagcaaacctcgaaac

SEQ ID NO: 6365 - DNA, 534 bp, Homo sapiens
  source 1..534: mol_type = genomic DNA
atggagatccctgccccggagcccgagaagacaggaatcggtgagtttcaaggatgtggctgtggacttcacccaggaggagtggggtcaactagactcccctcagagggccttgtaccgggatgtgatgttggagaactaccagaaccttcttgccctaggacctccactgcacaagccagatgtgatctctcatctggaacgaggcgaggagccatggagcatgcagagggaagtccccagagggccctgtccagaatgggagctgaaggcggtgccctctcaacagcagggcatttgcaaagaagaaccggcccaggagcccatcatggagcggcccctcggcggggcgcaggcgtgggggcgccaggcaggtgctctgcagaggagtcaggctgcgccctgggcgcccgcacctgccatggtctgggacgtccctgtagaggaattccccctcaggtgtcccctcttcgcccagcaacgcgttcccgaggggggacccttgctggacacacgcaagaacgtccaggccac

SEQ ID NO: 6366 - DNA, 228 bp, Homo sapiens
  source 1..228: mol_type = genomic DNA
atgaacaaatcccagggatcagtttcattcacggatgtgactgtggactttacccaggaggaatgggaacaactggacccctctcagaggatcctatacatggatgtgatgctggagaattatagcaacttactttcagtgggtaaggacggttttcagaagtgtggaaggctgatgaccagatggagagagaccacagaaacccagacgagcaggcgaggcaatttt

SEQ ID NO: 6367 - DNA, 1122 bp, Homo sapiens
  source 1..1122: mol_type = genomic DNA
atggatgtgatgctggagaattatagcaacttactttcagtggaagtgtggaaggctgatgaccagatggagagagaccacagaaacccagacgagcaggcgaggcaatttttaattcttaagaaccaaaccccaattgaggaaagaggcgatctctttggaaaagcacttaatctgaacacagactttgtttctttaagacaagtaccttataaatatgacttatatgaaaaaactttgaaatataattcagacttgcttaatagtaatagaagctatgcaggaaagcagactgatgagtgtaatgaatttggaaaagcacttctctacctgaagcaagagaaaacccacagtggagtagaatattctgaatacaataaaagtggaaaagccctcagccataaagcagccatttttaaacatcagaaaataaaaaacttggttcaacctttcatttgtacttactgtgacaaggctttctcctttaagtcactcctcattagtcataagagaatacatactggagaaaagccatatgaatgcaatgtatgtaagaaaaccttctcccataaggccaacctcatcaaacatcagagaattcacactggggagaaacctttcgagtgtccggaatgtggaaaagctttcacccaccagtcaaacctcattgtacaccagagagcacatatggagaagaagccctatgagtgcagtgaatgtggaaagacatttgcccaaaagtttgaactcaccacacaccagagaattcatacaggagagcgaccctatgagtgtaacgaatgtgcaaaaaccttctttaagaagtcaaaccttatcatacatcagaagattcacacgggggagaaacgctatgagtgcagtgaatgtggaaaatcctttatccagaactcacagctcatcatacacatgagaactcatacaggagagaaaccctatgaatgtactgagtgcggcaaaactttcagccagaggtcaactcttagattacacttgcgaatccacacaggagagaaaccatatgagtgttccgaatgtgggaaggcctttagcaggaagtcccgactcagtgtccatcagagagttcacatcggggagaaaccc

SEQ ID NO: 6368 - DNA, 1221 bp, Homo sapiens
  source 1..1221: mol_type = genomic DNA
atgaacaaatcccagggatcagtttcattcacggatgtgactgtggactttacccaggaggaatgggaacaactggacccctctcagaggatcctatacatggatgtgatgctggagaattatagcaacttactttcagtggaagtgtggaaggctgatgaccagatggagagagaccacagaaacccagacgagcaggcgaggcaatttttaattcttaagaaccaaaccccaattgaggaaagaggcgatctctttggaaaagcacttaatctgaacacagactttgtttctttaagacaagtaccttataaatatgacttatatgaaaaaactttgaaatataattcagacttgcttaatagtaatagaagctatgcaggaaagcagactgatgagtgtaatgaatttggaaaagcacttctctacctgaagcaagagaaaacccacagtggagtagaatattctgaatacaataaaagtggaaaagccctcagccataaagcagccatttttaaacatcagaaaataaaaaacttggttcaacctttcatttgtacttactgtgacaaggctttctcctttaagtcactcctcattagtcataagagaatacatactggagaaaagccatatgaatgcaatgtatgtaagaaaaccttctcccataaggccaacctcatcaaacatcagagaattcacactggggagaaacctttcgagtgtccggaatgtggaaaagctttcacccaccagtcaaacctcattgtacaccagagagcacatatggagaagaagccctatgagtgcagtgaatgtggaaagacatttgcccaaaagtttgaactcaccacacaccagagaattcatacaggagagcgaccctatgagtgtaacgaatgtgcaaaaaccttctttaagaagtcaaaccttatcatacatcagaagattcacacgggggagaaacgctatgagtgcagtgaatgtggaaaatcctttatccagaactcacagctcatcatacacatgagaactcatacaggagagaaaccctatgaatgtactgagtgcggcaaaactttcagccagaggtcaactcttagattacacttgcgaatccacacaggagagaaaccatatgagtgttccgaatgtgggaaggcctttagcaggaagtcccgactcagtgtccatcagagagttcacatcggggagaaaccc

SEQ ID NO: 6369 - DNA, 1926 bp, Homo sapiens
  source 1..1926: mol_type = genomic DNA
atgtcagagccaggaatgctgggcaggaaggatgtgtgggttccgagagaaaccccgttcaccaaggccatggaagtggaggctgcagaggcccggtccccagcccccggctacaagcgctcgggccgccgctacaagtgcctgtcctgtaccaagacatttccaaacgcgcccagggcagcgcgccacgctgccacacatgggccggcagactgctctgaagaggtggccgaggtgaagccaaagccagagacagaagctaaggcagaggaagccagtggggagaaggtgtcaggctccgcggccaagcctaggccctatgcgtgtccgctatgccccaaggcctacaagacggcacccgagctgcgcagccacgggcgcagccacacgggggagaagccctttccgtgccccgagtgcggccgccgcttcatgcagcccgtgtgcctgcgcgtgcacctggcctcgcacgctggcgaactgcccttccgctgtgcgcactgcccgaaggcctatggcgcgctctccaagctcaagatccaccagcgtggccacacaggcgagcggccttacgcctgcgccgactgcggcaagagctttgctgacccttcagtgttccgcaagcaccggcgtactcacgctggcctgcggccctacagctgtgagcgttgcggcaaagcctatgcggagctcaaggacctccgcaaccatgagcggtcccacaccggcgagcgccccttcctctgctccgagtgcgggaagagcttctcccgctcatcctcgctcacgtgccaccagcgcatccacgcggcacagaagccctaccgctgcccggcctgcggcaagggcttcacgcagctcagttcctaccagagccacgagcgcacgcactcgggggagaagcccttcctgtgcccgcgctgcggccgcatgttctccgacccctcgagcttccgtcgccaccagcgcgcccatgaaggggtgaagccataccactgcgagaagtgcggcaaggacttccggcagccggcggacctggccatgcaccggcgtgtgcacacaggcgaccggccgttcaagtgcctgcaatgtgacaagacgttcgtggcgtcctgggacctcaagcggcacgcgctggtgcactctggccagcggcccttccgctgtgaggagtgcgggcgagccttcgccgagcgtgccagcctcacgaagcatagccgggtgcactcgggggagcgccccttccactgtaacgcatgtgggaaatcctttgtggtgtcgtcgagcctgaggaagcacgagcggacccatcgaagcagtgaggccgcgggtgtgccccctgcacaggagctggtggtggggttggcgctgcctgtgggcgtggcaggtgagagttcagccgccccggcagcaggggcggggctgggggaccctccagcagggctgctagggctgcccccggagtcaggtggtgtgatggccacacagtggcaggtggtgggcatgacggtggagcatgtggaatgccaagatgctggtgtccgggaggctcctggtcccttggaaggggcaggcgaggcggggggtgaggaggctgacgagaagcccccccagtttgtgtgccgagagtgcaaggagaccttctccacaatgacgctgctgcgtcggcacgagcgctcacacccggagctccggcccttcccctgcacccagtgcggcaagagcttctctgaccgggctgggctgcgcaaacacagccgcactcacagctcagtgcgcccctacacctgcccccattgtcccaaggccttcttgagtgccagcgacttgcgcaagcatgaacgcacccaccctgtgcccatggggacccccacacccctggagcccctggtggctttgctaggaatgcctgaagaggggccggcc

SEQ ID NO: 6370 - DNA, 1857 bp, Homo sapiens
  source 1..1857: mol_type = genomic DNA
atggaagtggaggctgcagaggcccggtccccagcccccggctacaagcgctcgggccgccgctacaagtgcctgtcctgtaccaagacatttccaaacgcgcccagggcagcgcgccacgctgccacacatgggccggcagactgctctgaagaggtggccgaggtgaagccaaagccagagacagaagctaaggcagaggaagccagtggggagaaggtgtcaggctccgcggccaagcctaggccctatgcgtgtccgctatgccccaaggcctacaagacggcacccgagctgcgcagccacgggcgcagccacacgggggagaagccctttccgtgccccgagtgcggccgccgcttcatgcagcccgtgtgcctgcgcgtgcacctggcctcgcacgctggcgaactgcccttccgctgtgcgcactgcccgaaggcctatggcgcgctctccaagctcaagatccaccagcgtggccacacaggcgagcggccttacgcctgcgccgactgcggcaagagctttgctgacccttcagtgttccgcaagcaccggcgtactcacgctggcctgcggccctacagctgtgagcgttgcggcaaagcctatgcggagctcaaggacctccgcaaccatgagcggtcccacaccggcgagcgccccttcctctgctccgagtgcgggaagagcttctcccgctcatcctcgctcacgtgccaccagcgcatccacgcggcacagaagccctaccgctgcccggcctgcggcaagggcttcacgcagctcagttcctaccagagccacgagcgcacgcactcgggggagaagcccttcctgtgcccgcgctgcggccgcatgttctccgacccctcgagcttccgtcgccaccagcgcgcccatgaaggggtgaagccataccactgcgagaagtgcggcaaggacttccggcagccggcggacctggccatgcaccggcgtgtgcacacaggcgaccggccgttcaagtgcctgcaatgtgacaagacgttcgtggcgtcctgggacctcaagcggcacgcgctggtgcactctggccagcggcccttccgctgtgaggagtgcgggcgagccttcgccgagcgtgccagcctcacgaagcatagccgggtgcactcgggggagcgccccttccactgtaacgcatgtgggaaatcctttgtggtgtcgtcgagcctgaggaagcacgagcggacccatcgaagcagtgaggccgcgggtgtgccccctgcacaggagctggtggtggggttggcgctgcctgtgggcgtggcaggtgagagttcagccgccccggcagcaggggcggggctgggggaccctccagcagggctgctagggctgcccccggagtcaggtggtgtgatggccacacagtggcaggtggtgggcatgacggtggagcatgtggaatgccaagatgctggtgtccgggaggctcctggtcccttggaaggggcaggcgaggcggggggtgaggaggctgacgagaagcccccccagtttgtgtgccgagagtgcaaggagaccttctccacaatgacgctgctgcgtcggcacgagcgctcacacccggagctccggcccttcccctgcacccagtgcggcaagagcttctctgaccgggctgggctgcgcaaacacagccgcactcacagctcagtgcgcccctacacctgcccccattgtcccaaggccttcttgagtgccagcgacttgcgcaagcatgaacgcacccaccctgtgcccatggggacccccacacccctggagcccctggtggctttgctaggaatgcctgaagaggggccggcc

SEQ ID NO: 6371 - DNA, 1392 bp, Homo sapiens
  source 1..1392: mol_type = genomic DNA
atggtgagtggactgcgcctggcttcccgaagtggagaagagggctggttgaaacctgctgtggcgcgactcgggcctccacgccatcggctccggaacctgcggaccgagtcgccgtggcgtagccggggctcagtcctcttctgttcagggccgggccgggcggggcgggcagcggaacccctgcatcctgtctgtacctgcgggcgccacttccgccggccggagccctgtcgggaacccctcgcctcccctatccaggactcggtggcttttgaggatgtggctgtgaactttacccaggaggaatgggctttgctagattcttctcagaagaatctctacagagaagtgatgcaggaaacctgcaggaacctggcttctgtaggaagccaatggaaagaccagaatattgaagatcacttcgaaaaacctgggaaagatataagaaatcatatcgtacagagactgtgtgaaagtaaagaagatggtcagtatggagaagttgtcagccaaattccaaatcttgatctgaacgagaacatttctactggattaaaaccatgtgaatgcagtatttgtggaaaagtctttgtacgtcattccctccttaataggcatatcctagctcactcaggatacaaaccatatggagagaagcaatataaatgtgaacagtgtgggaaattcttcgtttctgttccaggtgttagaagacacatgataatgcacagtggaaatccagcttataaatgtacgatatgtgggaaagctttttattttctcaattcagttgaaagacatcagagaactcacacaggagaaaaaccctataaatgtaaacaatgtggtaaagcattcactgtttccggttcttgtctaatacatgaacgaactcacactggagagaaaccctacgaatgtaaggaatgtgggaaaacattcagattttcttgttcttttaagacgcatgaaaggactcacactggagaaagaccctataaatgtaccaaatgtgataaagccttcagctgttccacttcccttcgttaccatggaagcattcatactggagagagaccctatgagtgtaaacaatgtggcaaagcctttagtcgtttgagttccctttgtaaccatagaagtactcataccggagagaaaccctatgaatgtaaacaatgtgatcaagccttcagtcgcctcagttcccttcacctccacgaaagaattcatactggagaaaaaccctatgaatgtaagaaatgcggtaaagcctacactcgttccagtcaccttactcgccatgaaagaagtcatgatatagaggctgggtgtagtgactcagcctataatcccagcactttgggaggccaaggcgtgtggattgct

SEQ ID NO: 6372 - DNA, 1134 bp, Homo sapiens
  source 1..1134: mol_type = genomic DNA
atggactcggtggcttttgaggatgtggctgtgaactttacccaggaggaatgggctttgctagattcttctcagaagaatctctacagagaagtgatgcaggaaacctgcaggaacctggcttctgtaggaagccaatggaaagaccagaatattgaagatcacttcgaaaaacctgggaaagatataagaaatcatatcgtacagagactgtgtgaaagtaaagaagatggtcagtatggagaagttgtcagccaaattccaaatcttgatctgaacgagaacatttctactggattaaaaccatgtgaatgcagtatttgtggaaaagtctttgtacgtcattccctccttaataggcatatcctagctcactcaggatacaaaccatatggagagaagcaatataaatgtgaacagtgtgggaaattcttcgtttctgttccaggtgttagaagacacatgataatgcacagtggaaatccagcttataaatgtacgatatgtgggaaagctttttattttctcaattcagttgaaagacatcagagaactcacacaggagaaaaaccctataaatgtaaacaatgtggtaaagcattcactgtttccggttcttgtctaatacatgaacgaactcacactggagagaaaccctacgaatgtaaggaatgtgggaaaacattcagattttcttgttcttttaagacgcatgaaaggactcacactggagaaagaccctataaatgtaccaaatgtgataaagccttcagctgttccacttcccttcgttaccatggaagcattcatactggagagagaccctatgagtgtaaacaatgtggcaaagcctttagtcgtttgagttccctttgtaaccatagaagtactcataccggagagaaaccctatgaatgtaaacaatgtgatcaagccttcagtcgcctcagttcccttcacctccacgaaagaattcatactggagaaaaaccctatgaatgtaagaaatgcggtaaagcctacactcgttccagtcaccttactcgccatgaaagaagtcatgatatagaggctgggtgtagtgactcagcctataatcccagcactttgggaggccaaggcgtgtggattgct

SEQ ID NO: 6373 - DNA, 7872 bp, Homo sapiens
  source 1..7872: mol_type = genomic DNA
atgttccgcagggcacgccttagcgtgaagccgaatgtcaggcctggtgtaggcgccaggggctccacagcttccaatccccagcgtggacgggagtctcccaggccgccggatcctgccacggactctgcttccaagcccgcggagcccacagatgtgcccacagtcgatttcggtggagcggagccccaagaaaaggctcctaggagcagtactgaaaagactggtggtgacaatgatgttgaagaatccagtagatcttcctctactgtttcacagagaagaaagcgaatatcaagtacttctagcctggttaagtctagtgtcagtgttccttcagaatctcatcccttatctacaattaatcaagaggctccacagccaactgccacttcaacaaaagagaaacagccatgctcagacagataccgaatatacaaagcccagaaactgagggaaatgttaaaagaagaattgagaaaagagaagaaacaatggaaaaacaaatatgctataaatgaaagtcagaggccaccagatcgttcaaaaatgactatgagagacttcatatattatctaccagataataatccaatgacttcttcactggaacaagaaaagaaaactgaaaagccatcgactccagtccagacaagagagcaagaaggtaagagtactcctaatgctgaagataatgaaatggaagaagagacagatgatgggccattactggttcctcgagtaaaagtggcagaagatggttccattattttggatgaagaaagtttaactgtagaagttttaagaacaaaaggcccttgtgttgttgaagaaaatgaccccatatttgagcgcggttctacaactacatactccagctttaggaaaaactattactctaaaccatggtcaaataaagaaacagatatgttttttttagccatcagcatggtaggaactgacttttctatgatcggacaactttttcctcacagagcaaggatagaaattaagaataaatttaaacgggaagagaaaacaaatggatggagaatagacaaagcattccaggaaaagcgcccttttgacttcgatttttttgctcatttgcttcagaaagttcttgctgaagaagagaaaagaaaacaaaaatctgttaaaaatcacagtttaaaggagaagaaatccaccaaaccacggaaaaatgtaaaagtgaaaaaagttgcctgtgaaggagtgaataatgatccagatgagtctatgagttctagaatttcagacacggaaagatctcagaaggatgctcagacagttgaagaagagtctctgaccttatcaagggaggatgcagagcaggttgcattagaagtagacctaaatcaaaagaaaagaaggaggaagaagcaagatggagctaatgaactgggagtaaacaatcttttagaaaatgccactgttcaggcgggtccttctaaaggagaaaaacacaagaataaatgtcaggctataaggcctgagctaaaggaaggtgaatgcagtaaggagcagatgctttcctgcacacaaaacatagatggcattgtgggttttgcctccactgaaaaagttgagaaaagaactgaccccatcctttcattaagtaatcaacaagatgccacatcagtagcaactgagtcttcagaatcaagcacttcagatttgccttcattcgaagttggaattagagcattgtgtgaggtgaataatgctgagggtagttgtatagaagaaagaaatgttgacctaaaaaataattcactggaaattgatcaaacagaaaatgttaaaccaatgttgagaggtcgcttccaaagacctaaacccaatttgtcaagggctgggaagaaatcagttctttcacaaggcaaaacagagtcagagagcaagaattcacattcaaaaacttcagttgaaaagaaccacgtggaaaaagataaaatgaatacattggacattttgagaatggagactacagagagagagaatccagaagctgaaactgtatctgttttgggtgaaaaaaattgtctgcaggaagggagtcaactaaaggctttaagacctgtacaagtgaggggccgattgcaaaagccaaagccaaatgcaggtaaagctgctgaaagaaaagaaattctcatatcacaggaagaaattggggccaatgtagagaagaatgaaaatgaatcctgtgctgatagagatactcctcaacacatggaagatcaatcgcgtaaagattttgaagaggaagatgtcatattacagcctgagaaaaatgattcttttcaaaatgtgcagccagatgagcccaaggttcttaatgaatgtctaagcgttcaagagaataataaggcaaataaacttaaccaagtcccaattctaaggactcgatttcagaaaccaaagccaaatataggaagaggaactggaaggagagaaatttcctcaaaggaagaggtactagagaagattcttgtctctggggaaatggcggcagcattgagagaaactgtaagactagacacctcaccaaaggagatggtaccagcagagattaatactaaagaaatgcagtcagatttaaaagaaactggaagaagagccatttctcccagggagaagattctagatgtgattgatgacaccatagaaatggagacaggtctgaaagcaatgggaagagagatttgtctaagggagaagacgccagaggtgattgatgccactgaggaaatagacaaagatttggaagaagctggaagaagagaaatatccccacagaaaaatggcccagaggaggttaagcctctaggtgaagtggagacagatttgaaagcaactggaaatgagagttccccaagggagaagacaccagaggtgactgatgccactgaggaaatagacaaaaatttggaagaaactggaagaagaaaaatatccccaagggaaaatggcccagaggaggtcaagcctgtagatgaaatggagacagatttgaacgcaactggaagagagagttctccaagggagaagacaccagaggtgattgatgctactgaggaaatagatttggaagaaactgaaagagaagtatccccacaggaaaatggactagaggaggtcaagcctctaggtgaaatggagacggatttgaaagcaactggaagagacagtttcccaagggggaagacaccagaggtgattgatgccattgaggaaatagagatagatttggaagaaactgaaagagaaatatccccacaggaaaatggcctagaggaggttaagcctctaggtgaaatgcaaacagatttgaaagcaaccggaagggagatttccccaagggagaagacaccagaggtgattgatgccactgaggaaatagacaaagatctggaagaaactggaagaagagaaatatccccagaggaaaatggcccagaggaggtcaagcctgtagatgaaatggagacagacttgaaaacaactggaagagagggttcctcaagggagaagacacgagaggtgattgatgctgctgaggtaatagagacagatttggaagaaactgaaagagaaatatcgccacaggaaaatggcccagaggaggtcaagcctgtaggtaaaatggagacagatttgaaagaaattagagaagaaatttcccaaagggaaaaggtgctagcagagttcagtgctataagggaaaaggagattgatttgaaagaaactggaaaaagagacattcccatcatggagaaagtatcaggaaagatggctgttgttgaagaaatggaggcagatttgaaagaaactggaaaagaaaattttagagagagaggatctgaagagatctgtgttactgaggaaaaggtggcagaattgaaacaaactggaaaaacagacatttctccaagggaaaacgagctagaggagaccagtacctcaagacaaactgacacacatttaatgcagagcggtagcaatgacttcagtgctgtgccttcactagatattcagaacattagcagtgaagtactgtcgatgatgcatacacctgtagaagaaaaaagaaattctgaaaaagaagtatcaagtcacttcagtcatttcaagatttcttcacagactcatgaatctgataaaacagaagtccaggggattcaatctccagatgttccagagcagttttcagatattaatttaagcaaatctcttcctcaagaacagaagccacttgaaattaaaccagcaccttttgtgaggagccgattcaaaagaccaaaaccaaacttagcaagagcagctttgaagagagagactacagaatcagaaaaatatatatatgagaagaaatcagaaaccaagaaaatggagactattgtgatgcaagaaaataatgaacaaactgatactctcccttctcaacatgatgaagcttccctaatgatatcaagagaaaaagacacattaggtcacaggaatgaggaggctgtgatattgccatgtacacagactgaaaggaacctttcaccttcaaattcttgtgaacctaaagaggagtctcagtcagcaccagtccagaaaaatgactcagttgtttctgtggggactaataatgtaaacactttccagcaagaaatgaaggaaagtgttatccaaactgctcgacaagtaaggggccgacttcagagaccgagaccaaatataagaaagacaggacagaggcaaatagtagacaaaggtgaagccaaaggcataattaaggaaggaagaacgatattaccaaaagatgaaactgaaaagaaagtcttaactgtgtcaaattctcaaattgaaactgaaattgaagttccatcgtccgcagttccagaacacagaatgtatgaaaatcaaagtcaggtggttcttgtagaaaaccttcatgttaacaaaacaaatgaaacaatcagacatgaaaataaaccgtatgttcctagttcagcacaaatgacaagaaggaaattccaaaaggctaagccaaatttgggaagagcacacagtaagaaagaggaaccagttttagaaaaagtcacaacagatcagagcaaggaaggcaagccagaagatcatttgctgcagaaaggagcttccaacacccagctccttctaaaagaaaaagctgagcttctgacatctctggaggtttcagcaagaaaagattgtgtaggttccaaagagtctgctttggcaaaaatagatgcggaattagaagaagttggaccatcaagaagggttggagaggaaactgtaggagataattcaccatcttcagttgttgaagagcaatatctcaataaactaacaagctgtccacaaccgttaaacgaaacaagttactctaaaattgccctggatgggaaaacaactatctcttctacatctgagtatgagagaaatcgtggtgaaaggagaagtcataaaaagttcaaaccaaatgtcaccagaggtcgtggatcaaaacgagttcggggtaagacctctaagaaggaacctagagcttccaaggccatgctggtgactcttcgggcttcccaggaagaagatgatgatgctgacgattttgagtctgactatgaggaagaaagctatcatcttgctcccgaagaagtaaacaaagctccagtatttgtacctgttggtctcagatctcctgaacctgtttctgctcagattgaggaaacaatggaagagcttgaaataactgtgaatgtcccagatgtaggatgcatagctgttgttgaacatgagctaccaaacacagatgtgactactgaagaaatgaaacaagaagaaaatttgagtgtaccgtttgaaatgaccacaagtgaacatatccaagatgaaccaggtaccaatgatggaagcaccgaagctgcaataactttacttacaatgggagatctagtattgcagtcagagatcagtagtgaacagggtgatgtaggagtatgtataattcctcatgttcattcaaaggataaaagccatattccttctagcctagataatgtaaatcacaaaattgttcatgaatgtcaggaactttcttcacctgtcattactacatctcctgcatcatttgaagaaaacaagattgtattggaggaacaaagttccagagaagaaataagtttaatggagaaagtaaaggagaatgctacaccaaccaggaatacaatttctaaagtgaccagtaatttgagaataagaagtaggcttgctaagcctaaaccaaatcttgagaagactttagggaccaacaggcttgatgattatcaggaagtttccagtttgtgtgtaaccaaaggggcagaaatggaaactcaaagagaaacagagaaaaatgcttccaaagcaacagaattggaaaataaaaacctcggaccagttacaacagcagagaataaggatcagagcaaattggcatgtgtacatggtatcaaagggaccagtatttcttcagaagtaaacctaactgaaagaaacgaaaatcaagaagagagctctcaggaggttcacatgttgtcagttgctccagttgcttcctctgagacagggccctgcacacttggtttggataggggtcttggtgaaaattctgttgaagagccccagataaaggactctaaaggagacagtgtgcttacacttcctgtgccagagtatacaccaacaagtattccagaagtccaacaagagaatataatcaatcctcaagacctaacagtgaatctagttgctaatgtacctcaagatggagaagatgaacaagcctttattttaactctggtggaaatcccagccaatgcagtagaagaatttactgatgccactgcacagttcatgccaaaccctttactgccagctcccatattggtcaaatcagtgaataccgaagaaaggggtgacatgagtatttgtttaccagcaacttcagttggtcaagatgccatgggtttatctatttctggaagagataattctaaaaagccgcctgataatttggatcttgtatctaggaagagatttcaatgcaggcttgataaaaatgaccacattcctcctgccaaaaaacgttcactcactttaagagatgactgtcaagaatataccactgaggtgcactcaaaggaattaacaaatgtttttgaggaaacaggggagtctcacaagggacaagatatttttcttacctcaggaagcacactgacaactccagaacctcaaagacagcaagttgaagcagcttttcagagtagaggatctagatctcctgatgcatgcatggacaagaatgtgcctcagttacctcaggatgaaatgattgtgtctgataaggaagaaagaactgatgctgctcctaagtctcagcaaatggatagcagaacatcgtcttctaaagcctcactatccagacctggcagaagacccctgggatttttatctttaatatgctcaaagaatagtttggagtctgatgaacctatgcaagtccatagtaagaaacgcctaaaacctcttatacctggattaagaaagaaattgaaaagatctaatccattcaatgaaagccaggaaaaaaatcgagagtcctctgatctgcttccatctccaagtgttattactactcaatctgagaatattagcagctcagcaactcaggtttcttgtgatcagcccttactgaaagaaggatataaaagtgcccaaaagcgggcccctcaaggggaggcaaccacagtctctgaatatttcttcaatgatatcttcattgaagtggatgaaacagaa

SEQ ID NO: 6374 - DNA, 1278 bp, Homo sapiens
  source 1..1278: mol_type = genomic DNA
atgctggagaattatggggctgtggcttccctggcagcatttccatttcccaaaccggctctgatttcccagctggagcgaggggaaacaccctggtgctcggttcctcggggagctctggatggagaggccccaaggggcatctcctcaggatatccatttctaaagcctgctgggatttcccatcctgagcaggtggaagagccattaaacctgaaactgcaaggagagggtccaagcctgatttgtccggagggtgtgttgaagaggaagaaagaagattttattctgaaggaggaaattattgaggaagcacaggacctcatggtcctatcaagtggaccccagtggtgtggatcccaggaattatggtttgggaaaacctgtgaagagaaaagcaggttagggagatggcctggttacctcaatgggggacgtatggaaagttctacaaatgatattatagaagtgattgtcaaggatgagatgatctcagtagaagagagttcagggaatactgatgtcaataacctccttggtatacatcacaaaattctaaatgagcaaatattctatatatgtgaggaatgcggcaagtgttttgatcaaaatgaggactttgatcaacaccagaaaactcataatggagagaaggtctatggatgtaaggaatgtgggaaggctttcagttttcgatcacattgcattgcacatcagagaattcacagtggggtgaaaccctatgaatgtcaagaatgtgctaaggcctttgtttggaagtcaaacctgattcgtcaccagagaatacatactggagagaaaccctttgaatgtaaggaatgtgggaagggctttagtcagaacacaagccttacgcaacatcaacggatccacactggtgagaaaccatacacatgtaaggaatgtgggaaaagctttactcgaaacccagcccttcttcgacatcagagaatgcacactggggagaagccttacgaatgtaaggactgtgggaagggcttcatgtggaactcagatctttctcagcaccagagggtccacactggggacaagcctcatgaatgtactgactgtgggaaaagcttcttttgcaaggcacatcttattcgacatcaaagaatccatactggggaaagaccctataaatgtaatgactgtgggaaggccttcagtcagaattctgtcttaattaagcaccagaggcgccatgctagagacaaaccctataactgtcagatctctcaccttcttgaacat

SEQ ID NO: 6375 - DNA, 1356 bp, Homo sapiens
  source 1..1356: mol_type = genomic DNA
atggcggccgtggcgctggcgagcgggacacgcctcggccttgtcctcgagctgctcccgggacagcccgcgctgccccgggcgcgccgggagtcagtgaccttcgaggatgtggccgtctacttctctgagaacgaatggatcggcctgggccctgctcagagagccctgtacagggatgtgatgctggagaattatggggctgtggcttccctggcatttccatttcccaaaccggctctgatttcccagctggagcgaggggaaacaccctggtgctcggttcctcggggagctctggatggagaggccccaaggggcatctcctcagagggtgtgttgaagaggaagaaagaagattttattctgaaggaggaaattattgaggaagcacaggacctcatggtcctatcaagtggaccccagtggtgtggatcccaggaattatggtttgggaaaacctgtgaagagaaaagcaggttagggagatggcctggttacctcaatgggggacgtatggaaagttctacaaatgatattatagaagtgattgtcaaggatgagatgatctcagtagaagagagttcagggaatactgatgtcaataacctccttggtatacatcacaaaattctaaatgagcaaatattctatatatgtgaggaatgcggcaagtgttttgatcaaaatgaggactttgatcaacaccagaaaactcataatggagagaaggtctatggatgtaaggaatgtgggaaggctttcagttttcgatcacattgcattgcacatcagagaattcacagtggggtgaaaccctatgaatgtcaagaatgtgctaaggcctttgtttggaagtcaaacctgattcgtcaccagagaatacatactggagagaaaccctttgaatgtaaggaatgtgggaagggctttagtcagaacacaagccttacgcaacatcaacggatccacactggtgagaaaccatacacatgtaaggaatgtgggaaaagctttactcgaaacccagcccttcttcgacatcagagaatgcacactggggagaagccttacgaatgtaaggactgtgggaagggcttcatgtggaactcagatctttctcagcaccagagggtccacactggggacaagcctcatgaatgtactgactgtgggaaaagcttcttttgcaaggcacatcttattcgacatcaaagaatccatactggggaaagaccctataaatgtaatgactgtgggaaggccttcagtcagaattctgtcttaattaagcaccagaggcgccatgctagagacaaaccctataactgtcagatctctcaccttcttgaacat

SEQ ID NO: 6376 - DNA, 2787 bp, Homo sapiens
  source 1..2787: mol_type = genomic DNA
atgatagataagaaagccatgtacaaagcaggaatggtacagagagtccaaaatgaggtgaaaatacattgccaattgaaacatccttctatcttggagctttataactattttgaagatagcaattatgtgtatctggtattagaaatgtgccataatggagaaatgaacaggtatctaaagaatagagtgaaacccttctcagaaaatgaagctcgacacttcatgcaccagatcatcacagggatgttgtatcttcattctcatggtatactacaccgggacctcacactttctaacctcctactgactcgtaatatgaacatcaagattgctgattttgggctggcaactcaactgaaaatgccacatgaaaagcactatacattatgtggaactcctaactacatttcaccagaaattgccactcgaagtgcacatggccttgaatctgatgtttggtccctgggctgtatgttttatacattacttatcgggagaccacccttcgacactgacacagtcaagaacacattaaataaagtagtattggcagattatgaaatgccatcttttttgtcaatagaggccaaggaccttattcaccagttacttcgtagaaatccagcagatcgtttaagtctgtcttcagtattggaccatccttttatgtcccgaaattcttcaacaaaaagtaaagatttaggaactgtggaagactcaattgatagtgggcatgccacaatttctactgcaattacagcttcttccagtaccagtataagtggtagtttatttgacaaaagaagacttttgattggtcagccactcccaaataaaatgactgtatttccaaagaataaaagttcaactgatttttcttcttcaggagatggaaacagtttttatactcagtggggaaatcaagaaaccagtaatagtggaaggggaagagtaattcaagatgcagaagaaaggccacattctcgataccttcgtagagcttattcctctgatagatctggcacttctaatagtcagtctcaagcaaaaacatatacaatggaacgatgtcactcagcagaaatgctttcagtgtccaaaagatcaggaggaggtgaaaatgaagagaggtactcacccacagacaacaatgccaacatttttaacttctttaaagaaaagacatccagtagttctggatcttttgaaagacctgataacaatcaagcactctccaatcatctttgtccaggaaaaactccttttccatttgcagacccgacacctcagactgaaaccgtacaacagtggtttgggaatctgcaaataaatgctcatttaagaaaaactactgaatatgacagcatcagcccaaaccgggacttccagggccatccagatttgcagaaggacacatcaaaaaatgcctggactgatacaaaagtcaaaaagaactctgatgcttctgataatgcacattctgtaaaacagcaaaataccatgaaatatatgactgcacttcacagtaaacctgagataatccaacaagaatgtgtttttggctcagatcctctttctgaacagagcaagactaggggtatggagccaccatggggttatcagaatcgtacattaagaagcattacatctccgttggttgctcacaggttaaaaccaatcagacagaaaaccaaaaaggctgtggtgagcatacttgattcagaggaggtgtgtgtggagcttgtaaaggagtatgcatctcaagaatatgtgaaagaagttcttcagatatctagtgatggaaatacgatcactatttattatccaaatggtggtagaggttttcctcttgctgatagaccaccctcacctactgacaacatcagtaggtacagctttgacaatttaccagaaaaatactggcgaaaatatcaatatgcttccaggtttgtacagcttgtaagatctaaatctcccaaaatcacttattttacaagatatgctaaatgcattttgatggagaattctcctggtgctgattttgaggtttggttttatgatggggtaaaaatacacaaaacagaagatttcattcaggtgattgaaaagacagggaagtcttacactttaaaaagtgaaagtgaagttaatagcttgaaagaggagataaaaatgtatatggaccatgctaatgagggtcatcgtatttgtttagcactggaatccataatttcagaagaggaaaggaaaactaggagtgctccctttttcccaataatcataggaagaaaacctggtagtactagttcacctaaggccttatcacctcctccttctgtggattcaaattacccaacgagagagagagcatctttcaacagaatggtcatgcatagtgctgcttctccaacacaggcaccaatccttaatccctctatggttacaaatgaaggacttggtcttacaactacagcttctggaacagacatctcttctaatagtctaaaagattgtcttcctaaatcagcacaacttttgaaatctgtttttgtgaaaaatgttggttgggctacacagttaactagtggagctgtgtgggttcagtttaatgatgggtcccagttggttgtgcaggcaggagtgtcttctatcagttatacctcaccaaatggtcaaacaactaggtatggagaaaatgaaaaattaccagactacatcaaacagaaattacagtgtctgtcttccatccttttgatgttttctaatccgactcctaattttcat

SEQ ID NO: 6377 - DNA, 2910 bp, Homo sapiens
  source 1..2910: mol_type = genomic DNA
atggcgacctgcatcggggagaagatcgaggattttaaagttggaaatctgcttggtaaaggatcatttgctggtgtctacagagctgagtccattcacactggtttggaagttgcaatcaaaatgatagataagaaagccatgtacaaagcaggaatggtacagagagtccaaaatgaggtgaaaatacattgccaattgaaacatccttctatcttggagctttataactattttgaagatagcaattatgtgtatctggtattagaaatgtgccataatggagaaatgaacaggtatctaaagaatagagtgaaacccttctcagaaaatgaagctcgacacttcatgcaccagatcatcacagggatgttgtatcttcattctcatggtatactacaccgggacctcacactttctaacctcctactgactcgtaatatgaacatcaagattgctgattttgggctggcaactcaactgaaaatgccacatgaaaagcactatacattatgtggaactcctaactacatttcaccagaaattgccactcgaagtgcacatggccttgaatctgatgtttggtccctgggctgtatgttttatacattacttatcgggagaccacccttcgacactgacacagtcaagaacacattaaataaagtagtattggcagattatgaaatgccatcttttttgtcaatagaggccaaggaccttattcaccagttacttcgtagaaatccagcagatcgtttaagtctgtcttcagtattggaccatccttttatgtcccgaaattcttcaacaaaaagtaaagatttaggaactgtggaagactcaattgatagtgggcatgccacaatttctactgcaattacagcttcttccagtaccagtataagtggtagtttatttgacaaaagaagacttttgattggtcagccactcccaaataaaatgactgtatttccaaagaataaaagttcaactgatttttcttcttcaggagatggaaacagtttttatactcagtggggaaatcaagaaaccagtaatagtggaaggggaagagtaattcaagatgcagaagaaaggccacattctcgataccttcgtagagcttattcctctgatagatctggcacttctaatagtcagtctcaagcaaaaacatatacaatggaacgatgtcactcagcagaaatgctttcagtgtccaaaagatcaggaggaggtgaaaatgaagagaggtactcacccacagacaacaatgccaacatttttaacttctttaaagaaaagacatccagtagttctggatcttttgaaagacctgataacaatcaagcactctccaatcatctttgtccaggaaaaactccttttccatttgcagacccgacacctcagactgaaaccgtacaacagtggtttgggaatctgcaaataaatgctcatttaagaaaaactactgaatatgacagcatcagcccaaaccgggacttccagggccatccagatttgcagaaggacacatcaaaaaatgcctggactgatacaaaagtcaaaaagaactctgatgcttctgataatgcacattctgtaaaacagcaaaataccatgaaatatatgactgcacttcacagtaaacctgagataatccaacaagaatgtgtttttggctcagatcctctttctgaacagagcaagactaggggtatggagccaccatggggttatcagaatcgtacattaagaagcattacatctccgttggttgctcacaggttaaaaccaatcagacagaaaaccaaaaaggctgtggtgagcatacttgattcagaggaggtgtgtgtggagcttgtaaaggagtatgcatctcaagaatatgtgaaagaagttcttcagatatctagtgatggaaatacgatcactatttattatccaaatggtggtagaggttttcctcttgctgatagaccaccctcacctactgacaacatcagtaggtacagctttgacaatttaccagaaaaatactggcgaaaatatcaatatgcttccaggtttgtacagcttgtaagatctaaatctcccaaaatcacttattttacaagatatgctaaatgcattttgatggagaattctcctggtgctgattttgaggtttggttttatgatggggtaaaaatacacaaaacagaagatttcattcaggtgattgaaaagacagggaagtcttacactttaaaaagtgaaagtgaagttaatagcttgaaagaggagataaaaatgtatatggaccatgctaatgagggtcatcgtatttgtttagcactggaatccataatttcagaagaggaaaggaaaactaggagtgctccctttttcccaataatcataggaagaaaacctggtagtactagttcacctaaggccttatcacctcctccttctgtggattcaaattacccaacgagagagagagcatctttcaacagaatggtcatgcatagtgctgcttctccaacacaggcaccaatccttaatccctctatggttacaaatgaaggacttggtcttacaactacagcttctggaacagacatctcttctaatagtctaaaagattgtcttcctaaatcagcacaacttttgaaatctgtttttgtgaaaaatgttggttgggctacacagttaactagtggagctgtgtgggttcagtttaatgatgggtcccagttggttgtgcaggcaggagtgtcttctatcagttatacctcaccaaatggtcaaacaactaggtatggagaaaatgaaaaattaccagactacatcaaacagaaattacagtgtctgtcttccatccttttgatgttttctaatccgactcctaattttcat

SEQ ID NO: 6378 - DNA, 2814 bp, Homo sapiens
  source 1..2814: mol_type = genomic DNA
atggcgacctgcatcggggagaagatcgaggattttaaagttggaaatctgcttggtaaaggatcatttgctggtgtctacagagctgagtccattcacactggtttggaagttgcaatcaaaatgctttataactattttgaagatagcaattatgtgtatctggtattagaaatgtgccataatggagaaatgaacaggtatctaaagaatagagtgaaacccttctcagaaaatgaagctcgacacttcatgcaccagatcatcacagggatgttgtatcttcattctcatggtatactacaccgggacctcacactttctaacctcctactgactcgtaatatgaacatcaagattgctgattttgggctggcaactcaactgaaaatgccacatgaaaagcactatacattatgtggaactcctaactacatttcaccagaaattgccactcgaagtgcacatggccttgaatctgatgtttggtccctgggctgtatgttttatacattacttatcgggagaccacccttcgacactgacacagtcaagaacacattaaataaagtagtattggcagattatgaaatgccatcttttttgtcaatagaggccaaggaccttattcaccagttacttcgtagaaatccagcagatcgtttaagtctgtcttcagtattggaccatccttttatgtcccgaaattcttcaacaaaaagtaaagatttaggaactgtggaagactcaattgatagtgggcatgccacaatttctactgcaattacagcttcttccagtaccagtataagtggtagtttatttgacaaaagaagacttttgattggtcagccactcccaaataaaatgactgtatttccaaagaataaaagttcaactgatttttcttcttcaggagatggaaacagtttttatactcagtggggaaatcaagaaaccagtaatagtggaaggggaagagtaattcaagatgcagaagaaaggccacattctcgataccttcgtagagcttattcctctgatagatctggcacttctaatagtcagtctcaagcaaaaacatatacaatggaacgatgtcactcagcagaaatgctttcagtgtccaaaagatcaggaggaggtgaaaatgaagagaggtactcacccacagacaacaatgccaacatttttaacttctttaaagaaaagacatccagtagttctggatcttttgaaagacctgataacaatcaagcactctccaatcatctttgtccaggaaaaactccttttccatttgcagacccgacacctcagactgaaaccgtacaacagtggtttgggaatctgcaaataaatgctcatttaagaaaaactactgaatatgacagcatcagcccaaaccgggacttccagggccatccagatttgcagaaggacacatcaaaaaatgcctggactgatacaaaagtcaaaaagaactctgatgcttctgataatgcacattctgtaaaacagcaaaataccatgaaatatatgactgcacttcacagtaaacctgagataatccaacaagaatgtgtttttggctcagatcctctttctgaacagagcaagactaggggtatggagccaccatggggttatcagaatcgtacattaagaagcattacatctccgttggttgctcacaggttaaaaccaatcagacagaaaaccaaaaaggctgtggtgagcatacttgattcagaggaggtgtgtgtggagcttgtaaaggagtatgcatctcaagaatatgtgaaagaagttcttcagatatctagtgatggaaatacgatcactatttattatccaaatggtggtagaggttttcctcttgctgatagaccaccctcacctactgacaacatcagtaggtacagctttgacaatttaccagaaaaatactggcgaaaatatcaatatgcttccaggtttgtacagcttgtaagatctaaatctcccaaaatcacttattttacaagatatgctaaatgcattttgatggagaattctcctggtgctgattttgaggtttggttttatgatggggtaaaaatacacaaaacagaagatttcattcaggtgattgaaaagacagggaagtcttacactttaaaaagtgaaagtgaagttaatagcttgaaagaggagataaaaatgtatatggaccatgctaatgagggtcatcgtatttgtttagcactggaatccataatttcagaagaggaaaggaaaactaggagtgctccctttttcccaataatcataggaagaaaacctggtagtactagttcacctaaggccttatcacctcctccttctgtggattcaaattacccaacgagagagagagcatctttcaacagaatggtcatgcatagtgctgcttctccaacacaggcaccaatccttaatccctctatggttacaaatgaaggacttggtcttacaactacagcttctggaacagacatctcttctaatagtctaaaagattgtcttcctaaatcagcacaacttttgaaatctgtttttgtgaaaaatgttggttgggctacacagttaactagtggagctgtgtgggttcagtttaatgatgggtcccagttggttgtgcaggcaggagtgtcttctatcagttatacctcaccaaatggtcaaacaactaggtatggagaaaatgaaaaattaccagactacatcaaacagaaattacagtgtctgtcttccatccttttgatgttttctaatccgactcctaattttcat

SEQ ID NO: 6379 - DNA, 2034 bp, Homo sapiens
  source 1..2034: mol_type = genomic DNA
atggctcttcctcagggacagttgacattcaaggatgtggccatagaattctctcaggaggagtggacatgcctggaccctgctcagaagactttgtacagggacgtcatgttggagaattataggaacctggtctccctggatatctcttgtaaatgtgtaaacacggatttgccaccaaaggggaagaacaatatgggagaagcgttctacacggtgaagttggagagacttgaaagctgtgacactgtaggcttgtccttccaggaagttcagaaaaatacatacgactttgagtgtcagtggaaagatgatgaaggaaattataaaacagtacttatgttgcaaaaagaaaatctccctggtagaagagctcaacgtgatagaagggctgcaggaaacaggcatattgaaaatcagcttggagtaagctttcagtcacatctccctgaactgcagcaatttcaacatgaagggaaaatttatgaatacaatcaagttgagaagtctcctaataatcgaggaaaacattataaatgtgatgaatgtggcaaggtcttcagtcaaaactcacggctaacaagtcataagagaattcatactggagagaagccttaccagtgtaataagtgtggcaaagcctttactgttcgttcaaacctaacaatccatcaggtcatccatactggagaaaaaccttacaaatgtaatgaatgtggaaaggtcttcagtcaaccttcaaaccttgcaggtcatcagagaattcatactggagagaaaccttacaagtgtaatgagtgtggcaaagcctttagagcacattcaaaactaactacacatcaggtcatccatactggagaaaaaccttacaaatgtaaggaatgtggcaagtgcttcactcaaaattcacaccttgcaagtcatcgaagaattcatactggggagaagccttacaagtgtaatgagtgtggcaaagcctttagtgttcgctcaagcctgactacccatcagacaatccacactggagaaaaaccttacaaatgtaatgaatgtggcaaggtcttcaggcacaattcataccttgcaaagcatcggcgaattcatactggtgagaaaccttacaagtgtaatgagtgtgggaaagccttcagtatgcattcaaacttaactaagcatcagatcatccataccggagaaaagcctttcaaatgtaatgaatgcgtcaaggttttcactcagtattcacacttagcaaatcatcgaagaattcatactggagagaaaccttacaggtgtgatgagtgtggcaaagcctttagtgtgcgatcaagcctaactacccatcaggcaattcatactggagaaaagccttacaaatgtaatgactgcggtaaggtcttcacacaaaattcacaccttgcaagtcatcggggaattcattctggagagaaaccttacaagtgtgatgaatgtggtaaagccttcagtcaaacatcacaacttgcaaggcattggagagttcatactggagaaaaaccttacaagtgtaatgagtgtggcaaagcctttagtgttcattcaagcctaactatacatcagacaatacatactggacaaaaaccatacaaatgtaatgattgcggcaaggtcttcagacacaattcgtaccttgcaattcatcagagaattcacactggtgagaaaccttataagtgtaatgagtgcggcaaagcatttagtgtacattcaaacctagctacccatcaggtcatccatactggagaaaaaccttacaaatgtaatgaatgtggcaaggtcttcactcaaaattcacatcttgcaaatcatagaagaattcacactggagaaaaaccttataggtgtaatgagtgtgggaaagccttcagtgttcgttcaaccctaactacccatatggcagtccatactggagacaaaccttacaaatgtaaccaatgtggcaaggtctttactcaaaattcaaaccttgcaaaacatcgaagaattcatagtgga

SEQ ID NO: 6380 - DNA, 1830 bp, Homo sapiens
  source 1..1830: mol_type = genomic DNA
atgccttctgcacgggggaaatccaaatccaaggcacctataacatttggggacttagccatctacttctcccaggaggagtgggaatggctgagccccattcagaaggatttgtatgaagatgtcatgttggagaattaccggaacctggtctcgcttggtctttcctttcggagaccaaatgtgatcaccttattggagaaagggaaagcaccctggatggtagagccagtaagaagacgccgggctcctgactcggggtctaaatgtgagaccaagaagttacctccaaatcaatgcaacaaatctgggcaaagcatctgccagaaactagtttctgcacaacaaaaagctcctacacgaaagagtggctgcaacaaaaattcagtcctagtaaaacctaagaaagggcattcagggaagaaacctttaaaatgtaatgactgtggtaaaacctttagtcgaagcttctctcttaaacttcatcagaacattcatacaggagagaagccttttgaatgcagtaattgtagaaaagctttcagacagatctcatccatcctacttcatcagagaattcacagtggaaagaaaagccatgaatgcaataaatgtggggaaagcttcaatcaaagaacaacccttattctacatatgagaattcatgatggaaaggaaattcttgactgtgggaaggccttgagtcaatgtcagtctttcaatatacatcagaaaattcatgttgttgggaatgtctgccagtgcagaaagtgcggaaaagccttcaatcagatgtcatcccttttacttcataagaaaattcacaatggaaagaaaacacataaatataataaatgtgggagaggcttcaaaaagaaatcagtctttgttgtacataaaagaattcatgctggagagaaaatccctgaaaatgcgaaggccttaagtcagagtctacagcaaagaagtcaccatttagagaatccttttaaatgcagaaaatgtgggaaattatttaataggatttcacccctgatgcttcaccagagaattcacacttcagagaaaccgtacaaatgtgataaatgtgacaagttcttcaggcggctttcaacccttattctgcatctaagaattcataatggagaaaaactatacagatgcaataaatgtgagaaggtctgcaatcggcattcatcccttattcaacatcagaaagttcatacaaagaaaaagaaactatttgagtgtaaggaatgtgggaagatgttttctggaactgcaaaccttaaaatacatcagaatattcattctgaagagaaacctttcaaatgcaataaatgtagtaaagttttcggccgccaatcatttcttattgaacatcaaagaattcatactggagaaaaaccctaccagtgtgaggaatgtggaaaagccttcagccaccgaatatctctcacacgacataagagaattcatactgaagatagaccctatgaatgtgatcagtgtgggaaggccttcagccagagtgcacacctcgcccaacatgaaagaattcacactggagagaagccatatacatgcaaaacatgtggtaaggcctttagtcagcgcacatctcttattctacatgaaagaagtcatactggagagaaaccctatgaatgtaatgaatgtgggaaggcatttagcagtggctcagaccttattcgacatcagagaagtcattcttcagagaaaccctatgaatgtagtaaatgtgggaaggcatatagtcggagttcatccctgattcgacatcagaatacacattctgaagaaaaagcc

SEQ ID NO: 6381 - DNA, 2448 bp, Homo sapiens
  source 1..2448: mol_type = genomic DNA
atgctggaaaactatttcaacttgatctcagtgggatgtcaagttcccaaaccagaagtcatcttcagcttggaacaagaagagccatgtatgttggatggtgagatccccagtcagagccgtccagatggggacattggttttggacctttacaacagaggatgtctgaagaagtttctttccagtctgagattaatattaatctcttcacaagagatgacccatattccattttagaagaattgtggaaagacgatgaacacacaagaaaatgtggagaaaaccagaacaaacctttaagtcgtgttgtcttcattaacaagaaaacactagctaatgacagcatctttgaatataaggacattggggaaatagttcatgtaaacacacacctggtttcctcaagaaaaagaccccataactgtaactcgtgtggaaagaatttggagcctatcataaccttatataatagaaacaatgcaacagaaaattctgataagactattggagatggtgatattttcactcatttgaattctcatacagaagtgactgcttgtgaatgtaaccaatgtgggaaacctctgcatcataagcaagctctcattcaacaacagaaaattcatactagagagagcctctatttgttttctgactacgtaaatgttttctccccgaagtcacatgcctttgcacatgagagtatttgtgctgaagaaaagcagcatgaatgccatgaatgtgaggcagtcttcactcagaagtcccagcttgatggcagtcagagggtttatgcaggaatatgcactgaatatgagaaggatttttccctcaagtcaaaccgtcagaaaactccttatgaggggaattactataaatgcagtgactatggaagagcctttatccagaagtcagatctgttcagatgccagagaattcattctggagaaaaaccttatgagtacagtgaatgtgagaaaaacctccctcagaattcaaaccttaatatacataaaaaaattcatactggagggaaacactttgaatgtactgaatgtggaaaagctttcacaaggaaatcaacactaagtatgcatcagaaaatccatacaggagaaaaaccttatgtatgtactgaatgtgggaaggcctttatccggaagtcacattttatcacacatgaaagaattcatactggagaaaaaccctatgaatgcagtgactgtgggaaatcctttattaaaaaatcacaactccatgtgcatcagcgaattcacacaggagagaatccctttatatgttcagaatgtgggaaggtcttcactcacaagacaaatctcattatacaccagaaaattcatacaggagaaagaccctatatatgtactgtgtgtggtaaggcctttactgacaggtcaaatctcattaagcaccaaaaaattcatactggagagaaaccttataaatgcagcgactgtggaaaatcattcacctggaagtctcggctcaggatacatcagaagtgtcatactggagagagacattatgaatgcagtgaatgtgggaaagcattcattcagaagtcaacattaagtatgcaccagagaattcatagaggggaaaaaccatatgtttgcactgaatgtggtaaggccttcttccacaaatcccattttattacacatgagagaattcatactggagagaaaccctatgaatgcagtatttgtgggaaatccttcactaagaaatcacagctccacgtacatcagcagattcacacaggagagaaaccctataggtgtgctgaatgtggaaaggcttttactgacagatcaaatctctttacacaccagaaaattcacactggagagaaaccttataaatgtagtgactgtgggaaagccttcactaggaagtcaggtctccatatacatcagcaatcccatactggagaaaggcattatgagtgcagtgaatgtgggaaagcctttgcaagaaaatcaacactaattatgcatcagagaattcatacaggagagaaaccctatatttgtaatgaatgtgggaaatccttcatccagaagtcacacttaaatagacacaggagaattcatactggagagaaaccctatgaatgcagtgactgtggcaagtctttcattaagaaatcacaactccatgagcatcatcgaattcacacaggagagaaaccatatatatgtgctgagtgtggaaaggccttcaccatcagatcaaatcttattaaacaccagaaaattcatactaaacagaaaccctataagtgcagtgacttggggaaagccttaaactggaagccacaactcagtatgcctcagaaatctgacaatggggaagtagagtgctccatgccacaattatggtgtggggactcagaaggtgaccaaggccaactttcttctatc

SEQ ID NO: 6382 - DNA, 2562 bp, Homo sapiens
  source 1..2562: mol_type = genomic DNA
atgtctgtcctgagccttccggaatcagtgtcattcaaggacgtaactgtagacttcagtagggatgagtggcaacaattagaccttgctcagaaaagcctgtacagagaagtgatgctggaaaactatttcaacttgatctcagtgggatgtcaagttcccaaaccagaagtcatcttcagcttggaacaagaagagccatgtatgttggatggtgagatccccagtcagagccgtccagatggggacattggttttggacctttacaacagaggatgtctgaagaagtttctttccagtctgagattaatattaatctcttcacaagagatgacccatattccattttagaagaattgtggaaagacgatgaacacacaagaaaatgtggagaaaaccagaacaaacctttaagtcgtgttgtcttcattaacaagaaaacactagctaatgacagcatctttgaatataaggacattggggaaatagttcatgtaaacacacacctggtttcctcaagaaaaagaccccataactgtaactcgtgtggaaagaatttggagcctatcataaccttatataatagaaacaatgcaacagaaaattctgataagactattggagatggtgatattttcactcatttgaattctcatacagaagtgactgcttgtgaatgtaaccaatgtgggaaacctctgcatcataagcaagctctcattcaacaacagaaaattcatactagagagagcctctatttgttttctgactacgtaaatgttttctccccgaagtcacatgcctttgcacatgagagtatttgtgctgaagaaaagcagcatgaatgccatgaatgtgaggcagtcttcactcagaagtcccagcttgatggcagtcagagggtttatgcaggaatatgcactgaatatgagaaggatttttccctcaagtcaaaccgtcagaaaactccttatgaggggaattactataaatgcagtgactatggaagagcctttatccagaagtcagatctgttcagatgccagagaattcattctggagaaaaaccttatgagtacagtgaatgtgagaaaaacctccctcagaattcaaaccttaatatacataaaaaaattcatactggagggaaacactttgaatgtactgaatgtggaaaagctttcacaaggaaatcaacactaagtatgcatcagaaaatccatacaggagaaaaaccttatgtatgtactgaatgtgggaaggcctttatccggaagtcacattttatcacacatgaaagaattcatactggagaaaaaccctatgaatgcagtgactgtgggaaatcctttattaaaaaatcacaactccatgtgcatcagcgaattcacacaggagagaatccctttatatgttcagaatgtgggaaggtcttcactcacaagacaaatctcattatacaccagaaaattcatacaggagaaagaccctatatatgtactgtgtgtggtaaggcctttactgacaggtcaaatctcattaagcaccaaaaaattcatactggagagaaaccttataaatgcagcgactgtggaaaatcattcacctggaagtctcggctcaggatacatcagaagtgtcatactggagagagacattatgaatgcagtgaatgtgggaaagcattcattcagaagtcaacattaagtatgcaccagagaattcatagaggggaaaaaccatatgtttgcactgaatgtggtaaggccttcttccacaaatcccattttattacacatgagagaattcatactggagagaaaccctatgaatgcagtatttgtgggaaatccttcactaagaaatcacagctccacgtacatcagcagattcacacaggagagaaaccctataggtgtgctgaatgtggaaaggcttttactgacagatcaaatctctttacacaccagaaaattcacactggagagaaaccttataaatgtagtgactgtgggaaagccttcactaggaagtcaggtctccatatacatcagcaatcccatactggagaaaggcattatgagtgcagtgaatgtgggaaagcctttgcaagaaaatcaacactaattatgcatcagagaattcatacaggagagaaaccctatatttgtaatgaatgtgggaaatccttcatccagaagtcacacttaaatagacacaggagaattcatactggagagaaaccctatgaatgcagtgactgtggcaagtctttcattaagaaatcacaactccatgagcatcatcgaattcacacaggagagaaaccatatatatgtgctgagtgtggaaaggccttcaccatcagatcaaatcttattaaacaccagaaaattcatactaaacagaaaccctataagtgcagtgacttggggaaagccttaaactggaagccacaactcagtatgcctcagaaatctgacaatggggaagtagagtgctccatgccacaattatggtgtggggactcagaaggtgaccaaggccaactttcttctatc

SEQ ID NO: 6383 - DNA, 1131 bp, Homo sapiens
  source 1..1131: mol_type = genomic DNA
atgagctcccctggcaccgagagcgcgggaaagagcctgcagtaccgagtggaccacctgctgagcgccgtggagaatgagctgcaggcgggcagcgagaagggcgaccccacagagcgcgaactgcgcgtgggcctggaggagagcgagctgtggctgcgcttcaaggagctcaccaatgagatgatcgtgaccaagaacggcaggaggatgtttccggtgctgaaggtgaacgtgtctggcctggaccccaacgccatgtactccttcctgctggacttcgtggcggcggacaaccaccgctggaagtacgtgaacggggaatgggtgccggggggcaagccggagccgcaggcgcccagctgcgtctacatccaccccgactcgcccaacttcggggcccactggatgaaggctcccgtctccttcagcaaagtcaagctcaccaacaagctcaacggagggggccagatcatgctgaactccttgcataagtatgagcctcgaatccacatagtgagagttgggggtccacagcgcatgatcaccagccactgcttccctgagacccagttcatagcggtgactgcttatcagaacgaggagatcacagctcttaaaattaagtacaatccatttgcaaaagctttccttgatgcaaaggaaagaagtgatcacaaagagatgatggaggaacccggagacagccagcaacctgggtactcccaatcctattctgacaactcacctgcatgtttatccatgctgcaatcccatgacaattggtccagccttggaatgcctgcccatcccagcatgctccccgtgagccacaatgccagcccacctaccagctccagtcagtaccccagcctgtggtctgtgagcaacggcgccgtcaccccgggctcccaggcagcagccgtgtccaacgggctgggggcccagttcttccggggctcccccgcgcactacacacccctcacccatccggtctcggcgccctcttcctcgggatccccactgtacgaaggggcggccgcggccacagacatcgtggacagccagtacgacgccgcagcccaaggccgcctcatagcctcatggacacctgtgtcgccaccttccatg

SEQ ID NO: 6384 - DNA, 1305 bp, Homo sapiens
  source 1..1305: mol_type = genomic DNA
atgagctcccctggcaccgagagcgcgggaaagagcctgcagtaccgagtggaccacctgctgagcgccgtggagaatgagctgcaggcgggcagcgagaagggcgaccccacagagcgcgaactgcgcgtgggcctggaggagagcgagctgtggctgcgcttcaaggagctcaccaatgagatgatcgtgaccaagaacggcaggaggatgtttccggtgctgaaggtgaacgtgtctggcctggaccccaacgccatgtactccttcctgctggacttcgtggcggcggacaaccaccgctggaagtacgtgaacggggaatgggtgccggggggcaagccggagccgcaggcgcccagctgcgtctacatccaccccgactcgcccaacttcggggcccactggatgaaggctcccgtctccttcagcaaagtcaagctcaccaacaagctcaacggagggggccagatcatgctgaactccttgcataagtatgagcctcgaatccacatagtgagagttgggggtccacagcgcatgatcaccagccactgcttccctgagacccagttcatagcggtgactgcttatcagaacgaggagatcacagctcttaaaattaagtacaatccatttgcaaaagctttccttgatgcaaaggaaagaagtgatcacaaagagatgatggaggaacccggagacagccagcaacctgggtactcccaatgggggtggcttcttcctggaaccagcaccctgtgtccacctgcaaatcctcatcctcagtttggaggtgccctctccctcccctccacgcacagctgtgacaggtacccaaccctgaggagccaccggtcctcaccctaccccagcccctatgctcatcggaacaattctccaacctattctgacaactcacctgcatgtttatccatgctgcaatcccatgacaattggtccagccttggaatgcctgcccatcccagcatgctccccgtgagccacaatgccagcccacctaccagctccagtcagtaccccagcctgtggtctgtgagcaacggcgccgtcaccccgggctcccaggcagcagccgtgtccaacgggctgggggcccagttcttccggggctcccccgcgcactacacacccctcacccatccggtctcggcgccctcttcctcgggatccccactgtacgaaggggcggccgcggccacagacatcgtggacagccagtacgacgccgcagcccaaggccgcctcatagcctcatggacacctgtgtcgccaccttccatg

SEQ ID NO: 6385 - DNA, 6240 bp, Homo sapiens
  source 1..6240: mol_type = genomic DNA
atgagctcctccccctcccgcagtgccgccgacatctacatccgggagtatttccacagccacgtcagcggcggccaccccgaggccactcctctccgtgtgatgtacacggaccggccgctgagccagacggacccagtcacgctgcagtactgttgcctgaccgacgaccgccaggctttccgcccgcccacacgggcagagctggcgcggcaccgcgtggtggtcaccaccacctcccaggcccgtgagctcagggtgccggtcggcttcttctcccacattctcatcgatgaggcggcccagatgctggagtgcgaggccctcaccccgctggcctatgcctcgcacggcacccgcctcgtgctggcgggcgaccacatgcaggtcacaccccggctgttcagtgtggccagggcccgggcggccgagcacacgctgctgcaccgcctcttcctgtgctaccagcaggagactcacgaggtggcgcggcagagccgcctggtcttccacgagaactaccgctgcacggacgccattgtcagcttcatctcgcggcacttctacgtggccaagggcaaccccatccacgccaggggcaaggttccgccccacccccggcactacccgctcatgttctgccacgtggcgggcagcccagaccgggacatgtccatggcgtcctggctgaatctggctgagattgcgcaggtcgtcgagaaggtgcaggaggcctacaacacctggcccagctgctggggcggccgcgagcagaggtgcatctgtgtcgtttcccacggtgcccaggtcagtgcactgaggcaggagctgaggaggcgggacctaggccaggtgtctgtcggcagttttgagatcctgccagggcggcagttccgggtcgtggtgctcagcactgtgcacacctgccagagcctgctcagccctggggcactggcccctgagttcttcaccgacgcccgcgtgctcaacaccgtcctgacccgcgcccagtcccagctggtggtagtgggggacgccgtggccctctgctccttcggggcctgcggcaagctctgggagagcttcatccgtgagtgcgtggagcggcacagtgtctgccccgagggcctgtccatggagcaggtcgagcagggtgtggcgcagagacggcgctggcctccccgaggcacacaggctggggcagcggggaactgggaggctgccccagagccagtaggggacctggccgaggagcaggcggctgtggtgacggccatggtgaaggcagagccgggagatgaggctctgagcccagcatcccgtgacatcacggcaaccacagcgcagacggaggctgcggcagcaccagcaggagacgcagtgaaggaagacgtggtgcccggggcctgtgcggcaggagcggctgctgcagcgggcgtggagtccacggaggctgaggatgcagaggctgacttctggccgtgggacggggagctcaacgctgacgacgccatcctacgggagcttctggacgagagccagaaggtgatggtgaccgtcggggaggacgggctgctggacactgtcgccaggcccgagtccctgcagcaggcccggctgtacgagaacctgcccccggctgcgctacggaagctgctgcacgcggagcccgagcggtaccgccactgctctttcgtgccagagaccttcgagcgggcgtcagccatcccgctggacgatgcctcctcgggccccatccaggtcaggggccgcctggactgtgggatggccttcgccggggatgaggtgctggtgcagctcctttcgggagacaaggcgcccgaggggcggcttcggggccgcgtgctgggcgtgctgaagaggaagaggcacgagctggcgtttgtgtgccgcatggacacgtgggacccgcgcatcatggtccccatcaatggctccgtgaccaagatcttcgtggccgagctgaaggacccatcgcaggtccccatctacagcctccggaagggccggctgcagcgtgtggggcttgagaggctcaccgccgaggcccggcacagccggctcttctgggtccaaattgtcctgtggcggcaaggcttctactacccgctgggcatcgtccgggaggtgctgcctgaggccagcacctgggagcagggcctccgcatcctcggcctggagtacagcttgagggtgcccccgtcggaccaggccaccatcaccaaggtgctgcagaaataccacacggagcttggccgggttgccggccgccgagaggactgccgcgccttcttgaccttcactgtggacccccagggcgcctgcaacctcgatgatgccctcagtgtccgagacctgggtcccaggtgcgaggtggctgtgcacatcactgatgtggccagcttcgtgcccagggacggggtgctggacgtggaggcgcgaaggcagggcgctgcgttctatgcccccggcagggagccagtgcccatgctgccggccagcctctgccaggacgtcctcagcctcctgcctggccgggaccgcctggccatctccctgttcctcaccatggagaaggccagtggccagctgaagagcctgcgctttgcaccctccgtggtccagtctgaccgccagctgtcctacgaggaggcggaggaggtgatcaggcagcacccgggtgccggccgtgagctgccggcccgcctggactccgtggacgcctgcgtcgtggccgcgtgctacttctctcggctgctgcgccggcaccgcctgcggtccgactgcttctatgagcagccggacgaggacggcaccctgggcttccgcgcggcccacatcatggtgaaggagtacatgattcagtttaataggctcgtggctgagttcctggtgggcagcgagtgcacgcggacggtcacgcctctgcggtggcagccagcaccccgcagccagcagctcaaggccctgtgtgagaagcatggggaccgggtgcccctgtcactgcacctcggccaccacctgcacggcggcgggggcagtccccccgacacgcggctgcacctcctggcctccctctggaagcaggtccagtttgctgcccgcacccaggactacgaacagatggtggacttggtcaccacggacgacatgcacccattcctggctcctgcaggccgcgacctccgcaaggccctggagcgctcggcgttcggccgctgcgcccggggccaccagcagcagggcggccactactcgctgcaggtggactggtacacgtgggccacctcgcccatccgcaggtacctggacgtggtgttgcagcggcagatcctgctggcgctgggccatgggggctctgcctactctgccagggacatcgatgggctctgccaggccttcagcctccagcacgcacttgcccagagctatcagcggcgggcgcgcagcctgcacctggccgtgcagctcaaggcccagcctctggacaagctgggcttcgtggtggacgtggaggcgggctcccgctgcttccggctgctcttccccagcaaccgggagacgctgcctgacccctgccccgtcccctacggctccctgcagctggccgagcacccccacgccctggcaggccggccgggcctgcggctcctgtggcggcgccgtgtctactcagcgcagggatccagcccgcccctgccactgcctggcactgtgccggacccacacaccctggccgtggagacggccctgtggaagcagctgctggagctggtggagctgcagcgctggccggaggcggctgctctcatccaggagaagggcgaggcgtcccagcggcgggagctggtgcaggtgcagcggagccactgtggccatttcctggaggtggcccgggagctgggcagtggggacaccctgcaggtgcagctcggcaccagcctgcagcacggcttcctggtaccgagccctcagctctggacggtggcaccgggcttcagcctctgcctggagcacgtggagcggcccggagactgcttctcaggccgtgtgtaccgggccccgagggaccggtaccgcgacgtggatgagtacgcctgcgtgtgggaaccattctgcgccctggagtcggccaccggcgcggttgccgagaatgactccgtcacacttcagcacctgagtgtctcctgggaggcgtcacggacgccgcaggggcagctgcagggcgccttccgcctggaggccgccttcctcgaggagaactgtgccgacatcaacttcagctgctgctacctctgcatccggctcgaggggctgccggctcccacggccagcccacgccctgggcccagcagcctcggccctggcctgaatgttgaccccggcacgtatacctgggtggcccacgggcagacgcaggactgggaccaggagcgccgggcagaccggcaggaggctcccagacgggtgcacctcttcgtccaccacatgggcatggagaaggttccggaagaggtgctgaggccgggcaccctgttcaccgttgagctgctgcccaagcagcttcctgatctccgcaaggaggaagccgtgcgtggactagaggaggcgtccccgctggtcaccagcatcgcactgggccggcctgtcccgcagcccctctgcagagtgatccccagcaggttcctggagcggcagacctacaacatccccggaggccgccacaagctgaaccccagccagaacgtggcggtcagggaggctctggagaagcctttcacggtcattcagggcccaccaggtacagggaagacgatcgtgggcctccacatcgtattctggtttcataaatcaaaccaggagcaggtgcagcccggaggccccccccgtggggagaagcggctggggggtccctgcatcttgtactgcggcccctccaacaagtcggtggatgtcctggcaggactgctcctgagaaggatggagctgaagcccctccgtgtgtacagtgagcaggctgaggccagcgagttcccagtgccgcgtgtgggcagcaggaagctgctcaggaagagcccccgggaggggaggccgaaccagagcctcaggagcatcaccctgcaccaccggatccggcaggcccccaacccttactcgtcggaaatcaaggcctttgacacccggctgcagagaggggagctcttctccagggaggacctggtctggtacaagaaggtcttgtgggaggctcggaagttcgagctggaccggcatgaggtcatcctctgcacctgctcctgtgcagcctctgccagcctcaaaatcctggacgtgaggcagatccttgttgacgaggcaggcatggccacggaacctgaaaccctcatccccctggtgcagttcccacaggccgagaaggtggttcttctcggagaccacaagcagctgcggcctgtggtcaagaatgagcggctgcaaaacctgggtctggaccggtctctgttcgagcggtaccacgaggacgcacatatgctggacactcagtaccgcatgcatgagggcatctgtgccttcccctctgtggcgttctacaagagcaagctgaagacgtggcagggcctgaggaggccgcccagtgtcctgggccacgctggcaaggagagctgccctgtcatctttggccacgtgcagggccacgagcggagcctgctggtgtccacggacgaagggaatgagaactccaaggccaacctggaggaggtggctgaggtggtccgtatcaccaagcagctgaccctggggaggaccgtagagccccaggacatcgccgtcctcacgccctacaacgcgcaggcctctgagatcagcaaggcccttcggcgagagggcatcgccggggtggccgtgtcctccatcaccaagagccaggggagcgagtggcgctatgtgctggtgagcaccgtccgcacctgtgccaagagcgacctggaccagcggcccaccaagagctggctcaagaagtttctgggcttcgttgtggaccccaaccaagtgaatgtggctgtcacgcgggcccaggaggggctctgcctgatcggagaccacctccttctgcgctgctgccccctctggcgtagcctcctggacttctgcgaggctcagcagaccctcgtgcctgccggccaggtgcgcgtctgcaggaggccaactatgccttcc

SEQ ID NO: 6386 - DNA, 7947 bp, Homo sapiens
  source 1..7947: mol_type = genomic DNA
atggctgtgtgggaggccgagcagctgggtggcctccagcggggggacctgctcacaccccctgcccctgatggcgacgggcgcacggccccccttggccagccccctggggcccagctgtactgcccggcctgcttggtcacctgccactctcaggaggccttcgagaaccactgcgcatcctcggagcacgcacagatggtggccttcgaccaggccctgccctgggagcaccgttccccacccccgggactctccaagttcgagctctgcccaaagcctgacctctgtgagtatggggacgcctgcaccaaggcacactcagcacaggagctgcaggagtgggtccggcgcacgcaggctgtggagctgcgggggcaggcggcctggcaggacgggctggtgccctaccaggagcggctgctggccgagtaccagcgcagcagcagtgaggtccttgtgctggcagagacccttgatggagtgcgtgtcacctgcaaccagcccctgatgtaccaggcccaggagaggaagacccagtacagctggacgtttgccgtccactctgaggagcccctgctacacgtggccctgctgaagcaggagccaggagccgacttctctctggtggctcccggcctcccgccaggccggctctacgcacggggtgagcgcttccgtgtgcccagctccactgccgacttccaggtgggagtgcgtgtgcaggctgcctcgttcggcacctttgagcaatgggtggtcttcgactttggccgccggccggtgctgctacaaaagctggggctgcagctgggccaggggcgtcgcccaggaccctgcaggaatctggcgctcggccaccctgaggagatggagcgctggcacactggcaaccgccacgtggtgcctggcgtggagcggacggccgagcagacggccctgatggccaagtacaagggccctgccctggccctggagttcaaccgcagcagcgtggcctcgggccccatctcaccaaccaactatcggcagaggatgcaccagtttctctatgaggaggaggcggctcagcagcagctggtggccaagctgaccctgcggggccaggtgttcctgaagacggcattgcagacgccagcgctgaacatgctcttcgcgcctccgggagcactgtacgcagaggtccccgtcccctcctccctgatgccagacacagaccagggcttcctgctgggccgggcggtcagcacagccctggtggcccctgtacctgcacccgacaatacggtgttcgaggtgcggctggagaggcgggccagctcagagcaggcgctgtggctgctgcttccggcccgctgctgcttggccctggggctgcagcctgaggcccgcctggtcctggaggtgcagttccagattgacccgatgaccttccgcctctggcaccaggcagtggacacactgcctgaggagcagctggtggtgcccgacttgcccacctgcgccctgcccagaccttggtctgtcccacccttgcggcgtggcaaccgcaagcaggagctggccgtggcgctcatcgcgggctggggccctggggatgggaggcgtgtccccccgctactcatctatggcccctttggcaccggcaagacctacacgctggccatggcctccctggaggtcatccggaggcctgaaaccaaggtgctcatctgcacacacaccaacagtgccgccgacatctacatccgggagtatttccacagccacgtcagcggcggccaccccgaggccactcctctccgtgtgatgtacacggaccggccgctgagccagacggacccagtcacgctgcagtactgttgcctgaccgacgaccgccaggctttccgcccgcccacacgggcagagctggcgcggcaccgcgtggtggtcaccaccacctcccaggcccgtgagctcagggtgccggtcggcttcttctcccacattctcatcgatgaggcggcccagatgctggagtgcgaggccctcaccccgctggcctatgcctcgcacggcacccgcctcgtgctggcgggcgaccacatgcaggtcacaccccggctgttcagtgtggccagggcccgggcggccgagcacacgctgctgcaccgcctcttcctgtgctaccagcaggagactcacgaggtggcgcggcagagccgcctggtcttccacgagaactaccgctgcacggacgccattgtcagcttcatctcgcggcacttctacgtggccaagggcaaccccatccacgccaggggcaaggttccgccccacccccggcactacccgctcatgttctgccacgtggcgggcagcccagaccgggacatgtccatggcgtcctggctgaatctggctgagattgcgcaggtcgtcgagaaggtgcaggaggcctacaacacctggcccagctgctggggcggccgcgagcagaggtgcatctgtgtcgtttcccacggtgcccaggtcagtgcactgaggcaggagctgaggaggcgggacctaggccaggtgtctgtcggcagttttgagatcctgccagggcggcagttccgggtcgtggtgctcagcactgtgcacacctgccagagcctgctcagccctggggcactggcccctgagttcttcaccgacgcccgcgtgctcaacaccgtcctgacccgcgcccagtcccagctggtggtagtgggggacgccgtggccctctgctccttcggggcctgcggcaagctctgggagagcttcatccgtgagtgcgtggagcggcacagtgtctgccccgagggcctgtccatggagcaggtcgagcagggtgtggcgcagagacggcgctggcctccccgaggcacacaggctggggcagcggggaactgggaggctgccccagagccagtaggggacctggccgaggagcaggcggctgtggtgacggccatggtgaaggcagagccgggagatgaggctctgagcccagcatcccgtgacatcacggcaaccacagcgcagacggaggctgcggcagcaccagcaggagacgcagtgaaggaagacgtggtgcccggggcctgtgcggcaggagcggctgctgcagcgggcgtggagtccacggaggctgaggatgcagaggctgacttctggccgtgggacggggagctcaacgctgacgacgccatcctacgggagcttctggacgagagccagaaggtgatggtgaccgtcggggaggacgggctgctggacactgtcgccaggcccgagtccctgcagcaggcccggctgtacgagaacctgcccccggctgcgctacggaagctgctgcacgcggagcccgagcggtaccgccactgctctttcgtgccagagaccttcgagcgggcgtcagccatcccgctggacgatgcctcctcgggccccatccaggtcaggggccgcctggactgtgggatggccttcgccggggatgaggtgctggtgcagctcctttcgggagacaaggcgcccgaggggcggcttcggggccgcgtgctgggcgtgctgaagaggaagaggcacgagctggcgtttgtgtgccgcatggacacgtgggacccgcgcatcatggtccccatcaatggctccgtgaccaagatcttcgtggccgagctgaaggacccatcgcaggtccccatctacagcctccggaagggccggctgcagcgtgtggggcttgagaggctcaccgccgaggcccggcacagccggctcttctgggtccaaattgtcctgtggcggcaaggcttctactacccgctgggcatcgtccgggaggtgctgcctgaggccagcacctgggagcagggcctccgcatcctcggcctggagtacagcttgagggtgcccccgtcggaccaggccaccatcaccaaggtgctgcagaaataccacacggagcttggccgggttgccggccgccgagaggactgccgcgccttcttgaccttcactgtggacccccagggcgcctgcaacctcgatgatgccctcagtgtccgagacctgggtcccaggtgcgaggtggctgtgcacatcactgatgtggccagcttcgtgcccagggacggggtgctggacgtggaggcgcgaaggcagggcgctgcgttctatgcccccggcagggagccagtgcccatgctgccggccagcctctgccaggacgtcctcagcctcctgcctggccgggaccgcctggccatctccctgttcctcaccatggagaaggccagtggccagctgaagagcctgcgctttgcaccctccgtggtccagtctgaccgccagctgtcctacgaggaggcggaggaggtgatcaggcagcacccgggtgccggccgtgagctgccggcccgcctggactccgtggacgcctgcgtcgtggccgcgtgctacttctctcggctgctgcgccggcaccgcctgcggtccgactgcttctatgagcagccggacgaggacggcaccctgggcttccgcgcggcccacatcatggtgaaggagtacatgattcagtttaataggctcgtggctgagttcctggtgggcagcgagtgcacgcggacggtcacgcctctgcggtggcagccagcaccccgcagccagcagctcaaggccctgtgtgagaagcatggggaccgggtgcccctgtcactgcacctcggccaccacctgcacggcggcgggggcagtccccccgacacgcggctgcacctcctggcctccctctggaagcaggtccagtttgctgcccgcacccaggactacgaacagatggtggacttggtcaccacggacgacatgcacccattcctggctcctgcaggccgcgacctccgcaaggccctggagcgctcggcgttcggccgctgcgcccggggccaccagcagcagggcggccactactcgctgcaggtggactggtacacgtgggccacctcgcccatccgcaggtacctggacgtggtgttgcagcggcagatcctgctggcgctgggccatgggggctctgcctactctgccagggacatcgatgggctctgccaggccttcagcctccagcacgcacttgcccagagctatcagcggcgggcgcgcagcctgcacctggccgtgcagctcaaggcccagcctctggacaagctgggcttcgtggtggacgtggaggcgggctcccgctgcttccggctgctcttccccagcaaccgggagacgctgcctgacccctgccccgtcccctacggctccctgcagctggccgagcacccccacgccctggcaggccggccgggcctgcggctcctgtggcggcgccgtgtctactcagcgcagggatccagcccgcccctgccactgcctggcactgtgccggacccacacaccctggccgtggagacggccctgtggaagcagctgctggagctggtggagctgcagcgctggccggaggcggctgctctcatccaggagaagggcgaggcgtcccagcggcgggagctggtgcaggtgcagcggagccactgtggccatttcctggaggtggcccgggagctgggcagtggggacaccctgcaggtgcagctcggcaccagcctgcagcacggcttcctggtaccgagccctcagctctggacggtggcaccgggcttcagcctctgcctggagcacgtggagcggcccggagactgcttctcaggccgtgtgtaccgggccccgagggaccggtaccgcgacgtggatgagtacgcctgcgtgtgggaaccattctgcgccctggagtcggccaccggcgcggttgccgagaatgactccgtcacacttcagcacctgagtgtctcctgggaggcgtcacggacgccgcaggggcagctgcagggcgccttccgcctggaggccgccttcctcgaggagaactgtgccgacatcaacttcagctgctgctacctctgcatccggctcgaggggctgccggctcccacggccagcccacgccctgggcccagcagcctcggccctggcctgaatgttgaccccggcacgtatacctgggtggcccacgggcagacgcaggactgggaccaggagcgccgggcagaccggcaggaggctcccagacgggtgcacctcttcgtccaccacatgggcatggagaaggttccggaagaggtgctgaggccgggcaccctgttcaccgttgagctgctgcccaagcagcttcctgatctccgcaaggaggaagccgtgcgtggactagaggaggcgtccccgctggtcaccagcatcgcactgggccggcctgtcccgcagcccctctgcagagtgatccccagcaggttcctggagcggcagacctacaacatccccggaggccgccacaagctgaaccccagccagaacgtggcggtcagggaggctctggagaagcctttcacggtcattcagggcccaccaggtacagggaagacgatcgtgggcctccacatcgtattctggtttcataaatcaaaccaggagcaggtgcagcccggaggccccccccgtggggagaagcggctggggggtccctgcatcttgtactgcggcccctccaacaagtcggtggatgtcctggcaggactgctcctgagaaggatggagctgaagcccctccgtgtgtacagtgagcaggctgaggccagcgagttcccagtgccgcgtgtgggcagcaggaagctgctcaggaagagcccccgggaggggaggccgaaccagagcctcaggagcatcaccctgcaccaccggatccggcaggcccccaacccttactcgtcggaaatcaaggcctttgacacccggctgcagagaggggagctcttctccagggaggacctggtctggtacaagaaggtcttgtgggaggctcggaagttcgagctggaccggcatgaggtcatcctctgcacctgctcctgtgcagcctctgccagcctcaaaatcctggacgtgaggcagatccttgttgacgaggcaggcatggccacggaacctgaaaccctcatccccctggtgcagttcccacaggccgagaaggtggttcttctcggagaccacaagcagctgcggcctgtggtcaagaatgagcggctgcaaaacctgggtctggaccggtctctgttcgagcggtaccacgaggacgcacatatgctggacactcagtaccgcatgcatgagggcatctgtgccttcccctctgtggcgttctacaagagcaagctgaagacgtggcagggcctgaggaggccgcccagtgtcctgggccacgctggcaaggagagctgccctgtcatctttggccacgtgcagggccacgagcggagcctgctggtgtccacggacgaagggaatgagaactccaaggccaacctggaggaggtggctgaggtggtccgtatcaccaagcagctgaccctggggaggaccgtagagccccaggacatcgccgtcctcacgccctacaacgcgcaggcctctgagatcagcaaggcccttcggcgagagggcatcgccggggtggccgtgtcctccatcaccaagagccaggggagcgagtggcgctatgtgctggtgagcaccgtccgcacctgtgccaagagcgacctggaccagcggcccaccaagagctggctcaagaagtttctgggcttcgttgtggaccccaaccaagtgaatgtggctgtcacgcgggcccaggaggggctctgcctgatcggagaccacctccttctgcgctgctgccccctctggcgtagcctcctggacttctgcgaggctcagcagaccctcgtgcctgccggccaggtgcgcgtctgcaggaggccaactatgccttcc

SEQ ID NO: 6387 - DNA, 831 bp, Homo sapiens
  source 1..831: mol_type = genomic DNA
atggacactaaccgcccgggcgcgttcgtgctgagcagtgccccgctggccgcgctgcacaacatggccgagatgaagacgtcgctgttcccctacgcgctgcagggtccggccggcttcaaggcgcccgcgctggggggcctgggcgcgcagctcccgctcgggaccccgcacggcatcagcgacatcctgggccggcccgtgggcgcggcgggcgggggcctcctgggggggctgccccggctcaacgggctcgcgtcgtccgccggcgtttacttcgggcccgcggccgctgtggcgcgcggctaccccaagcccctggccgagctgccggggcgcccgcccatcttctggcccggcgtggtgcagggcgcgccctggagggacccgcgtctggctggcccggccccggccggcggcgtcctggacaaggacgggaagaagaagcactcgcgcccgaccttctcgggccagcagatcttcgcgctggagaaaaccttcgagcagaccaagtacctggcgggcccggagcgcgcgcgtctcgcctactcgctgggcatgaccgagagccaggtgaaggtctggttccagaaccgccggaccaagtggcgcaagcggcacgcggtggagatggcgtcggccaagaagaagcaggactcggacgccgagaagctgaaggtgggcggctcggacgcggaggacgacgacgaatacaaccggcccctggaccccaactcggacgacgagaagatcacgcggctgctcaagaagcacaaaccctcgaacttggcgctggtcagcccgtgcggcggcggcgcgggggacgccttg

SEQ ID NO: 6388 - DNA, 795 bp, Homo sapiens
  source 1..795: mol_type = genomic DNA
atggagtccaacctgcaggggacgttcctgctgaacaacacgccgctggctcagtttccggagatgaaggccccggtgtgccagtactctgtgcagaactccttctacaagctcagccccccagggctgggcccccagctggccgccggaaccccccacgggatcacggacatcctgagcaggcccgtggctgcgccgaacaacagcctcctctccggctacccccacgtggcaggctttggggggctcagctcgcagggggtctactacagcccccaggtagggaatttttccaaggctgggaacgagtacccgacccggacccggaactgctgggcggacacgggccaagactggcgaggcgggcggcagtgcagcaacaccccagaccccctgagtgacagcatacacaagaagaagcacacccggcccaccttcacggggcaccagatctttgccctggagaaaacctttgagcagaccaagtacttggctggccccgagagggcacggctggcatactcactgggcatgaccgagtcgcaggtcaaggtgtggttccagaaccgcaggaccaagtggcggaagaagagcgccctggagccctcgtcctccacgccccgggccccgggcggcgcgggtgcaggcgcaggcggggaccgcgcaccctcggagaacgaggacgacgagtacaacaagccgctggaccccgactcggacgacgagaagatccgcctgctgctgcgcaagcaccgcgccgccttctcggtgctcagcctgggagcgcacagcgtc

SEQ ID NO: 6389 - DNA, 405 bp, Homo sapiens
  source 1..405: mol_type = genomic DNA
atgcagcaggggcagctggcacctgggtctaggctttgctcagggccctggggcctccccgagctccaacccgctgcgccctcctcatcagccgctcagctgccctggggcgagagctggggggaagaagcagacactcctgcatgtctttctgcttctggggtgtggttccagaaccgcaggaccaagtggcggaagaagagcgccctggagccctcgtcctccacgccccgggccccgggcggcgcgggtgcaggcgcaggcggggaccgcgcaccctcggagaacgaggacgacgagtacaacaagccgctggaccccgactcggacgacgagaagatccgcctgctgctgcgcaagcaccgcgccgccttctcggtgctcagcctgggagcgcacagcgtc

SEQ ID NO: 6390 - DNA, 1101 bp, Homo sapiens
  source 1..1101: mol_type = genomic DNA
atgttagcggtgggggcaatggagggcacccggcagagcgcattcctgctcagcagccctcccctggccgccctgcacagcatggccgagatgaagaccccgctgtaccctgccgcgtatcccccgctgcctgccggccccccctcctcctcgtcctcgtcgtcgtcctcctcgtcgccctccccgcctctgggcacccacaacccaggcggcctgaagcccccggccacgggggggctctcatccctcggcagccccccgcagcagctctcggccgccaccccacacggcatcaacgatatcctgagccggccctccatgcccgtggcctcgggggccgccctgccctccgcctcgccctccggttcctcctcctcctcttcctcgtccgcctctgcctcctccgcctctgccgccgccgcggctgctgccgcggccgcagccgccgcctcatccccggcggggctgctggccggactgccacgctttagcagcctgagcccgccgccgccgccgcccgggctctacttcagccccagcgccgcggccgtggccgccgtgggccggtaccccaagccgctggctgagctgcctggccggacgcccatcttctggcccggagtgatgcagagcccgccctggagggacgcacgcctggcctgtacccctcatcaaggatccattttgttggacaaagacgggaagagaaaacacacgagacccactttttccggacagcagatcttcgccctggagaagactttcgaacaaacaaaatacttggcggggcccgagagggctcgtttggcctattcgttggggatgacagagagtcaggtcaaggtctggttccagaaccgccggaccaagtggaggaagaagcacgctgccgagatggccacggccaagaagaagcaggactcggagacagagcgcctcaagggggcctcggagaacgaggaagaggacgacgactacaataagcctctggatcccaactcggacgacgagaaaatcacgcagctgttgaagaagcacaagtccagcagcggcggcggcggcggcctcctactgcacgcgtccgagccggagagctcatcc

SEQ ID NO: 6391 - DNA, 981 bp, Homo sapiens
  source 1..981: mol_type = genomic DNA
atggaggtggcggtgcccgtgaagcaggaggccgagggcctggcgctggactccccgtggcaccgcttccgccgcttccacctgggcgacgcgccgggcccgcgggaggcgctggggctgctccgcgccctgtgccgggactggctgcggcccgaggtgcacaccaaggagcagatgttggagctgctggtgctggaacagttcctgagcgcgctgcccgccgacacgcaggcctgggtgtgcagccggcagccgcagagcggggaggaggcggtggccctgctggaggagctctgggggccagcagcctcccccgatgggtcgtcagcaacgagggtgcctcaggatgtgacgcagggccctggggccacaggtggaaaggaggacagtgggatgattcccttagcaggcaccgcccctggggctgaggggccggcgcctggggactcccaggctgtgcgcccctacaagcaggagcccagcagccccccgctggcgcctggcctgcccgccttcctagcggccccgggcaccacgtcctgccccgagtgcggcaaaacgtccctgaaaccagctcacctgctgcgccaccggcagagccactcgggcgagaagccgcacgcctgccctgagtgcgggaaggcctttcggcgcaaggagcacctgcggcgccaccgcgacacgcaccccggcagccccggcagccccgggcccgcgctgcgccctctgcccgcccgtgagaagccccacgcgtgctgcgagtgtggcaagaccttctactggcgcgagcacctggtgcgccaccgcaagacgcactcgggagcgcggccctttgcctgctgggagtgtggcaagggcttcgggcgccgcgagcacgtgctgcgccaccagcgcatccacggccgggcagcggccagcgcgcagggggcggtagctccgggcccggatggtggaggccccttcccgccctggcccttgggt

SEQ ID NO: 6392 - DNA, 978 bp, Homo sapiens
  source 1..978: mol_type = genomic DNA
atggaggtggcggtgcccgtgaagcaggaggccgagggcctggcgctggactccccgtggcaccgcttccgccgcttccacctgggcgacgcgccgggcccgcgggaggcgctggggctgctccgcgccctgtgccgggactggctgcggcccgaggtgcacaccaaggagcagatgttggagctgctggtgctggaacagttcctgagcgcgctgcccgccgacacgcaggcctgggtgtgcagccggcagccgcagagcggggaggaggcggtggccctgctggaggagctctgggggccagcagcctcccccgatgggtcgtcagcaacgagggtgcctcaggatgtgacgcagggccctggggccacaggtggaaaggaggacagtgggatgattcccttaggcaccgcccctggggctgaggggccggcgcctggggactcccaggctgtgcgcccctacaagcaggagcccagcagccccccgctggcgcctggcctgcccgccttcctagcggccccgggcaccacgtcctgccccgagtgcggcaaaacgtccctgaaaccagctcacctgctgcgccaccggcagagccactcgggcgagaagccgcacgcctgccctgagtgcgggaaggcctttcggcgcaaggagcacctgcggcgccaccgcgacacgcaccccggcagccccggcagccccgggcccgcgctgcgccctctgcccgcccgtgagaagccccacgcgtgctgcgagtgtggcaagaccttctactggcgcgagcacctggtgcgccaccgcaagacgcactcgggagcgcggccctttgcctgctgggagtgtggcaagggcttcgggcgccgcgagcacgtgctgcgccaccagcgcatccacggccgggcagcggccagcgcgcagggggcggtagctccgggcccggatggtggaggccccttcccgccctggcccttgggt

SEQ ID NO: 6393 - DNA, 3093 bp, Homo sapiens
  source 1..3093: mol_type = genomic DNA
atgcctccaggcaggtggcatgctgcctatccagctcaggcccagtcttcgagggagcgagggcggcttcagacagtaaagaaggaagaagaggatgaaagctatactccagtgcaggctgccaggccacagactctcaaccgccctggccaggagctgttccgccagctcttcagacagcttcgctaccatgagtcttcagggcccctagaaactctgagccggctccgggaactctgtcgctggtggctgaggcctgacgttctctccaaggcacagatcctagagctgctggtgctggaacagttcctgagcatcctgcctggggagctccgggtttgggtgcagcttcataaccctgagagtggcgaggaggctgtggccttgctggaggagctgcagagggaccttgatgggacatcctggagggacccgggccctgcccagagcccagatgtgcattggatgggtacaggagccctgcgatctgcacagatatggtcccttgcttcacctctcaggagcagctctgctctgggggaccacctggagcctccctatgaaatagaagcacgtgacttcctggctgggcaatccgatactcctgctgcccagatgcctgcccttttcccgagagaggggtgcccgggagaccaggtaacaccaaccaggtccctgacagcccagctccaggagaccatgactttcaaggatgtggaggtgaccttctcccaggacgagtgggggtggctggactctgctcagaggaacctgtacagggatgtgatgctggagaattataggaacatggcttccctggtgggaccattcaccaaacctgctctgatctcctggttggaagcaagggagccatggggcctgaacatgcaggcagctcagcctaaggggaatccagttgctgctcctacaggagatgacctccagagtaaaacaaacaaattcatcttaaatcaggaacctttggaagaagcagaaaccttagctgtgtcatcaggatgtcctgcgacaagtgtttctgagggaattgggctcagagaatcttttcaacagaagagcaggcagaaggatcaatgtgaaaatcccatacaagtaagagttaagaaagaagagaccaatttcagtcacaggacaggaaaagactctgaagtatcaggaagtaatagtcttgacttaaaacatgttacatatttgagagtttctggaagaaaggaatcccttaaacatggctgtggcaaacacttcagaatgagttcacaccactatgactacaagaaatatgggaaggggctcagacacatgattgggggcttcagcctacatcagagaattcatagtggactgaaagggaacaaaaaggacgtgtgtggaaaagacttcagccttagctctcatcaccaacgtgggcagagtcttcacacagtgggagtgtcatttaagtgcagtgactgtggaaggactttcagtcatagctcccatcttgcgtatcatcagagacttcacactcaagagaaagcatttaaatgtagggtgtgtgggaaagccttccggtggagttccaactgtgcgcggcatgagaaaattcacactggagtgaagccttataaatgcgatttatgtgagaaagctttccgacgcctgtcagcctaccgtctgcaccgagaaacccatgctaagaagaaatttcttgaattgaatcagtatagggcagctctcacctacagctcagggtttgatcatcatttgggagaccaaagtggggagaaactctttgactgcagccagtgcaggaaatccttccactgtaagtcatatgttcttgaacatcaaaggattcacacccaggagaagccctataaatgtaccaaatgtaggaaaacctttagatggagatcaaactttactcgtcatatgaggttgcatgaggaggaaaaattctacaaacaagatgaatgtcgtgaaggcttcaggcaatctcctgactgcagtcagccccagggtgctcccgctgtggagaaaacatttctgtgtcagcagtgtgggaaaacttttactagaaagaaaactctcgttgaccaccagagaattcacacaggtgagaaaccttaccagtgtagcgattgtgggaaggactttgcctataggtcagcctttattgttcataagaagaagcatgccatgaaaagaaaacctgagggcgggccatcttttagtcaggacacagtgttccaggttcctcagagcagtcactccaaagaggagccctacaaatgcagccagtgtggcaaggccttccgcaatcactcattcctcctcatccatcagagagttcacactggagagaagccatataagtgcagggagtgtgggaaagccttcagatggagttccaatctctaccgacatcagaggattcactctcttcaaaaacagtatgattgccatgaaagtgaaaagactccaaatgtggagccaaaaatcctcactggtgagaaacgtttttggtgtcaagaatgtgggaaaacctttacacgtaaaagaacccttttagatcataagggaatacacagtggagagaagcgctataaatgtaatctatgtgggaaatcttatgatagaaactatcgccttgttaaccatcagaggatccactctacagagagacctttcaaatgtcagtggtgtgggaaagagttcattgggagacataccctttccagtcaccagaggaaacacaccagagcagcacaggctgaacgtagcccgcctgcacggtcttcctctcaggacacaaagttgagattacagaagctaaaaccaagtgaagagatgcccctcgaagactgcaaagaagcttgcagccagagctccaggctcactggactccaggacataagcattgggaaaaagtgccacaaatgcagcatatgtgggaaaacttttaacaagagttcacaactcattagccacaagagatttcatactcgagagaggcccttcaaatgcagcaagtgtggaaagaccttcaggtggtcttcgaacctggctcggcatatgaaaaaccatattagagat

SEQ ID NO: 6394 - DNA, 1350 bp, Homo sapiens
  source 1..1350: mol_type = genomic DNA
atgccatcccctctgggtcccccatgcctgcccgtcatggacccagagaccacccttgaggagcctgagactgcccgcctccgcttccgagggttctgctaccaggaggtggcaggtccccgagaagccctggcccggctgcgtgagctgtgttgccagtggctgcagcctgaggcacactccaaggagcagatgctggagatgctggtgctggagcagttcctgggcacactgcctcccgagatccaggcctgggtgcgcggtcagcggccaggcagtcctgaggaggccgctgccctagtcgaaggactgcagcatgaccctgggcaactgttgggctggatcacagcccatgtcctgaagcaggaggtgctccctgcagcccagaagacagaggaaccacttgggagcccccacccctcagggacagtggagtcccctggggaaggtccccaggacaccagaatagaggggtctgtccagctcagctgcagtgtgaaggaggagcccaatgtcgatggacaggaagtggcaccctccagccctccacttgcagcacagtcccctgaggggaaccatggacaccaagaaccagcctccacatccttccacccacccaggattcaggaggagtgggggctgctggaccggtcacagaaggaactgtactgggatgcgatgctggagaagtacggcacagtggtctccctggggttaccgccccaccagccagaggcacaggcccagtcagagctggggatgctgctcacggggacaggcgtctgcagaagcctgcgctcgggaaatgagagtgagggtccacctggctgcccagaggcccagccgccccagggcccagggccggcagcctgggagggcttgtctggggctgccactcctgcccccactgtgcgcccagggacaccgccagtgcccactcagcccacacctgcagagacgagactggagccggctgccacccccaggaagccctacacgtgcgagcagtgtggccgcggcttcgactggaagtcagtgttcgtcatccaccaccggacacacacgagtgggccaggtgtgcagtccccggggctagccaccggggaaagcacagagaagccaccacaaggggaggtggcctttccgcaccacccccgacgctcactcacaggcccccggagttacccgtgtgaggagtgcgggtgcagcttcagctggaagtcgcagctggtcatccaccgcaagagccacacaggccagcggcgtcacttctgcagtgactgtggccgcgccttcgactggaagtcgcagctggtcatccaccgcaagggccaccggccggaggttcca

SEQ ID NO: 6395 - DNA, 1785 bp, Homo sapiens
  source 1..1785: mol_type = genomic DNA
atggacccagtggcttttaaggatgtggctgtgaacttcacccaggaggagtgggctttgctggatatttcccagaggaaactctacagggaagtgatgctggaaactttcaggaacctgacctctttaggaaaaaggtggaaagaccagaacattgaatatgagcaccaaaaccccaggagaaacttcaggagtctcatagaagaaaaagtcaatgaaattaaagatgacagtcattgtggagaaacttttaccccagttccagatgacagactgaacttccaggagaagaaagcttctcctgaagtaaaatcatgtgaaagctttgtgtgtggagaagttggcctaggtaactcatcttttaatatgaacatcagaggtgacattggacacaaggcatatgagtatcaggaatatggaccaaagccatgtaagtgtcaacaacctaaaaaagccttcagataccgcccctcctttagaacacaagaaagggatcacactggagagaaacccaatgcttgtaaagtatgtggaaaaacctttatttcccattcaagtgttcgaagacacatggtaatgcacagtggggatggaccttataaatgtaagttttgtgggaaagcattccattgtctcagattatatcttatccatgaaagaattcacactggagagaaaccatgtgaatgtaaacagtgtggtaaatcctttagttattctgctacccatcgaatacataaaagaactcacactggagaaaagccttatgaatatcaggagtgtgggaaagcatttcatagtcccagatcctatcgtagacatgaaaggattcacatgggagaaaaggcttatcaatgtaaggaatgtggaaaagcattcacgtgtccccgttatgttcgtatacatgaaaggacccactctaggaaaaatctctatgaatgtaagcagtgtgggaaagcattatcctctcttacaagttttcaaacacacgtaagattgcactctggagaaagaccttatgaatgtaagatatgtggaaaagacttttgttctgtgaattcatttcaaagacatgaaaaaattcacagtggagagaaaccctataaatgtaagcagtgtggtaaagccttccctcattccagttcccttcgatatcatgaaaggactcacactggagagaaaccctatgagtgtaagcaatgtgggaaagccttcagatctgcctcacaccttcgagtgcatggtaggactcacactggagagaaaccgtatgaatgtaaggaatgtgggaaagccttcagatatgtgaataaccttcaaagtcatgaaaggacacaaacacacataagaatacactctggagaaagacgttataaatgtaagatatgtgggaaaggcttttattgtcccaaatcatttcaaagacatgaaaaaactcacactggagagaaactctatgaatgcaagcaacgttcagtagttccttcagtagttccagttccttttgatatcatgaaaggactcacactggagagaagccctataaatgcgagcaatgtgggaaagccttcagagctgtgtcaatcctttgaatgcatggtaggactcaccctgaagagaaaccctatgagtgtgagcaatgacggaaagccttcagatctgccccacacctttgaatacgtggtaggacacacaatggagagaagccctatgcatgtaaggaatgtgggaaacccttcggatctgcccagaaccttcgaattcatgaaaggacacaaacacaca

SEQ ID NO: 6396 - DNA, 1161 bp, Homo sapiens
  source 1..1161: mol_type = genomic DNA
atgacaatggaaggggccagcgggtcgagttttggaatagacacgattttgtccagtgccagttcaggcagcccaggcatgatgaatggagatttccgcccgctcggtgaggccaggaccgcggattttaggagtcaggccaccccatctccctgttcggagattgataccgtagggacggcgccttcttctcctatctcagtcaccatggagcccccggagccgcatctggtagcagacgcgacccagcatcatcaccacctccaccacagccagcagccgccgccgccggccgcggccccgacgcaaagtttgcagcctttgccccaacagcagcagccgctgccgccacagcagccgccgccgccgcccccccagcagctgggctcggccgcctcggcccccaggacttccacgtcttcttttttaattaaggacatcttgggcgacagcaaacctctggcggcatgtgcaccctacagcaccagcgtatcctctccccaccacaccccgaagcaggagagcaacgcagtgcacgagagcttcaggccaaagctcgagcaggaggacagcaagaccaaactcgacaagcgggaggattcccagagcgacatcaaatgccacgggacaaaggaggaaggagaccgggagattacgagtagccgtgagagtccccctgtgagagccaagaagcctcgaaaagcaaggacagctttttccgaccaccagctcaatcaactggagcgtagctttgagcggcagaagtacctgagcgtgcaggatcgcatggacctggctgcagcgctcaacctcactgacacccaagtcaagacctggtaccagaaccgcaggaccaagtggaagcggcagacagcggtgggcctggagttgctggccgaggcagggaactactcggcgctgcagaggatgtttccatcgccttatttctatcacccaagcctgctgggcagcatggacagcactacggcggcggcggctgccgctgccatgtacagcagcatgtaccggactcctccagcaccccatccccagctgcagcggcccctggtgccccgtgtgctcatccacggcctagggcctgggggacagccagcccttaatccattgtccagccccatcccaggcaccccacacccccgg

SEQ ID NO: 6397 - DNA, 981 bp, Homo sapiens
  source 1..981: mol_type = genomic DNA
atggaaggctccaatggctttgggatcgactccattctctcccaccgcgcgggcagccccgcccttcccaagggggaccccttgctcggggactgccgttcgcccctggagctgagtccacgctcagagagcagcagcgactgctcttcgccagcctctccaggaagggactgtttggagacggggaccccacggcctggcggggcatccggcccaggtttggactcccacctgcagcccgggcagctctcagccccggcccagtcgcgcaccgtcacctcctcctttctgatcagggacatccttgccgactgcaaaccactcgcggcctgtgcaccctactctagcagcgggcagccggcagcccctgagcctgggggccgccttgcggccaaggccgcggaggactttagagacaagctggacaaaagtggcagcaacgcctcatcggactctgagtataaagtgaaggaggagggcgaccgcgagatctccagctccagggacagtcccccggtgcgcctgaaaaagccacgcaaggcgcgcacggccttcaccgaccatcagctggcgcagctggagcgcagcttcgagcggcagaagtacctgagcgtgcaggaccgcatggagctcgccgcctcgctcaacctcaccgacacgcaggtcaagacctggtaccagaaccgcaggactaaatggaagcgacagacggccgtcgggttggagctgctggcggaggcaggcaattactcagcgctccagcggatgttcccgtcgccttatttctacccgcagagtctggtttccaacctggaccccggcgcggcgctctacctgtaccgcggccccagcgcgccgccgcctgctctccagagacctctggtgccccgcatcctcatccacggactccagggcgccagcgagccgcccccgccgctgccccccctggccggcgtcctcccacgcgccgcgcagcctcgg

SEQ ID NO: 6398 - DNA, 2013 bp, Homo sapiens
  source 1..2013: mol_type = genomic DNA
atggcctcagtggctttagaggatgtggctgtgaacttcacccgagaagagtgggctttgctgggtccttgtcagaagaatctctacaaagatgtgatgcaggaaaccatcaggaacctggattgtgtagtaatgaaatggaaagaccagaacattgaagatcaatatagatatcccaggaaaaatctaagatgtcgtatgttagagagatttgttgaaagtaaagatggaactcaatgtggagaaacatctagccagattcaagatagtattgtgaccaagaacactcttcctggagtaggtccttgtgaaagcagtatgagaggagaaaaagtcatgggtcattcatcccttaattgttacatcagagttggtgctgggcacaaaccacatgagtatcatgaatgtggagagaagccagatacgcataaacaacgtgggaaagccttcagttaccacaactcatttcaaacacatgagaggcttcacactggaaagaaaccatatgattgtaaagaatgtgggaagtccttcagttctttgggaaaccttcaaagacacatggcagtgcagcgtggagatggaccttataaatgtaagttgtgtgggaaagcgtttttttggcccagtttattacatatgcatgaaagaacgcacactggagagaaaccatatgaatgtaagcagtgttctaaagccttttctttttacagttcctatctaagacatgaaagaacacatactggggagaaaccgtatgaatgtaaacagtgttctaaagcctttcctttttacagttcctatctaagacatgaaagaacacatactggggagaaaccatataaatgtaagcagtgttctaaagccttccctgattccagttcttgtctaatacatgaaagaactcacactggagagaaaccctatacatgtaaacaatgtgggaaagccttcagtgtttccggttcccttcaaagacatgaaaccactcacagtgcagagaaaccctatgcatgtcagcaatgtgggaaagcgtttcatcatctgggaagctttcaaagacacatgataaggcacactggaaatggacctcataaatgtaagatatgtgggaaaggctttgattgtcctagttcactgcaaagtcatgaaagaactcacactggagagaaaccctatgaatgcaagcagtgtgggaaagcattatctcatcgctcaagctttcgaagtcatatgataatgcacactggagatggacctcataaatgcaaggtatgtgggaaagcctttgtttatcccagtgtatttcaaagacatgaaaggactcacactgcagagaaaccctataaatgtaaacaatgtggcaaagcctaccgtatttccagttcccttcgaaggcatgaaacaactcatactggagagaaaccctataaatgcaaacttgggaaagcctgtattgatttctgttcctttcaaaatcacaaaacaactcacactggagagaagccatatgagtgtaaggaatgtgggaaagcattcagtcgtttcagatacctttctcgacataaaaggactcacacaggagagaaaccttatgagtgtaaaacatgtaggaaagccttcggtcattatgataacttaaaggtacatgaaagaattcactctggagagaagccgtatgaatgtaaggaatgtgggaaagcattctcttggctcacttgctttctacgacatgaaagaattcacatgagagagaaatcctatgaatgtccacaatgtggtaaagccttcactcattcccgttttcttcaaggacatgaaaaaactcatactggagagaacccgtatgaatgtaaggaatgtgggaaagcatttgcttctctcagttccttgcatagacataaaaagactcactggaaaaaaactcacactggagagaacccatatgaatgtaaggaatgtgggaaagcatttgcttctctcagttccttgcatagacataaaaagactcac

SEQ ID NO: 6399 - DNA, 2316 bp, Homo sapiens
  source 1..2316: mol_type = genomic DNA
atgaggcgaagagagggccatggcaccgactccgagatgggtcaaggacccgtacgggagtcgcaatcctcagaccctcccgcgctccagttccggataagcgagtataagccgctgaacatggcgggagtggagcagcccccgagccccgagctgcggcaggaaggcgtgaccgaatacgaagatggcggggccccggcgggagatggcgaggcgggcccccaacaggcggaggaccacccccagaatcctccagaagatcccaatcaggaccccccagaggatgatagcacctgtcagtgccaggcgtgcgggcctcaccaagccgcgggtccagatcttggttcctctaatgatggctgccctcagctgttccaggagcggtcagtcatagtggagaactcctcaggctctaccagcgcttctgagctcctcaaacccatgaagaagaggaagcgcagggaataccagagcccatcagaggaggagtcggagccagaggccatggagaagcaagaagaaggaaaggacccagagggacaacccactgctagcaccccagagagtgaggagtggagcagcagccagcctgcaacaggtgagaagaaggaatgctggtcgtgggagtcctacctagaggagcagaaggccattactgctccagtcagcctcttccaggactcccaggcagtcactcacaacaagaatggcttcaaactgggcatgaagttggaaggcattgaccctcaacacccgtccatgtacttcatcctcaccgtggctgaggtatgtggctatcgcctacgcctgcactttgatgggtattctgagtgccatgacttctgggtcaatgccaactcccctgacattcaccctgctggctggttcgagaagacgggccacaagctgcagcctcccaaaggttacaaggaggaggagttcagctggagccagtacctgcgcagcacaagagctcaggctgcccccaagcacctgtttgtgagccagagccacagtcccccacccctgggcttccaggtgggcatgaagctggaggctgttgaccgcatgaacccgtcccttgtctgcgtggccagtgtgaccgatgtggtggacagccgcttcctggtgcactttgacaactgggatgatacttatgactactggtgtgatcccagcagcccctacatccacccagtgggctggtgccagaagcaaggaaagcccctcacccctccacaagactacccagaccctgataacttctgttgggagaaatatctggaagaaactggggcctctgctgtccccacctgggccttcaaggtgcgaccccctcacagcttcctggtcaatatgaagctggaggctgtggaccgcaggaacccagccctgattcgcgtggccagcgtggaggatgtggaggaccatcggataaagatccactttgatggctggagtcatggctatgatttctggatcgacgctgaccacccagacatccaccctgccggctggtgctccaagacaggacatcccctgcagcctcctctcggacccagagagcccagctctgcctcccctgggggctgtccccctctcagctataggagcctgccccacactaggacctccaaatacagctttcaccaccggaagtgccccactcctggttgcgacggctctggccatgtcacaggcaagttcacagctcaccattgcctctcaggctgcccactggctgagaggaaccagagccggctgaaagcggagctgtctgactcggaggcctcagcccgcaagaagaacctctcaggcttctccccaaggaagaagcctcgccatcacggccgaattggacgccctccgaagtatcgaaagattccgcaggaagatttccagaccctcacgcccgatgtcgtgcaccagtccctcttcatgtcagccctgtcggcccaccctgaccgctcactctcagtgtgctgggagcagcactgcaagctcctgccaggagtagcgggcatctcagcctcgacagtcgccaagtggaccatcgatgaggtcttcggctttgttcagaccctgacaggttgtgaggaccaagcacgcctcttcaaagacgaggcaagaatagtcagagtgacccatgtatctgggaagactctagtctggactgtggcccagcttggggaccttgtgtgctcagatcatcttcaggaaggaaaaggcatcctggagacaggagtccattcactcctctgctctctacccactcatttgcttgccaaacttagctttgccagtgatagtcaatat

SEQ ID NO: 6400 - DNA, 2520 bp, Homo sapiens
  source 1..2520: mol_type = genomic DNA
atgcacttggtggccggagacagccccggttctggtcctcacctgcccgcaactgccttcatcattccagccagttcggccaccctcggcctgcccagcagtgccctggatgtgtcttgctttccccgggagccaatccatgtgggtgccccggagcaagtggccggctgcgaaccagtttctgccaccgtcctgccgcagcttagcgccgggccggccagctccagcaccagcacagtgcggcttctggaatggacagaggccgcggccccgcccccagggggcggcctgcggttccggataagcgagtataagccgctgaacatggcgggagtggagcagcccccgagccccgagctgcggcaggaaggcgtgaccgaatacgaagatggcggggccccggcgggagatggcgaggcgggcccccaacaggcggaggaccacccccagaatcctccagaagatcccaatcaggaccccccagaggatgatagcacctgtcagtgccaggcgtgcgggcctcaccaagccgcgggtccagatcttggttcctctaatgatggctgccctcagctgttccaggagcggtcagtcatagtggagaactcctcaggctctaccagcgcttctgagctcctcaaacccatgaagaagaggaagcgcagggaataccagagcccatcagaggaggagtcggagccagaggccatggagaagcaagaagaaggaaaggacccagagggacaacccactgctagcaccccagagagtgaggagtggagcagcagccagcctgcaacaggtgagaagaaggaatgctggtcgtgggagtcctacctagaggagcagaaggccattactgctccagtcagcctcttccaggactcccaggcagtcactcacaacaagaatggcttcaaactgggcatgaagttggaaggcattgaccctcaacacccgtccatgtacttcatcctcaccgtggctgaggtatgtggctatcgcctacgcctgcactttgatgggtattctgagtgccatgacttctgggtcaatgccaactcccctgacattcaccctgctggctggttcgagaagacgggccacaagctgcagcctcccaaaggttacaaggaggaggagttcagctggagccagtacctgcgcagcacaagagctcaggctgcccccaagcacctgtttgtgagccagagccacagtcccccacccctgggcttccaggtgggcatgaagctggaggctgttgaccgcatgaacccgtcccttgtctgcgtggccagtgtgaccgatgtggtggacagccgcttcctggtgcactttgacaactgggatgatacttatgactactggtgtgatcccagcagcccctacatccacccagtgggctggtgccagaagcaaggaaagcccctcacccctccacaagactacccagaccctgataacttctgttgggagaaatatctggaagaaactggggcctctgctgtccccacctgggccttcaaggtgcgaccccctcacagcttcctggtcaatatgaagctggaggctgtggaccgcaggaacccagccctgattcgcgtggccagcgtggaggatgtggaggaccatcggataaagatccactttgatggctggagtcatggctatgatttctggatcgacgctgaccacccagacatccaccctgccggctggtgctccaagacaggacatcccctgcagcctcctctcggacccagagagcccagctctgcctcccctgggggctgtccccctctcagctataggagcctgccccacactaggacctccaaatacagctttcaccaccggaagtgccccactcctggttgcgacggctctggccatgtcacaggcaagttcacagctcaccattgcctctcaggctgcccactggctgagaggaaccagagccggctgaaagcggagctgtctgactcggaggcctcagcccgcaagaagaacctctcaggcttctccccaaggaagaagcctcgccatcacggccgaattggacgccctccgaagtatcgaaagattccgcaggaagatttccagaccctcacgcccgatgtcgtgcaccagtccctcttcatgtcagccctgtcggcccaccctgaccgctcactctcagtgtgctgggagcagcactgcaagctcctgccaggagtagcgggcatctcagcctcgacagtcgccaagtggaccatcgatgaggtcttcggctttgttcagaccctgacaggttgtgaggaccaagcacgcctcttcaaagacgaggcaagaatagtcagagtgacccatgtatctgggaagactctagtctggactgtggcccagcttggggaccttgtgtgctcagatcatcttcaggaaggaaaaggcatcctggagacaggagtccattcactcctctgctctctacccactcatttgcttgccaaacttagctttgccagtgatagtcaatat

SEQ ID NO: 6401 - DNA, 1614 bp, Homo sapiens
  source 1..1614: mol_type = genomic DNA
atggctagagaattaagtgaaagcacagccctggatgcccagtctacagaagaccagatggagcttctggtcataaaggtggaggaagaagaagccggttttcccagtagcccagatctgggttctgagggctcccgcgagcgcttccgaggcttccgctacccggaggctgcaggcccccgcgaggcgctgagtcggctccgagagctctgccgacagtggctgcagcctgagatgcacagcaaggagcagatcctggagctgctggtgctggagcagttcctgaccatcctgccggggaatctgcagagctgggtgcgggagcagcatccagagagcggggaggaggtggtggtgctattggagtatttggagaggcagctggatgagccggcgccgcaggtttcaggtgttgaccaggggcaagaactgctctgttgcaagatggcactattgacaccagccccagggtcacaaagtagccaatttcagctaatgaaggctctgctcaagcatgaatctgtgggatcccagcctttacaagatagagttctccaggtccccgtgcttgcccatggaggatgctgcagagaagataaagtggtagcttctaggcttactccagagtcccaggggttgttgaaagtggaagatgtggccctgaccctcacccctgaatggacacagcaggattcatctcaggggaatctctgtagagatgaaaagcaggagaaccatggcagcctggtctccctgggtgatgaaaaacagactaagagcagggacttgcctccagctgaggagcttccagaaaaggagcatgggaagatatcgtgccacctgagagaagacattgcccagattcctacatgtgcagaagctggtgaacaggagggcaggctacaaagaaagcagaaaaatgccacaggagggaggcggcacatctgccatgaatgtggaaagagttttgctcaaagctcaggcctgagtaaacacaggagaatccacactggtgagaaaccctacgaatgtgaagagtgtggcaaagccttcattgggagctctgcccttgtcattcatcagagagtccacactggtgagaagccatatgagtgtgaagaatgtggtaaggccttcagtcatagctcagaccttatcaagcatcagagaacccacactggggagaagccctatgagtgtgatgactgtgggaagaccttcagccagagctgcagcctccttgaacatcacagaatccacactggggagaagccgtatcagtgcagtatgtgtggcaaagcctttaggcgaagttcacatctcctgagacatcagaggatccatactggggataaaaatgttcaggaacctgagcagggagaggcctggaaaagtaggatggaaagccagttggaaaatgttgaaactcccatgtcttataaatgtaatgagtgtgaaagaagtttcactcagaatacaggcctcattgaacatcaaaaaatccacactggtgagaaaccctatcagtgtaatgcgtgtggaaaaggcttcacccgaatttcataccttgttcaacatcagagaagccatgtagggaaaaacatcctatcacag

SEQ ID NO: 6402 - DNA, 1170 bp, Homo sapiens
  source 1..1170: mol_type = genomic DNA
atggcactattgacaccagccccagggtcacaaagtagccaatttcagctaatgaaggctctgctcaagcatgaatctgtgggatcccagcctttacaagatagagttctccaggtccccgtgcttgcccatggaggatgctgcagagaagataaagtggtagcttctaggcttactccagagtcccaggggttgttgaaagtggaagatgtggccctgaccctcacccctgaatggacacagcaggattcatctcaggggaatctctgtagagatgaaaagcaggagaaccatggcagcctggtctccctgggtgatgaaaaacagactaagagcagggacttgcctccagctgaggagcttccagaaaaggagcatgggaagatatcgtgccacctgagagaagacattgcccagattcctacatgtgcagaagctggtgaacaggagggcaggctacaaagaaagcagaaaaatgccacaggagggaggcggcacatctgccatgaatgtggaaagagttttgctcaaagctcaggcctgagtaaacacaggagaatccacactggtgagaaaccctacgaatgtgaagagtgtggcaaagccttcattgggagctctgcccttgtcattcatcagagagtccacactggtgagaagccatatgagtgtgaagaatgtggtaaggccttcagtcatagctcagaccttatcaagcatcagagaacccacactggggagaagccctatgagtgtgatgactgtgggaagaccttcagccagagctgcagcctccttgaacatcacagaatccacactggggagaagccgtatcagtgcagtatgtgtggcaaagcctttaggcgaagttcacatctcctgagacatcagaggatccatactggggataaaaatgttcaggaacctgagcagggagaggcctggaaaagtaggatggaaagccagttggaaaatgttgaaactcccatgtcttataaatgtaatgagtgtgaaagaagtttcactcagaatacaggcctcattgaacatcaaaaaatccacactggtgagaaaccctatcagtgtaatgcgtgtggaaaaggcttcacccgaatttcataccttgttcaacatcagagaagccatgtagggaaaaacatcctatcacag

SEQ ID NO: 6403 - DNA, 2901 bp, Homo sapiens
  source 1..2901: mol_type = genomic DNA
atggctgtcgccctcgactctcagatcgacgcgcccctggaggttgagggatgcctaataatgaaggtggaaaaggaccctgagtgggcatcagagcccattctggaaggatcggatagctctgagaccttccgcaaatgcttcaggcaattctgttatgaggatgtgactggaccccatgaagctttcagtaaactctgggaactttgctgccggtggctgaagccagaaatgcgttccaaggagcaaatacttgagctgctggtgattgagcagtttctcaccattttacccgagaagattcaggcttgggcacagaagcagtgtccgcaaagtggagaggaagcggtggccctggtagtgcatttggagaaagagactggaagactaagacagcaggtcagcagtcccgtgcaccgggagaagcactccccacttggagcagcgtgggaggtggcagacttccagccagagcaggtggagacccaacccagggcggtgtctcgggaggaacctggaagcctccactcaggacaccaggaacagctgaaccgaaagcgagaacgtcggcccttacccaagaatgctcggccttctccctgggttcctgcccttgctgatgaatggaataccctagatcaggaagtgacaaccacacggcttcctgctgggtcccaggaaccagtgaaagatgtccacgtggccagaggcttttcctacagaaagagtgtgcatcagattcctgcccaaagggacctctaccgggatttcaggaaggagaatgttgggaacgtggtctccctgggaagtgcagtgtctacatctaacaagataacccggttggaacagagaaaggagccatggactctaggtctgcattcctctaacaagagaagtatcctacgaagcaactacgtcaaggaaaagtcagttcatgctattcaggtccctgcaaggagtgcaggaaaaacatggagagagcagcagcagtggggtttagaagatgaaaagatagcaggtgtgcattggagctatgaggaaacaaagactttcctggcaattctcaaagagtctcgcttttatgaaacacttcaggcctgtccccgaaatagccaagtgtatggtgctgtggctgaatggttgcgagaatgtggcttccttagaaccccagaacagtgtcgaaccaagttcaaaagtctccagaaaagctatcgaaaggtgagaaatggccacatgctagaaccctgcgccttctttgaggacatggatgctttgttgaaccctgcagcccgtgctccgtccactgataaaccaaaggagatgatacctgtccccagactgaagagaattgccatcagtgctaaggaacacatcagcttggtggaggaggaggaagctgcagaagattctgatgatgatgaaataggcatcgaatttatccgcaagtctgaaatccatggtgcccctgtcttgtttcagaatctcagtggcgtgcactggggctatgaagaaaccaagacttttcttgatatcctccgtgagactcggttttatgaagcgcttcaagcctgtcatcggaagagcaaattgtatggggctgtagctgaacagcttcgagagtgcggcttcctccggacaccagaacagtgccgaaccaagttcaaaagccttcagaagagttaccgcaaggtgaaaaatggccacgtgctagagtcctgcgcgttctacaaggagatggatgccctgattaactctcgggcatctgctccttcccccagcaccccagaggaagtcccatcaccttcaaggcaagaaagagggggtattgaggttgaaccccaggaacctacaggctgggaacctgaagagacctcacaggaggcagtaatagaagactcttgcagtgagagaatgagcgaggaggaaattgtgcaagagccagagttccagggacctccaggtctactgcagagcccaaatgattttgaaatcggaagtagcatcaaggaggatccaacacagatagtatataaggacatggaacagcatagggcattaatagaaaagtctaaaagagttgtttcccagagtaccgaccccagcaaatatcgcaaaagggaatgcatctcaggaagacaatgggaaaatcttcaaggaattagacagggaaagccgatgtctcagcctagagatttagggaaagccgttgtgcatcagaggccttttgtggggaagagaccctacagacttctcaaatatggagaaagctttggaaggagcactcgtctgatgtgccggatgacccaccacaaggagaatccttacaagtgtggtgtctgtgggaagtgctttggtagaagcaggagcctgatcagacaccaaagaatccacacaggcgaaaaaccttttaaatgtcttgactgtggaaaaagctttaatgactcctcaaattttggtgcccaccagagaatccacacaggagagaaaccctacagatgcggagagtgtggaaaatgctttagtcagagctctagtcttattatacatcagagaacgcacaccggtgagaagccctatcagtgtggagagtgtgggaaaagtttcaccaacagttctcatttcagcgcccaccggagagttcacactggggagaatccctacaaatgtgtggactgtgaaaaaagtttcaataactgtacgagatttcgagaacatcggagaatacacactggagagaagccctatggatgtgcccagtgtggcaaacgtttcagtaagagttctgttcttaccaaacatcgggaagttcatgtgagagaaaagcctctgccacaccctccatctctgtattgccctgagaacccacataagggaaagactgatgaatttaggaaaactttt

SEQ ID NO: 6404 - DNA, 2517 bp, Homo sapiens
  source 1..2517: mol_type = genomic DNA
atgataatgaccgaatcccgagaagttatagacttagaccccccagctgagacttcccaggagcaggaagaccttttcatagtgaaggtggaagaagaagactgcacctggatgcaggagtacaacccgccaacgtttgagactttttaccagcgcttcaggcacttccagtaccatgaggcttcaggaccccgggaggctctcagccaactccgggtgctctgctgtgagtggctgaggcccgagctgcacacgaaggagcagatcctggagctgctggtgctggagcagttcctgaccatcctgcctgaagagttccagccctgggtgagggaacatcaccctgaaagtggagaagaggcggtggccgtgatagaaaatatacagcgagaacttgaggaacgcagacagcagattgttgcctgccctgatgtgcttcctcggaagatggcaacacctggagcagtgcaggagtcctgcagcccccatcccctgaccgtggacacccagcctgagcaagcgccacagaagcctcgtctcctggaggaaaatgcccttcctgttctccaagttccttcccttcccctgaaggacagccaggagctgacagcttcacttctctcaactgggtcccagaagttggtgaaaattgaagaggtggctgatgtggctgtatccttcatcctggaggaatgggggcatttggaccagtcccagaagtccctttatagggatgacaggaaggagaactatgggagtattacttccatgggttatgagtccagggacaatatggagctcatagtgaagcagatttctgatgactctgaatcacactgggtggcgccagaacacaccgaaaggagcgttcctcaggatccagactttgcagaagtcagtgaccttaaaggcatggtacaaaggtggcaggtcaaccccactgtggggaaatcaaggcagaatccttcccagaaaagggatctggatgcaatcacagacatcagccctaagcaaagcacacatggcgagagagggcacagatgcagcgattgtggcaaattcttcctccaagcctcaaactttattcagcatcggcgcatccacactggagaaaaaccgtttaagtgcggagaatgtgggaagagctacaatcagcgggtgcacctcacccagcaccagcgcgtccacacaggggagaaaccctacaaatgtcaggtgtgcggaaaggctttccgggtgagttcccacctggttcagcaccacagtgtccacagcggagagaggccctatggctgcaatgagtgtgggaagaacttcggtcgccattcgcatctgatcgaacacctaaaacgccacttcagggagaaatcccagagatgcagtgacaaaagaagtaagaacacaaaattaagtgttaagaagaaaatttcagaatattcagaagcagacatggaactatctggaaaaacccaaagaaatgtttctcaagttcaagattttggagaaggctgtgagtttcaaggcaagctggatagaaagcagggaattcccatgaaagagatactaggacaaccatcttcaaagaggatgaactacagtgaagtcccatatgtccacaaaaaatcctccactggagagagaccacataaatgtaacgagtgtgggaaaagcttcattcagagtgcacatcttattcaacatcaaagaatacacactggggagaaaccattcaggtgtgaggaatgtgggaaaagctacaaccaacgcgtgcacctaactcagcatcagcgcgtccacacaggtgagaagccctacacctgtcccttatgtgggaaagccttcagagtgaggtcccaccttgttcagcatcagagcgtgcacagtggggagagacccttcaagtgtaacgaatgtgggaaaggctttgggaggcgttcccacctggctggacatcttcgactccactcccgagagaaatcccatcagtgtcgtgaatgtggggaaatcttttttcagtacgttagcctaattgaacatcaggtgctccacatgggtcagaaaaatgaaaaaaatggcatctgtgaggaagcatatagttggaacttgacagtgattgaagacaagaagattgagttacaagagcagccttatcagtgtgatatctgtggaaaagcctttggttatagctcagacctcattcagcattacagaactcatacagcagagaagccctatcaatgtgatatatgtagagaaaatgttggccagtgttcccacaccaaacaacatcaaaaaatctactccagcacaaaatcccatcaatgtcatgaatgtggcagaggcttcactctgaagtcacatcttaatcaacatcagagaatccatactggtgagaaaccttttcaatgtaaagaatgtggaatgaatttcagctggagttgtagcctctttaaacacctgagaagccatgagaggacagatcccataaataccttaagtgtagaggggtctctgttg

SEQ ID NO: 6405 - DNA, 2262 bp, Homo sapiens
  source 1..2262: mol_type = genomic DNA
atgaccactgcaggcaggggaaatttaggcctcatccccaggagcactgctttccagaagcaagaggggcgcctgactgtgaagcaggagccagcaaaccagacctgggggcagggcagcagtctccagaagaactatcctcctgtctgcgaaatcttccggctacacttcaggcaattgtgttaccacgagatgtctgggccgcaggaagcattgagccggcttcgggagctctgccgctggtggctcatgccagaggtgcacaccaaggagcagatcctggagctgctggtgcttgagcagttcctgagcatcctccctggggagctccggacctgggtgcagctgcatcaccctgagagtggtgaggaggctgtggctgtggtggaggatttccagagacacctcagtggatcagaggaggtttcagccccagcacagaaacaggaaatgcattttgaggagacaacagctctgggtacaacaaaggaatctcctcctacctcacccctcagtgggggctcagcccctggagcccacctggagcctccttatgacccagggacacaccacctccccagtggggacttcgctcaatgtacttctccagttcctacccttcctcaagtggggaactcaggagaccaagcaggggcaactgtacttcggatggtcaggccccaggatactgtggcatatgaggacctatctgtagactacactcagaagaaatggaaaagtctcacactcagtcagagagccctgcagtggaacatgatgccagaaaatcaccatagcatggcctccttggcaggtgagaacatgatgaagggttcagagttgactccaaagcaggaattttttaaaggatcagagtcatctaacaggacatcagggggactctttggggtggttcctggggcagcagagactggagatgtttgtgaagatactttcaaggagttagaaggacaaacctcagatgaagaagggagcagactagaaaatgatttcttggaaataacagatgaagataagaaaaaatccacaaaagacagatatgacaaatataaggaagttggggaacatccacctctgtcttccagtcctgttgaacatgaaggagttttaaagggacagaaatcctatcgatgtgatgaatgtggcaaagctttcaatcggagttctcaccttattggccatcagagaatccacactggagagaaaccctatgagtgtaatgagtgtgggaagaccttcaggcaaacctcccagctcattgttcatctcagaacccacacaggggaaaaaccctatgaatgcagtgagtgtggaaaggcctataggcacagctcccatctcattcaacaccagagactccataatggggagaaaccctataaatgtaatgaatgtgcaaaagcctttactcagagttcccgactcactgaccaccagagaacccatactggggagaaaccttatgaatgcaatgagtgtggagaggcattcattcgaagcaaaagtcttgctcgacatcaggtcctgcacactggtaagaaaccttacaaatgcaatgagtgtgggagagcattctgttccaatagaaatctcattgaccatcagagaatccacactggggagaagccttatgagtgtagtgaatgtggcaaagccttcagtcggagtaaatgtcttattcgacatcagagcctccatactggggaaaagccatacaaatgtagtgaatgtgggaaagccttcaatcagaactctcaactcattgagcatgagcgaattcatactggagaaaaaccttttgaatgtagcgagtgtggtaaggcatttggtctgagtaaatgtcttattcggcaccagagacttcacacgggtgaaaagccctataaatgcaatgagtgtggaaaatccttcaatcaaaactcacaccttattatacaccagagaattcacactggtgagaaaccctatgaatgtaatgagtgtgggaaggtattcagttatagctccagccttatggtacatcagagaacccatactggggaaaaaccctataaatgcaatgattgtgggaaagcttttagtgacagctcacagcttattgtacaccagagagtccacaccggagagaaaccttatgaatgtagtgaatgtgggaaagcctttagtcagcgttccacttttaatcaccaccagcgaactcacactggagagaagtcctcaggtctggcttggtcagtttct

SEQ ID NO: 6406 - DNA, 1119 bp, Homo sapiens
  source 1..1119: mol_type = genomic DNA
atgcattttgaggagacaacagctctgggtacaacaaaggaatctcctcctacctcacccctcagtgggggctcagcccctggagcccacctggagcctccttatgacccagggacacaccacctccccagtggggacttcgctcaatgtacttctccagttcctacccttcctcaagtggggaactcaggagaccaagcaggggcaactgtacttcggatggtcaggccccaggatactgtggcatatgaggacctatctgtagactacactcagaagaaatggaaaagtctcacactcagtcagagagccctgcagtggaacatgatgccagaaaatcaccatagcatggcctccttgggtgagaacatgatgaagggttcagagttgactccaaagcaggaattttttaaaggatcagagtcatctaacaggacatcagggggactctttggggtggttcctggggcagcagagactggagatgtttgtgaagatactttcaaggagttagaaggacaaacctcagatgaagaagggagcagactagaaaatgatttcttggaaataacagatgaagataagaaaaaatccacaaaagacagatatgacaaatataaggaagttggggaacatccacctctgtcttccagtcctgttgaacatgaaggagttttaaagggacagaaatcctatcgatgtgatgaatgtggcaaagctttcaatcggagttctcaccttattggccatcagagaatccacactggagagaaaccctatgagtgtaatgagtgtgggaagaccttcaggcaaacctcccagctcattgttcatctcagaacccacacaggggaaaaaccctatgaatgcagtgagtgtggaaaggcctataggcacagctcccatctcattcaacaccagagactccataatggggagaaaccctataaatgtaatgaatgtgcaaaagcctttactcagagttcccgactcactgaccaccagagaacccatactggggagaaaccttatgaatgcaatgagtgtggagaggcattcattcgaagcaaaagtcttgctcgacatcaggtcctgcacactggctggagtacaatggcg

SEQ ID NO: 6407 - DNA, 828 bp, Homo sapiens
  source 1..828: mol_type = genomic DNA
atgaccactgcaggcaggggaaatttaggcctcatccccaggagcactgctttccagaagcaagaggggcgcctgactgtgaagcaggagccagcaaaccagacctgggggcagggcagcagtctccagaagaactatcctcctgtctgcgaaatcttccggctacacttcaggcaattgtgttaccacgagatgtctgggccgcaggaagcattgagccggcttcgggagctctgccgctggtggctcatgccagaggtgcacaccaaggagcagatcctggagctgctggtgcttgagcagttcctgagcatcctccctggggagctccggacctgggtgcagctgcatcaccctgagagtggtgaggaggctgtggctgtggtggaggatttccagagacacctcagtggatcagaggaggtttcagccccagcacagaaacaggaaatgcattttgaggagacaacagctctgggtacaacaaaggaatctcctcctacctcacccctcagtgggggctcagcccctggagcccacctggagcctccttatgacccagggacacaccacctccccagtggggacttcgctcaatgtacttctccagttcctacccttcctcaagtggggaactcaggagaccaagcaggggcaactgtacttcggatggtcaggccccaggatactgtggcatatgaggacctatctgtagactacactcagaagaaatggaaaagtctcacactcagtcagagagccctgcagtggaacatgatgccagaaaatcaccatagcatggcctccttgggctggagtacaatggcg

SEQ ID NO: 6408 - DNA, 4710 bp, Homo sapiens
  source 1..4710: mol_type = genomic DNA
atggaaccggggtgtgacgagttcctgccgccaccggagtgcccggtttttgagcctagctgggctgaattccaagacccgcttggctacattgcgaaaataaggcccatagcagagaagtctggcatctgcaaaatccgcccacccgcggattggcagcctccttttgcagtagaagttgacaatttcagatttactcctcgcgtccaaaggctaaatgaactggaggcccaaactagagtgaaattgaactatttggatcagattgcaaaattctgggaaattcaaggctcctctttaaagattcccaatgtggagcggaagatcttggacctctacagccttagtaagattgtgattgaggaaggtggctatgaagccatctgcaaggatcgtcggtgggctcgagttgcccagcgtctccactacccaccaggcaaaaacattggctccctgctacgatcacattacgaacgcattatttacccctatgaaatgtttcagtctggagccaaccatgtgcaatgtaacacacacccgtttgacaatgaggtaaaagataaggaatacaagccccacagcatcccccttagacagtctgtgcagccttcaaagttcagcagctacagtcgacgggcaaaaaggctacagcctgatccagagcctacagaggaggacattgagaagcatccagagctaaagaagttacagatatatgggccaggtcccaaaatgatgggcttgggccttatggctaaggataaggataagactgtgcataagaaagtcacatgccccccaactgttacggtgaaggatgagcaaagtggaggtgggaacgtgtcatcaacattgctcaagcagcacttgagcctagagccctgcactaagacaaccatgcaacttcgaaagaatcacagcagtgcccagtttattgactcatatatttgccaagtatgctcccgtggggatgaagatgataagcttcttttctgtgatggctgtgatgacaattaccacatcttctgcttgttaccaccccttcctgaaatccccagaggcatctggaggtgcccaaaatgtatcttggcggagtgtaaacagcctcctgaagcttttggatttgaacaggctacccaggagtacagtttgcagagttttggtgaaatggctgattccttcaagtccgactacttcaacatgcctgtacatatggtgcctacagaacttgtagagaaggaattctggaggctggtgagcagcattgaggaagacgtgacagttgaatatggagctgatattcattccaaagaatttggcagtggctttcctgtcagcaatagcaaacaaaacttatctcctgaggagaagagacaaagtctcactgtgttgaccaggctgatctcaagcttctgggctcaagcagtcctcccaccttggcctcccaaagtgttgggattacaggagtatgcgaccagtggttggaacctgaatgtgatgccagtgctagatcagtctgttctctgtcacatcaatgcagacatctcaggcatgaaggtgccctggctgtacgtgggcatggttttctcagcattttgttggcatattgaggatcactggagttactctattaactatctgcattggggtgagccgaagacctggtatggtgtaccctccctggcagcagagcatttggaggaggtgatgaagatgctgacacctgagctgtttgatagccagcctgatctcctacaccagcttgtcactctcatgaatcccaacactttgatgtcccatggtgtgccagttgtccgcacaaaccagtgtgcaggggagtttgtcatcacttttcctcgtgcttaccacagtggttttaaccaaggctacaattttgctgaagctgtcaacttttgtactgctgactggctacctgctggacgccagtgcattgaacactaccgccggctccggcgctattgtgtcttctcccacgaggagctcatctgcaagatggctgccttcccagagacgttggatctcaatctagcagtagctgtgcacaaggagatgttcattatggttcaggaggagcgacgtctacgaaaggcccttttggagaagggcgtcacggaggctgagcgagaggcttttgagctgctcccagatgatgaacgccagtgcatcaagtgcaagaccacgtgcttcttgtcagccctggcctgctacgactgcccagatggccttgtatgcctttcccacatcaatgacctctgcaagtgctctagtagccgacagtacctccggtatcggtacaccttggatgagctccccaccatgctgcataaactgaagattcgggctgagtcttttgacacctgggccaacaaagtgcgagtggccttggaggtggaggatggccgtaaacgcagctttgaagagctaagggcactggagtctgaggctcgtgagaggaggtttcctaatagtgagctgcttcagcgactgaagaactgcctgagtgaggtggaggcttgtattgctcaagtcctggggctggtcagtggtcaggtggccaggatggacactccacagctgaccttgactgaactccgggtccttcttgagcagatgggcagcctgccctgtgccatgcatcagattggggatgtcaaggatgtcctggaacaggtggaggcctatcaagctgaggctcgtgaggctctggccacactgccctctagtccagggctattgcggtccctgttggagagggggcagcagctgggtgtagaggtgcctgaagcccatcagcttcagcagcaggtggagcaggcgcaatggctagatgaagtgaagcaggccctggccccttctgctcacaggggctctctggtcatcatgcaggggcttttggttatgggtgccaagatagcctccagcccttctgtggacaaggcccgggctgagctgcaagaactactgaccattgcagagcgctgggaagaaaaggctcatttctgcctggaggccaggcagaagcatccaccagccacattggaagccataattcgtgagacagaaaacatccctgttcacctgcctaacatccaggctctcaaagaagctctgactaaggcacaagcttggattgctgatgtggatgagatccaaaatggtgaccactacccctgtctagatgacttggagggcctggtggctgtgggccgggacctgcctgtggggctggaagagctgagacagctagagctgcaggtattgacagcacattcctggagagagaaggcctccaagacctttctcaagaagaattcttgctacacactgcttgaggtgctttgcccgtgtgcagacgctggctcagacagcaccaagcgtagccggtggatggagaaggcgctggggttgtaccagtgtgacacagagctgctggggctgtctgcacaggacctcagagacccaggctctgtgattgtggccttcaaggaaggggaacagaaggagaaggagggtatcctgcagctgcgtcgcaccaactcagccaagcccagtccactggcaccatccctcatggcctcttctccgacttctatctgtgtgtgtgggcaggtgccagctggggtgggagttctgcagtgtgacctgtgtcaggactggttccatgggcagtgtgtgtcagtgccccatctcctcacctctccaaagcccagtctcacttcatctccactgctagcctggtgggaatgggacacaaaattcctgtgtccactgtgtatgcgctcacgacggccacgcctagagacaatcctagccttgctggttgccctgcagaggctgcccgtgcggctgcctgagggtgaggcccttcagtgtctcacagagagggccattggctggcaagaccgtgccagaaaggctctggcctctgaagatgtgactgctctgttgcgacagctggctgagcttcgccaacagctacaggccaaacccagaccagaggaggcctcagtctacacttcagccactgcctgtgaccctatcagagaaggcagtggcaacaatatttctaaggtccaagggctgctggagaatggagacagtgtgaccagtcctgagaacatggctccaggaaagggctctgacctggagctactgtcctcactgttgccgcagttgactggccctgtgttggagctgcctgaggcaatccgggctcccctggaggagctcatgatggaaggggacctgcttgaggtgaccctggatgagaaccacagcatctggcagctgctgcaggctggacagcctccagacctggacagaattcgcacacttctggagctggaaaaatttgaacatcaagggagtcggacaaggagccgggctctggagaggcgacggcggcggcagaaggtggatcagggtagaaacgttgagaatcttgttcaacaggagcttcagtcaaaaagggctcggagctcagggattatgtctcaggtgggccgagaagaagaacattatcaggagaaagcagaccgtgaaaatatgttcctgacaccttccacagaccacagccctttcttgaaaggaaaccaaaatagcttacaacacaaggattcaggctcttcagctgcttgtccttctttaatgcctttgctacaactctcctactctgatgagcaacagttg

SEQ ID NO: 6409 - DNA, 4446 bp, Homo sapiens
  source 1..4446: mol_type = genomic DNA
atggaaccggggtgtgacgagttcctgccgccaccggagtgcccggtttttgagcctagctgggctgaattccaagacccgcttggctacattgcgaaaataaggcccatagcagagaagtctggcatctgcaaaatccgcccacccgcggattggcagcctccttttgcagtagaagttgacaatttcagatttactcctcgcgtccaaaggctaaatgaactggaggcccaaactagagtgaaattgaactatttggatcagattgcaaaattctgggaaattcaaggctcctctttaaagattcccaatgtggagcggaagatcttggacctctacagccttagtaagcaatgtaacacacacccgtttgacaatgaggtaaaagataaggaatacaagccccacagcatcccccttagacagtctgtgcagccttcaaagttcagcagctacagtcgacgggcaaaaaggctacagcctgatccagagcctacagaggaggacattgagaagcatccagagctaaagaagttacagatatatgggccaggtcccaaaatgatgggcttgggccttatggctaaggataaggataagactgtgcataagaaagtcacatgccccccaactgttacggtgaaggatgagcaaagtggaggtgggaacgtgtcatcaacattgctcaagcagcacttgagcctagagccctgcactaagacaaccatgcaacttcgaaagaatcacagcagtgcccagtttattgactcatatatttgccaagtatgctcccgtggggatgaagatgataagcttcttttctgtgatggctgtgatgacaattaccacatcttctgcttgttaccaccccttcctgaaatccccagaggcatctggaggtgcccaaaatgtatcttggcggagtgtaaacagcctcctgaagcttttggatttgaacaggctacccaggagtacagtttgcagagttttggtgaaatggctgattccttcaagtccgactacttcaacatgcctgtacatatggtgcctacagaacttgtagagaaggaattctggaggctggtgagcagcattgaggaagacgtgacagttgaatatggagctgatattcattccaaagaatttggcagtggctttcctgtcagcaatagcaaacaaaacttatctcctgaggagaaggagtatgcgaccagtggttggaacctgaatgtgatgccagtgctagatcagtctgttctctgtcacatcaatgcagacatctcaggcatgaaggtgccctggctgtacgtgggcatggttttctcagcattttgttggcatattgaggatcactggagttactctattaactatctgcattggggtgagccgaagacctggtatggtgtaccctccctggcagcagagcatttggaggaggtgatgaagatgctgacacctgagctgtttgatagccagcctgatctcctacaccagcttgtcactctcatgaatcccaacactttgatgtcccatggtgtgccagttgtccgcacaaaccagtgtgcaggggagtttgtcatcacttttcctcgtgcttaccacagtggttttaaccaaggctacaattttgctgaagctgtcaacttttgtactgctgactggctacctgctggacgccagtgcattgaacactaccgccggctccggcgctattgtgtcttctcccacgaggagctcatctgcaagatggctgccttcccagagacgttggatctcaatctagcagtagctgtgcacaaggagatgttcattatggttcaggaggagcgacgtctacgaaaggcccttttggagaagggcgtcacggaggctgagcgagaggcttttgagctgctcccagatgatgaacgccagtgcatcaagtgcaagaccacgtgcttcttgtcagccctggcctgctacgactgcccagatggccttgtatgcctttcccacatcaatgacctctgcaagtgctctagtagccgacagtacctccggtatcggtacaccttggatgagctccccaccatgctgcataaactgaagattcgggctgagtcttttgacacctgggccaacaaagtgcgagtggccttggaggtggaggatggccgtaaacgcagctttgaagagctaagggcactggagtctgaggctcgtgagaggaggtttcctaatagtgagctgcttcagcgactgaagaactgcctgagtgaggtggaggcttgtattgctcaagtcctggggctggtcagtggtcaggtggccaggatggacactccacagctgaccttgactgaactccgggtccttcttgagcagatgggcagcctgccctgtgccatgcatcagattggggatgtcaaggatgtcctggaacaggtggaggcctatcaagctgaggctcgtgaggctctggccacactgccctctagtccagggctattgcggtccctgttggagagggggcagcagctgggtgtagaggtgcctgaagcccatcagcttcagcagcaggtggagcaggcgcaatggctagatgaagtgaagcaggccctggccccttctgctcacaggggctctctggtcatcatgcaggggcttttggttatgggtgccaagatagcctccagcccttctgtggacaaggcccgggctgagctgcaagaactactgaccattgcagagcgctgggaagaaaaggctcatttctgcctggaggccaggcagaagcatccaccagccacattggaagccataattcgtgagacagaaaacatccctgttcacctgcctaacatccaggctctcaaagaagctctgactaaggcacaagcttggattgctgatgtggatgagatccaaaatggtgaccactacccctgtctagatgacttggagggcctggtggctgtgggccgggacctgcctgtggggctggaagagctgagacagctagagctgcaggtattgacagcacattcctggagagagaaggcctccaagacctttctcaagaagaattcttgctacacactgcttgaggtgctttgcccgtgtgcagacgctggctcagacagcaccaagcgtagccggtggatggagaaggcgctggggttgtaccagtgtgacacagagctgctggggctgtctgcacaggacctcagagacccaggctctgtgattgtggccttcaaggaaggggaacagaaggagaaggagggtatcctgcagctgcgtcgcaccaactcagccaagcccagtccactggcaccatccctcatggcctcttctccgacttctatctgtgtgtgtgggcaggtgccagctggggtgggagttctgcagtgtgacctgtgtcaggactggttccatgggcagtgtgtgtcagtgccccatctcctcacctctccaaagcccagtctcacttcatctccactgctagcctggtgggaatgggacacaaaattcctgtgtccactgtgtatgcgctcacgacggccacgcctagagacaatcctagccttgctggttgccctgcagaggctgcccgtgcggctgcctgagggtgaggcccttcagtgtctcacagagagggccattggctggcaagaccgtgccagaaaggctctggcctctgaagatgtgactgctctgttgcgacagctggctgagcttcgccaacagctacaggccaaacccagaccagaggaggcctcagtctacacttcagccactgcctgtgaccctatcagagaaggcagtggcaacaatatttctaaggtccaagggctgctggagaatggagacagtgtgaccagtcctgagaacatggctccaggaaagggctctgacctggagctactgtcctcactgttgccgcagttgactggccctgtgttggagctgcctgaggcaatccgggctcccctggaggagctcatgatggaaggggacctgcttgaggtgaccctggatgagaaccacagcatctggcagctgctgcaggctggacagcctccagacctggacagaattcgcacacttctggagctggaaaaatttgaacatcaagggagtcggacaaggagccgggctctggagaggcgacggcggcggcagaaggtggatcagggtagaaacgttgagaatcttgttcaacaggagcttcagtcaaaaagggctcggagctcagggattatgtctcaggtgggccgagaagaagaacattatcaggagaaagcagaccgtgaaaatatgttcctgacaccttccacagaccacagccctttcttgaaaggaaaccaaaatagcttacaacacaaggattcaggctcttcagctgcttgtccttctttaatgcctttgctacaactctcctactctgatgagcaacagttg

SEQ ID NO: 6410 - DNA, 4617 bp, Homo sapiens
  source 1..4617: mol_type = genomic DNA
atggaaccggggtgtgacgagttcctgccgccaccggagtgcccggtttttgagcctagctgggctgaattccaagacccgcttggctacattgcgaaaataaggcccatagcagagaagtctggcatctgcaaaatccgcccacccgcggattggcagcctccttttgcagtagaagttgacaatttcagatttactcctcgcgtccaaaggctaaatgaactggaggcccaaactagagtgaaattgaactatttggatcagattgcaaaattctgggaaattcaaggctcctctttaaagattcccaatgtggagcggaagatcttggacctctacagccttagtaagattgtgattgaggaaggtggctatgaagccatctgcaaggatcgtcggtgggctcgagttgcccagcgtctccactacccaccaggcaaaaacattggctccctgctacgatcacattacgaacgcattatttacccctatgaaatgtttcagtctggagccaaccatgtgcaatgtaacacacacccgtttgacaatgaggtaaaagataaggaatacaagccccacagcatcccccttagacagtctgtgcagccttcaaagttcagcagctacagtcgacgggcaaaaaggctacagcctgatccagagcctacagaggaggacattgagaagcatccagagctaaagaagttacagatatatgggccaggtcccaaaatgatgggcttgggccttatggctaaggataaggataagactgtgcataagaaagtcacatgccccccaactgttacggtgaaggatgagcaaagtggaggtgggaacgtgtcatcaacattgctcaagcagcacttgagcctagagccctgcactaagacaaccatgcaacttcgaaagaatcacagcagtgcccagtttattgactcatatatttgccaagtatgctcccgtggggatgaagatgataagcttcttttctgtgatggctgtgatgacaattaccacatcttctgcttgttaccaccccttcctgaaatccccagaggcatctggaggtgcccaaaatgtatcttggcggagtgtaaacagcctcctgaagcttttggatttgaacaggctacccaggagtacagtttgcagagttttggtgaaatggctgattccttcaagtccgactacttcaacatgcctgtacatatggtgcctacagaacttgtagagaaggaattctggaggctggtgagcagcattgaggaagacgtgacagttgaatatggagctgatattcattccaaagaatttggcagtggctttcctgtcagcaatagcaaacaaaacttatctcctgaggagaaggagtatgcgaccagtggttggaacctgaatgtgatgccagtgctagatcagtctgttctctgtcacatcaatgcagacatctcaggcatgaaggtgccctggctgtacgtgggcatggttttctcagcattttgttggcatattgaggatcactggagttactctattaactatctgcattggggtgagccgaagacctggtatggtgtaccctccctggcagcagagcatttggaggaggtgatgaagatgctgacacctgagctgtttgatagccagcctgatctcctacaccagcttgtcactctcatgaatcccaacactttgatgtcccatggtgtgccagttgtccgcacaaaccagtgtgcaggggagtttgtcatcacttttcctcgtgcttaccacagtggttttaaccaaggctacaattttgctgaagctgtcaacttttgtactgctgactggctacctgctggacgccagtgcattgaacactaccgccggctccggcgctattgtgtcttctcccacgaggagctcatctgcaagatggctgccttcccagagacgttggatctcaatctagcagtagctgtgcacaaggagatgttcattatggttcaggaggagcgacgtctacgaaaggcccttttggagaagggcgtcacggaggctgagcgagaggcttttgagctgctcccagatgatgaacgccagtgcatcaagtgcaagaccacgtgcttcttgtcagccctggcctgctacgactgcccagatggccttgtatgcctttcccacatcaatgacctctgcaagtgctctagtagccgacagtacctccggtatcggtacaccttggatgagctccccaccatgctgcataaactgaagattcgggctgagtcttttgacacctgggccaacaaagtgcgagtggccttggaggtggaggatggccgtaaacgcagctttgaagagctaagggcactggagtctgaggctcgtgagaggaggtttcctaatagtgagctgcttcagcgactgaagaactgcctgagtgaggtggaggcttgtattgctcaagtcctggggctggtcagtggtcaggtggccaggatggacactccacagctgaccttgactgaactccgggtccttcttgagcagatgggcagcctgccctgtgccatgcatcagattggggatgtcaaggatgtcctggaacaggtggaggcctatcaagctgaggctcgtgaggctctggccacactgccctctagtccagggctattgcggtccctgttggagagggggcagcagctgggtgtagaggtgcctgaagcccatcagcttcagcagcaggtggagcaggcgcaatggctagatgaagtgaagcaggccctggccccttctgctcacaggggctctctggtcatcatgcaggggcttttggttatgggtgccaagatagcctccagcccttctgtggacaaggcccgggctgagctgcaagaactactgaccattgcagagcgctgggaagaaaaggctcatttctgcctggaggccaggcagaagcatccaccagccacattggaagccataattcgtgagacagaaaacatccctgttcacctgcctaacatccaggctctcaaagaagctctgactaaggcacaagcttggattgctgatgtggatgagatccaaaatggtgaccactacccctgtctagatgacttggagggcctggtggctgtgggccgggacctgcctgtggggctggaagagctgagacagctagagctgcaggtattgacagcacattcctggagagagaaggcctccaagacctttctcaagaagaattcttgctacacactgcttgaggtgctttgcccgtgtgcagacgctggctcagacagcaccaagcgtagccggtggatggagaaggcgctggggttgtaccagtgtgacacagagctgctggggctgtctgcacaggacctcagagacccaggctctgtgattgtggccttcaaggaaggggaacagaaggagaaggagggtatcctgcagctgcgtcgcaccaactcagccaagcccagtccactggcaccatccctcatggcctcttctccgacttctatctgtgtgtgtgggcaggtgccagctggggtgggagttctgcagtgtgacctgtgtcaggactggttccatgggcagtgtgtgtcagtgccccatctcctcacctctccaaagcccagtctcacttcatctccactgctagcctggtgggaatgggacacaaaattcctgtgtccactgtgtatgcgctcacgacggccacgcctagagacaatcctagccttgctggttgccctgcagaggctgcccgtgcggctgcctgagggtgaggcccttcagtgtctcacagagagggccattggctggcaagaccgtgccagaaaggctctggcctctgaagatgtgactgctctgttgcgacagctggctgagcttcgccaacagctacaggccaaacccagaccagaggaggcctcagtctacacttcagccactgcctgtgaccctatcagagaaggcagtggcaacaatatttctaaggtccaagggctgctggagaatggagacagtgtgaccagtcctgagaacatggctccaggaaagggctctgacctggagctactgtcctcactgttgccgcagttgactggccctgtgttggagctgcctgaggcaatccgggctcccctggaggagctcatgatggaaggggacctgcttgaggtgaccctggatgagaaccacagcatctggcagctgctgcaggctggacagcctccagacctggacagaattcgcacacttctggagctggaaaaatttgaacatcaagggagtcggacaaggagccgggctctggagaggcgacggcggcggcagaaggtggatcagggtagaaacgttgagaatcttgttcaacaggagcttcagtcaaaaagggctcggagctcagggattatgtctcaggtgggccgagaagaagaacattatcaggagaaagcagaccgtgaaaatatgttcctgacaccttccacagaccacagccctttcttgaaaggaaaccaaaatagcttacaacacaaggattcaggctcttcagctgcttgtccttctttaatgcctttgctacaactctcctactctgatgagcaacagttg

SEQ ID NO: 6411 - DNA, 5070 bp, Homo sapiens
  source 1..5070: mol_type = genomic DNA
atggcgggcgtggggccggggggctacgcggcggagttcgtgccaccgccagagtgccccgtctttgagccgagttgggaggagttcacagatccgctcagctttatcggccgcatccggcctttggcggagaaaaccggcatctgcaaaattcggccgcccaaggactggcagcctccatttgcctgtgaagtaaaaagctttcgtttcactccaagagtccagcgcctgaatgaacttgaggcaatgaccagagtgagattggatttcttggatcaactagcaaaattttgggaacttcaaggatctactctgaagatccctgtggtagagagaaaaatcctggatctgtatgctttgagcaagattgttgccagcaaaggaggttttgaaatggtcaccaaagagaagaaatggtctaaagtgggtagtcgcttgggatatctgccaggaaaaggaactgggtctcttttgaagtcacattatgaaagaattctctacccatatgagcttttccagtctggtgtgagccttatgggtgtgcagatgcctaatttagatcttaaagaaaaagtggagcctgaggttctcagcactgatacccaaacttccccagagccaggcacaaggatgaacattctgccgaagagaacaagacgtgtgaagactcagtcagaatctggagatgtgagtagaaacacggaactgaagaaacttcagatttttggggctgggcccaaggttgtgggcttggcaatgggaacaaaagataaagaagatgaggtcacccgaagacgaaaagttaccaacaggtcagacgcatttaacatgcaaatgagacaacggaaaggcactctctctgttaactttgttgatctctatgtttgtatgttttgtggtcggggaaacaatgaagataaattgcttttgtgtgatggatgtgatgacagctatcatacattttgtctaattcctccactacctgatgtgcccaaaggagactggaggtgtcctaaatgtgtcgccgaggaatgtagcaaacctcgagaagcctttggatttgaacaagctgtacgagagtatacacttcagagctttggagagatggcagataattttaagtctgattattttaatatgccagtccatatggttcccacagaactagtagaaaaggaattttggcggctggtaagcagcattgaagaagatgttattgtggaatatggagcagatatctcctcaaaagactttggaagtggatttccggtgaaggatgggcggagaaagattctgccagaagaagaggaatatgcactttctggttggaatttgaataacatgcctgtcctggaacagtctgttcttgcacatattaatgtggacatctctggtatgaaagtgccgtggctctatgtgggaatgtgcttctcttctttttgctggcacattgaggatcactggagttattccatcaactacttgcactggggggagccaaagacatggtatggtgtgccatctcatgctgcagagcaactggaggaggtgatgagagagctggcccccgagttatttgaatcccagcctgatcttctgcatcagttagttaccatcatgaaccccaacgtgctaatggagcatggtgtgcctgtgtacaggaccaatcagtgtgctggcgagtttgttgtgacatttcctcgtgcctatcactctggatttaaccagggctacaactttgctgaagctgtgaacttctgtactgctgactggttgcccattggacgtcaatgtgtaaatcattaccgacgcctaaggcgccactgtgtcttttcacacgaggaactaattttcaagatggcagcagatccagaatgcttagatgtggggctggctgccatggtctgcaaagaattgactctcatgactgaagaagaaacacgattaagagagtctgttgtacagatgggtgtcctgatgtcagaagaagaagtgtttgaacttgttcctgatgatgagcggcagtgttcagcatgcagaaccacatgttttctctctgctctcacatgttcctgtaatcctgagcggcttgtatgtctctaccatccaactgatctgtgcccctgccccatgcagaagaaatgtcttagatatcgctacccattagaagacctcccttctctgctatatggtgtaaaagtcagggcacagtcctatgacacttgggtcagtcgtgttacagaagcattgtctgctaacttcaaccacaaaaaagatttgattgaattgcgagtaatgctggaagatgctgaggataggaaatacccagagaatgatctctttcgaaaactcagggatgctgtaaaagaagctgagacctgtgcttctgtggctcagctgcttctgagcaaaaagcagaaacacagacagagcccagatagtgggaggactcggaccaaactgacagtggaagaattgaaggcctttgtccaacaactttttagtcttccgtgtgtcatcagccaagctcggcaagtaaagaatctgctagatgatgtggaagagtttcatgaacgtgctcaggaggccatgatggatgaaaccccagattcttccaaactccagatgttgatagatatgggctctagtctctatgtggaactccctgaattaccacgactgaagcaagagctacaacaggctcggtggttggacgaagtaagactgaccttatcagatccgcaacaagtcactttggatgtcatgaagaagctgatagactctggggtagggttggcaccccaccatgctgtggagaaagcaatggctgaactacaggagctccttacagtctctgaacgatgggaagaaaaggctaaggtctgcctacaggcaagaccgaggcacagtgtggcaagtttagaaagcattgtgaatgaagccaagaacattccagcctttctacccaatgtgttgtccttgaaagaagccttacaaaaggctcgagaatggaccgctaaagtggaagctattcagagtggcagcaattacgcttatttggagcagcttgagagcttgtctgcgaaaggacgccctattcctgtgcgtcttgaagcactgccgcaagtggaatcacaggtagcagcagcacgggcatggagagaacggactgggcggacgtttcttaagaagaattctagccatacattgttacaggtgctgagcccccggaccgacattggtgtatatgggagtggcaaaaataggaggaaaaaagtaaaagaactaatagaaaaagaaaaagaaaaggatctggacctggagcctctgagtgatctggaggaaggattggaggaaaccagagatacagccatggtggtggcagttttcaaagaacgggagcaaaaagagattgaagccatgcattctctcagagcagccaacctagccaagatgacaatggtggaccgcatagaagaagtaaaattttgcatttgccgcaagacagccagtgggtttatgctacagtgtgagctctgcaaagactggttccataacagctgtgttcctcttcctaaatcaagttcccaaaaaaaaggatccagctggcaagctaaagaagtaaaattcctttgccctctttgtatgcggtctcgaaggcccaggctagagactattctgtcactcctggtatcccttcagaagttgcccgtacggttgcctgaaggagaggccctgcagtgtttgacagaacgtgctatgagttggcaagatagagcgcggcaggctctagccacagatgaactatcctctgccctggccaaactatctgtgttgagccagcgtatggtggaacaggcggctcgagaaaaaactgaaaagatcatcagtgcagaactccaaaaagcagctgccaatccagacttacagggacacttacctagtttccagcagtctgcttttaaccgggtggtgagcagtgtgtcatcttctcctcgacaaacaatggactatgatgatgaagaaacagactctgatgaagacattcgagagacatatggctacgacatgaaggacacagccagtgtgaagtcctctagtagtcttgaacccaatcttttttgtgatgaagagattcccatcaaatccgaggaggtggtgacccacatgtggacagcaccttcattttgtgcagagcatgcttattcttctgcttctaagagttgttctcaaggttctagcaccccaaggaaacaacctcggaagagccctttggtgccccgaagtttggaacctccagtgctggagttgtcacctggagctaaggcacaactggaagaacttatgatggttggagatctcctggaagtatctctggacgagactcaacacatatggcggattttgcaggccacacacccaccctctgaagacagattcttgcatatcatggaggatgacagcatggaagagaaaccactaaaagtgaaaggaaaggactcttcagagaagaaacggaaacggaagctagaaaaggtagagcaactttttggagaaggaaaacagaagtccaaggagttaaagaaaatggacaaacctagaaagaagaaattaaaattaggtgcagacaaatcaaaggagctgaataaactggccaagaaactagcaaaagaagaagagagaaagaaaaagaaggagaaggctgctgcagccaaagttgaacttgtgaaagagagcactgaaaagaaaagagagaaaaaggtgctggacatcccctcaaagtatgactggtcaggagcagaggagtctgatgatgagaatgctgtgtgcgcagcacagaactgccaaaggccctgcaaggacaaggtagactgggtacaatgtgatggtggctgtgatgagtggtttcatcaagtttgtgtgggtgtatctccagaaatggctgaaaatgaagattacatctgtataaactgtgcaaagaagcaggggccagttagcccaggtccagcaccacctccttccttcataatgagctacaaactaccaatggaggatcttaaagagaccagt

SEQ ID NO: 6412 - DNA, 4740 bp, Homo sapiens
  source 1..4740: mol_type = genomic DNA
atggaggcggccaccacactgcacccaggcccgcgcccggcgctgcccctcgggggcccgggcccgctgggcgagttcctgcctccacccgagtgcccggtcttcgaacccagctgggaagagttcgcggaccccttcgctttcatccacaagatccggcccatagccgagcagactggcatctgtaaggtgcggccgccgccggattggcagccaccatttgcatgtgatgttgataaacttcattttacgccacgtatccagagactgaatgaattggaggcccaaactcgtgtaaaattgaatttcttggaccagattgcaaagtactgggagttacagggaagtactctgaaaattccacatgtggagaggaagatcttggacttatttcagcttaataagttagttgcagaagaaggtggatttgcagttgtttgcaaggatagaaaatggaccaaaattgctaccaagatggggtttgctcctggcaaagcagtgggctcacatatcagagggcattatgaacgaattctcaacccctacaacttattcctgtccggagacagcctaaggtgtttgcagaagccaaacctgaccacagacactaaggacaaggagtacaaaccccatgatattccccagaggcagtctgtgcagccttcggaaacgtgccccccagcccgacgagcaaaacgcatgagagcagagagacagagtctcgctgtgttgcccaggctggagtgcagtggcgcgatcttggctcactgcaacctccgcctcctagattccagcaattcttctgcctcagcctcccaagccatgaatattaaaatagaacccgaggagacaacggaagccagaactcataatctgagacgtcgaatgggttgtccaactccaaaatgtgaaaatgagaaagaaatgaagagtagcatcaagcaagaacctattgagaggaaagattatattgtagaaaatgagaaggaaaagcccaagagtcgatctaaaaaagccaccaatgctgtggacctgtatgtctgtcttttatgtggcagtggcaatgatgaagaccggctactgttgtgtgatggctgtgatgacagttaccataccttttgcttgatcccacctctccatgatgttcccaagggagactggaggtgtcctaagtgtttggctcaggaatgtagtaagccacaagaagcatttggctttgaacaagcagccagggactataccctccgtacttttggggaaatggcagatgcgttcaaatctgattacttcaacatgccagtccatatggtccccacagagcttgttgagaaagaattttggagactagtaagcactattgaggaggatgtcacagtggaatatggagctgacattgcctcaaaggaatttggcagtggctttcctgtccgagatgggaaaatcaaactctcacctgaggaagaggagtatcttgatagtggctggaatttgaacaacatgccagtgatggagcagtctgtccttgcacatattactgctgatatatgtggcatgaaacttccttggttgtatgtgggaatgtgcttttcttcattctgttggcacattgaagaccactggagctattcaattaactacttgcactggggtgagccaaaaacctggtatggagtcccagggtatgctgctgagcagctagaaaatgtaatgaagaaactagctccagaactctttgtgtcccagccggatctcctccatcagcttgtgaccatcatgaaccccaataccctgatgactcatgaagtgcctgtttaccgaactaatcagtgtgctggggagtttgtgattacatttccaagagcctaccacagtggttttaaccagggttttaattttgctgaggctgttaacttctgcactgttgattggctgccattaggccgacagtgtgtggagcattatcgcttgcttcatcgatattgtgtgttttcccacgatgagatgatctgcaagatggcttccaaggctgatgtattagatgttgtagtggcttcaactgttcagaaagacatggccattatgattgaggatgagaaagctttaagagaaactgtccgtaaattgggagtgattgattcggaaagaatggattttgagctgttgccagatgatgaacgtcagtgtgtaaaatgcaaaactacatgcttcatgtctgccatctcctgttcttgtaaacctggccttcttgtttgcctgcatcatgtaaaagaattgtgttcctgtcctccttacaaatataaattgcggtataggtacacgctggatgatctctaccctatgatgaatgcattgaagcttcgagcagaatcttacaacgaatgggccttgaatgtgaatgaagctttggaggcaaagatcaacaagaagaaaagccttgtcagcttcaaggctttaattgaagaatctgaaatgaagaaattcccagacaatgatcttttgcgacaccttcgcctagtcacacaggatgcagagaagtgtgcctctgttgcgcagcagttgcttaatggcaaaaggcaaactagatatcgatctggtggagggaaatcccaaaatcagttgacagtgaatgagctccggcagtttgtaacacagctgtatgctcttccatgtgtcctcagtcagacaccattactaaaggatctcttgaatcgtgtagaagattttcaacagcatagtcagaaactactctctgaggaaacgcctagtgctgcggagctgcaggacttgctagatgtcagctttgaatttgatgttgaacttccacagcttgctgagatgcgtatccgtttggaacaagcccgttggctagaagaggtgcagcaagcttgcctagaccccagctcccttactttagatgatatgagacgtctcatagacctaggggtagggctggccccgtattcagcagtggagaaagctatggcccggctgcaggaactgctcacagtgtcagagcactgggacgacaaagccaagagtctcctcaaggccaggccacgacattcattgaatagccttgctacggcagtaaaggaaatcgaagagatccctgcatatctgcccaatggtgcggctctgaaagactcagtgcagagagccagagactggcttcaggatgtagagggcctgcaggctggaggacgtgtgccagtgttagacacactcatagaacttgttacacgaggccgatctatccccgtacatctgaattctttgccaagactggaaaccctagtagctgaggttcaggcttggaaagaatgtgctgttaatacattcttgactgagaattctccatattctctcttagaggtgctgtgtcctcgatgtgatattggccttttgggattgaaaaggaagcagagaaagttaaaggagcccttgccaaatggaaagaaaaaaagcaccaaattagagagtctgagtgacctggagagagctttaactgaaagcaaggagactgcttcagctatggcaactcttggggaagctcgcctaagggaaatggaagccttgcagtctctcagactcgccaatgaagggaaattgctgtcgcctctccaagatgtggatataaaaatctgcctatgtcagaaggccccagctgcccctatgattcaatgtgaactctgcagggatgctttccacaccagttgtgtggcggtacccagtatttcacagggcctgcgaatctggctttgtccccattgtcggaggtcagagaaacctccattagagaaaattctgcccctgctcgcctcccttcagcgtatccgagttcgccttcctgagggagatgcacttcgatatatgattgaaagaaccgtgaactggcagcacagagcccagcaactgctttcgtcagggaatcttaaatttgtgcaagatcgagtgggctcaggactgttatatagcagatggcaagcctcagcaggacaggtgtcagacacaaacaaggtatctcaacctcctggcacaacatcattttctttgcctgatgactgggacaacagaacctcatatttgcactcccccttctcaactggacgaagttgtatccccctccatggtgttagtccagaagtgaatgaactattgatggaagcccagctgctccaggtatcccttcctgaaattcaggaactttaccagactttacttgcaaagccaagccctgctcagcagactgaccgaagctcaccagtgagacccagcagtgagaagaatgactgttgccgagggaagcgagatggaattaacagtcttgagagaaaactgaagagacgcctggaaagagagggcctctccagtgagcggtgggaacgagttaagaaaatgcggacccccaaaaagaagaaaatcaaactgagccaccccaaggacatgaacaatttcaagttagagagagagcgtagctatgaattagttcgttctgctgaaactcattccctgccctcagacacatcctattccgaacaggaagactctgaggatgaagatgccatctgcccagctgtgagctgcctgcagccagaaggagatgaggtggactgggtccagtgtgatggcagctgcaatcagtggtttcatcaggtctgtgttggtgtctccccagagatggcagagaaagaagactacatctgtgtgcgctgtactgtgaaggacgcaccaagccgaaag

SEQ ID NO: 6413 - DNA, 4632 bp, Homo sapiens
  source 1..4632: mol_type = genomic DNA
atggaggcggccaccacactgcacccaggcccgcgcccggcgctgcccctcgggggcccgggcccgctgggcgagttcctgcctccacccgagtgcccggtcttcgaacccagctgggaagagttcgcggaccccttcgctttcatccacaagatccggcccatagccgagcagactggcatctgtaaggtgcggccgccgccggattggcagccaccatttgcatgtgatgttgataaacttcattttacgccacgtatccagagactgaatgaattggaggcccaaactcgtgtaaaattgaatttcttggaccagattgcaaagtactgggagttacagggaagtactctgaaaattccacatgtggagaggaagatcttggacttatttcagcttaataagttagttgcagaagaaggtggatttgcagttgtttgcaaggatagaaaatggaccaaaattgctaccaagatggggtttgctcctggcaaagcagtgggctcacatatcagagggcattatgaacgaattctcaacccctacaacttattcctgtccggagacagcctaaggtgtttgcagaagccaaacctgaccacagacactaaggacaaggagtacaaaccccatgatattccccagaggcagtctgtgcagccttcggaaacgtgccccccagcccgacgagcaaaacgcatgagagcagaggccatgaatattaaaatagaacccgaggagacaacggaagccagaactcataatctgagacgtcgaatgggttgtccaactccaaaatgtgaaaatgagaaagaaatgaagagtagcatcaagcaagaacctattgagaggaaagattatattgtagaaaatgagaaggaaaagcccaagagtcgatctaaaaaagccaccaatgctgtggacctgtatgtctgtcttttatgtggcagtggcaatgatgaagaccggctactgttgtgtgatggctgtgatgacagttaccataccttttgcttgatcccacctctccatgatgttcccaagggagactggaggtgtcctaagtgtttggctcaggaatgtagtaagccacaagaagcatttggctttgaacaagcagccagggactataccctccgtacttttggggaaatggcagatgcgttcaaatctgattacttcaacatgccagtccatatggtccccacagagcttgttgagaaagaattttggagactagtaagcactattgaggaggatgtcacagtggaatatggagctgacattgcctcaaaggaatttggcagtggctttcctgtccgagatgggaaaatcaaactctcacctgaggaagaggagtatcttgatagtggctggaatttgaacaacatgccagtgatggagcagtctgtccttgcacatattactgctgatatatgtggcatgaaacttccttggttgtatgtgggaatgtgcttttcttcattctgttggcacattgaagaccactggagctattcaattaactacttgcactggggtgagccaaaaacctggtatggagtcccagggtatgctgctgagcagctagaaaatgtaatgaagaaactagctccagaactctttgtgtcccagccggatctcctccatcagcttgtgaccatcatgaaccccaataccctgatgactcatgaagtgcctgtttaccgaactaatcagtgtgctggggagtttgtgattacatttccaagagcctaccacagtggttttaaccagggttttaattttgctgaggctgttaacttctgcactgttgattggctgccattaggccgacagtgtgtggagcattatcgcttgcttcatcgatattgtgtgttttcccacgatgagatgatctgcaagatggcttccaaggctgatgtattagatgttgtagtggcttcaactgttcagaaagacatggccattatgattgaggatgagaaagctttaagagaaactgtccgtaaattgggagtgattgattcggaaagaatggattttgagctgttgccagatgatgaacgtcagtgtgtaaaatgcaaaactacatgcttcatgtctgccatctcctgttcttgtaaacctggccttcttgtttgcctgcatcatgtaaaagaattgtgttcctgtcctccttacaaatataaattgcggtataggtacacgctggatgatctctaccctatgatgaatgcattgaagcttcgagcagaatcttacaacgaatgggccttgaatgtgaatgaagctttggaggcaaagatcaacaagaagaaaagccttgtcagcttcaaggctttaattgaagaatctgaaatgaagaaattcccagacaatgatcttttgcgacaccttcgcctagtcacacaggatgcagagaagtgtgcctctgttgcgcagcagttgcttaatggcaaaaggcaaactagatatcgatctggtggagggaaatcccaaaatcagttgacagtgaatgagctccggcagtttgtaacacagctgtatgctcttccatgtgtcctcagtcagacaccattactaaaggatctcttgaatcgtgtagaagattttcaacagcatagtcagaaactactctctgaggaaacgcctagtgctgcggagctgcaggacttgctagatgtcagctttgaatttgatgttgaacttccacagcttgctgagatgcgtatccgtttggaacaagcccgttggctagaagaggtgcagcaagcttgcctagaccccagctcccttactttagatgatatgagacgtctcatagacctaggggtagggctggccccgtattcagcagtggagaaagctatggcccggctgcaggaactgctcacagtgtcagagcactgggacgacaaagccaagagtctcctcaaggccaggccacgacattcattgaatagccttgctacggcagtaaaggaaatcgaagagatccctgcatatctgcccaatggtgcggctctgaaagactcagtgcagagagccagagactggcttcaggatgtagagggcctgcaggctggaggacgtgtgccagtgttagacacactcatagaacttgttacacgaggccgatctatccccgtacatctgaattctttgccaagactggaaaccctagtagctgaggttcaggcttggaaagaatgtgctgttaatacattcttgactgagaattctccatattctctcttagaggtgctgtgtcctcgatgtgatattggccttttgggattgaaaaggaagcagagaaagttaaaggagcccttgccaaatggaaagaaaaaaagcaccaaattagagagtctgagtgacctggagagagctttaactgaaagcaaggagactgcttcagctatggcaactcttggggaagctcgcctaagggaaatggaagccttgcagtctctcagactcgccaatgaagggaaattgctgtcgcctctccaagatgtggatataaaaatctgcctatgtcagaaggccccagctgcccctatgattcaatgtgaactctgcagggatgctttccacaccagttgtgtggcggtacccagtatttcacagggcctgcgaatctggctttgtccccattgtcggaggtcagagaaacctccattagagaaaattctgcccctgctcgcctcccttcagcgtatccgagttcgccttcctgagggagatgcacttcgatatatgattgaaagaaccgtgaactggcagcacagagcccagcaactgctttcgtcagggaatcttaaatttgtgcaagatcgagtgggctcaggactgttatatagcagatggcaagcctcagcaggacaggtgtcagacacaaacaaggtatctcaacctcctggcacaacatcattttctttgcctgatgactgggacaacagaacctcatatttgcactcccccttctcaactggacgaagttgtatccccctccatggtgttagtccagaagtgaatgaactattgatggaagcccagctgctccaggtatcccttcctgaaattcaggaactttaccagactttacttgcaaagccaagccctgctcagcagactgaccgaagctcaccagtgagacccagcagtgagaagaatgactgttgccgagggaagcgagatggaattaacagtcttgagagaaaactgaagagacgcctggaaagagagggcctctccagtgagcggtgggaacgagttaagaaaatgcggacccccaaaaagaagaaaatcaaactgagccaccccaaggacatgaacaatttcaagttagagagagagcgtagctatgaattagttcgttctgctgaaactcattccctgccctcagacacatcctattccgaacaggaagactctgaggatgaagatgccatctgcccagctgtgagctgcctgcagccagaaggagatgaggtggactgggtccagtgtgatggcagctgcaatcagtggtttcatcaggtctgtgttggtgtctccccagagatggcagagaaagaagactacatctgtgtgcgctgtactgtgaaggacgcaccaagccgaaag

SEQ ID NO: 6414 - DNA, 4137 bp, Homo sapiens
  source 1..4137: mol_type = genomic DNA
atggagccggggtccgacgatttcctaccgccaccggagtgcccggtgttcgagcctagctgggccgagttccgagaccctcttggctacatcgcgaaaatcaggcccatcgcagagaaatcgggcatttgcaagatccgcccacccgcgattgtggtggaggaaggtggttatgaagctatctgcaaggaccgtcggtgggctcgggtagcccagcgcctcaactatccaccaggcaaaaatattggctccttgctacgctcccactacgaacgcattgtttatccctatgaaatgtaccagtctggagccaaccttgtgcagtgtaacacacgtccatttgataatgaggagaaggacaaggaatacaaaccccacagcatccccctacgacagtctgtgcagccttccaagttcaacagctatggccggcgggccaagagactgcagcctgatccggaacccacagaggaagacattgagaagaatccagagctgaaaaagctacagatctatggggcaggccccaagatgatgggcctgggcctcatggccaaagacaagactctgcggaagaaagataaggaggggcctgagtgtccccccacagtagtggtgaaggaggagttaggtggggatgtgaaggtggagtcaacatcgcctaagaccttcctggagagcaaggaggagctgagtcacagcccagaaccctgcaccaagatgaccatgaggctacggaggaaccacagcaatgcccagtttattgagtcatatgtctgccggatgtgttctcgaggggatgaggatgacaagctcctgctgtgtgatggctgtgatgacaactaccacatcttctgcctgctgcctcctctgcctgagatccccaagggtgtctggcggtgcccaaagtgtgtcatggcggagtgtaagcggcccccagaagcctttggctttgagcaggctacccgggaatacactctgcagagctttggcgagatggccgactcctttaaagctgactacttcaacatgcccgtgcatatggtgcccacagaacttgtggagaaggagttctggaggctggtaaatagcattgaggaagatgtgactgttgagtatggagctgacatccattccaaagaatttggcagcggtttccctgtcagtgacagtaaacggcacctaacccccgaagaggaggagtatgctaccagtggttggaacctaaatgtgatgccggtgttggaacagtctgtactgtgccacatcaatgcagatatctctggcatgaaggtgccctggctctacgtgggcatggtcttctcagccttttgctggcatattgaggatcactggagttactccattaactacctccactggggtgagccgaagacctggtatggggtgccctcacttgcagcagaacatttggaagaagtgatgaagaagctgacacctgaactatttgatagccagcctgacctcctgcaccaacttgtcaccctcatgaatcccaacaccctcatgtcccatggtgtgccagttgtccgcacaaaccagtgtgcaggagagtttgtcatcaccttcccccgtgcttaccacagcggcttcaaccaaggctacaactttgccgaggctgtcaacttttgcactgctgactggttgcctgctgggcgccagtgcattgagcactaccgccggctccggagatactgcgtcttctcccatgaggagcttatctgcaagatggctgcctgcccagagaagctagacctgaacctggcggcagctgtgcataaggagatgttcatcatggtgcaagaagagcggcgtctacgaaaggccctgctggagaagggtatcacagaggctgagcgagaggctttcgagctgctcccagatgatgagcgccagtgtatcaagtgcaagactacgtgtttcctgtcagccctggcctgctacgactgcccagacggccttgtctgcctttcccacatcaatgatctctgcaagtgctccagtagccggcagtacctgcggtatcggtataccttggatgagcttcctgccatgctgcataagctgaaggttcgggctgagtcctttgacacctgggccaacaaagtgcgagtggccctggaggtggaggatgggcggaagcgcagccttgaagaactgagggcactagagtctgaagcccgtgagcggaggtttcctaatagtgagctgctgcagcaactaaagaactgcctgagtgaggcagaggcttgcgtgtcccgagctctgggactggtcagcggccaggaagctggcccccacagggtggctggtctacagatgaccctgactgagctccgggcctttctggaccagatgaacaacctgccttgcgccatgcaccagattggggatgtcaagggtgttctggaacaggtggaggcctaccaggctgaggctcgtgaggccctggcctcactgccctccagtccagggctactgcagtccctgttggagagggggcggcagctgggggtggaggtgcctgaggcccagcagctccagcggcaggtggaacaggcgcgatggctggatgaggtgaaacgcacactggccccctcagcccgaaggggcaccttggctgtcatgcgaggactgttggtcgcgggtgccagtgtagcccctagccctgctgtggataaagcccaggccgagctgcaggaactgctgaccattgctgaacgctgggaggagaaagcccacctctgcctggaggccaggcagaagcatccaccagccacacttgaggccataatccgtgaagcggaaaacatccctgttcacctgcccaacatccaggctctcaaggaggctcttgctaaggcccgggcctggattgctgatgttgatgagatccaaaatggtgaccactacccctgcctggatgacttggagggcctagtagctgtgggccgggacctacctgtggggctggaggagctgagacagctagagctacaggtactgacagcgcactcctggagggagaaggcctccaagaccttcctcaagaaaaattcttgctacacgctgctggaggttctctgcccatgtgcagatgccggctcagacagcaccaagcgcagccggtggatggagaaggagctggggttgtacaaatctgacacagagctgctggggctgtctgcgcaggacctcagggacccaggctctgtgatcgtggccttcaaggagggggaacagaaggagaaggagggtatcctgcagctgcgtcgcaccaattcggccaagcccagtccactggcatcatcgagcacggcctcctctacaacctctatctgtgtgtgtgggcaggtgctggctggggcgggagctctgcagtgtgacctgtgtcaggactggttccatgggcggtgtgtgtcagtgcctcgcctcctcagctctccgaggcccaatcccacctcatccccactgctggcctggtgggaatgggacaccaaattcctgtgtccactgtgtatgcgctcaaggcgcccgcgcctggagaccatcctggcactgctggtagccctgcagagactgcctgtgcggctgcccgagggcgaggccctgcagtgcctcacagagagggccatcagctggcaaggccgcgccaggcaggctctggcctctgaagatgtgactgctcttttgggacggctggctgagctccgccaacggctacaggctgaacctagacctgaggagcctcctaactaccctgcagcccctgcttctgaccccctcagagagggcagtggcaaggatatgcctaaggtccagggcttactggagaatggagacagtgtgaccagtcctgagaaggtagccccggaggagggctcagatctggagctgctgtcctcgctgttgccacagttgactggccctgtgttggaactgcctgaggcaacccgggcccccttggaggagctcatgatggagggggacctgctcgaggtgaccctggatgagaaccacagcatccctgagtcccttgacttttgtattctgactccaaggtattgttcagacctcagctcctgggggccggcccctggagtcttccctccctgg

SEQ ID NO: 6415 - DNA, 4680 bp, Homo sapiens
  source 1..4680: mol_type = genomic DNA
atggagccggggtccgacgatttcctaccgccaccggagtgcccggtgttcgagcctagctgggccgagttccgagaccctcttggctacatcgcgaaaatcaggcccatcgcagagaaatcgggcatttgcaagatccgcccacccgcggactggcagccaccctttgctgtggaagtggacaacttcaggtttaccccccgaatccagaggctgaatgagctagaggcccagacgagagtgaaactgaactacttggaccagattgccaaattctgggaaatccagggctcctccttaaagattcccaatgtagaacggcggatcttggacctctacagtctcagcaaaattgtggtggaggaaggtggttatgaagctatctgcaaggaccgtcggtgggctcgggtagcccagcgcctcaactatccaccaggcaaaaatattggctccttgctacgctcccactacgaacgcattgtttatccctatgaaatgtaccagtctggagccaaccttgtgcagtgtaacacacgtccatttgataatgaggagaaggacaaggaatacaaaccccacagcatccccctacgacagtctgtgcagccttccaagttcaacagctatggccggcgggccaagagactgcagcctgatccggaacccacagaggaagacattgagaagaatccagagctgaaaaagctacagatctatggggcaggccccaagatgatgggcctgggcctcatggccaaagacaagactctgcggaagaaagataaggaggggcctgagtgtccccccacagtagtggtgaaggaggagttaggtggggatgtgaaggtggagtcaacatcgcctaagaccttcctggagagcaaggaggagctgagtcacagcccagaaccctgcaccaagatgaccatgaggctacggaggaaccacagcaatgcccagtttattgagtcatatgtctgccggatgtgttctcgaggggatgaggatgacaagctcctgctgtgtgatggctgtgatgacaactaccacatcttctgcctgctgcctcctctgcctgagatccccaagggtgtctggcggtgcccaaagtgtgtcatggcggagtgtaagcggcccccagaagcctttggctttgagcaggctacccgggaatacactctgcagagctttggcgagatggccgactcctttaaagctgactacttcaacatgcccgtgcatatggtgcccacagaacttgtggagaaggagttctggaggctggtaaatagcattgaggaagatgtgactgttgagtatggagctgacatccattccaaagaatttggcagcggtttccctgtcagtgacagtaaacggcacctaacccccgaagaggaggagtatgctaccagtggttggaacctaaatgtgatgccggtgttggaacagtctgtactgtgccacatcaatgcagatatctctggcatgaaggtgccctggctctacgtgggcatggtcttctcagccttttgctggcatattgaggatcactggagttactccattaactacctccactggggtgagccgaagacctggtatggggtgccctcacttgcagcagaacatttggaagaagtgatgaagaagctgacacctgaactatttgatagccagcctgacctcctgcaccaacttgtcaccctcatgaatcccaacaccctcatgtcccatggtgtgccagttgtccgcacaaaccagtgtgcaggagagtttgtcatcaccttcccccgtgcttaccacagcggcttcaaccaaggctacaactttgccgaggctgtcaacttttgcactgctgactggttgcctgctgggcgccagtgcattgagcactaccgccggctccggagatactgcgtcttctcccatgaggagcttatctgcaagatggctgcctgcccagagaagctagacctgaacctggcggcagctgtgcataaggagatgttcatcatggtgcaagaagagcggcgtctacgaaaggccctgctggagaagggtatcacagaggctgagcgagaggctttcgagctgctcccagatgatgagcgccagtgtatcaagtgcaagactacgtgtttcctgtcagccctggcctgctacgactgcccagacggccttgtctgcctttcccacatcaatgatctctgcaagtgctccagtagccggcagtacctgcggtatcggtataccttggatgagcttcctgccatgctgcataagctgaaggttcgggctgagtcctttgacacctgggccaacaaagtgcgagtggccctggaggtggaggatgggcggaagcgcagccttgaagaactgagggcactagagtctgaagcccgtgagcggaggtttcctaatagtgagctgctgcagcaactaaagaactgcctgagtgaggcagaggcttgcgtgtcccgagctctgggactggtcagcggccaggaagctggcccccacagggtggctggtctacagatgaccctgactgagctccgggcctttctggaccagatgaacaacctgccttgcgccatgcaccagattggggatgtcaagggtgttctggaacaggtggaggcctaccaggctgaggctcgtgaggccctggcctcactgccctccagtccagggctactgcagtccctgttggagagggggcggcagctgggggtggaggtgcctgaggcccagcagctccagcggcaggtggaacaggcgcgatggctggatgaggtgaaacgcacactggccccctcagcccgaaggggcaccttggctgtcatgcgaggactgttggtcgcgggtgccagtgtagcccctagccctgctgtggataaagcccaggccgagctgcaggaactgctgaccattgctgaacgctgggaggagaaagcccacctctgcctggaggccaggcagaagcatccaccagccacacttgaggccataatccgtgaagcggaaaacatccctgttcacctgcccaacatccaggctctcaaggaggctcttgctaaggcccgggcctggattgctgatgttgatgagatccaaaatggtgaccactacccctgcctggatgacttggagggcctagtagctgtgggccgggacctacctgtggggctggaggagctgagacagctagagctacaggtactgacagcgcactcctggagggagaaggcctccaagaccttcctcaagaaaaattcttgctacacgctgctggaggttctctgcccatgtgcagatgccggctcagacagcaccaagcgcagccggtggatggagaaggagctggggttgtacaaatctgacacagagctgctggggctgtctgcgcaggacctcagggacccaggctctgtgatcgtggccttcaaggagggggaacagaaggagaaggagggtatcctgcagctgcgtcgcaccaattcggccaagcccagtccactggcatcatcgagcacggcctcctctacaacctctatctgtgtgtgtgggcaggtgctggctggggcgggagctctgcagtgtgacctgtgtcaggactggttccatgggcggtgtgtgtcagtgcctcgcctcctcagctctccgaggcccaatcccacctcatccccactgctggcctggtgggaatgggacaccaaattcctgtgtccactgtgtatgcgctcaaggcgcccgcgcctggagaccatcctggcactgctggtagccctgcagagactgcctgtgcggctgcccgagggcgaggccctgcagtgcctcacagagagggccatcagctggcaaggccgcgccaggcaggctctggcctctgaagatgtgactgctcttttgggacggctggctgagctccgccaacggctacaggctgaacctagacctgaggagcctcctaactaccctgcagcccctgcttctgaccccctcagagagggcagtggcaaggatatgcctaaggtccagggcttactggagaatggagacagtgtgaccagtcctgagaaggtagccccggaggagggctcaggtaagagagatctggagctgctgtcctcgctgttgccacagttgactggccctgtgttggaactgcctgaggcaacccgggcccccttggaggagctcatgatggagggggacctgctcgaggtgaccctggatgagaaccacagcatatggcagctgctgcaggctggacagcccccagacctggagaggatccgcacacttctggagctggagaaggcagagcgtcacgggagtcgggctcggggccgggccctggagaggcggcggcggcggaaggtggatcggggtggggagggcgatgacccagcccgagaggagctagagccaaagagggtacggagctcagggccagaggctgaggaggtccaggaggaggaagagctggaggaggagactgggggtgagggcccccctgcacccatccccaccactggcagccccagcacccaggagaaccagaatggcttggaaccggcggaagggaccacttcaggcccctcggcccctttctccactctgactccccggctgcatctgccctgcccacagcagccgcctcagcaacagttg

SEQ ID NO: 6416 - DNA, 4677 bp, Homo sapiens
  source 1..4677: mol_type = genomic DNA
atggagccggggtccgacgatttcctaccgccaccggagtgcccggtgttcgagcctagctgggccgagttccgagaccctcttggctacatcgcgaaaatcaggcccatcgcagagaaatcgggcatttgcaagatccgcccacccgcggactggcagccaccctttgctgtggaagtggacaacttcaggtttaccccccgaatccagaggctgaatgagctagaggcccagacgagagtgaaactgaactacttggaccagattgccaaattctgggaaatccagggctcctccttaaagattcccaatgtagaacggcggatcttggacctctacagtctcagcaaaattgtggtggaggaaggtggttatgaagctatctgcaaggaccgtcggtgggctcgggtagcccagcgcctcaactatccaccaggcaaaaatattggctccttgctacgctcccactacgaacgcattgtttatccctatgaaatgtaccagtctggagccaaccttgtgtgtaacacacgtccatttgataatgaggagaaggacaaggaatacaaaccccacagcatccccctacgacagtctgtgcagccttccaagttcaacagctatggccggcgggccaagagactgcagcctgatccggaacccacagaggaagacattgagaagaatccagagctgaaaaagctacagatctatggggcaggccccaagatgatgggcctgggcctcatggccaaagacaagactctgcggaagaaagataaggaggggcctgagtgtccccccacagtagtggtgaaggaggagttaggtggggatgtgaaggtggagtcaacatcgcctaagaccttcctggagagcaaggaggagctgagtcacagcccagaaccctgcaccaagatgaccatgaggctacggaggaaccacagcaatgcccagtttattgagtcatatgtctgccggatgtgttctcgaggggatgaggatgacaagctcctgctgtgtgatggctgtgatgacaactaccacatcttctgcctgctgcctcctctgcctgagatccccaagggtgtctggcggtgcccaaagtgtgtcatggcggagtgtaagcggcccccagaagcctttggctttgagcaggctacccgggaatacactctgcagagctttggcgagatggccgactcctttaaagctgactacttcaacatgcccgtgcatatggtgcccacagaacttgtggagaaggagttctggaggctggtaaatagcattgaggaagatgtgactgttgagtatggagctgacatccattccaaagaatttggcagcggtttccctgtcagtgacagtaaacggcacctaacccccgaagaggaggagtatgctaccagtggttggaacctaaatgtgatgccggtgttggaacagtctgtactgtgccacatcaatgcagatatctctggcatgaaggtgccctggctctacgtgggcatggtcttctcagccttttgctggcatattgaggatcactggagttactccattaactacctccactggggtgagccgaagacctggtatggggtgccctcacttgcagcagaacatttggaagaagtgatgaagaagctgacacctgaactatttgatagccagcctgacctcctgcaccaacttgtcaccctcatgaatcccaacaccctcatgtcccatggtgtgccagttgtccgcacaaaccagtgtgcaggagagtttgtcatcaccttcccccgtgcttaccacagcggcttcaaccaaggctacaactttgccgaggctgtcaacttttgcactgctgactggttgcctgctgggcgccagtgcattgagcactaccgccggctccggagatactgcgtcttctcccatgaggagcttatctgcaagatggctgcctgcccagagaagctagacctgaacctggcggcagctgtgcataaggagatgttcatcatggtgcaagaagagcggcgtctacgaaaggccctgctggagaagggtatcacagaggctgagcgagaggctttcgagctgctcccagatgatgagcgccagtgtatcaagtgcaagactacgtgtttcctgtcagccctggcctgctacgactgcccagacggccttgtctgcctttcccacatcaatgatctctgcaagtgctccagtagccggcagtacctgcggtatcggtataccttggatgagcttcctgccatgctgcataagctgaaggttcgggctgagtcctttgacacctgggccaacaaagtgcgagtggccctggaggtggaggatgggcggaagcgcagccttgaagaactgagggcactagagtctgaagcccgtgagcggaggtttcctaatagtgagctgctgcagcaactaaagaactgcctgagtgaggcagaggcttgcgtgtcccgagctctgggactggtcagcggccaggaagctggcccccacagggtggctggtctacagatgaccctgactgagctccgggcctttctggaccagatgaacaacctgccttgcgccatgcaccagattggggatgtcaagggtgttctggaacaggtggaggcctaccaggctgaggctcgtgaggccctggcctcactgccctccagtccagggctactgcagtccctgttggagagggggcggcagctgggggtggaggtgcctgaggcccagcagctccagcggcaggtggaacaggcgcgatggctggatgaggtgaaacgcacactggccccctcagcccgaaggggcaccttggctgtcatgcgaggactgttggtcgcgggtgccagtgtagcccctagccctgctgtggataaagcccaggccgagctgcaggaactgctgaccattgctgaacgctgggaggagaaagcccacctctgcctggaggccaggcagaagcatccaccagccacacttgaggccataatccgtgaagcggaaaacatccctgttcacctgcccaacatccaggctctcaaggaggctcttgctaaggcccgggcctggattgctgatgttgatgagatccaaaatggtgaccactacccctgcctggatgacttggagggcctagtagctgtgggccgggacctacctgtggggctggaggagctgagacagctagagctacaggtactgacagcgcactcctggagggagaaggcctccaagaccttcctcaagaaaaattcttgctacacgctgctggaggttctctgcccatgtgcagatgccggctcagacagcaccaagcgcagccggtggatggagaaggagctggggttgtacaaatctgacacagagctgctggggctgtctgcgcaggacctcagggacccaggctctgtgatcgtggccttcaaggagggggaacagaaggagaaggagggtatcctgcagctgcgtcgcaccaattcggccaagcccagtccactggcatcatcgagcacggcctcctctacaacctctatctgtgtgtgtgggcaggtgctggctggggcgggagctctgcagtgtgacctgtgtcaggactggttccatgggcggtgtgtgtcagtgcctcgcctcctcagctctccgaggcccaatcccacctcatccccactgctggcctggtgggaatgggacaccaaattcctgtgtccactgtgtatgcgctcaaggcgcccgcgcctggagaccatcctggcactgctggtagccctgcagagactgcctgtgcggctgcccgagggcgaggccctgcagtgcctcacagagagggccatcagctggcaaggccgcgccaggcaggctctggcctctgaagatgtgactgctcttttgggacggctggctgagctccgccaacggctacaggctgaacctagacctgaggagcctcctaactaccctgcagcccctgcttctgaccccctcagagagggcagtggcaaggatatgcctaaggtccagggcttactggagaatggagacagtgtgaccagtcctgagaaggtagccccggaggagggctcaggtaagagagatctggagctgctgtcctcgctgttgccacagttgactggccctgtgttggaactgcctgaggcaacccgggcccccttggaggagctcatgatggagggggacctgctcgaggtgaccctggatgagaaccacagcatatggcagctgctgcaggctggacagcccccagacctggagaggatccgcacacttctggagctggagaaggcagagcgtcacgggagtcgggctcggggccgggccctggagaggcggcggcggcggaaggtggatcggggtggggagggcgatgacccagcccgagaggagctagagccaaagagggtacggagctcagggccagaggctgaggaggtccaggaggaggaagagctggaggaggagactgggggtgagggcccccctgcacccatccccaccactggcagccccagcacccaggagaaccagaatggcttggaaccggcggaagggaccacttcaggcccctcggcccctttctccactctgactccccggctgcatctgccctgcccacagcagccgcctcagcaacagttg

SEQ ID NO: 6417 - DNA, 4548 bp, Homo sapiens
  source 1..4548: mol_type = genomic DNA
atggagccggggtccgacgatttcctaccgccaccggagtgcccggtgttcgagcctagctgggccgagttccgagaccctcttggctacatcgcgaaaatcaggcccatcgcagagaaatcgggcatttgcaagatccgcccacccgcggactggcagccaccctttgctgtggaagtggacaacttcaggtttaccccccgaatccagaggctgaatgagctagagattgtggtggaggaaggtggttatgaagctatctgcaaggaccgtcggtgggctcgggtagcccagcgcctcaactatccaccaggcaaaaatattggctccttgctacgctcccactacgaacgcattgtttatccctatgaaatgtaccagtctggagccaaccttgtgcagtgtaacacacgtccatttgataatgaggagaaggacaaggaatacaaaccccacagcatccccctacgacagtctgtgcagccttccaagttcaacagctatggccggcgggccaagagactgcagcctgatccggaacccacagaggaagacattgagaagaatccagagctgaaaaagctacagatctatggggcaggccccaagatgatgggcctgggcctcatggccaaagacaagactctgcggaagaaagataaggaggggcctgagtgtccccccacagtagtggtgaaggaggagttaggtggggatgtgaaggtggagtcaacatcgcctaagaccttcctggagagcaaggaggagctgagtcacagcccagaaccctgcaccaagatgaccatgaggctacggaggaaccacagcaatgcccagtttattgagtcatatgtctgccggatgtgttctcgaggggatgaggatgacaagctcctgctgtgtgatggctgtgatgacaactaccacatcttctgcctgctgcctcctctgcctgagatccccaagggtgtctggcggtgcccaaagtgtgtcatggcggagtgtaagcggcccccagaagcctttggctttgagcaggctacccgggaatacactctgcagagctttggcgagatggccgactcctttaaagctgactacttcaacatgcccgtgcatatggtgcccacagaacttgtggagaaggagttctggaggctggtaaatagcattgaggaagatgtgactgttgagtatggagctgacatccattccaaagaatttggcagcggtttccctgtcagtgacagtaaacggcacctaacccccgaagaggaggagtatgctaccagtggttggaacctaaatgtgatgccggtgttggaacagtctgtactgtgccacatcaatgcagatatctctggcatgaaggtgccctggctctacgtgggcatggtcttctcagccttttgctggcatattgaggatcactggagttactccattaactacctccactggggtgagccgaagacctggtatggggtgccctcacttgcagcagaacatttggaagaagtgatgaagaagctgacacctgaactatttgatagccagcctgacctcctgcaccaacttgtcaccctcatgaatcccaacaccctcatgtcccatggtgtgccagttgtccgcacaaaccagtgtgcaggagagtttgtcatcaccttcccccgtgcttaccacagcggcttcaaccaaggctacaactttgccgaggctgtcaacttttgcactgctgactggttgcctgctgggcgccagtgcattgagcactaccgccggctccggagatactgcgtcttctcccatgaggagcttatctgcaagatggctgcctgcccagagaagctagacctgaacctggcggcagctgtgcataaggagatgttcatcatggtgcaagaagagcggcgtctacgaaaggccctgctggagaagggtatcacagaggctgagcgagaggctttcgagctgctcccagatgatgagcgccagtgtatcaagtgcaagactacgtgtttcctgtcagccctggcctgctacgactgcccagacggccttgtctgcctttcccacatcaatgatctctgcaagtgctccagtagccggcagtacctgcggtatcggtataccttggatgagcttcctgccatgctgcataagctgaaggttcgggctgagtcctttgacacctgggccaacaaagtgcgagtggccctggaggtggaggatgggcggaagcgcagccttgaagaactgagggcactagagtctgaagcccgtgagcggaggtttcctaatagtgagctgctgcagcaactaaagaactgcctgagtgaggcagaggcttgcgtgtcccgagctctgggactggtcagcggccaggaagctggcccccacagggtggctggtctacagatgaccctgactgagctccgggcctttctggaccagatgaacaacctgccttgcgccatgcaccagattggggatgtcaagggtgttctggaacaggtggaggcctaccaggctgaggctcgtgaggccctggcctcactgccctccagtccagggctactgcagtccctgttggagagggggcggcagctgggggtggaggtgcctgaggcccagcagctccagcggcaggtggaacaggcgcgatggctggatgaggtgaaacgcacactggccccctcagcccgaaggggcaccttggctgtcatgcgaggactgttggtcgcgggtgccagtgtagcccctagccctgctgtggataaagcccaggccgagctgcaggaactgctgaccattgctgaacgctgggaggagaaagcccacctctgcctggaggccaggcagaagcatccaccagccacacttgaggccataatccgtgaagcggaaaacatccctgttcacctgcccaacatccaggctctcaaggaggctcttgctaaggcccgggcctggattgctgatgttgatgagatccaaaatggtgaccactacccctgcctggatgacttggagggcctagtagctgtgggccgggacctacctgtggggctggaggagctgagacagctagagctacaggtactgacagcgcactcctggagggagaaggcctccaagaccttcctcaagaaaaattcttgctacacgctgctggaggttctctgcccatgtgcagatgccggctcagacagcaccaagcgcagccggtggatggagaaggagctggggttgtacaaatctgacacagagctgctggggctgtctgcgcaggacctcagggacccaggctctgtgatcgtggccttcaaggagggggaacagaaggagaaggagggtatcctgcagctgcgtcgcaccaattcggccaagcccagtccactggcatcatcgagcacggcctcctctacaacctctatctgtgtgtgtgggcaggtgctggctggggcgggagctctgcagtgtgacctgtgtcaggactggttccatgggcggtgtgtgtcagtgcctcgcctcctcagctctccgaggcccaatcccacctcatccccactgctggcctggtgggaatgggacaccaaattcctgtgtccactgtgtatgcgctcaaggcgcccgcgcctggagaccatcctggcactgctggtagccctgcagagactgcctgtgcggctgcccgagggcgaggccctgcagtgcctcacagagagggccatcagctggcaaggccgcgccaggcaggctctggcctctgaagatgtgactgctcttttgggacggctggctgagctccgccaacggctacaggctgaacctagacctgaggagcctcctaactaccctgcagcccctgcttctgaccccctcagagagggcagtggcaaggatatgcctaaggtccagggcttactggagaatggagacagtgtgaccagtcctgagaaggtagccccggaggagggctcagatctggagctgctgtcctcgctgttgccacagttgactggccctgtgttggaactgcctgaggcaacccgggcccccttggaggagctcatgatggagggggacctgctcgaggtgaccctggatgagaaccacagcatatggcagctgctgcaggctggacagcccccagacctggagaggatccgcacacttctggagctggagaaggcagagcgtcacgggagtcgggctcggggccgggccctggagaggcggcggcggcggaaggtggatcggggtggggagggcgatgacccagcccgagaggagctagagccaaagagggtacggagctcagggccagaggctgaggaggtccaggaggaggaagagctggaggaggagactgggggtgagggcccccctgcacccatccccaccactggcagccccagcacccaggagaaccagaatggcttggaaccggcggaagggaccacttcaggcccctcggcccctttctccactctgactccccggctgcatctgccctgcccacagcagccgcctcagcaacagttg

SEQ ID NO: 6418 - DNA, 4671 bp, Homo sapiens
  source 1..4671: mol_type = genomic DNA
atggagccggggtccgacgatttcctaccgccaccggagtgcccggtgttcgagcctagctgggccgagttccgagaccctcttggctacatcgcgaaaatcaggcccatcgcagagaaatcgggcatttgcaagatccgcccacccgcggactggcagccaccctttgctgtggaagtggacaacttcaggtttaccccccgaatccagaggctgaatgagctagaggcccagacgagagtgaaactgaactacttggaccagattgccaaattctgggaaatccagggctcctccttaaagattcccaatgtagaacggcggatcttggacctctacagtctcagcaaaattgtggtggaggaaggtggttatgaagctatctgcaaggaccgtcggtgggctcgggtagcccagcgcctcaactatccaccaggcaaaaatattggctccttgctacgctcccactacgaacgcattgtttatccctatgaaatgtaccagtctggagccaaccttgtgcagtgtaacacacgtccatttgataatgaggagaaggacaaggaatacaaaccccacagcatccccctacgacagtctgtgcagccttccaagttcaacagctatggccggcgggccaagagactgcagcctgatccggaacccacagaggaagacattgagaagaatccagagctgaaaaagctacagatctatggggcaggccccaagatgatgggcctgggcctcatggccaaagacaagactctgcggaagaaagataaggaggggcctgagtgtccccccacagtagtggtgaaggaggagttaggtggggatgtgaaggtggagtcaacatcgcctaagaccttcctggagagcaaggaggagctgagtcacagcccagaaccctgcaccaagatgaccatgaggctacggaggaaccacagcaatgcccagtttattgagtcatatgtctgccggatgtgttctcgaggggatgaggatgacaagctcctgctgtgtgatggctgtgatgacaactaccacatcttctgcctgctgcctcctctgcctgagatccccaagggtgtctggcggtgcccaaagtgtgtcatggcggagtgtaagcggcccccagaagcctttggctttgagcaggctacccgggaatacactctgcagagctttggcgagatggccgactcctttaaagctgactacttcaacatgcccgtgcatatggtgcccacagaacttgtggagaaggagttctggaggctggtaaatagcattgaggaagatgtgactgttgagtatggagctgacatccattccaaagaatttggcagcggtttccctgtcagtgacagtaaacggcacctaacccccgaagaggaggagtatgctaccagtggttggaacctaaatgtgatgccggtgttggaacagtctgtactgtgccacatcaatgcagatatctctggcatgaaggtgccctggctctacgtgggcatggtcttctcagccttttgctggcatattgaggatcactggagttactccattaactacctccactggggtgagccgaagacctggtatggggtgccctcacttgcagcagaacatttggaagaagtgatgaagaagctgacacctgaactatttgatagccagcctgacctcctgcaccaacttgtcaccctcatgaatcccaacaccctcatgtcccatggtgtgccagttgtccgcacaaaccagtgtgcaggagagtttgtcatcaccttcccccgtgcttaccacagcggcttcaaccaaggctacaactttgccgaggctgtcaacttttgcactgctgactggttgcctgctgggcgccagtgcattgagcactaccgccggctccggagatactgcgtcttctcccatgaggagcttatctgcaagatggctgcctgcccagagaagctagacctgaacctggcggcagctgtgcataaggagatgttcatcatggtgcaagaagagcggcgtctacgaaaggccctgctggagaagggtatcacagaggctgagcgagaggctttcgagctgctcccagatgatgagcgccagtgtatcaagtgcaagactacgtgtttcctgtcagccctggcctgctacgactgcccagacggccttgtctgcctttcccacatcaatgatctctgcaagtgctccagtagccggcagtacctgcggtatcggtataccttggatgagcttcctgccatgctgcataagctgaaggttcgggctgagtcctttgacacctgggccaacaaagtgcgagtggccctggaggtggaggatgggcggaagcgcagccttgaagaactgagggcactagagtctgaagcccgtgagcggaggtttcctaatagtgagctgctgcagcaactaaagaactgcctgagtgaggcagaggcttgcgtgtcccgagctctgggactggtcagcggccaggaagctggcccccacagggtggctggtctacagatgaccctgactgagctccgggcctttctggaccagatgaacaacctgccttgcgccatgcaccagattggggatgtcaagggtgttctggaacaggtggaggcctaccaggctgaggctcgtgaggccctggcctcactgccctccagtccagggctactgcagtccctgttggagagggggcggcagctgggggtggaggtgcctgaggcccagcagctccagcggcaggtggaacaggcgcgatggctggatgaggtgaaacgcacactggccccctcagcccgaaggggcaccttggctgtcatgcgaggactgttggtcgcgggtgccagtgtagcccctagccctgctgtggataaagcccaggccgagctgcaggaactgctgaccattgctgaacgctgggaggagaaagcccacctctgcctggaggccaggcagaagcatccaccagccacacttgaggccataatccgtgaagcggaaaacatccctgttcacctgcccaacatccaggctctcaaggaggctcttgctaaggcccgggcctggattgctgatgttgatgagatccaaaatggtgaccactacccctgcctggatgacttggagggcctagtagctgtgggccgggacctacctgtggggctggaggagctgagacagctagagctacaggtactgacagcgcactcctggagggagaaggcctccaagaccttcctcaagaaaaattcttgctacacgctgctggaggttctctgcccatgtgcagatgccggctcagacagcaccaagcgcagccggtggatggagaaggagctggggttgtacaaatctgacacagagctgctggggctgtctgcgcaggacctcagggacccaggctctgtgatcgtggccttcaaggagggggaacagaaggagaaggagggtatcctgcagctgcgtcgcaccaattcggccaagcccagtccactggcatcatcgagcacggcctcctctacaacctctatctgtgtgtgtgggcaggtgctggctggggcgggagctctgcagtgtgacctgtgtcaggactggttccatgggcggtgtgtgtcagtgcctcgcctcctcagctctccgaggcccaatcccacctcatccccactgctggcctggtgggaatgggacaccaaattcctgtgtccactgtgtatgcgctcaaggcgcccgcgcctggagaccatcctggcactgctggtagccctgcagagactgcctgtgcggctgcccgagggcgaggccctgcagtgcctcacagagagggccatcagctggcaaggccgcgccaggcaggctctggcctctgaagatgtgactgctcttttgggacggctggctgagctccgccaacggctacaggctgaacctagacctgaggagcctcctaactaccctgcagcccctgcttctgaccccctcagagagggcagtggcaaggatatgcctaaggtccagggcttactggagaatggagacagtgtgaccagtcctgagaaggtagccccggaggagggctcagatctggagctgctgtcctcgctgttgccacagttgactggccctgtgttggaactgcctgaggcaacccgggcccccttggaggagctcatgatggagggggacctgctcgaggtgaccctggatgagaaccacagcatatggcagctgctgcaggctggacagcccccagacctggagaggatccgcacacttctggagctggagaaggcagagcgtcacgggagtcgggctcggggccgggccctggagaggcggcggcggcggaaggtggatcggggtggggagggcgatgacccagcccgagaggagctagagccaaagagggtacggagctcagggccagaggctgaggaggtccaggaggaggaagagctggaggaggagactgggggtgagggcccccctgcacccatccccaccactggcagccccagcacccaggagaaccagaatggcttggaaccggcggaagggaccacttcaggcccctcggcccctttctccactctgactccccggctgcatctgccctgcccacagcagccgcctcagcaacagttg

SEQ ID NO: 6419 - DNA, 375 bp, Homo sapiens
  source 1..375: mol_type = genomic DNA
atgcctcacagctccgacagcagtgactccagcttcagccgctctcctccccctggcaaacaggactcatctgatgatgtgagaagagttcagaggagggagaaaaatcgtattgccgcccagaagagccgacagaggcagacacagaaggccgacaccctgcacctggagagcgaagacctggagaaacagaacgcggctctacgcaaggagatcaagcagctcacagaggaactgaagtacttcacgtcggtgctgaacagccacgagcccctgtgctcggtgctggccgccagcacgccctcgccccccgaggtggtgtacagcgcccacgcattccaccaacctcatgtcagctccccgcgcttccagccc

SEQ ID NO: 6420 - DNA, 1869 bp, Homo sapiens
  source 1..1869: mol_type = genomic DNA
atggcccataaatatgtgggtttgcagtatcacggatcagtgacatttgaggatgtggccatagccttctcccagcaggagtgggagagtctggactcttcccagaggggcttgtacagagatgtgatgttggagaactacaggaacttggtgtcaatgggacattcccgttctaaaccacatgtgatcgccttattggaacaatggaaagagcctgaagtgacagtgaggaaagatggaagaagatggtgcacagatttgcagttggaagatgatacaatcggctgtaaagaaatgcccacctctgaaaactgtccatcttttgctctacatcagaaaataagtagacagaaaccacgtgaatgtcaggaatatggaaagaccctttgtcaagactcaaagcctgttcaacatgaaagaatacatagtagtgaaaaacccaacagatgtaaagaatgtgggaagaactttagtaatggacatcaactcaccatacatcagagattgcatgttggtgagaaaccctataaatatgaaaaatgtgggaaggcctttatcagtggctcagcctttgttaagcatgggagaattcacactggtgagaagccactcaaatgtaagcaatgtggaaagactattagtggtagctatcaacttacagtacataagagtattcatactgggaagaaaccatatgagtgcggggaatgtgggaaagcttttctagtatatggaaagcttacccggcatcagagtactcacactggtgaaaaaccctttgggtgtgaggagtgtgggaaggccttcagtaccttttcatacctggttcaacatcagcgaattcataccagtgaaaaaccttacgaatgcaaagaatgtgggaaggcctttagcactagctcaccccttgctaagcatcagagaattcatactggcgagaaaccctatgaatgtaaggagtgtgggaagtccttcactgtgtatggacagcttactcgacatcagagtattcatactggtgagaaaccttttgaatgtaaggaatgtggaaaggcctttagacttagttccttccttcatgcacatcagcgaattcatgcagagataaagccctacggatgcaaggaatgcgggagaaccttcagtcgtgcctcatatcttgttcaacatggaagacttcacactggcgagaagccctatgaatgtaaggagtgtggcaaggcctttagtactggctcataccttgttcagcatcagaggatccatactggggagaaaccctatgaatgtaaggaatgtggcaaagcctttattagtcgccatcagcttaccgtacatcaaagggttcatactggagagaaaccctatgagtgtaaggaatgtggcaaggccttcagagtgcacgtacatctcacacagcatcggaaaattcatactgatgtaaagccctatgaatgtaaggaatgtggaaagacttttagtcgagcctcgtaccttgtacaacatagcagaatccatactggtaagaagccctatgagtgtaaggagtgtggcaaggccttcagttctggctcataccttgttcagcatcaaagaattcatactggggagaaaccctatgaatgtaacaaatgtgggaaagcctttactgtttatggacaacttattggacatcagagtgttcacactggtgagaaaccttttgaatgtaaggaatgcgggaaggcctttagacttaattcattccttactgaacatcagcgggtacacactggtgagaaaccctttaaatgcaaaaaatgtgggaagacctttagatacagttcagcccttaaagtgcatctgagaaaacatatgagtgttataccc

SEQ ID NO: 6421 - DNA, 1872 bp, Homo sapiens
  source 1..1872: mol_type = genomic DNA
atggcccataaatatgtgggtttgcagtatcacggatcagtgacatttgaggatgtggccatagccttctcccagcaggagtgggagagtctggactcttcccagaggggcttgtacagagatgtgatgttggagaactacaggaacttggtgtcaatggcaggacattcccgttctaaaccacatgtgatcgccttattggaacaatggaaagagcctgaagtgacagtgaggaaagatggaagaagatggtgcacagatttgcagttggaagatgatacaatcggctgtaaagaaatgcccacctctgaaaactgtccatcttttgctctacatcagaaaataagtagacagaaaccacgtgaatgtcaggaatatggaaagaccctttgtcaagactcaaagcctgttcaacatgaaagaatacatagtagtgaaaaacccaacagatgtaaagaatgtgggaagaactttagtaatggacatcaactcaccatacatcagagattgcatgttggtgagaaaccctataaatatgaaaaatgtgggaaggcctttatcagtggctcagcctttgttaagcatgggagaattcacactggtgagaagccactcaaatgtaagcaatgtggaaagactattagtggtagctatcaacttacagtacataagagtattcatactgggaagaaaccatatgagtgcggggaatgtgggaaagcttttctagtatatggaaagcttacccggcatcagagtactcacactggtgaaaaaccctttgggtgtgaggagtgtgggaaggccttcagtaccttttcatacctggttcaacatcagcgaattcataccagtgaaaaaccttacgaatgcaaagaatgtgggaaggcctttagcactagctcaccccttgctaagcatcagagaattcatactggcgagaaaccctatgaatgtaaggagtgtgggaagtccttcactgtgtatggacagcttactcgacatcagagtattcatactggtgagaaaccttttgaatgtaaggaatgtggaaaggcctttagacttagttccttccttcatgcacatcagcgaattcatgcagagataaagccctacggatgcaaggaatgcgggagaaccttcagtcgtgcctcatatcttgttcaacatggaagacttcacactggcgagaagccctatgaatgtaaggagtgtggcaaggcctttagtactggctcataccttgttcagcatcagaggatccatactggggagaaaccctatgaatgtaaggaatgtggcaaagcctttattagtcgccatcagcttaccgtacatcaaagggttcatactggagagaaaccctatgagtgtaaggaatgtggcaaggccttcagagtgcacgtacatctcacacagcatcggaaaattcatactgatgtaaagccctatgaatgtaaggaatgtggaaagacttttagtcgagcctcgtaccttgtacaacatagcagaatccatactggtaagaagccctatgagtgtaaggagtgtggcaaggccttcagttctggctcataccttgttcagcatcaaagaattcatactggggagaaaccctatgaatgtaacaaatgtgggaaagcctttactgtttatggacaacttattggacatcagagtgttcacactggtgagaaaccttttgaatgtaaggaatgcgggaaggcctttagacttaattcattccttactgaacatcagcgggtacacactggtgagaaaccctttaaatgcaaaaaatgtgggaagacctttagatacagttcagcccttaaagtgcatctgagaaaacatatgagtgttataccc

SEQ ID NO: 6422 - DNA, 1572 bp, Homo sapiens
  source 1..1572: mol_type = genomic DNA
atgcactccctggacgagccgctcgacctgaagctgagtatcaccaagctccgggcggcaagagagaagcgggagaggacgctgggtgtggtccggccccgtgctctgcacagggagctgggcctggtggatgacagccccacacctggctctccaggctccccgccctcaggcttcctgctgaactccaagttccccgagaaggtggagggacgcttttcagcagcccctctcgtggacctcagcctgtcaccaccatctgggctggactcccccaatggcagcagctcgctgtcccccgagcgccagggcaacggggacctgcctccagtgcccagtgcctcggacttccagccactgcgctatttggatggtgtccccagctccttccagttcttcctgcccctcggctccgggggggccctgcacctgcctgcctcctccttccttacccctcccaaggacaagtgcctctcgccagacctgcccctgcccaagcagctggtgtgtcgctgggccaagtgtaaccagctctttgagctcctgcaagacctggtggaccatgtcaacgattaccatgtcaagcccgagaaggatgcggggtactgctgccactgggagggctgcgcccgccatggccgaggtttcaacgccaggtacaagatgctcatccacatccgcacacacaccaacgagaagccacaccgctgtccgacctgcagcaagagcttctcccgcctggagaacctgaagatccacaaccggtcgcacacaggtgagaagccctacgtctgcccctacgagggctgcaacaagcgctattccaactccagtgaccgctttaagcacacgcgcacccactatgtggacaagccctactactgcaagatgcccggctgccacaagcgctacacggaccccagctcactgcgcaagcacatcaaggcccatggccactttgtgtcccacgagcagcaagagctcctgcagctgcgcccaccccccaagccgccactgcccgcccccgacggcggcccctatgtcagtggggcccagatcatcatccccaacccagctgccctctttggaggccctggcctgcccggcttacccctacccctggcccccggcccccttgacctcagtgccctggcctgtggcaacggtgggggcagtgggggtggggggggcatgggccctgggctgccaggccccgtcctgcctctcaatctggccaagaacccgctgctgccctcgccctttggggctggcggactgggcttgcctgtggtctccctccttgctggcgcagctggtggcaaggccgagggggagaaggggcgtgggtcggtgcccaccagggccctgggcatggagggccacaagacgccccttgaaaggacggagagcagctgctcccggccaagccccgatggactccccctgctgccaggcaccgtgctggacctgtccacgggcgtcaactcagctgccagcagcccagaggcgttggcccctggctgggtggtcatcccgccgggctcggtgctgctcaaaccggctgtggtgaac

SEQ ID NO: 6423 - DNA, 2325 bp, Homo sapiens
  source 1..2325: mol_type = genomic DNA
atgatggttcagcgactgggactcatttcacctccagcaagccaggtctctacagcatgcaaccagatcagtcctagcttacagagggcaatgaatgcagccaacctgaatatacctccttcagataccaggtcccttatttcgcgtgagtctttggcgtccacgaccttgagtctgacggaaagtcagtcggcctcaagcatgaagcaggagtggtcccagggctacagggccctcccttcgctctccaaccacggctctcagaatggccttgatctaggggatctccttagccttcctcccgggacatccatgtccagcaatagtgtctctaactcattaccatcctacctttttggcacggaaagtagccactctccttaccctagtcctcggcactcatccaccaggtcccactcggcccgctccaagaagagagcgctgtccttgtccccgctgtccgatggcatcgggatagatttcaataccatcatccgcacgtcgcccacgtccttggtggcctacatcaacgggtcgagggcttcgccggccaacctgtccccgcagccggaggtctacgggcatttcctgggcgtgcgcggcagctgcattccccagccgcgcccggtgcccggcagccagaagggcgtgctggtggcccctggaggcctggcgctgccggcctacggcgaggacggggccctggagcacgagcgcatgcaacagctggagcacggcggcctgcagccaggcctggtcaaccacatggtggtgcagcatggcctgccgggccccgacagccagtcggccggcctgttcaagaccgaacgcctggaggagttcccgggcagcaccgtagacctaccccccgcgcctccgctccctcctctgccgccgcccccaggccccccacccccttaccatgcccatgcgcaccttcaccacccggagctcgggccccacgcccagcagctggccttgccccaggccaccctggacgacgacggggagatggacggcatcgggggcaagcattgctgccgctggatcgactgcagcgccctgtacgaccagcaggaggagctcgtgcggcacatcgagaaggtccacatcgaccagcgcaaaggggaggacttcacttgcttctgggccggttgccctcgaagatacaagcccttcaacgcccgctataaactgctgatccacatgagagtccactctggggagaagcccaacaagtgtacgtttgaaggttgcgagaaggccttttcaaggcttgaaaatctcaagatccacttgcggagccacacaggcgagaagccgtatttgtgccagcatccgggttgtcagaaggccttcagtaactccagtgaccgcgccaaacaccagcggacgcatctggacaccaaaccttatgcttgtcaaattccaggatgtaccaaacgctacacagacccaagttccctaagaaagcatgtgaaggcacattcttccaaagagcaacaagcaaggaaaaagttgcggtccagcacagagctccatccagacctgctcacagattgcctcaccgtgcagtccctgcagccggccacttcccctagagatgctgctgctgaagggaccgtgggacgctcccctggacccgggcctgacctctattcagctcccattttctccagcaattattcaagccgaagtggaacagctgctggggccgtaccacccccacatcctgtcagtcacccttctccaggacataatgtacaggggagccctcacaacccctcctcccagttacctccactcacagctgtggacgcaggagctgagaggtttgcaccttctgctccatctcctcaccacatcagcccccggagagttccagctccttcttcaatactgcaaagaacacagcctccctatacccagcagccatcaggttcacacctgaagtcctatcagccagaaacaaactcttcttttcaaccaaatggtatccatgtccatggattttatgggcagctgcagaagttctgtcccccacactaccccgattcccagagaattgtgccgcctgtcagctcctgcagtgtggtgccttcgtttgaggactgcctagtccctacatccatgggccaggccagttttgatgttttccacagagccttctcgactcactcgggcattacagtgtatgatttaccttcaagttcctcgagcctctttggggagtctctccgcagcggggctgaagatgctaccttcttgcagatcagcaccgtggaccgctgtcctagccagctctcctctgtctacaccgaaggc

SEQ ID NO: 6424 - DNA, 2790 bp, Homo sapiens
  source 1..2790: mol_type = genomic DNA
atgaatggaagatcatgcagcatgagtctccaccggacatcgggaaccccacaggggcctaggatggtcagtggtcatcacattcctgccatccgagcccactccgggactcctggcccctcgccctgtggcagcacatcgagtcccactatggcaagccttgctaacaacctccatctcaagatgccctcaggaggagggatggctcctcagaacaacgtggctgagagccgcatccatctgcctgccttaagccccaggagacaaatgctcaccaatgggaagccgcgattccaggtcacccaggctggaggcatgtcagggtcacatactttaaagccaaagcagcaggagtttggaagcccttttcctccaaatcctgggaaaggggctcttggctttgggcctcagtgcaagtccattggaaaaggcagctgcaacaatctagtggtcaccagcagtcccatgatggttcagcgactgggactcatttcacctccagcaagccaggtctctacagcatgcaaccagatcagtcctagcttacagagggcaatgaatgcagccaacctgaatatacctccttcagataccaggtcccttatttcgcgtgagtctttggcgtccacgaccttgagtctgacggaaagtcagtcggcctcaagcatgaagcaggagtggtcccagggctacagggccctcccttcgctctccaaccacggctctcagaatggccttgatctaggggatctccttagccttcctcccgggacatccatgtccagcaatagtgtctctaactcattaccatcctacctttttggcacggaaagtagccactctccttaccctagtcctcggcactcatccaccaggtcccactcggcccgctccaagaagagagcgctgtccttgtccccgctgtccgatggcatcgggatagatttcaataccatcatccgcacgtcgcccacgtccttggtggcctacatcaacgggtcgagggcttcgccggccaacctgtccccgcagccggaggtctacgggcatttcctgggcgtgcgcggcagctgcattccccagccgcgcccggtgcccggcagccagaagggcgtgctggtggcccctggaggcctggcgctgccggcctacggcgaggacggggccctggagcacgagcgcatgcaacagctggagcacggcggcctgcagccaggcctggtcaaccacatggtggtgcagcatggcctgccgggccccgacagccagtcggccggcctgttcaagaccgaacgcctggaggagttcccgggcagcaccgtagacctaccccccgcgcctccgctccctcctctgccgccgcccccaggccccccacccccttaccatgcccatgcgcaccttcaccacccggagctcgggccccacgcccagcagctggccttgccccaggccaccctggacgacgacggggagatggacggcatcgggggcaagcattgctgccgctggatcgactgcagcgccctgtacgaccagcaggaggagctcgtgcggcacatcgagaaggtccacatcgaccagcgcaaaggggaggacttcacttgcttctgggccggttgccctcgaagatacaagcccttcaacgcccgctataaactgctgatccacatgagagtccactctggggagaagcccaacaagtgtacgtttgaaggttgcgagaaggccttttcaaggcttgaaaatctcaagatccacttgcggagccacacaggcgagaagccgtatttgtgccagcatccgggttgtcagaaggccttcagtaactccagtgaccgcgccaaacaccagcggacgcatctggacaccaaaccttatgcttgtcaaattccaggatgtaccaaacgctacacagacccaagttccctaagaaagcatgtgaaggcacattcttccaaagagcaacaagcaaggaaaaagttgcggtccagcacagagctccatccagacctgctcacagattgcctcaccgtgcagtccctgcagccggccacttcccctagagatgctgctgctgaagggaccgtgggacgctcccctggacccgggcctgacctctattcagctcccattttctccagcaattattcaagccgaagtggaacagctgctggggccgtaccacccccacatcctgtcagtcacccttctccaggacataatgtacaggggagccctcacaacccctcctcccagttacctccactcacagctgtggacgcaggagctgagaggtttgcaccttctgctccatctcctcaccacatcagcccccggagagttccagctccttcttcaatactgcaaagaacacagcctccctatacccagcagccatcaggttcacacctgaagtcctatcagccagaaacaaactcttcttttcaaccaaatggtatccatgtccatggattttatgggcagctgcagaagttctgtcccccacactaccccgattcccagagaattgtgccgcctgtcagctcctgcagtgtggtgccttcgtttgaggactgcctagtccctacatccatgggccaggccagttttgatgttttccacagagccttctcgactcactcgggcattacagtgtatgatttaccttcaagttcctcgagcctctttggggagtctctccgcagcggggctgaagatgctaccttcttgcagatcagcaccgtggaccgctgtcctagccagctctcctctgtctacaccgaaggc

SEQ ID NO: 6425 - DNA, 1860 bp, Homo sapiens
  source 1..1860: mol_type = genomic DNA
atggcagaggcccgcacatccctgtctgcccactgtcggggcccgctggccactggcctgcacccagacctggacctcccgggccgaagcctcgccacccctgcgccttcctgctaccttctgggcagcgaacccagctctggcctgggcctccagcccgagacccacctccccgagggcagcctgaagcggtgctgcgtcttgggcctaccccccacctccccagcctcctcctcaccctgtgcctcctccgacgtcacctccatcatccgctcctcccagacgtctctggtcacctgtgtaaatggactccggagcccccctctgacgggagatctggggggcccttccaagcgggcccggcctggccctgcatcgacggacagccatgagggcagcttgcaacttgaagcctgccggaaggcgagcttcctgaagcaggaacccgcggatgagttttcagagctctttgggcctcaccagcagggcctgccgcccccctatcccctgtctcagttgccgcctggcccaagccttggaggcctggggctgggcctggcaggcagggtggtggccgggcggcaggcgtgccgctgggtggactgctgtgcagcctatgagcagcaggaggagctggtgcggcacatcgagaagagccacatcgaccagcgcaagggcgaggacttcacctgcttctgggctggctgcgtgcgccgctacaagcccttcaacgcccgctacaagctgctcatccacatgcgagtgcactcgggcgagaagcccaacaagtgcatgtttgaaggctgcagcaaggccttctcacggctggagaacctcaagatccacctgaggagccacacgggcgagaagccgtacctgtgccagcacccgggttgccagaaggccttcagcaactccagcgaccgcgccaagcaccagcgcacccacctagacacgaagccgtacgcctgtcagatccctggctgctccaagcgctacacagaccccagctccctccgcaagcacgtcaaggcccattcagccaaagagcagcaggtgcgtaagaagctgcatgcgggccctgacaccgaggccgacgtcctgaccgagtgtctggtcctgcagcagctccacacgtccacacagctggctgccagcgacggcaagggtggctgtggcctgggccaggagctgctcccaggtgtgtatcctggctccatcaccccccataacggacttgcatcgggcctcctgcccccagcgcacgacgtaccttccaggcaccacccgctggatgccaccaccagttcccaccaccatctgtcccctctgcccatggctgagagcacccgggatgggttggggcccggcctcctctcaccaatagtcagccccctgaaggggctggggccaccgccgctgcccccatcctctcagagccattctccggggggccagcccttccccacactccccagcaagccgtcctacccacccttccagagccctccacccccgcctctgcccagcccacaaggttaccagggcagtttccactccatccagagttgcttcccctatggcgactgctaccggatggctgaaccagcagccggtggggacggactggtcggggagacccacggtttcaaccccctgcggcccaatggctaccacagcctcagcacgcccttgcctgccacaggctatgaggccctggctgaggcctcatgccccacagcgctgccacagcagccatctgaagatgtggtgtccagcggccccgaggactgtggcttcttccccaatggagcctttgaccactgcctgggccacatcccctccatctacacagacacc

SEQ ID NO: 6426 - DNA, 2385 bp, Homo sapiens
  source 1..2385: mol_type = genomic DNA
atgcattgcgaggtggctgaggcacactcggacaagaggcctaaggaggcccctggtgcgcccggccccgaccgcggccccgccagcctcggcgcgcacatggccttcagggtcaccgtgagtggcggcggctgcggggacaggggcccgcgggacctgctagcccggccgcctgcgccgccaccgcgcgcccacgacctcctccggccccgcagtccccgagactacggtccatccaaggccgccgccgccgggaaggtgaatgggagctacggacaccgtaccccgggctcagagaagagcctgctggacctggaccttgctgagggccctggccccacctgctgccagggcctgtttctccctgcaggaagcccaccgccccgggctcacccccaagcttgtgagaggctgctgcatttcccccaccctgacaggtcacctagaccccaggccacgtatgtgaacggcagcctcccaaccacacaacacatcaaacaggagtccttgcccgactaccaagccatggcagaggcccgcacatccctgtctgcccactgtcggggcccgctggccactggcctgcacccagacctggacctcccgggccgaagcctcgccacccctgcgccttcctgctaccttctgggcagcgaacccagctctggcctgggcctccagcccgagacccacctccccgagggcagcctgaagcggtgctgcgtcttgggcctaccccccacctccccagcctcctcctcaccctgtgcctcctccgacgtcacctccatcatccgctcctcccagacgtctctggtcacctgtgtaaatggactccggagcccccctctgacgggagatctggggggcccttccaagcgggcccggcctggccctgcatcgacggacagccatgagggcagcttgcaacttgaagcctgccggaaggcgagcttcctgaagcaggaacccgcggatgagttttcagagctctttgggcctcaccagcagggcctgccgcccccctatcccctgtctcagttgccgcctggcccaagccttggaggcctggggctgggcctggcaggcagggtggtggccgggcggcaggcgtgccgctgggtggactgctgtgcagcctatgagcagcaggaggagctggtgcggcacatcgagaagagccacatcgaccagcgcaagggcgaggacttcacctgcttctgggctggctgcgtgcgccgctacaagcccttcaacgcccgctacaagctgctcatccacatgcgagtgcactcgggcgagaagcccaacaagtgcatgtttgaaggctgcagcaaggccttctcacggctggagaacctcaagatccacctgaggagccacacgggcgagaagccgtacctgtgccagcacccgggttgccagaaggccttcagcaactccagcgaccgcgccaagcaccagcgcacccacctagacacgaagccgtacgcctgtcagatccctggctgctccaagcgctacacagaccccagctccctccgcaagcacgtcaaggcccattcagccaaagagcagcaggtgcgtaagaagctgcatgcgggccctgacaccgaggccgacgtcctgaccgagtgtctggtcctgcagcagctccacacgtccacacagctggctgccagcgacggcaagggtggctgtggcctgggccaggagctgctcccaggtgtgtatcctggctccatcaccccccataacggacttgcatcgggcctcctgcccccagcgcacgacgtaccttccaggcaccacccgctggatgccaccaccagttcccaccaccatctgtcccctctgcccatggctgagagcacccgggatgggttggggcccggcctcctctcaccaatagtcagccccctgaaggggctggggccaccgccgctgcccccatcctctcagagccattctccggggggccagcccttccccacactccccagcaagccgtcctacccacccttccagagccctccacccccgcctctgcccagcccacaaggttaccagggcagtttccactccatccagagttgcttcccctatggcgactgctaccggatggctgaaccagcagccggtggggacggactggtcggggagacccacggtttcaaccccctgcggcccaatggctaccacagcctcagcacgcccttgcctgccacaggctatgaggccctggctgaggcctcatgccccacagcgctgccacagcagccatctgaagatgtggtgtccagcggccccgaggactgtggcttcttccccaatggagcctttgaccactgcctgggccacatcccctccatctacacagacacc

SEQ ID NO: 6427 - DNA, 1632 bp, Homo sapiens
  source 1..1632: mol_type = genomic DNA
atggaggcgctgagtcgagctgggcaggagatgagcctagcggccctgaagcaacacgacccctatatcaccagcatcgcagacctcacgggccaggtcgctctgtacaccttctgccccaaggccaaccagtgggagaagactgatatagaagggaccttattcgtatatcgaaggtcagcttccccttaccatggttttaccattgtgaatcgactaaatatgcacaatctagttgaaccagtgaataaagatttggaatttcagctccatgaaccatttcttctgtatagaaatgcaagcttgtcgatatatagtatctggttttatgacaagaatgactgtcaccgcatagcaaaactcatggctgatgtggtagaagaggagacacggcgatcccagcaagctgctcgggacaaacagagtcccagccaggccaatggctgcagcgaccacaggcccatcgacatcctggagatgctgagcagagccaaggatgagtatgagaggtctgctccatctggacacaagcatctgacggtagaagagttatttggaacctctttgccaaaggaacaaccagcagttgtgggtctggattcagaagaaatggagaggttgccaggagatgcctcccagaaagagcccaattcattcctaccatttccctttgagcagttaggaggagcccctcaatcagaaaccctgggtgtcccttctgctgcccaccattcagtccagcctgaaatcaccaccccggtgctaatcactccagcctccatcacacagtccaatgaaaagcatgctccaacctacacaatcccgttgagccctgttctcagtcccactctgccagctgaagctcctactgcacaggttccccccagcttacctcgaaacagcaccatgatgcaggcagtgaagaccacgcctagacagaggtctccactcctgaaccagccagtccctgagctaagccatgccagtctgattgccaaccagagccccttcagggccccattgaacgtgacgaacacagctggcacatccctcccaagcgttgatcttctccagaaactcaggttgaccccacagcatgaccaaatacagacacaaccacttgggaaaggtgcaatggtagccagcttttctccggcagctggtcagctagccacacctgagagcttcatagagcctccctctaagacagcagcagcaagagtggcggcctcagcctccctgagcaacatggtgcttgctccccttcagtctatgcagcagaaccaggatcctgaagtatttgtgcagcctaaggtgttatccagtgccatcccggttgcaggcgccccactggttactgcaacgaccactgcagtgtcttcagtcctgctggccccaagtgttttccagcagacagttacaagatcttcggaccttgagaggaaagccagctccccttctcctctaactattggaacgccagaaagtcagagaaagccttccattattctcagcaagtctcagctccaggatacattaatacatctaataaagaatgattccagcttcctcagtacacttcatgaagtctacttgcaggttctgaccaagaacaaagacaaccacaaccta

SEQ ID NO: 6428 - DNA, 867 bp, Homo sapiens
  source 1..867: mol_type = genomic DNA
atgatgtcttatcttaagcaaccgccttacgcagtcaatgggctgagtctgaccacttcgggtatggacttgctgcacccctccgtgggctacccggccaccccccggaaacagcgccgggagaggacgacgttcactcgggcgcagctagatgtgctggaagcactgtttgccaagacccggtacccagacatcttcatgcgagaggaggtggcactgaaaatcaacttgcccgagtcgagggtgcaggtatggtttaagaatcgaagagctaagtgccgccaacaacagcaacaacagcagaatggaggtcaaaacaaagtgagacctgccaaaaagaagacatctccagctcgggaagtgagttcagagagtggaacaagtggccaattcactcccccctctagcacctcagtcccgaccattgccagcagcagtgctcctgtgtctatctggagcccagcttccatctccccactgtcagatcccttgtccacctcctcttcctgcatgcagaggtcctatcccatgacctatactcaggcttcaggttatagtcaaggatatgctggctcaacttcctactttgggggcatggactgtggatcatatttgacccctatgcatcaccagcttcccggaccaggggccacactcagtcccatgggtaccaatgcagtcaccagccatctcaatcagtccccagcttctctttccacccagggatatggagcttcaagcttgggttttaactcaaccactgattgcttggattataaggaccaaactgcctcctggaagcttaacttcaatgctgactgcttggattataaagatcagacatcctcgtggaaattccaggttttg

SEQ ID NO: 6429 - DNA, 2283 bp, Homo sapiens
  source 1..2283: mol_type = genomic DNA
atgttagcctcaagcaagaggatgaacagttcttcacgttctcaaatccttctaaggtggaagtcagacaaggctcagagtggaccctacaatgttgagaaggaaatccttacttcaagattcttgcgtgacactgagacctgtcgacagaattttaggaattttccatacccagacctggctggtcctcgaaaggcattgagtcaactccgagagctctgccttaagtggctgagacctgagattcactcaaaggaacaaattttggagctgctggtgctggagcaattcctgaccatcctgcctggtgaggttaggacttgggtaaagtcccagtatccagagagcagcgaggaagcagtgactctggtggaggatttgactcagattctagaagaggaagctcctcaaaactctaccctttcccaagataccccagaggaagaccccagaggaaaacatgctttccagacaggatggctaaatgacttggtgaccaaagaatcgatgacattcaaagatgtggctgtagacatcacccaggaggactgggagttaatgcgtcctgtgcagaaggaattatacaagactgtgacgttacagaactattggaacatggtttctctgggacttacagtgtacagaccaactgtgattcccatattggaagaaccatggatggtgataaaagaaattttagaaggccctagtccagaatgggaaactaaagcccaagcatgtactccagtggaggatatgtctaaactcacaaaggaagaaacccataccatcaaattagaagactcatatgactacgatgatagactagagaggcgaggaaaaggtggcttctggaaaattcacactgatgaaagaggtttcagtttgaagtcagtcctttcacaagaatatgatcctacagaagaatgtcttagtaaatatgatatatatagaaataattttgaaaagcattcaaacctaattgtacagtttgatacccaattagataataaaacttctgtgtataatgaaggcagggcaaccttcaatcatgtctcatatggtattgtacataggaaaatacttcctggagagaagccttacaagtgtaatgtgtgtgggaaaaaatttaggaaatacccatccctcctgaaacaccaaagtacccatgccaaagagaaatcgtatgaatgtgaagaatgtgggaaagagtttaggcatatctcatcccttattgcacatcagagaatgcacactggagaaaaaccatatgaatgccaccagtgtggtaaagccttcagccagcgtgcacaccttactatacatcagagaattcatactggagagaaaccctataagtgtgatgactgtgggaaagacttcagtcagcgtgcacaccttaccatccatcaaaggacacatactggagagaaaccatataaatgcttggaatgtggtaaaaccttcagtcatagttcatcactgattaatcatcagagagttcatactggagaaaaaccttatatatgcaatgaatgtgggaagactttcagtcagagtacacaccttcttcagcatcaaaaaatacatactgggaagaaaccatataaatgcaatgaatgttggaaagtgtttagtcagagtacttaccttattcgacatcagagaattcattctggagagaagtgttataaatgtaatgaatgtggaaaagcctttgctcattcctcaacccttattcaacatcaaaccactcacactggagagaaatcctatatatgtaatatatgtgggaaagccttcagccagagtgcaaatcttactcaacatcatagaacacatactggagagaaaccatataaatgcagtgtgtgtgggaaagcattcagccagagtgtgcaccttactcaacatcagaggattcataatggagaaaaaccctttaaatgcaatatatgtgggaaagcatatagacaaggcgcaaatcttactcagcatcaaaggattcatactggagaaaaaccctataaatgtaatgaatgtgggaaagctttcatttattcctcatcacttaatcaacatcagagaactcatactggagagagaccctataaatgtaatgaatgtgataaggattttagccagagaacatgccttattcaacaccagagaattcacacaggagagaaaccctatgcatgtcgtatatgtggtaaaaccttcacccagagtacaaaccttattcagcatcaacgtgttcatacaggtgccaaacatcgtaat

SEQ ID NO: 6430 - DNA, 1779 bp, Homo sapiens
  source 1..1779: mol_type = genomic DNA
atgaccatgttcaaggaggcagtgaccttcaaggatgtggctgtggtcttcaccgaggaggagctggggctgctggacgtttcccagaggaagctgtatcgagatgtcatgctggagaacttcagaaacctgctatcagtggggcatcaactttcccaccgagatacttttcacttccaaagagaagaaaagttttggatcatggagacagcaacccaaagagaagggaattcaggaggcaagatccaaactgagttggagtctgttccagaaacaggaccacatgaagagtggtcttgccagcaaatctgggaacaaactgcaagtgagttaactagacctcaagactccataagtagctctcagttctccacacaaggtgatgtcccctcccaggttgacgcaggactatctataattcacataggagagacaccttctgagcatgggaagtgtaaaaaattcttcagtgatgtctccatccttgatcttcatcaacaattacactcaggaaagatatcccatacatgtaatgagtacaggaagagattctgttatagctcagctctttgtcttcatcagaaagttcacatgggagagaaacgctataagtgtgatgtgtgtagtaaggcatttagtcagaactcacaactgcaaactcatcagagaatccacactggagagaaaccattcaaatgtgagcagtgtgggaaaagtttcagccgtagatcaggaatgtatgttcattgcaaattacacacaggagaaaaacctcatatttgtgaggaatgtgggaaggccttcattcacaattcccagcttcgggaacatcaaagaatccatactggggagaagccattcaaatgttatatatgtggtaagagcttccatagtagatcaaatcttaataggcattccatggtccacatgcaagagaaatcatttagatgtgatacctgtagtaatagctttggtcagagatcagcacttaatagtcattgcatggaccacacaaaagagaaactatacaaatgtgaagaatgtggaaggagcttcacttgtaggcaagatctttgtaagcatcagatggaccatacaggagacaaaccatataattgtaatgtatgtgggaagggcttcaggtggtcctcatgtctttcaagacatcagcgggtccacaatggagaaacaacattcaagtgcgacggatgtgggaagagattttatatgaattcacagggccattcacatcagagagcctatagagaagaagaactgtataaatgtcagaagtgtgggaagggctacattagtaagtttaatcttgacttgcaccagagggtccacacgggagagagaccttataattgtaaggaatgtggaaagagcttcaggtgggcctcaggtattttgagacataagagactccatactggagaaaaaccattcaaatgtgaagagtgtgggaagaggtttactgagaattcaaaacttcgtttccatcaaagaattcacactggagaaaagccttacaaatgtgaggagtgtggaaagggattcagatgggcctcaactcatctaacccatcaaagactccacagcagagaaaaactattccaatgtgaggattgtgggaagagcagtgagcacagttcatgccttcaagaccaacaaagcgaccacagtggagaaaaaacatccaaatgtgaggactgtgggaagcgctacgagaggcgcttgaatctagatatgattttatcattatttttaaatgatata

SEQ ID NO: 6431 - DNA, 1791 bp, Homo sapiens
  source 1..1791: mol_type = genomic DNA
atgattaagttccagattcaagggatacatgtgcaggaaagggtgacattcaaggatgtggctgttgtcttcaccaaggaagagctggcactattggataaagcccagataaacctgtaccaagatgtgatgctggaaaacttcaggaacctcatgttagtgagagacgggattaaaaacaacattttgaatcttcaggcaaaggggttaagttacctttcgcaagaagtgcttcattgctggcagatttggaaacaaaggatccgggatttaactgtgagtcaggattatatcgtgaaccttcaagaagagtgttccccacatttagaagatgtttccctcagtgaagagtgggcaggcatttctcttcagatttctgaaaatgaaaactatgtagtaaatgccattatcaaaaatcaagatatcacagcatggcaaagcctgacacaggttcttaccccagaatcgtggaggaaagccaacataatgaccgagccccagaactctcagggaagatataagggaatttacatggaagagaaattgtacagacgtgctcagcatgatgacagcctcagttggacctcatgtgatcatcatgagtcccaagaatgtaaaggagaggaccctggtagacatcccagctgtgggaaaaacttgggtatgaaatcaacggttgaaaaacgtaatgcggcccatgtattaccacagcctttcccatgtaataactgtggggtggcctttgcagatgatacagatcctcatgtccatcacagcactcacctaggagaaaaatcttataaatgtgaccagtatggaaagaactttagtcagagccaagatcttatcgttcattgtaaaactcactctggcaagactccctatgaattccacgaatggcctatgggctgcaaacagagctcagaccttcccagatatcagaaagtctcctcaggagacaaaccctacaaatgtaaagaatgtggcaagggcttcaggcgcagctcttcccttcacaaccatcatcgagtccacacaggggagatgccctacaaatgcgatgaatgtgggaaagggtttggatttaggtcacttctttgtattcatcagggagtacacacagggaaaaagccctataaatgtgaagagtgtgggaagggctttgatcagagctccaaccttcttgtccatcagagagtccacactggagagaagccctacaaatgcagtgagtgtggcaagtgctttagttcaagctccgttcttcaagtccactggaggtttcacacaggggagaaaccatataggtgtggtgagtgtggaaagggcttcagccaatgtacacaccttcacattcaccagagagtccacacaggggagaaaccatacaaatgcaatgtgtgtggaaaggattttgcgtatagctctgttcttcacactcatcagagagttcacactggagaaaaaccatataaatgtgaagtgtgtggaaagtgcttcagttacagttcatattttcacttacatcaaagagatcacatcagagagaaaccatataaatgtgatgagtgtggtaaaggcttcagccggaattcagatcttaatgttcacctcagagtccacacaggagagaggccctataagtgtaaggcatgtggtaagggcttcagtcgtaattcatacctccttgcccatcagagagtgcatatagatgagacacagtacacacactgtgagcgtggaaaggaccttctgactcatcaaagactacatgagcagagagaaacatta

SEQ ID NO: 6432 - DNA, 1389 bp, Homo sapiens
  source 1..1389: mol_type = genomic DNA
atgcagtttgtgtcaacacggccgcagcctcagcagctgggcatccagggcctggggctggacagcgggagctggagctgggcccaggctctgcccccggaggaggtctgccaccaggagccggcgctgcgcggggaaatggccgagggaatgccgcccatgcaggctcaagaatgggacatggacgcccggcggccaatgccttttcagttcccaccctttccagatagggcacctgtcttccccgaccgcatgatgcgagagccccagttgcccacagcagagatctcactctggactgtggtggctgccattcaggctgtggagaggaaggtggatgcccaggccagccagctgctgaacctggaggggcgcacggggacagccgagaagaagctggccgactgtgaaaagacggccgtggaatttgggaaccacatggagagcaagtgggccgtgctggggaccctgctgcaggagtacgggctgctgcagaggcggctggagaacttggagaacttgctgcgcaacaggaacttctgggtcctgcggctgcccccgggcagcaagggggaggcccccaaggttccagtgacttttgtcgacattgctgtgtacttctccgaagacgagtggaagaacttggacgaatggcagaaggagctttataacaaccttgttaaggagaactacaaaaccctcatgtccctggacgcggagggctcagtccccaagccagatgctccagtccaggctgagcccagggaagaaccttgtgtgtgggagcagcgccaccccgaagagagagaaatcccaatggatcccgaagcaggagcagagcccctggtgcctgcgcaggatgcgtcctcccaggtgaagcgtgaggacaccctgtgtgtccggggtcagcggggcctggaggaaagagccatccctacggaatccattaccgactccccaatttctgcccaggacctcttgtcccggattaaacaggaggagcatcagtgcgtgtgggatcagcaggatttggcagacagagatattcccacggatcccaattcagagtctctcatctcagcacatgacattttgtcatggatcaagcaggaggagcagccatacccatggggaccacgcgactcaatggacggagagcttggattagactctggccctagtgacagcctgctgatggtgaagaacccacccccggccccgccacagccccagccccagccccagccaccgcagccgcagctgcagtcgcagccccagccccagagcctgccccccatcgcggtggccgagaacccgggcggccccccgagccgagggctgctggacgacggtttccagccacaccaaggagcggccctacgagtgcgc

SEQ ID NO: 6433 - DNA, 2013 bp, Homo sapiens
  source 1..2013: mol_type = genomic DNA
atgcagtttgtgtcaacacggccgcagcctcagcagctgggcatccagggcctggggctggacagcgggagctggagctgggcccaggctctgcccccggaggaggtctgccaccaggagccggcgctgcgcggggaaatggccgagggaatgccgcccatgcaggctcaagaatgggacatggacgcccggcggccaatgccttttcagttcccaccctttccagatagggcacctgtcttccccgaccgcatgatgcgagagccccagttgcccacagcagagatctcactctggactgtggtggctgccattcaggctgtggagaggaaggtggatgcccaggccagccagctgctgaacctggaggggcgcacggggacagccgagaagaagctggccgactgtgaaaagacggccgtggaatttgggaaccacatggagagcaagtgggccgtgctggggaccctgctgcaggagtacgggctgctgcagaggcggctggagaacttggagaacttgctgcgcaacaggaacttctgggtcctgcggctgcccccgggcagcaagggggaggcccccaaggttccagtgacttttgtcgacattgctgtgtacttctccgaagacgagtggaagaacttggacgaatggcagaaggagctttataacaaccttgttaaggagaactacaaaaccctcatgtccctggacgcggagggctcagtccccaagccagatgctccagtccaggctgagcccagggaagaaccttgtgtgtgggagcagcgccaccccgaagagagagaaatcccaatggatcccgaagcaggagcagagcccctggtgcctgcgcaggatgcgtcctcccaggtgaagcgtgaggacaccctgtgtgtccggggtcagcggggcctggaggaaagagccatccctacggaatccattaccgactccccaatttctgcccaggacctcttgtcccggattaaacaggaggagcatcagtgcgtgtgggatcagcaggatttggcagacagagatattcccacggatcccaattcagagtctctcatctcagcacatgacattttgtcatggatcaagcaggaggagcagccatacccatggggaccacgcgactcaatggacggagagcttggattagactctggccctagtgacagcctgctgatggtgaagaacccacccccggccccgccacagccccagccccagccccagccaccgcagccgcagctgcagtcgcagccccagccccagagcctgccccccatcgcggtggccgagaacccgggcggccccccgagccgagggctgctggacgacggtttccaggtgctgcccggggagcgtggctccggcgaggcgccgccgggtggggaccgcagcaccgggggcggcgggggcgatgggggcggtgggggcggcggcgcggaggcggggacgggggcaggcggcggctgtggcagctgctgccctggcgggctgcggcggagcctcctcctgcacggcgcccgcagcaagccctactcgtgccccgagtgcggcaagagcttcggcgtgcgcaagagcctcatcatccaccaccgcagccacaccaaggagcggccctacgagtgcgctgagtgcgagaagagcttcaactgccactcgggcctcatccgccaccagatgacgcaccgcggcgagcggccctacaagtgctcggagtgcgagaagacctacagccgtaaggagcacctgcagaaccaccagcggctgcacacgggcgagcggcctttccaatgtgcactgtgcggcaagagcttcatccgcaagcagaacctgctcaagcaccagcgcatccacacgggcgagcgcccctacacgtgcggcgagtgcggcaagagcttccgctacaaggagtcgctcaaggaccacctgcgcgtgcacagcggcggcccgggccccggcgccccacggcagctcccgccgcctcctgagcgagac

SEQ ID NO: 6434 - DNA, 2037 bp, Homo sapiens
  source 1..2037: mol_type = genomic DNA
atggagtctcgctctgtcgcccaggctggagtgcagtggtgcgatcttggctcactgcaagctccgcctcctgggttcacgctattctcctgcctcagcctcctgagtagctgggactacagttctggcttttctggattctgtgcttcaccaatagaggaatcccatggagcattaattagttcttgcaattccagaaccatgactgatgggttggtgacattcagggatgtggccatcgacttctctcaggaggagtgggaatgcctggaccctgctcagagggacttgtacgtggatgtaatgttggagaactatagtaacttggtgtcactggatttggagtcaaaaacgtatgagaccaaaaaaatattttcagaaaatgatatttttgaaataaatttttcccagtgggagatgaaggacaaaagtaaaacccttggccttgaggcatccatcttcagaaataattggaagtgcaaaagcatattcgagggactaaaaggacatcaagagggatacttcagtcaaatgataatcagctatgaaaaaataccttcttacagaaaaagtaaatctcttactccacatcaaagaattcataatacagagaaatcctatgtttgtaaggaatgtgggaaggcttgcagtcatggctcaaaacttgttcaacatgagagaactcatacagctgaaaaacactttgaatgtaaagaatgtgggaagaattatttaagtgcctatcaactcaatgtgcatcagagatttcatactggtgagaaaccctatgagtgtaaggaatgtgggaagacctttagctggggatcaagccttgttaaacatgagagaattcacactggtgagaaaccctatgaatgtaaagaatgtgggaaggcctttagtcgtggctatcaccttacccaacatcagaaaattcatactggtgtgaaatcttataaatgtaaggaatgtgggaaggcctttttttggggctcaagccttgctaaacatgagataattcatacaggtgagaaaccttataaatgtaaagaatgtgggaaggccttcagtcgtggctatcagcttactcagcatcagaaaatccatactggtaagaaaccttatgaatgtaaaatatgtggaaaggctttttgttggggctatcaacttactcgacatcagatatttcatactggtgagaaaccctatgaatgcaaggaatgtgggaaggcttttaattgcggatcaagtcttattcaacatgaaagaattcatactggtgagaaaccttatgaatgtaaagaatgtggaaaggcctttagtcgtggctatcacctttctcaacatcagaaaatccatactggtgagaaaccttttgaatgtaaggaatgtgggaaggcctttagttggggttcaagccttgttaaacatgagagagttcatactggtgagaaatcccatgaatgtaaagaatgcggaaagaccttttgtagtgggtatcaacttactcgacatcaggtatttcacactggtgagaaaccctatgaatgtaaggaatgtgggaaggcttttaattgtggatcaagccttgttcaacatgaaagaatccatacaggggagaaaccctatgaatgtaaagaatgtgggaaggcttttagtcgtggctatcaccttactcaacatcagaaaattcataccggtgagaaacctttcaaatgtaaggaatgtgggaaggccttcagttggggttcaagcctagttaagcatgagagagtccatactaatgagaagtcttatgaatgtaaagactgtgggaaggcctttggtagtggctatcaacttagtgttcatcagagatttcatactggtgagaagctttatcaacgtaaggaattcgggaagacctttacttgtggctcaaaacttgttcatgagagaactcatagtaatgataaaccctacaaatataacgaatgtggggaagcctttctgtggacaacttactcaaatgagaaaattgatactgatgaaacctta

SEQ ID NO: 6435 - DNA, 1620 bp, Homo sapiens
  source 1..1620: mol_type = genomic DNA
atgaaggacaaaagtaaaacccttggccttgaggcatccatcttcagaaataattggaagtgcaaaagcatattcgagggactaaaaggacatcaagagggatacttcagtcaaatgataatcagctatgaaaaaataccttcttacagaaaaagtaaatctcttactccacatcaaagaattcataatacagagaaatcctatgtttgtaaggaatgtgggaaggcttgcagtcatggctcaaaacttgttcaacatgagagaactcatacagctgaaaaacactttgaatgtaaagaatgtgggaagaattatttaagtgcctatcaactcaatgtgcatcagagatttcatactggtgagaaaccctatgagtgtaaggaatgtgggaagacctttagctggggatcaagccttgttaaacatgagagaattcacactggtgagaaaccctatgaatgtaaagaatgtgggaaggcctttagtcgtggctatcaccttacccaacatcagaaaattcatactggtgtgaaatcttataaatgtaaggaatgtgggaaggcctttttttggggctcaagccttgctaaacatgagataattcatacaggtgagaaaccttataaatgtaaagaatgtgggaaggccttcagtcgtggctatcagcttactcagcatcagaaaatccatactggtaagaaaccttatgaatgtaaaatatgtggaaaggctttttgttggggctatcaacttactcgacatcagatatttcatactggtgagaaaccctatgaatgcaaggaatgtgggaaggcttttaattgcggatcaagtcttattcaacatgaaagaattcatactggtgagaaaccttatgaatgtaaagaatgtggaaaggcctttagtcgtggctatcacctttctcaacatcagaaaatccatactggtgagaaaccttttgaatgtaaggaatgtgggaaggcctttagttggggttcaagccttgttaaacatgagagagttcatactggtgagaaatcccatgaatgtaaagaatgcggaaagaccttttgtagtgggtatcaacttactcgacatcaggtatttcacactggtgagaaaccctatgaatgtaaggaatgtgggaaggcttttaattgtggatcaagccttgttcaacatgaaagaatccatacaggggagaaaccctatgaatgtaaagaatgtgggaaggcttttagtcgtggctatcaccttactcaacatcagaaaattcataccggtgagaaacctttcaaatgtaaggaatgtgggaaggccttcagttggggttcaagcctagttaagcatgagagagtccatactaatgagaagtcttatgaatgtaaagactgtgggaaggcctttggtagtggctatcaacttagtgttcatcagagatttcatactggtgagaagctttatcaacgtaaggaattcgggaagacctttacttgtggctcaaaacttgttcatgagagaactcatagtaatgataaaccctacaaatataacgaatgtggggaagcctttctgtggacaacttactcaaatgagaaaattgatactgatgaaacctta

SEQ ID NO: 6436 - DNA, 2577 bp, Homo sapiens
  source 1..2577: mol_type = genomic DNA
atgaaaatcggcagtgggttcctgagtggcggcggaggtaccggcagtagcggtggtagcggctccggcggcggtggtagtggcggcggcggcggcggcggcagcagcggcaggagggcagagatggaacccacctttccccaggccccggccgctgagcccccccctccgccagccccggacatgactttcaagaaggagccggcggcgtcagccgcggccttcccctcgcagaggacctcctgggggttcttgcagtctttggttagcatcaaacaggagaaacccgcggatcctgaggagcagcagtcccaccaccaccatcaccaccaccactatggggggctgttcgctggagctgaagagaggtctccaggcctaggaggcggtgaaggggggagtcacggcgtcatccaggacctcagtattctccaccagcatgtccagcagcaaccagcccagcaccaccgtgacgtattactcagcagcagtagcaggactgatgaccaccatggcactgaggagccaaagcaggacactaatgtcaaaaaggcaaaaaggccaaagccagaatctcagggaatcaaagccaagaggaagccaagtgcatcttccaaaccttctttggttggagatggagaaggtgccatcctctccccaagtcagaaacctcatatctgtgatcactgtagtgctgctttccgaagctcctatcacctgcggagacatgtcctcattcatacaggagaaagacctttccagtgcagccagtgtagtatgggtttcattcagaaatacctactacagagacatgagaaaattcatagtagagagaagccatttggatgtgatcagtgcagcatgaagtttattcagaagtaccatatggagagacacaagaggacacatagtggagaaaagccatataagtgtgacacttgccaacagtatttttcaaggactgatagattgttgaagcacaggcgcacatgtggtgaagtcatagttaaaggagccactagtgcagaacctgggtcatcaaaccataccaatatgggtaatctggctgtgttgtctcagggaaatacaagttcttcaaggagaaaaacaaagtcaaaaagcatagctattgaaaataaggaacagaagaccggtaaaacaaatgaatcgcaaatttcaaataatataaacatgcagagttactcagtagaaatgcctaccgtgtcttccagtggaggcataattggcactggaatagatgaactgcagaagagggtgccaaaattgatctttaagaaaggaagcagaaagaatacagataaaaactaccttaactttgtgtcaccattaccagacatagtaggacagaaatccttgtctggaaaaccaagtggctcacttggcatagtatcaaataatagtgtggagaccattggtcttctccaaagtacaagtggcaaacaaggtcagataagtagtaattatgatgatgccatgcagttttcaaagaaaagaagatatttaccaactgccagcagcaacagtgccttttctataaacgtaggacacatggtctcccaacagtctgtcattcagtctgcaggtgtcagtgttttggacaatgaggcaccattgtcacttattgactcctcagctctaaatgctgaaattaaatcttgtcatgacaagtctggaattcctgatgaggttttacaaagtattttggatcaatactccaacaaatcagaaagccagaaagaggatcctttcaatattgcagaaccacgagtggatttacacacctcaggagaacactcagaattggttcaagaagaaaatttgagcccaggcacccaaacaccttcaaatgataaagcaagtatgttgcaagaatactccaaatacctccaacaggcttttgaaaaatccactaatgcaagttttactcttggacacggtttccaatttgtcagtttgtcttcacctctccacaaccacactttgtttccagaaaaacaaatatacactacgtctcctttggagtgtggtttcggccaatctgttacctcagtgttgccatcttcattgccaaagcctccttttgggatgttgtttggatctcagccaggtctttatttgtctgctttggatgctacacatcagcagttgacaccttcccaggagctggatgatctgatagattctcagaagaacttagagacttcatcagccttccagtcctcatctcagaaattgactagccagaaggaacagaaaaacttagagtcttcaacaggctttcagattccatctcaggagttagctagccagatagatcctcagaaagacatagagcctagaacaacgtatcagattgagaactttgcacaagcgtttggttctcagtttaagtcgggcagcagggtgccaatgacctttatcactaactctaatggagaagtggaccatagagtaaggacttcagtgtcagatttctcagggtatacaaatatgatgtctgatgtaagtgagccatgtagtacaagagtaaagacacccaccagccagagttacagg

SEQ ID NO: 6437 - DNA, 1047 bp, Homo sapiens
  source 1..1047: mol_type = genomic DNA
atgagtaaaagcaaagatgatgctcctcacgaactggagagccagtttatcttacgtctgcctccagaatatgcctctactgtgagaagggcagtacagtctggtcatgtcaacctcaaggacagactgacaattgagttacatcctgatgggcgtcatggaatcgtcagagtggaccgtgttccattggcctcaaaattagtagacctgccctgtgttatggaaagcttgaaaaccattgataaaaaaactttttacaagacagctgatatctgtcagatgcttgtatccacagttgatggtgatctctatcctcctgtggaggagccagttgctagcactgatcctaaagcaagcaagaaaaaggataaggacaaagagaaaaagtttatctggaaccacggaattactctgcctctaaagaatgtcaggaagagaaggttccggaagacagcaaagaagaaatatattgaatctccagatgttgaaaaagaagtgaaacgattgctgagtacagatgctgaagctgttagtactcggtgggaaataattgccgaagatgaaacaaaggaggcagaaaatcaaggcctggatatctcttctccaggaatgtctggtcacaggcagggccatgactcattagaacatgatgagcttcgggagatattcaatgacctcagcagcagcagtgaggatgaagatgagacccagcatcaagatgaagaagatataaacatcattgacacggaggaagatctggagagacagctacaggacaagctaaatgaatcagatgaacagcaccaggaaaatgaaggaaccaatcagctggttatgggaattcagaagcagattgacaacatgaaaggcaagctccaagagacccaggacagggcaaaacgacaagaggatctcatcatgaaagtggaaaatctggctctcaagaacagatttcaggctgtactggatgagctcaaacaaaaggaagaccgagaaaaggagcaactcagctctttgcaagaggagctagaatcactcctagagaag

SEQ ID NO: 6438 - DNA, 2142 bp, Homo sapiens
  source 1..2142: mol_type = genomic DNA
atgacaaagcgccgtctacaaacaatcaccgcttgccttcaacttcgggaagggtctccgtctctccaccgggggcttcatccttccagggaggagaagagggactccagaatggctgaggagaagaagctgaagcttagcaacactgtgctgccctcggagtccatgaaggtggtggctgaatccatgggcatcgcccagattcaggaggagacctgccagctgctaacggatgaggtcagctaccgcatcaaagagatcgcacaggatgccttgaagttcatgcacatggggaagcggcagaagctcaccaccagtgacattgactacgccttgaagctaaagaatgtcgagccactctatggcttccacgcccaggagttcattcctttccgcttcgcctctggtgggggccgggagctttacttctatgaggagaaggaggttgatctgagcgacatcatcaatacccctctgccccgggtgcccctggacgtctgcctcaaagctcattggctgagcatcgagggctgccagccagctatccccgagaacccgcccccagctcccaaagagcaacagaaggctgaagccacagaacccctgaagtcagccaagccaggccaggaggaagacggacccctgaagggcaaaggtcaaggggccaccacagccgacggcaaagggaaagagaagaaggcgccgcccttgctggagggggcccccttgcgactgaagccccggagcatccacgagttgtctgtggagcagcagctctactacaaggagatcaccgaggcctgcgtgggctcctgcgaggccaagagggcggaagccctgcaaagcattgccacggaccctggactgtatcagatgctgccacggttcagtacctttatctcggagggggtccgtgtgaacgtggttcagaacaacctggccctactcatctacctgatgcgtatggtgaaagcgctgatggacaaccccacgctctatctagaaaaatacgtccatgagctgattccagctgtgatgacctgcatcgtgagcagacagttgtgcctgcgaccagatgtggacaatcactgggcactccgagactttgctgcccgcctggtggcccagatctgcaagcattttagcacaaccactaacaacatccagtcccggatcaccaagaccttcaccaagagctgggtggacgagaagacgccctggacgactcgttatggctccatcgcaggcttggctgagctgggacacgatgttatcaagactctgattctgccccggctgcagcaggaaggggagcggatccgcagtgtgctggacggccctgtgctgagcaacattgaccggattggagcagaccatgtgcagagcctcctgctgaaacactgtgctcctgttctggcaaagctgcgcccaccgcctgacaatcaggacgcctatcgggcagaattcgggtcccttgggcccctcctctgctcccaggtggtcaaggctcgggcccaggctgctctgcaggctcagcaggtcaacaggaccactctgaccatcacgcagccccggcccacgctgaccctctcgcaggccccacagcctggccctcgcacccctggcttgctgaaggttcctggctccatcgcacttcctgtccagacactggtgtctgcacgagcggctgccccaccacagccttcccctcctccaaccaagtttattgtaatgtcatcgtcctccagcgccccatccacccagcaggtcctgtccctcagcacctcggcccccggctcaggttccaccaccacttcgcccgtcaccaccaccgtccccagcgtgcagcccatcgtcaagttggtctccaccgccaccaccgcaccccccagcactgctccctctggtcctgggagtgtccagaagtacatcgtggtctcacttcccccaacaggggagggcaaaggaggccccacctcccatccttctccagttcctcccccggcatcgtccccgtccccactcagcggcagtgccctttgtggggggaagcaggaggctggggacagtccccctccagctccagggactccaaaagccaatggctcccagcccaactccggctcccctcagcctgctccg

SEQ ID NO: 6439 - DNA, 2031 bp, Homo sapiens
  source 1..2031: mol_type = genomic DNA
atggctgaggagaagaagctgaagcttagcaacactgtgctgccctcggagtccatgaaggtggtggctgaatccatgggcatcgcccagattcaggaggagacctgccagctgctaacggatgaggtcagctaccgcatcaaagagatcgcacaggatgccttgaagttcatgcacatggggaagcggcagaagctcaccaccagtgacattgactacgccttgaagctaaagaatgtcgagccactctatggcttccacgcccaggagttcattcctttccgcttcgcctctggtgggggccgggagctttacttctatgaggagaaggaggttgatctgagcgacatcatcaatacccctctgccccgggtgcccctggacgtctgcctcaaagctcattggctgagcatcgagggctgccagccagctatccccgagaacccgcccccagctcccaaagagcaacagaaggctgaagccacagaacccctgaagtcagccaagccaggccaggaggaagacggacccctgaagggcaaaggtcaaggggccaccacagccgacggcaaagggaaagagaagaaggcgccgcccttgctggagggggcccccttgcgactgaagccccggagcatccacgagttgtctgtggagcagcagctctactacaaggagatcaccgaggcctgcgtgggctcctgcgaggccaagagggcggaagccctgcaaagcattgccacggaccctggactgtatcagatgctgccacggttcagtacctttatctcggagggggtccgtgtgaacgtggttcagaacaacctggccctactcatctacctgatgcgtatggtgaaagcgctgatggacaaccccacgctctatctagaaaaatacgtccatgagctgattccagctgtgatgacctgcatcgtgagcagacagttgtgcctgcgaccagatgtggacaatcactgggcactccgagactttgctgcccgcctggtggcccagatctgcaagcattttagcacaaccactaacaacatccagtcccggatcaccaagaccttcaccaagagctgggtggacgagaagacgccctggacgactcgttatggctccatcgcaggcttggctgagctgggacacgatgttatcaagactctgattctgccccggctgcagcaggaaggggagcggatccgcagtgtgctggacggccctgtgctgagcaacattgaccggattggagcagaccatgtgcagagcctcctgctgaaacactgtgctcctgttctggcaaagctgcgcccaccgcctgacaatcaggacgcctatcgggcagaattcgggtcccttgggcccctcctctgctcccaggtggtcaaggctcgggcccaggctgctctgcaggctcagcaggtcaacaggaccactctgaccatcacgcagccccggcccacgctgaccctctcgcaggccccacagcctggccctcgcacccctggcttgctgaaggttcctggctccatcgcacttcctgtccagacactggtgtctgcacgagcggctgccccaccacagccttcccctcctccaaccaagtttattgtaatgtcatcgtcctccagcgccccatccacccagcaggtcctgtccctcagcacctcggcccccggctcaggttccaccaccacttcgcccgtcaccaccaccgtccccagcgtgcagcccatcgtcaagttggtctccaccgccaccaccgcaccccccagcactgctccctctggtcctgggagtgtccagaagtacatcgtggtctcacttcccccaacaggggagggcaaaggaggccccacctcccatccttctccagttcctcccccggcatcgtccccgtccccactcagcggcagtgccctttgtggggggaagcaggaggctggggacagtccccctccagctccagggactccaaaagccaatggctcccagcccaactccggctcccctcagcctgctccg

SEQ ID NO: 6440 - DNA, 2400 bp, Homo sapiens
  source 1..2400: mol_type = genomic DNA
atggcggcgctggcggaggagcagacggaggtggcggtcaagctagagcctgagggaccgccaacgctgctacctccgcaggcgggggacggcgcaggcgagggtagcggcggcactaccaacaacggccccaacggcggcggcgggaacgttgcggcgtcgtcgtccactggcggggatggcgggacccccaagcccacggtggctgtctccgccgctgccccggcgggggcggccccggtgcccgccgctgctccggacgccggcgctccgcatgaccgacagactctactggccgtgctgcagttcctacggcagagcaaactccgcgaggccgaagaggcgctgcgccgtgaggccgggctgctggaggaggcagtggcgggctccggagccccgggagaggtggacagcgccggcgctgaggtgaccagcgcgcttctcagccgggtgaccgcctcggcccctggccctgcggcccccgaccctccgggcactggcgcttcgggggccacggtcgtctcaggttcagcctcaggtcctgcggctccgggtaaagttggaagtgttgctgtggaagaccagccagatgtcagtgccgtgttgtcagcctacaaccaacaaggagatcccacaatgtatgaagaatactatagtggactgaaacacttcattgaatgttccctggactgccatcgggcagagttgtcccaacttttttatcctctgtttgtgcacatgtacttggagctagtctacaatcaacatgagaatgaagcaaagtcattctttgagaagttccatggagatcaggaatgttattaccaggatgacctacgagtattatctagtcttaccaaaaaggaacacatgaaagggaatgagaccatgttggattttcgaacaagtaaatttgttctgcgtatttcccgtgactcgtaccaactcttgaagaggcatcttcaggagaaacagaacaatcagatatggaacatagttcaggagcacctctacattgacatctttgatgggatgccgcgtagtaagcaacagatagatgcgatggtgggaagtttggcaggagaggctaaacgagaggcaaacaaatcaaaggtattttttggtttattaaaagaaccagaaattgaggtacctttggatgacgaggatgaagagggagaaaatgaagaaggaaaacctaaaaagaagaagcctaaaaaagatagtattggatccaaaagcaaaaaacaagatcccaatgctccacctcagaacagaatccctcttcctgagttgaaagattcagataagttggataagataatgaatatgaaagaaaccaccaaacgagtgcgccttgggccggactgcttaccctccatttgtttctatacatttctcaatgcttaccagggtctcactgcagtggatgtcactgatgattctagtctgattgctggaggttttgcagattcaactgtcagagtgtggtcggtaacacccaaaaagcttcgtagtgtcaaacaagcatcagatcttagtcttatagacaaagaatcagatgatgtcttagaaagaatcatggatgagaaaacagcaagtgagttgaagattttgtatggtcacagtgggcctgtctacggagccagcttcagtccggataggaactatctgctttcctcttcagaggacggaactgttagattgtggagccttcaaacatttacttgtttggtgggatataaaggacacaactatccagtatgggacacacaattttctccatatggatattattttgtgtcagggggccatgaccgagtagctcggctctgggctacagaccactatcagcctttaagaatatttgccggccatcttgctgatgtgaattgtaccagattccatccaaattctaattatgttgctacgggctctgcagacagaactgtgcggctctgggacgtcctgaatggtaactgtgtaaggatcttcactggacacaagggaccaattcattccttgacattttctcccaatgggagattcctggctacaggagcaacagatggcagagtgcttctttgggatattggacatggtttgatggttggagaattaaaaggccacactgatacagtctgttcacttaggtttagtagagatggtgaaattttggcatcaggttcaatggataatacagttcgattatgggatgctatcaaagcctttgaagatttagagaccgatgactttactacagccactgggcatataaatttacctgagaattcacaggagttattgttgggaacatatatgaccaaatcaacaccagttgtacaccttcattttactcgaagaaacctggttctagctgcaggagcttatagtccacaa

SEQ ID NO: 6441 - DNA, 1110 bp, Homo sapiens
  source 1..1110: mol_type = genomic DNA
atggacctgtggaactgggatgaggcatccccacaggaagtgcctccagggaacaagctggcagggcttggtaggctgccgaggctgccacaacgtgtgtggggagggtgtccaggtggggcctctgctgaccctaaccccttatcgcctgcagaaggagccaaattaggcttctgtttccctgatctggcactccaaggggacacgccgacagcgacagcagagacatgctggaaaggtacaagctcatccctggcaagcttcccacagctggactggggctccgcgttactgcacccagaagttccatggggggcggagcccgactctcaggctcttccgtggtccggggactggacagacatggcgtgcacagcctgggactcttggagcggcgcctcgcagaccctgggccccgcccctctcggcccgggccccatccccgccgccggctccgaaggcgccgcgggccagaactgcgtccccgtggcgggagaggccacctcgtggtcgcgcgcccaggccgccgggagcaacaccagctgggactgttctgtggggcccgacggcgatacctactggggcagtggcctgggcggggagccgcgcacggactgtaccatttcgtggggcgggcccgcgggcccggactgtaccacctcctggaacccggggctgcatgcgggtggcaccacctctttgaagcggtaccagagctcagctctcaccgtttgctccgaaccgagcccgcagtcggaccgtgccagtttggctcgatgccccaaaactaaccaccgaggtcccattcagctgtggcagttcctcctggagctgctccacgacggggcgcgtagcagctgcatccgttggactggcaacagccgcgagttccagctgtgcgaccccaaagaggtggctcggctgtggggcgagcgcaagagaaagccgggcatgaattacgagaagctgagccggggccttcgctactactatcgccgcgacatcgtgcgcaagagcggggggcgaaagtacacgtaccgcttcgggggccgcgtgcccagcctagcctatccggactgtgcgggaggcggacggggagcagagacacaa

SEQ ID NO: 6442 - DNA, 465 bp, Homo sapiens
  source 1..465: mol_type = genomic DNA
atggacctgtggaactgggatgaggcatccccacaggaagtgcctccagggaacaagctggcagggcttgaaggagccaaattaggcttctgtttccctgatctggcactccaaggggacacgccgacagcgacagcagagacatgctggaaaggtcccattcagctgtggcagttcctcctggagctgctccacgacggggcgcgtagcagctgcatccgttggactggcaacagccgcgagttccagctgtgcgaccccaaagaggtggctcggctgtggggcgagcgcaagagaaagccgggcatgaattacgagaagctgagccggggccttcgctactactatcgccgcgacatcgtgcgcaagagcggggggcgaaagtacacgtaccgcttcgggggccgcgtgcccagcctagcctatccggactgtgcgggaggcggacggggagcagagacacaa

SEQ ID NO: 6443 - DNA, 747 bp, Homo sapiens
  source 1..747: mol_type = genomic DNA
atggcgtgcacagcctgggactcttggagcggcgcctcgcagaccctgggccccgcccctctcggcccgggccccatccccgccgccggctccgaaggcgccgcgggccagaactgcgtccccgtggcgggagaggccacctcgtggtcgcgcgcccaggccgccgggagcaacaccagctgggactgttctgtggggcccgacggcgatacctactggggcagtggcctgggcggggagccgcgcacggactgtaccatttcgtggggcgggcccgcgggcccggactgtaccacctcctggaacccggggctgcatgcgggtggcaccacctctttgaagcggtaccagagctcagctctcaccgtttgctccgaaccgagcccgcagtcggaccgtgccagtttggctcgatgccccaaaactaaccaccgaggtcccattcagctgtggcagttcctcctggagctgctccacgacggggcgcgtagcagctgcatccgttggactggcaacagccgcgagttccagctgtgcgaccccaaagaggtggctcggctgtggggcgagcgcaagagaaagccgggcatgaattacgagaagctgagccggggccttcgctactactatcgccgcgacatcgtgcgcaagagcggggggcgaaagtacacgtaccgcttcgggggccgcgtgcccagcctagcctatccggactgtgcgggaggcggacggggagcagagacacaa

SEQ ID NO: 6444 - DNA, 1026 bp, Homo sapiens
  source 1..1026: mol_type = genomic DNA
atggacctgtggaactgggatgaggcatccccacaggaagtgcctccagggaacaagctggcagggcttgaaggagccaaattaggcttctgtttccctgatctggcactccaaggggacacgccgacagcgacagcagagacatgctggaaaggtacaagctcatccctggcaagcttcccacagctggactggggctccgcgttactgcacccagaagttccatggggggcggagcccgactctcaggctcttccgtggtccggggactggacagacatggcgtgcacagcctgggactcttggagcggcgcctcgcagaccctgggccccgcccctctcggcccgggccccatccccgccgccggctccgaaggcgccgcgggccagaactgcgtccccgtggcgggagaggccacctcgtggtcgcgcgcccaggccgccgggagcaacaccagctgggactgttctgtggggcccgacggcgatacctactggggcagtggcctgggcggggagccgcgcacggactgtaccatttcgtggggcgggcccgcgggcccggactgtaccacctcctggaacccggggctgcatgcgggtggcaccacctctttgaagcggtaccagagctcagctctcaccgtttgctccgaaccgagcccgcagtcggaccgtgccagtttggctcgatgccccaaaactaaccaccgaggtcccattcagctgtggcagttcctcctggagctgctccacgacggggcgcgtagcagctgcatccgttggactggcaacagccgcgagttccagctgtgcgaccccaaagaggtggctcggctgtggggcgagcgcaagagaaagccgggcatgaattacgagaagctgagccggggccttcgctactactatcgccgcgacatcgtgcgcaagagcggggggcgaaagtacacgtaccgcttcgggggccgcgtgcccagcctagcctatccggactgtgcgggaggcggacggggagcagagacacaa

SEQ ID NO: 6445 - DNA, 3597 bp, Homo sapiens
  source 1..3597: mol_type = genomic DNA
atgccgctgactggtgtagagcccgccagaatgaacaggaagaaaggagacaagggctttgaaagcccaaggccatataaattaacccatcaggtcgtctgcatcaacaacataaatttccagagaaaatctgttgtgggatttgtggaactgactatatttcccacagttgcaaacttgaatagaatcaagttgaacagcaaacagtgtagaatataccgagtaaggatcaatgatttagaggctgcttttatttataatgacccaaccttggaagtttgtcacagtgaatcaaaacagagaaacctcaattatttttccaatgcttatgcagctgcagttagtgctgtggaccctgatgcaggaaatggagaactttgcattaaggttccatcagagctatggaaacacgttgatgagttaaaggtcctgaagatacacatcaatttttctttggatcagcccaaaggaggtcttcattttgtggtacccagtgtagagggaagtatggcagagagaggtgctcatgttttctcttgtgggtatcaaaattctacaagattttggttcccttgtgttgattcatactctgaattgtgtacatggaaattagaatttacagtagatgctgcaatggttgctgtttctaatggcgatttggtggagacagtgtatactcatgatatgaggaagaaaactttccattatatgcttaccattcctacagcagcgtcaaatatctccttggccattggaccatttgaaatactggtagatccatacatgcatgaggttactcatttttgtttgccccaacttcttccattgctgaaacataccacatcataccttcatgaagtctttgaattttatgaagaaattcttacatgtcgttacccatactcctgttttaagactgtcttcattgatgaggcttatgttgaagtggctgcttatgcttccatgagcatttttagcacaaatcttttacacagtgccatgattatagatgagacacctttgactagaaggtgtttagcccaatccttggcccagcagttttttggttgtttcatatctagaatgtcttggtctgatgaatgggtgctgaagggaatttcaggctatatctatggactttggatgaaaaaaacttttggtgttaatgagtaccgccattggattaaagaggagctagacaaaatagtggcatatgaactaaaaactggtggggttttactacatcccatatttggtggaggaaaagagaaggataatccggcttcccatctacacttttcaataaagcatccacatacactgtcctgggaatactacagtatgtttcagtgtaaagcccaccttgtgatgagattgattgaaaataggatcagtatggaatttatgctacaagttttcaataaactgctaagtctggctagtactgcttcatctcagaagttccagtcacatatgtggagtcagatgttggtttccacatctgggtttttgaaatccatttcaaatgtctctggcaaagatattcagccgttaataaagcagtgggtagatcagagtggagtggtaaaattttatggaagttttgcatttaatagaaaacgaaatgtcttggaactggaaataaaacaggactatacatctcctggaactcagaaatacgtgggaccacttaaagtgacagtgcaggagttagatggatccttcaatcatacactgcaaattgaagaaaacagccttaaacatgatataccctgccattccaaaagtagaaggaataaaaagaaaaaaatcccactgatgaatggagaagaagttgatatggatctttctgcaatggatgctgattcccctttgctgtggataaggatagacccagatatgtcagtattgaggaaggtagaatttgagcaagctgattttatgtggcagtatcagctccgctatgagagagatgttgttgcacagcaggaatccattttggctttggaaaaattccctactccagcatctcggcttgcactcactgatatattagaacaagagcagtgtttctacagagtaagaatgtcagcttgcttctgtcttgcaaagattgcaaattcaatggtgagcacatggacaggaccaccagccatgaagtcactcttcactaggatgttttgttgtaaaagttgtccaaacattgtgaaaacaaacaactttatgagctttcaaagctattttctacagaagactatgccagttgcaatggctttattaagagatgttcataatctttgtcctaaagaagtcttaacatttattttagacttaatcaagtacaatgacaacaggaaaaataagttttcagataactattatcgtgcagaaatgattgatgccctggccaactctgttacacctgcagtcagtgtgaataatgaagttagaactttggataacttaaatcctgatgtgcgactcattcttgaagaaatcaccagatttttgaatatggaaaaacttcttccgagttacaggcataccatcactgtcagttgtttgagagccatacgggtacttcagaagaacggacatgtgccaagtgatccagctctttttaaatcttatgctgaatatggccactttgtggacattaggatagcagctttggaagcagttgttgattatactaaagtggacagaagttatgaagaactgcaatggctacttaatatgattcagaatgaccctgtaccctatgtaaggcataagattctcaacatgttgactaagaacccaccatttactaagaacatggagtctcccttatgcaatgaagccctggtagatcaactttggaaacttatgaattctggtacttcacatgactggaggttacggtgtggtgctgtggacttgtacttcacactttttggcctcagtagaccttcctgtttacccttgccagagcttgggttggttcttaatctaaaggagaaaaaagctgtcttgaatcctaccataattccagagtcagtagcaggcaaccaagaagctgcaaataatccaagcagtcacccacagctagttggatttcagaaccctttttccagttctcaagatgaggaggagattgatatggatactgttcatgatagccaggccttcatttcccatcatttaaacatgcttgaaaggccgtcaactccagggctctcgaaatatcggccagctagctcccgatctgctttaataccccagcactcagcaggctgtgacagcacacccaccacaaaaccccagtggagtttggaacttgcacggaagggaacaggtaaagaacaagcacctttggagatgagtatgcatccagcggcaagcgctccactctcagtctttactaaggaatctacagcctccaaacacagtgaccaccatcaccaccatcaccatgagcacaagaaaaagaagaagaagcataaacataagcacaaacacaagcataagcatgacagtaaagaaaaggacaaggagcctttcactttctccagccctgccagtggcaggtctattcgttctccttccctttcagac

SEQ ID NO: 6446 - DNA, 846 bp, Homo sapiens
  source 1..846: mol_type = genomic DNA
atgcaccgcggagcacgggttcgagatgaacggacgcgccctctgcatcctcaccaaggacgacttccggcaccgtgcgcccagctcaggtcagggaaacgcacaggctttcctctaagcgggaaccctggtgacgtcctgtatgagctgctccagtacatcaagacccagcggcgagccctggtgtgtgggcccttttttggagggatcttcaggctgaagacgcccacccagcactctccagtccccccggaagaggtgactggcccctctcagatggacacccgaaggggccacctgctgcagccaccagacccagggcttaccagcaacttcggccacctggatgaccctggcctggcaaggtggacccctggcaaggaggagtccctcaacttatgtcactgtgcagagctcggctgcaggacccagggggtctgttccttccccgcgatgccgcaggcccccattgacggcaggatcgctgactgccgcctgctgtgggattacgtgtatcagctgctccttgatacccgatatgagccctacatcaagtgggaagacaaggacgccaagatcttccgagttgtggatccaaatgggctcgccagactctggggaaatcacaagaaccgggtgaacatgacctacgagaagatgtctcgtgccctgcgccactattataagcttaatatcattaagaaggaaccggggcagaaactcctgttcagatttctaaagactccgggaaagatggtccaggacaagcacagccacctggagccgctggagagccaggagcaggacagaatagagttcaaggacaagaggccagaaatctctccg

SEQ ID NO: 6447 - DNA, 792 bp, Homo sapiens
  source 1..792: mol_type = genomic DNA
atgcaggagggagaattggctatttctcctataagccctgtggcagccatgcctcccctaggcacccacgtgcaagccagatgtgaagctcaaattaacctgctgggtgaaggggggatctgcaagctgccaggaagactccgcatccagcccgcactgtggagcagggaggacgtgctgcactggctgcgctgggcagagcaggagtactctctgccatgcaccgcggagcacgggttcgagatgaacggacgcgccctctgcatcctcaccaaggacgacttccggcaccgtgcgcccagctcaggtgacgtcctgtatgagctgctccagtacatcaagacccagcggcgagccctggtgtgtgggcccttttttggagggatcttcaggctgaagacgcccacccagcactctccagtccccccggaagactgccgcctgctgtgggattacgtgtatcagctgctccttgatacccgatatgagccctacatcaagtgggaagacaaggacgccaagatcttccgagttgtggatccaaatgggctcgccagactctggggaaatcacaagaaccgggtgaacatgacctacgagaagatgtctcgtgccctgcgccactattataagcttaatatcattaagaaggaaccggggcagaaactcctgttcagatttctaaagactccgggaaagatggtccaggacaagcacagccacctggagccgctggagagccaggagcaggacagaatagagttcaaggacaagaggccagaaatctctccg

SEQ ID NO: 6448 - DNA, 570 bp, Homo sapiens
  source 1..570: mol_type = genomic DNA
atggacacccgaaggggccacctgctgcagccaccagacccagggcttaccagcaacttcggccacctggatgaccctggcctggcaaggtggacccctggcaaggaggagtccctcaacttatgtcactgtgcagagctcggctgcaggacccagggggtctgttccttccccgcgatgccgcaggcccccattgacggcaggatcgctgactgccgcctgctgtgggattacgtgtatcagctgctccttgatacccgatatgagccctacatcaagtgggaagacaaggacgccaagatcttccgagttgtggatccaaatgggctcgccagactctggggaaatcacaagaaccgggtgaacatgacctacgagaagatgtctcgtgccctgcgccactattataagcttaatatcattaagaaggaaccggggcagaaactcctgttcagatttctaaagactccgggaaagatggtccaggacaagcacagccacctggagccgctggagagccaggagcaggacagaatagagttcaaggacaagaggccagaaatctctccg

SEQ ID NO: 6449 - DNA, 951 bp, Homo sapiens
  source 1..951: mol_type = genomic DNA
atgcaggagggagaattggctatttctcctataagccctgtggcagccatgcctcccctaggcacccacgtgcaagccagatgtgaagctcaaattaacctgctgggtgaaggggggatctgcaagctgccaggaagactccgcatccagcccgcactgtggagcagggaggacgtgctgcactggctgcgctgggcagagcaggagtactctctgccatgcaccgcggagcacgggttcgagatgaacggacgcgccctctgcatcctcaccaaggacgacttccggcaccgtgcgcccagctcaggtgacgtcctgtatgagctgctccagtacatcaagacccagcggcgagccctggtgtgtgggcccttttttggagggatcttcaggctgaagacgcccacccagcactctccagtccccccggaagaggtgactggcccctctcagatggacacccgaaggggccacctgctgcagccaccagacccagggcttaccagcaacttcggccacctggatgaccctggcctggcaaggtggacccctggcaaggaggagtccctcaacttatgtcactgtgcagagctcggctgcaggacccagggggtctgttccttccccgcgatgccgcaggcccccattgacggcaggatcgctgactgccgcctgctgtgggattacgtgtatcagctgctccttgatacccgatatgagccctacatcaagtgggaagacaaggacgccaagatcttccgagttgtggatccaaatgggctcgccagactctggggaaatcacaagaaccgggtgaacatgacctacgagaagatgtctcgtgccctgcgccactattataagcttaatatcattaagaaggaaccggggcagaaactcctgttcagaaatggacttcagctgatcttcatattcatatggagtttccag

SEQ ID NO: 6450 - DNA, 858 bp, Homo sapiens
  source 1..858: mol_type = genomic DNA
atgcaggagggagaattggctatttctcctataagccctgtggcagccatgcctcccctaggcacccacgtgcaagccagatgtgaagctcaaattaacctgctgggtgaaggggggatctgcaagctgccaggaagactccgtgacgtcctgtatgagctgctccagtacatcaagacccagcggcgagccctggtgtgtgggcccttttttggagggatcttcaggctgaagacgcccacccagcactctccagtccccccggaagaggtgactggcccctctcagatggacacccgaaggggccacctgctgcagccaccagacccagggcttaccagcaacttcggccacctggatgaccctggcctggcaaggtggacccctggcaaggaggagtccctcaacttatgtcactgtgcagagctcggctgcaggacccagggggtctgttccttccccgcgatgccgcaggcccccattgacggcaggatcgctgactgccgcctgctgtgggattacgtgtatcagctgctccttgatacccgatatgagccctacatcaagtgggaagacaaggacgccaagatcttccgagttgtggatccaaatgggctcgccagactctggggaaatcacaagaaccgggtgaacatgacctacgagaagatgtctcgtgccctgcgccactattataagcttaatatcattaagaaggaaccggggcagaaactcctgttcagatttctaaagactccgggaaagatggtccaggacaagcacagccacctggagccgctggagagccaggagcaggacagaatagagttcaaggacaagaggccagaaatctctccg

SEQ ID NO: 6451 - DNA, 780 bp, Homo sapiens
  source 1..780: mol_type = genomic DNA
atgaacggacgcgccctctgcatcctcaccaaggacgacttccggcaccgtgcgcccagctcaggtgacgtcctgtatgagctgctccagtacatcaagacccagcggcgagccctggtgtgtgggcccttttttggagggatcttcaggctgaagacgcccacccagcactctccagtccccccggaagaggtgactggcccctctcagatggacacccgaaggggccacctgctgcagccaccagacccagggcttaccagcaacttcggccacctggatgaccctggcctggcaaggtggacccctggcaaggaggagtccctcaacttatgtcactgtgcagagctcggctgcaggacccagggggtctgttccttccccgcgatgccgcaggcccccattgacggcaggatcgctgactgccgcctgctgtgggattacgtgtatcagctgctccttgatacccgatatgagccctacatcaagtgggaagacaaggacgccaagatcttccgagttgtggatccaaatgggctcgccagactctggggaaatcacaagaaccgggtgaacatgacctacgagaagatgtctcgtgccctgcgccactattataagcttaatatcattaagaaggaaccggggcagaaactcctgttcagatttctaaagactccgggaaagatggtccaggacaagcacagccacctggagccgctggagagccaggagcaggacagaatagagttcaaggacaagaggccagaaatctctccg

SEQ ID NO: 6452 - DNA, 786 bp, Homo sapiens
  source 1..786: mol_type = genomic DNA
atgcaggagggagaattggctatttctcctataagccctgtggcagccatgcctcccctaggcacccacgtgcaagccagatgtgaagctcaaattaacctgctgggtgaaggggggatctgcaagctgccaggaagactccgtgacgtcctgtatgagctgctccagtacatcaagacccagcggcgagccctggtgtgtgggcccttttttggagggatcttcaggctgaagacgcccacccagcactctccagtccccccggaagaggtgactggcccctctcagatggacacccgaaggggccacctgctgcagccaccagacccagggcttaccagcaacttcggccacctggatgaccctggcctggcaaggtggacccctggcaaggaggagtccctcaacttatgtcactgtgcagagctcggctgcaggacccagggggtctgttccttccccgcgatgccgcaggcccccattgacggcaggatcgctgactgccgcctgctgtgggattacgtgtatcagctgctccttgatacccgatatgagccctacatcaagtgggaagacaaggacgccaagatcttccgagttgtggatccaaatgggctcgccagactctggggaaatcacaagaaccgggtgaacatgacctacgagaagatgtctcgtgccctgcgccactattataagcttaatatcattaagaaggaaccggggcagaaactcctgttcagaaatggacttcagctgatcttcatattcatatggagtttccag

SEQ ID NO: 6453 - DNA, 1224 bp, Homo sapiens
  source 1..1224: mol_type = genomic DNA
atgaacctgccaagagctgagcgccctcgctccacaccgcagcgcagcctccgggactccgatggggaagacggtaaaatcgatgtcctgggagaggaggaagatgaagacgaggtggaagacgaggaggaggaggcgagccagaagttcctagagcagtcgctccagccggggctgcaggtggcccggtggggcggggttgcgcttccccgagagcacatcgagggcggcggcccgagcgacccctcagagtttggcaccgagttcagggcaccgccaaggtctgcggcggcctctgaagatgcccggcagccggcaaagcccccctactcgtacatcgcgctcatcaccatggccatcctgcaaagcccgcacaagcgcctcacgctcagcggcatctgcgccttcattagtggccgcttcccctactaccgccgcaagttccccgcctggcagaacagcatccgccacaacctctcgctgaacgactgcttcgtcaagatcccccgcgagccgggccacccaggcaagggcacctactggagcctggaccccgcctcccaggacatgttcgacaatggcagctttctccggcgtaggaagcgtttcaagcgccaccaactgaccccgggagcccacctgccccaccccttccctctacctgctgcacacgccgccctgcacaacccccgcccaggccctctgcttggggcccctgccctgccgcagccagtcccgggggcctaccccaacaccgcccccgggagacgcccttacgctctgctgcacccgcatcctcctcgctacctactgctctcggcccccgcctatgccggggcaccgaagaaagcagaaggcgcggacctggcgacccccggcacccttcccgtgctgcagccctcacttggtcctcagccttgggaggagggcaagggtctggcgtcgccaccgggaggcggatgcatctctttcagcattgagagtatcatgcaaggggtcaggggagcgggtacaggggctgcgcagagtttgtccccgaccgcgtggagctactgccccctgctccagcgaccgtcaagcctgtcggacaattttgcagcaacagcagcagcatcaggaggaggactgcgccaacggctgcgctcccaccaagggcgcggtgctgggcgggcacctgtcggccgcgtcggcgctgctgcggtatcaggcggtggcagagggctc

SEQ ID NO: 6454 - DNA, 711 bp, Homo sapiens
  source 1..711: mol_type = genomic DNA
atgtttcaggctttccccggagactacgactccggctcccggtgcagctcctcaccctctgccgagtctcaatatctgtcttcggtggactccttcggcagtccacccaccgccgccgcctcccaggagtgcgccggtctcggggaaatgcccggttccttcgtgcccacggtcaccgcgatcacaaccagccaggacctccagtggcttgtgcaacccaccctcatctcttccatggcccagtcccaggggcagccactggcctcccagcccccggtcgtcgacccctacgacatgccgggaaccagctactccacaccaggcatgagtggctacagcagtggcggagcgagtggcagtggtgggccttccaccagcggaactaccagtgggcctgggcctgcccgcccagcccgagcccggcctaggagaccccgagaggagacgctcaccccagaggaagaggagaagcgaagggtgcgccgggaacgaaataaactagcagcagctaaatgcaggaaccggcggagggagctgaccgaccgactccaggcggagacagatcagttggaggaagaaaaagcagagctggagtcggagatcgccgagctccaaaaggagaaggaacgtctggagtttgtgctggtggcccacaaaccgggctgcaagatcccctacgaagaggggcccgggccgggcccgctggcggag

SEQ ID NO: 6455 - DNA, 1014 bp, Homo sapiens
  source 1..1014: mol_type = genomic DNA
atgtttcaggctttccccggagactacgactccggctcccggtgcagctcctcaccctctgccgagtctcaatatctgtcttcggtggactccttcggcagtccacccaccgccgccgcctcccaggagtgcgccggtctcggggaaatgcccggttccttcgtgcccacggtcaccgcgatcacaaccagccaggacctccagtggcttgtgcaacccaccctcatctcttccatggcccagtcccaggggcagccactggcctcccagcccccggtcgtcgacccctacgacatgccgggaaccagctactccacaccaggcatgagtggctacagcagtggcggagcgagtggcagtggtgggccttccaccagcggaactaccagtgggcctgggcctgcccgcccagcccgagcccggcctaggagaccccgagaggagacgctcaccccagaggaagaggagaagcgaagggtgcgccgggaacgaaataaactagcagcagctaaatgcaggaaccggcggagggagctgaccgaccgactccaggcggagacagatcagttggaggaagaaaaagcagagctggagtcggagatcgccgagctccaaaaggagaaggaacgtctggagtttgtgctggtggcccacaaaccgggctgcaagatcccctacgaagaggggcccgggccgggcccgctggcggaggtgagagatttgccgggctcagcaccggctaaggaagatggcttcagctggctgctgccgcccccgccaccaccgcccctgcccttccagaccagccaagacgcaccccccaacctgacggcttctctctttacacacagtgaagttcaagtcctcggcgaccccttccccgttgttaacccttcgtacacttcttcgtttgtcctcacctgcccggaggtctccgcgttcgccggcgcccaacgcaccagcggcagtgaccagccttccgatcccctgaactcgccctccctcctcgctctg

SEQ ID NO: 6456 - DNA, 906 bp, Homo sapiens
  source 1..906: mol_type = genomic DNA
atgtttcaggctttccccggagactacgactccggctcccggtgcagctcctcaccctctgccgagtctcaatatctgtcttcggtggactccttcggcagtccacccaccgccgccgcctcccaggagtgcgccggtctcggggaaatgcccggttccttcgtgcccacggtcaccgcgatcacaaccagccaggacctccagtggcttgtgcaacccaccctcatctcttccatggcccagtcccaggggcagccactggcctcccagcccccggtcgtcgacccctacgacatgccgggaaccagctactccacaccaggcatgagtggctacagcagtggcggagcgagtggcagtggtgggccttccaccagcggaactaccagtgggcctgggcctgcccgcccagcccgagcccggcctaggagaccccgagaggagacggagacagatcagttggaggaagaaaaagcagagctggagtcggagatcgccgagctccaaaaggagaaggaacgtctggagtttgtgctggtggcccacaaaccgggctgcaagatcccctacgaagaggggcccgggccgggcccgctggcggaggtgagagatttgccgggctcagcaccggctaaggaagatggcttcagctggctgctgccgcccccgccaccaccgcccctgcccttccagaccagccaagacgcaccccccaacctgacggcttctctctttacacacagtgaagttcaagtcctcggcgaccccttccccgttgttaacccttcgtacacttcttcgtttgtcctcacctgcccggaggtctccgcgttcgccggcgcccaacgcaccagcggcagtgaccagccttccgatcccctgaactcgccctccctcctcgctctg

SEQ ID NO: 6457 - DNA, 1251 bp, Homo sapiens
  source 1..1251: mol_type = genomic DNA
atgaacctgccaagagctgagcgccttcgctccacaccgcagcgcagcctccgggactccgatggggaagacggtaaaatcgatgtcctgggagaggaggaagatgaagacgaggtggaagacgaggaggaggcggcgagccagcagttcctagagcagtcgctccagccggggctgcaggtggcccggtggggcggggttgcgcttccccgagagcacatcgagggcggcggcggcccgagcgacccctcagagtttggcaccaagttcagggcaccgccaaggtctgcggcggcctctgaagatgcccggcagccggcaaagcccccctactcgtacatcgcgctcatcaccatggccatcctgcaaaacccgcacaagcgcctcacgctcagcggcatctgcgccttcattagtggccgcttcccctactaccgccgcaagttccccgcctggcagaacagcatccgccacaacctctcgctgaacgactgcttcgttaagatcccccgcgagccgggccacccaggcaagggcaactactggagcctggaccccgcctcccaagacatgttcgacaatggcagctttctccggcgtaggaagcgtttcaagcgccaccaactgaccccgggagcccacctgccccaccccttccctctacctgctgcacacgccgccctgcacaacccccgcccaggccctctgcttggggcccctgccccgccgcagccagtcccgggggcctaccccaacaccgcccccgggagacgcccttacgctctgctgcacccgcatcctcttcgctacctactgctctcggcccccgtctatgccggggcaccgaagaaagcagaaggcgcggccctggcgaccccggcacccttcccgtgctgcagccctcacttggtcctcagccttgggaggagggcaagggtctggcgtcgccaccgggaggcggatgcatctctttcagcattgagagtattatgcaaggggtcaggggagcgggtacaggggctgcgcagaatttgtccccgaccgcgtggagctactgccacctgctccagcgaccatcaagcctgttgcatccccagaccgctgcccctttgctgcaagtgtccgccgccgccgctgctcggacaattttgcagcaatagcagcagcatcaggaggaggactgcgccaacggctgcgctcccaccaagggcgcggtgctgggcgggcacctgtcggcctcgtcggccctgc

SEQ ID NO: 6458 - DNA, 4587 bp, Homo sapiens
  source 1..4587: mol_type = genomic DNA
atgttgccctgtaagaagagaagaactacagtgacagagtccctacagcataaaggcaatcaagaggaaaacaacgtagacctagaatcagccgttaaaccagaatctgaccaggttaaggacttgagttcggtgtcactatcctgggatccaagtcatggcagagtagctggcttcgaagtacagtctttgcaggatgcaggaaatcagcttggtatggaggatacatctctgagctctggaatgctcacccagaacacaaatgtaccaattctagaaggtgttgatgtggccatctctcagggaatcaccctaccttccttggagtcttttcacccccttaatatacacattggtaaaggaaaactccacgctactggctcaaagagagggaaaaaaatgacactcaggcctgggccagttacccaagaagacagatgtgatcatcttaccctaaaggagcctttttcaggagagcctagtgaagaagtcaaggaagaaggagggaaacctcaaatgaattctgaaggggagataccttccctgccatcaggcagccaatctgcaaaaccagtaagccagcccaggaaatcaacccagccagatgtttgtgcctctcctcaagaaaagccactcaggactctgtttcaccaacctgaggaagagatagaagatggtggactcttcattccaatggaagaacaagacaatgaagaaagtgagaaaaggagaaaaaagaaaaagggtaccaagaggaaacgagatggaaggggtcaagaagggaccttggcatatgacctgaaactggatgacatgcttgaccgtaccttggaggatggtgccaagcagcacaatctaacagcagtcaatgtccgaaacatccttcatgaagtaatcacaaatgaacacgtggtagctatgatgaaagcagccatcagtgagacggaagatatgccaatgtttgagcctaaaatgacacgctctaaactgaaggaagtagtggaaaaaggagtggtaattccaacatggaatatttcaccaattaagaaggccaatgaaattaagcctcctcagtttgtggatatccaccttgaagaagatgattcctcagatgaagaataccagccggatgatgaagaagaagatgaaactgctgaagagagcttattggaaagtgatgttgaaagcactgcttcatctccacgtggggcaaagaaatccagattgaggcagtcttctgagatgactgaaacagatgaggagagtggcatattatcagaggctgagaaagtcaccacaccagccatcaggcacatcagtgctgaggtagtgcccatggggcccccgccccctccaaagccgaaacagaccagagatagtactttcatggagaagttacatgcggtagatgaggagctggcttccagtccagtctgcatggattctttccagcccatggatgacagtctcattgcatttcgaacgcgttctaagatgcccctgaaagatgttcccctgggccaattagaggcagagctccaagctccagacatcactccagatatgtatgaccccaatacggcagatgatgaggactggaagatgtggctggggggacttatgaatgatgatgtggggaatgaagatgaagcagatgatgatgatgatccagaatataatttcctggaagacctcgatgaaccagacacagaggatttccggactgaccgggcagtgagaatcaccaaaaaggaagtaaatgagctgatggaagagctgtttgaaactttccaagatgagatgggattctccaacatggaagatgatggcccagaagaggaggagtgtgtagctgagcctcgtcctaactttaacacccctcaagctctacggtttgaggaaccactggccaacctgttaaatgaacaacatcggacagtgaaggagctatttgaacagctgaagatgaagaaatcttcagccaaacagctgcaggaagtagagaaggttaaaccccagagtgagaaagttcatcagactctgattctggacccagcacagaggaagagactccagcagcagatgcagcagcacgttcagctcttgacccaaatccaccttcttgccacctgcaaccccaacctcaatccggaggccactaccaccaggatatttcttaaagagctgggaacctttgctcaaagctccatcgcccttcaccatcagtacaaccccaagtttcagaccctgttccaaccctgtaacttgatgggagctatgcagctgattgaagacttcagcacacatgtcagcattgactgcagccctcataaaactgtcaagaagactgcgaatgaatttccctgtttgccaaagcaagtggcttggattctggccacaagcaaggttttcatgtatccagagttacttccagtgtgttccctgaaggcaaagaatccccaggataagatcgtcttcaccaaggctgaggacaatttgttagctttaggactgaagcattttgaaggaactgagtttcctaatcctctaatcagcaagtaccttctaacctgcaaaactgcccaccaactgacagtgagaatcaagaacctcaacatgaacagagctcctgacaacatcattaaattttataagaagaccaaacagctgccagtcctaggaaaatgctgtgaagagatccagccacatcagtggaagccacctatagagagagaagaacaccggctcccattctggttaaaggccagtctgccatccatccaggaagaactgcggcacatggctgatggtgctagagaggtaggaaatatgactggaaccactgagatcaactcagatcgaagcctagaaaaagacaatttggagttggggagtgaatctcggtacccactgctattgcctaagggtgtagtcctgaaactgaagccagttgccacccgtttccccaggaaggcttggagacagaagcgttcatcagtcctgaagcccctccttatccaacccagcccctctctccagcccagcttcaaccctgggaaaacaccagcccgatcaactcattcagaagcccctccgagcaaaatggtgctccggattcctcacccaatacagccagccactgttttacagacagttccaggtgtccctccactgggggtcagtggaggtgagagttttgagtctcctgcagcactgcctgctgtgccccctgaggccaggacaagcttccctctgtctgagtcccagactttgctctcttctgcccctgtgcccaaggtaatgctgccctcccttgccccttctaagtttcgaaagccatatgtgagacggagaccctcaaagagaagaggagtcaaggcctctccctgtatgaaacctgcccctgttatccaccaccctgcatctgttatcttcactgttcctgctaccactgtgaagattgtgagccttggcggtggctgtaacatgatccagcctgtcaatgcggctgtggcccagagtccccagactattcccatcactaccctcttggttaaccctacttccttcccctgtccattgaaccagtcccttgtggcctcctctgtctcacccttaattgtttctggcaattctgtgaatcttcctataccatccacccctgaagataaggcccacgtgaatgtggacattgcttgtgctgtggctgatggggaaaatgcctttcagggcctagaacccaaattagagccccaggaactatctcctctctctgctactgttttcccgaaagtggaacatagcccagggcctccactagcagatgcagagtgccaagaaggattgtcagagaatagtgcctgtcgctggaccgttgtgaaaacagaggaggggaggcaagctctggagccgctccctcagggcatccaggagtctctaaacaaccctacccctggggatttagaggaaattgtcaagatggaacctgaagaagctagagaggaaatcagtggatcccctgagcgtgatatttgtgatgacatcaaagtggaacatgctgtggaattggacactggtgccccaagcgaggagttgagcagtgctggagaagtaacgaaacagacagtcttacagaaggaagaggagaggagtcagccaactaaaaccccttcatcttctcaagagccccctgatgaaggaacctcagggacagatgtgaacaaaggatcatcaaagaatgctttgtcctcaatggatcctgaagtgaggcttagtagccccccagggaagccagaagattcatccagtgttgatggtcagtcagtggggactccagttgggccagaaactggaggagagaagaatgggccagaagaagaggaagaagaggactttgatgacctcacccaagatgaggaagatgaaatgtcatcagcttctgaggaatctgtgctttctgtcccagaactccaggtgagagctggagaatattctcaagtatttcgtggactcagtaatatgtatcacttattgatatgccacctgcttgcttgctgcactatggatagtcctaaaatcatttgtatt

SEQ ID NO: 6459 - DNA, 6720 bp, Homo sapiens
  source 1..6720: mol_type = genomic DNA
atgttgccctgtaagaagagaagaactacagtgacagagtccctacagcataaaggcaatcaagaggaaaacaacgtagacctagaatcagccgttaaaccagaatctgaccaggttaaggacttgagttcggtgtcactatcctgggatccaagtcatggcagagtagctggcttcgaagtacagtctttgcaggatgcaggaaatcagcttggtatggaggatacatctctgagctctggaatgctcacccagaacacaaatgtaccaattctagaaggtgttgatgtggccatctctcagggaatcaccctaccttccttggagtcttttcacccccttaatatacacattggtaaaggaaaactccacgctactggctcaaagagagggaaaaaaatgacactcaggcctgggccagttacccaagaagacagatgtgatcatcttaccctaaaggagcctttttcaggagagcctagtgaagaagtcaaggaagaaggagggaaacctcaaatgaattctgaaggggagataccttccctgccatcaggcagccaatctgcaaaaccagtaagccagcccaggaaatcaacccagccagatgtttgtgcctctcctcaagaaaagccactcaggactctgtttcaccaacctgaggaagagatagaagatggtggactcttcattccaatggaagaacaagacaatgaagaaagtgagaaaaggagaaaaaagaaaaagggtaccaagaggaaacgagatggaaggggtcaagaagggaccttggcatatgacctgaaactggatgacatgcttgaccgtaccttggaggatggtgccaagcagcacaatctaacagcagtcaatgtccgaaacatccttcatgaagtaatcacaaatgaacacgtggtagctatgatgaaagcagccatcagtgagacggaagatatgccaatgtttgagcctaaaatgacacgctctaaactgaaggaagtagtggaaaaaggagtggtaattccaacatggaatatttcaccaattaagaaggccaatgaaattaagcctcctcagtttgtggatatccaccttgaagaagatgattcctcagatgaagaataccagccggatgatgaagaagaagatgaaactgctgaagagagcttattggaaagtgatgttgaaagcactgcttcatctccacgtggggcaaagaaatccagattgaggcagtcttctgagatgactgaaacagatgaggagagtggcatattatcagaggctgagaaagtcaccacaccagccatcaggcacatcagtgctgaggtagtgcccatggggcccccgccccctccaaagccgaaacagaccagagatagtactttcatggagaagttacatgcggtagatgaggagctggcttccagtccagtctgcatggattctttccagcccatggatgacagtctcattgcatttcgaacgcgttctaagatgcccctgaaagatgttcccctgggccaattagaggcagagctccaagctccagacatcactccagatatgtatgaccccaatacggcagatgatgaggactggaagatgtggctggggggacttatgaatgatgatgtggggaatgaagatgaagcagatgatgatgatgatccagaatataatttcctggaagacctcgatgaaccagacacagaggatttccggactgaccgggcagtgagaatcaccaaaaaggaagtaaatgagctgatggaagagctgtttgaaactttccaagatgagatgggattctccaacatggaagatgatggcccagaagaggaggagtgtgtagctgagcctcgtcctaactttaacacccctcaagctctacggtttgaggaaccactggccaacctgttaaatgaacaacatcggacagtgaaggagctatttgaacagctgaagatgaagaaatcttcagccaaacagctgcaggaagtagagaaggttaaaccccagagtgagaaagttcatcagactctgattctggacccagcacagaggaagagactccagcagcagatgcagcagcacgttcagctcttgacccaaatccaccttcttgccacctgcaaccccaacctcaatccggaggccactaccaccaggatatttcttaaagagctgggaacctttgctcaaagctccatcgcccttcaccatcagtacaaccccaagtttcagaccctgttccaaccctgtaacttgatgggagctatgcagctgattgaagacttcagcacacatgtcagcattgactgcagccctcataaaactgtcaagaagactgcgaatgaatttccctgtttgccaaagcaagtggcttggattctggccacaagcaaggttttcatgtatccagagttacttccagtgtgttccctgaaggcaaagaatccccaggataagatcgtcttcaccaaggctgaggacaatttgttagctttaggactgaagcattttgaaggaactgagtttcctaatcctctaatcagcaagtaccttctaacctgcaaaactgcccaccaactgacagtgagaatcaagaacctcaacatgaacagagctcctgacaacatcattaaattttataagaagaccaaacagctgccagtcctaggaaaatgctgtgaagagatccagccacatcagtggaagccacctatagagagagaagaacaccggctcccattctggttaaaggccagtctgccatccatccaggaagaactgcggcacatggctgatggtgctagagaggtaggaaatatgactggaaccactgagatcaactcagatcgaagcctagaaaaagacaatttggagttggggagtgaatctcggtacccactgctattgcctaagggtgtagtcctgaaactgaagccagttgccacccgtttccccaggaaggcttggagacagaagcgttcatcagtcctgaagcccctccttatccaacccagcccctctctccagcccagcttcaaccctgggaaaacaccagcccgatcaactcattcagaagcccctccgagcaaaatggtgctccggattcctcacccaatacagccagccactgttttacagacagttccaggtgtccctccactgggggtcagtggaggtgagagttttgagtctcctgcagcactgcctgctgtgccccctgaggccaggacaagcttccctctgtctgagtcccagactttgctctcttctgcccctgtgcccaaggtaatgctgccctcccttgccccttctaagtttcgaaagccatatgtgagacggagaccctcaaagagaagaggagtcaaggcctctccctgtatgaaacctgcccctgttatccaccaccctgcatctgttatcttcactgttcctgctaccactgtgaagattgtgagccttggcggtggctgtaacatgatccagcctgtcaatgcggctgtggcccagagtccccagactattcccatcactaccctcttggttaaccctacttccttcccctgtccattgaaccagtcccttgtggcctcctctgtctcacccttaattgtttctggcaattctgtgaatcttcctataccatccacccctgaagataaggcccacgtgaatgtggacattgcttgtgctgtggctgatggggaaaatgcctttcagggcctagaacccaaattagagccccaggaactatctcctctctctgctactgttttcccgaaagtggaacatagcccagggcctccactagcagatgcagagtgccaagaaggattgtcagagaatagtgcctgtcgctggaccgttgtgaaaacagaggaggggaggcaagctctggagccgctccctcagggcatccaggagtctctaaacaaccctacccctggggatttagaggaaattgtcaagatggaacctgaagaagctagagaggaaatcagtggatcccctgagcgtgatatttgtgatgacatcaaagtggaacatgctgtggaattggacactggtgccccaagcgaggagttgagcagtgctggagaagtaacgaaacagacagtcttacagaaggaagaggagaggagtcagccaactaaaaccccttcatcttctcaagagccccctgatgaaggaacctcagggacagatgtgaacaaaggatcatcaaagaatgctttgtcctcaatggatcctgaagtgaggcttagtagccccccagggaagccagaagattcatccagtgttgatggtcagtcagtggggactccagttgggccagaaactggaggagagaagaatgggccagaagaagaggaagaagaggactttgatgacctcacccaagatgaggaagatgaaatgtcatcagcttctgaggaatctgtgctttctgtcccagaactccaggaaacaatggagaaactgacttggctggcatctgaaaggcgcatgagtcaggagggtgagtctgaagaagagaattctcaggaggagaactctgagccagaagaagaggaggaagaagaagcagaaggaatggaaagcctgcagaaagaggatgaaatgacggatgaagcagttggagactctgctgagaagcctcctacttttgcttcacctgagactgctccagaagtggagaccagcagaactccaccaggagagagcatcaaagctgctggaaaaggccggaacaatcatcgagctcgcaacaagcggggaagtcgggctcgggccagcaaggacacctccaagctgctgttgctgtatgatgaggacattctcgagcgagatccactcagggagcagaaggacttggcctttgcccaagcttatctgaccagggtgcgagaagccctacaacatatccctggcaagtatgaagacttccttcaagtcatctatgaatttgagtcaagtacccagagacggacggctgtagatctctacaaaagcctgcaaattctgctccaagactggcctcagctgttgaaagactttgctgctttcctgttacctgagcaagctctggcctgtggattatttgaggagcagcaggcttttgagaagagccgcaagttccttcggcagctggagatttgctttgcagagaacccctcacaccaccagaagattatcaaggtcctccaaggctgtgcagactgccttccccaggagatcaccgagctcaagacacagatgtggcagctcctcaagggccacgaccacctgcaggatgagttttctatcttctttgaccacttgcgcccagcagctagccggatgggtgactttgaagagatcaattggactgaggaaaaggagtatgagtttgatggctttgaagaagtggccctgcctgatgtggaagaagaggaggagcctcccaagatacccacagcctcaaagaacaagaggaaaaaagagatcggggtccaaaatcatgataaggagactgaatggccagatggggccaaggactgtgcctgctcctgccatgaaggaggtccagattccaagctgaagaagagcaaaaggcggagctgtagccactgtagcagcaaggtctgtgacagcaaatcctacaagagcaaggagccccatgagttggtgggcagcagcccccaccgagaggctagtcctatgcctggtgctaaggaagctgggcagggcaaggatatgatggaagaggaagccccagaggagcgggagagcactgaggccacccagagcaggactgtcaggaccaccagaaagggagagatgcctgtttcaggattggcagtggggagcactttgccatcccctcgagaagtgactgttacagaacggctcctcctggatggcccaccacctcattcaccagagactcctcaatttccccccacaactggagctgtactgtacactgttaagagaaaccaggttgggcctgaggttcgctcctgccccaaggcatcccccagacttcagaaagagagggagggccaaaaggcagtgagtgagtcagaggctttgatgctggtctgggatgcatcagaaactgagaaattgcctggtaccgtggaaccccctgcttccttcctgagtcctgtttcctcaaagaccagagatgcagggagaagacatgtgtccgggaaaccagacactcaagagagatggctgccctcaagcagagctcgggtgaagacaagagacaggacgtgccctgtccatgaatctccatcaggaattgacacctcagagacttctcccaaagcccctagagggggtttggctaaagacagtggaacacaggccaagggtccagagggggagcagcagccaaaggccgcagaagctacggtgtgtgccaacaacagcaaggtcagctccactggggaaaaggttgtcctgtggacaagggaagctgaccgtgtgatcctcaccatgtgccaggagcaaggggcacagccacagaccttcaacatcatctcccagcagctgggaaataagacccctgctgaggtttcccaccgttttcgagaactcatgcagctcttccacactgcctgtgaagccagctctgaggatgaggatgatgcaaccagtaccagcaatgcagaccagctgtctgaccatggggaccttctgtctgaagaggagctggatgaa

SEQ ID NO: 6460 - DNA, 6723 bp, Homo sapiens
  source 1..6723: mol_type = genomic DNA
atgttgccctgtaagaagagaagaactacagtgacagagtccctacagcataaaggcaatcaagaggaaaacaacgtagacctagaatcagccgttaaaccagaatctgaccaggttaaggacttgagttcggtgtcactatcctgggatccaagtcatggcagagtagctggcttcgaagtacagtctttgcaggatgcaggaaatcagcttggtatggaggatacatctctgagctctggaatgctcacccagaacacaaatgtaccaattctagaaggtgttgatgtggccatctctcagggaatcaccctaccttccttggagtcttttcacccccttaatatacacattggtaaaggaaaactccacgctactggctcaaagagagggaaaaaaatgacactcaggcctgggccagttacccaagaagacagatgtgatcatcttaccctaaaggagcctttttcaggagagcctagtgaagaagtcaaggaagaaggagggaaacctcaaatgaattctgaaggggagataccttccctgccatcaggcagccaatctgcaaaaccagtaagccagcccaggaaatcaacccagccagatgtttgtgcctctcctcaagaaaagccactcaggactctgtttcaccaacctgaggaagagatagaagatggtggactcttcattccaatggaagaacaagacaatgaagaaagtgagaaaaggagaaaaaagaaaaagggtaccaagaggaaacgagatggaaggggtcaagaagggaccttggcatatgacctgaaactggatgacatgcttgaccgtaccttggaggatggtgccaagcagcacaatctaacagcagtcaatgtccgaaacatccttcatgaagtaatcacaaatgaacacgtggtagctatgatgaaagcagccatcagtgagacggaagatatgccaatgtttgagcctaaaatgacacgctctaaactgaaggaagtagtggaaaaaggagtggtaattccaacatggaatatttcaccaattaagaaggccaatgaaattaagcctcctcagtttgtggatatccaccttgaagaagatgattcctcagatgaagaataccagccggatgatgaagaagaagatgaaactgctgaagagagcttattggaaagtgatgttgaaagcactgcttcatctccacgtggggcaaagaaatccagattgaggcagtcttctgagatgactgaaacagatgaggagagtggcatattatcagaggctgagaaagtcaccacaccagccatcaggcacatcagtgctgaggtagtgcccatggggcccccgccccctccaaagccgaaacagaccagagatagtactttcatggagaagttacatgcggtagatgaggagctggcttccagtccagtctgcatggattctttccagcccatggatgacagtctcattgcatttcgaacgcgttctaagatgcccctgaaagatgttcccctgggccaattagaggcagagctccaagctccagacatcactccagatatgtatgaccccaatacggcagatgatgaggactggaagatgtggctggggggacttatgaatgatgatgtggggaatgaagatgaagcagatgatgatgatgatccagaatataatttcctggaagacctcgatgaaccagacacagaggatttccggactgaccgggcagtgagaatcaccaaaaaggaagtaaatgagctgatggaagagctgtttgaaactttccaagatgagatgggattctccaacatggaagatgatggcccagaagaggaggagtgtgtagctgagcctcgtcctaactttaacacccctcaagctctacggtttgaggaaccactggccaacctgttaaatgaacaacatcggacagtgaaggagctatttgaacagctgaagatgaagaaatcttcagccaaacagctgcaggaagtagagaaggttaaaccccagagtgagaaagttcatcagactctgattctggacccagcacagaggaagagactccagcagcagatgcagcagcacgttcagctcttgacccaaatccaccttcttgccacctgcaaccccaacctcaatccggaggccactaccaccaggatatttcttaaagagctgggaacctttgctcaaagctccatcgcccttcaccatcagtacaaccccaagtttcagaccctgttccaaccctgtaacttgatgggagctatgcagctgattgaagacttcagcacacatgtcagcattgactgcagccctcataaaactgtcaagaagactgcgaatgaatttccctgtttgccaaagcaagtggcttggattctggccacaagcaaggttttcatgtatccagagttacttccagtgtgttccctgaaggcaaagaatccccaggataagatcgtcttcaccaaggctgaggacaatttgttagctttaggactgaagcattttgaaggaactgagtttcctaatcctctaatcagcaagtaccttctaacctgcaaaactgcccaccaactgacagtgagaatcaagaacctcaacatgaacagagctcctgacaacatcattaaattttataagaagaccaaacagctgccagtcctaggaaaatgctgtgaagagatccagccacatcagtggaagccacctatagagagagaagaacaccggctcccattctggttaaaggccagtctgccatccatccaggaagaactgcggcacatggctgatggtgctagagaggtaggaaatatgactggaaccactgagatcaactcagatcgaagcctagaaaaagacaatttggagttggggagtgaatctcggtacccactgctattgcctaagggtgtagtcctgaaactgaagccagttgccacccgtttccccaggaaggcttggagacagaagcgttcatcagtcctgaagcccctccttatccaacccagcccctctctccagcccagcttcaaccctgggaaaacaccagcccgatcaactcattcagaagcccctccgagcaaaatggtgctccggattcctcacccaatacagccagccactgttttacagacagttccaggtgtccctccactgggggtcagtggaggtgagagttttgagtctcctgcagcactgcctgctgtgccccctgaggccaggacaagcttccctctgtctgagtcccagactttgctctcttctgcccctgtgcccaaggtaatgctgccctcccttgccccttctaagtttcgaaagccatatgtgagacggagaccctcaaagagaagaggagtcaaggcctctccctgtatgaaacctgcccctgttatccaccaccctgcatctgttatcttcactgttcctgctaccactgtgaagattgtgagccttggcggtggctgtaacatgatccagcctgtcaatgcggctgtggcccagagtccccagactattcccatcactaccctcttggttaaccctacttccttcccctgtccattgaaccagtcccttgtggcctcctctgtctcacccttaattgtttctggcaattctgtgaatcttcctataccatccacccctgaagataaggcccacgtgaatgtggacattgcttgtgctgtggctgatggggaaaatgcctttcagggcctagaacccaaattagagccccaggaactatctcctctctctgctactgttttcccgaaagtggaacatagcccagggcctccactagcagatgcagagtgccaagaaggattgtcagagaatagtgcctgtcgctggaccgttgtgaaaacagaggaggggaggcaagctctggagccgctccctcagggcatccaggagtctctaaacaaccctacccctggggatttagaggaaattgtcaagatggaacctgaagaagctagagaggaaatcagtggatcccctgagcgtgatatttgtgatgacatcaaagtggaacatgctgtggaattggacactggtgccccaagcgaggagttgagcagtgctggagaagtaacgaaacagacagtcttacagaaggaagaggagaggagtcagccaactaaaaccccttcatcttctcaagagccccctgatgaaggaacctcagggacagatgtgaacaaaggatcatcaaagaatgctttgtcctcaatggatcctgaagtgaggcttagtagccccccagggaagccagaagattcatccagtgttgatggtcagtcagtggggactccagttgggccagaaactggaggagagaagaatgggccagaagaagaggaagaagaggactttgatgacctcacccaagatgaggaagatgaaatgtcatcagcttctgaggaatctgtgctttctgtcccagaactccaggaaacaatggagaaactgacttggctggcatctgaaaggcgcatgagtcaggagggtgagtctgaagaagagaattctcaggaggagaactctgagccagaagaagaggaggaagaagaagcagaaggaatggaaagcctgcagaaagaggatgaaatgacggatgaagcagttggagactctgctgagaagcctcctacttttgcttcacctgagactgctccagaagtggagaccagcagaactccaccaggagagagcatcaaagctgctggaaaaggccggaacaatcatcgagctcgcaacaagcggggaagtcgggctcgggccagcaaggacacctccaagctgctgttgctgtatgatgaggacattctcgagcgagatccactcagggagcagaaggacttggcctttgcccaagcttatctgaccagggtgcgagaagccctacaacatatccctggcaagtatgaagacttccttcaagtcatctatgaatttgagtcaagtacccagagacggacggctgtagatctctacaaaagcctgcaaattctgctccaagactggcctcagctgttgaaagactttgctgctttcctgttacctgagcaagctctggcctgtggattatttgaggagcagcaggcttttgagaagagccgcaagttccttcggcagctggagatttgctttgcagagaacccctcacaccaccagaagattatcaaggtcctccaaggctgtgcagactgccttccccaggagatcaccgagctcaagacacagatgtggcagctcctcaagggccacgaccacctgcaggatgagttttctatcttctttgaccacttgcgcccagcagctagccggatgggtgactttgaagagatcaattggactgaggaaaaggagtatgagtttgatggctttgaagaagtggccctgcctgatgtggaagaagaggaggagcctcccaagatacccacagcctcaaagaacaagaggaaaaaagagatcggggtccaaaatcatgataaggagactgaatggccagatggggccaaggactgtgcctgctcctgccatgaaggaggtccagattccaagctgaagaagagcaaaaggcggagctgtagccactgtagcagcaaggtctgtgacagcaaatcctacaagagcaaggagccccatgagttggtgggcagcagcccccaccgagaggctagtcctatgcctggtgctaaggaagctgggcagggcaaggatatgatggaagaggaagccccagaggagcgggagagcactgaggccacccagagcaggactgtcaggaccaccagaaagggagagatgcctgtttcagcaggattggcagtggggagcactttgccatcccctcgagaagtgactgttacagaacggctcctcctggatggcccaccacctcattcaccagagactcctcaatttccccccacaactggagctgtactgtacactgttaagagaaaccaggttgggcctgaggttcgctcctgccccaaggcatcccccagacttcagaaagagagggagggccaaaaggcagtgagtgagtcagaggctttgatgctggtctgggatgcatcagaaactgagaaattgcctggtaccgtggaaccccctgcttccttcctgagtcctgtttcctcaaagaccagagatgcagggagaagacatgtgtccgggaaaccagacactcaagagagatggctgccctcaagcagagctcgggtgaagacaagagacaggacgtgccctgtccatgaatctccatcaggaattgacacctcagagacttctcccaaagcccctagagggggtttggctaaagacagtggaacacaggccaagggtccagagggggagcagcagccaaaggccgcagaagctacggtgtgtgccaacaacagcaaggtcagctccactggggaaaaggttgtcctgtggacaagggaagctgaccgtgtgatcctcaccatgtgccaggagcaaggggcacagccacagaccttcaacatcatctcccagcagctgggaaataagacccctgctgaggtttcccaccgttttcgagaactcatgcagctcttccacactgcctgtgaagccagctctgaggatgaggatgatgcaaccagtaccagcaatgcagaccagctgtctgaccatggggaccttctgtctgaagaggagctggatgaa

SEQ ID NO: 6461 - DNA, 1257 bp, Homo sapiens
  source 1..1257: mol_type = genomic DNA
atgggtgaaaaaaaaccagagcctttggacttcgtgaaagattttcaggaatacctgactcagcagacccatcacgtgaacatgatttctggatcagttagtggggacaaagaagcagaggctcttcagggagctggaacagatggtgatcaaaatggacttgatcacccatctgttgaagtttccttggatgaaaactcaggaatgttagtagacgggtttgaaaggacctttgatgggaagcttaagtgtcggtactgcaactatgccagcaaaggaacagcccggcttattgaacacatcagaatccacacaggtgaaaaacctcatcgatgtcatctttgtccatttgcatctgcttatgagcgtcatctggaagcccatatgcgttctcatactggagaaaaaccatacaaatgtgaattatgttccttccgctgcagtgatcgaagtaacttgtcccatcatcgaaggcgcaagcataaaatggtaccaattaaaggtactaggtcttccttaagcagcaagaaaatgtggggggttttacagaagaaaacaagcaatctgggctatagcagaagagcactaatcaacttaagtccaccttccatggtggttcagaaaccagactaccttaacgattttacccacgaaatcccaaatatccagactgactcctatgaaagtatggcaaaaaccacaccaactggtggccttccaagggacccccaagaactcatggttgataaccctttgaatcagctctcgactctagcagggcagttgtccagtctgccacccgaaaaccaaaaccctgcatcccctgatgtagttccctgccctgatgaaaagcctttcatgattcagcagccctctacccaagcagtagtttctgccgtatcagcaagtattcctcagagctcctctcccacaagcccagaacctcggccatcccatagtcaaaggaactatagtccagtggcaggtccaagcagtgagccaagtgcccacacgagcactcccagcataggaaacagccagccaagcaccccagccccagccctgccggtccaggaccctcagcttctgcaccactgccagcactgtgatatgtactttgcagacaacatcctttacactattcatatgggatgtcatgggtatgaaaatccttttcagtgtaatatatgtggatgcaaatgtaaaaacaagtatgattttgcctgtcattttgcaagagggcaacataaccaacat

SEQ ID NO: 6462 - DNA, 1755 bp, Homo sapiens
  source 1..1755: mol_type = genomic DNA
atgcatacaccacccgcactccctcgccgtttccaaggcggcggccgcgttcgcaccccagggtctcaccggcaagggaaggataatctggagagggatccctcaggagggtgtgttccggatttcttgcctcaggcccaagactccaaccattttataatggaatctttattttgtgaaagtagcggggactcatctctggagaaggagttcctcggggccccagtggggccctcggtgagcacccccaacagccagcactcttctcctagccgctcactcagtgccaactccatcaaggtggagatgtacagcgatgaggagtcaagcagactgctggggccagatgagcggctcctggaaaaggacgacagcgtgattgtggaagattcattgtctgagcccctgggctactgtgatgggagtgggccagagcctcactcccctgggggcatccggctgcccaatggcaagctcaagtgtgacgtctgcggcatggtctgtattggacccaacgtgctcatggtgcacaagcgcagtcacactggtgaaaggcccttccattgcaaccagtgtggtgcctccttcacccagaaggggaacctgctgcgccacatcaagctgcactctggggagaagccctttaaatgtcccttctgcaactatgcctgccgccggcgtgatgcactcactggtcacctccgcacacactcagtctcctctcccacagtgggcaagccctacaagtgtaactactgtggccggagctacaaacagcagagtaccctggaggagcacaaggagcggtgccataactacctacagagtctcagcactgaagcccaagctttggctggccaaccaggtgacgaaatacgtgacctggagatggtgccagactccatgctgcactcatcctctgagcggccaactttcatcgatcgtctggccaatagcctcaccaaacgcaagcgttccacaccccagaagtttgtaggcgaaaagcagatgcgcttcagcctctcagacctcccctatgatgtgaactcgggtggctatgaaaaggatgtggagttggtggcacaccacagcctagagcctggctttggaagttccctggcctttgtgggtgcagagcatctgcgtcccctccgccttccacccaccaattgcatctcagaactcacgcctgtcatcagctctgtctacacccagatgcagcccctccctggtcgactggagcttccaggatcccgagaagcaggtgagggacctgaggacctggctgatggaggtcccctcctctaccggccccgaggccccctgactgaccctggggcatcccccagcaatggctgccaggactccacagacacagaaagcaaccacgaagatcgggttgcgggggtggtatccctccctcagggtcccccaccccagccacctcccaccattgtggtgggccggcacagtcctgcctacgccaaagaggaccccaagccacaggaggggttattgcggggcaccccaggcccctccaaggaagtgcttcgggtggtgggcgagagtggtgagcctgtgaaggccttcaagtgtgagcactgccgtatcctcttcctggaccacgtcatgttcactatccacatgggctgccatggcttcagagacccttttgagtgcaacatctgtggttatcacagccaggaccggtacgaattctcttcccacattgtccggggggagcataaggtgggc

SEQ ID NO: 6463 - DNA, 1557 bp, Homo sapiens
  source 1..1557: mol_type = genomic DNA
atggatgctgatgagggtcaagacatgtcccaagtttcagggaaggaaagcccccctgtaagcgatactccagatgagggcgatgagcccatgccgatccccgaggacctctccaccacctcgggaggacagcaaagctccaagagtgacagagtcgtggccagtaatgttaaagtagagactcagagtgatgaagagaatgggcgtgcctgtgaaatgaatggggaagaatgtgcggaggatttacgaatgcttgatgcctcgggagagaaaatgaatggctcccacagggaccaaggcagctcggctttgtcgggagttggaggcattcgacttcctaacggaaaactaaagtgtgatatctgtgggatcatttgcatcgggcccaatgtgctcatggttcacaaaagaagccacactggagaacggcccttccagtgcaatcagtgcggggcctcattcacccagaagggcaacctgctccggcacatcaagctgcattccggggagaagcccttcaaatgccacctctgcaactacgcctgccgccggagggacgccctcactggccacctgaggacgcactccgttggtaaacctcacaaatgtggatattgtggccgaagctataaacagcgaagctctttagaggaacataaagagcgctgccacaactacttggaaagcatgggccttccgggcacactgtacccagtcattaaagaagaaactaatcacagtgaaatggcagaagacctgtgcaagataggatcagagagatctctcgtgctggacagactagcaagtaacgtcgccaaacgtaagagctctatgcctcagaaatttcttggggacaagggcctgtccgacacgccctacgacagcagcgccagctacgagaaggagaacgaaatgatgaagtcccacgtgatggaccaagccatcaacaacgccatcaactacctgggggccgagtccctgcgcccgctggtgcagacgcccccgggcggttccgaggtggtcccggtcatcagcccgatgtaccagctgcacaagccgctcgcggagggcaccccgcgctccaaccactcggcccaggacagcgccgtggagaacctgctgctgctctccaaggccaagttggtgccctcggagcgcgaggcgtccccgagcaacagctgccaagactccacggacaccgagagcaacaacgaggagcagcgcagcggtctcatctacctgaccaaccacatcgccccgcacgcgcgcaacgggctgtcgctcaaggaggagcaccgcgcctacgacctgctgcgcgccgcctccgagaactcgcaggacgcgctccgcgtggtcagcaccagcggggagcagatgaaggtgtacaagtgcgaacactgccgggtgctcttcctggatcacgtcatgtacaccatccacatgggctgccacggcttccgtgatccttttgagtgcaacatgtgcggctaccacagccaggaccggtacgagttctcgtcgcacataacgcgaggggagcaccgcttccacatgagc

SEQ ID NO: 6464 - DNA, 1296 bp, Homo sapiens
  source 1..1296: mol_type = genomic DNA
atggatgctgatgagggtcaagacatgtcccaagtttcagggaaggaaagcccccctgtaagcgatactccagatgagggcgatgagcccatgccgatccccgaggacctctccaccacctcgggaggacagcaaagctccaagagtgacagagtcgtgggagaacggcccttccagtgcaatcagtgcggggcctcattcacccagaagggcaacctgctccggcacatcaagctgcattccggggagaagcccttcaaatgccacctctgcaactacgcctgccgccggagggacgccctcactggccacctgaggacgcactccgttggtaaacctcacaaatgtggatattgtggccgaagctataaacagcgaagctctttagaggaacataaagagcgctgccacaactacttggaaagcatgggccttccgggcacactgtacccagtcattaaagaagaaactaatcacagtgaaatggcagaagacctgtgcaagataggatcagagagatctctcgtgctggacagactagcaagtaacgtcgccaaacgtaagagctctatgcctcagaaatttcttggggacaagggcctgtccgacacgccctacgacagcagcgccagctacgagaaggagaacgaaatgatgaagtcccacgtgatggaccaagccatcaacaacgccatcaactacctgggggccgagtccctgcgcccgctggtgcagacgcccccgggcggttccgaggtggtcccggtcatcagcccgatgtaccagctgcacaagccgctcgcggagggcaccccgcgctccaaccactcggcccaggacagcgccgtggagaacctgctgctgctctccaaggccaagttggtgccctcggagcgcgaggcgtccccgagcaacagctgccaagactccacggacaccgagagcaacaacgaggagcagcgcagcggtctcatctacctgaccaaccacatcgccccgcacgcgcgcaacgggctgtcgctcaaggaggagcaccgcgcctacgacctgctgcgcgccgcctccgagaactcgcaggacgcgctccgcgtggtcagcaccagcggggagcagatgaaggtgtacaagtgcgaacactgccgggtgctcttcctggatcacgtcatgtacaccatccacatgggctgccacggcttccgtgatccttttgagtgcaacatgtgcggctaccacagccaggaccggtacgagttctcgtcgcacataacgcgaggggagcaccgcttccacatgagc

SEQ ID NO: 6465 - DNA, 522 bp, Homo sapiens
  source 1..522: mol_type = genomic DNA
atggatgctgatgagggtcaagacatgtcccaagtttcagggaaggaaagcccccctgtaagcgatactccagatgagggcgatgagcccatgccgatccccgaggacctctccaccacctcgggaggacagcaaagctccaagagtgacagagtcgtggttacatatggggctgatgactttagggatttccatgcaataattcccaaatctttctctcgtaagtatatgccttgcttctggaaaacaaaagcatgccttcatctcctatcatgtaaatatcgtacgtgcatgttccttcatcaacccccgagatacattaaatattcactgttctattcgttagacacctaccatatcatttttgggtatttataccataaagtgcaaaacgaaggtctaggcagttgtgcggtgtcctgggagcatggcagtggagtaacagtaagggttggagtcacagtagcactgatgggattgttacttcgcagatgctgctggacagctttgagattactcctg

SEQ ID NO: 6466 - DNA, 1128 bp, Homo sapiens
  source 1..1128: mol_type = genomic DNA
atggatgctgatgagggtcaagacatgtcccaagtttcagggaaggaaagcccccctgtaagcgatactccagatgagggcgatgagcccatgccgatccccgaggacctctccaccacctcgggaggacagcaaagctccaagagtgacagagtcgtggccagtaatgttaaagtagagactcagagtgatgaagagaatgggcgtgcctgtgaaatgaatggggaagaatgtgcggaggatttacgaatgcttgatgcctcgggagagaaaatgaatggctcccacagggaccaaggcagctcggctttgtcgggagttggaggcattcgacttcctaacggaaaactaaagtgtgatatctgtgggatcatttgcatcgggcccaatgtgctcatggttcacaaaagaagccacactggggacaagggcctgtccgacacgccctacgacagcagcgccagctacgagaaggagaacgaaatgatgaagtcccacgtgatggaccaagccatcaacaacgccatcaactacctgggggccgagtccctgcgcccgctggtgcagacgcccccgggcggttccgaggtggtcccggtcatcagcccgatgtaccagctgcacaagccgctcgcggagggcaccccgcgctccaaccactcggcccaggacagcgccgtggagaacctgctgctgctctccaaggccaagttggtgccctcggagcgcgaggcgtccccgagcaacagctgccaagactccacggacaccgagagcaacaacgaggagcagcgcagcggtctcatctacctgaccaaccacatcgccccgcacgcgcgcaacgggctgtcgctcaaggaggagcaccgcgcctacgacctgctgcgcgccgcctccgagaactcgcaggacgcgctccgcgtggtcagcaccagcggggagcagatgaaggtgtacaagtgcgaacactgccgggtgctcttcctggatcacgtcatgtacaccatccacatgggctgccacggcttccgtgatccttttgagtgcaacatgtgcggctaccacagccaggaccggtacgagttctcgtcgcacataacgcgaggggagcaccgcttccacatgagc

SEQ ID NO: 6467 - DNA, 1296 bp, Homo sapiens
  source 1..1296: mol_type = genomic DNA
atggatgctgatgagggtcaagacatgtcccaagtttcagggaaggaaagcccccctgtaagcgatactccagatgagggcgatgagcccatgccgatccccgaggacctctccaccacctcgggaggacagcaaagctccaagagtgacagagtcgtggccagtaatgttaaagtagagactcagagtgatgaagagaatgggcgtgcctgtgaaatgaatggggaagaatgtgcggaggatttacgaatgcttgatgcctcgggagagaaaatgaatggctcccacagggaccaaggcagctcggctttgtcgggagttggaggcattcgacttcctaacggaaaactaaagtgtgatatctgtgggatcatttgcatcgggcccaatgtgctcatggttcacaaaagaagccacactggagaacggcccttccagtgcaatcagtgcggggcctcattcacccagaagggcaacctgctccggcacatcaagctgcattccggggagaagcccttcaaatgccacctctgcaactacgcctgccgccggagggacgccctcactggccacctgaggacgcactccggggacaagggcctgtccgacacgccctacgacagcagcgccagctacgagaaggagaacgaaatgatgaagtcccacgtgatggaccaagccatcaacaacgccatcaactacctgggggccgagtccctgcgcccgctggtgcagacgcccccgggcggttccgaggtggtcccggtcatcagcccgatgtaccagctgcacaagccgctcgcggagggcaccccgcgctccaaccactcggcccaggacagcgccgtggagaacctgctgctgctctccaaggccaagttggtgccctcggagcgcgaggcgtccccgagcaacagctgccaagactccacggacaccgagagcaacaacgaggagcagcgcagcggtctcatctacctgaccaaccacatcgccccgcacgcgcgcaacgggctgtcgctcaaggaggagcaccgcgcctacgacctgctgcgcgccgcctccgagaactcgcaggacgcgctccgcgtggtcagcaccagcggggagcagatgaaggtgtacaagtgcgaacactgccgggtgctcttcctggatcacgtcatgtacaccatccacatgggctgccacggcttccgtgatccttttgagtgcaacatgtgcggctaccacagccaggaccggtacgagttctcgtcgcacataacgcgaggggagcaccgcttccacatgagc

SEQ ID NO: 6468 - DNA, 864 bp, Homo sapiens
  source 1..864: mol_type = genomic DNA
atggaagatatacaaacaaatgcggaactgaaaagcactcaggagcagtctgtgcccgcagaaagtgcagcggttttgaatgactacagtttaaccaaatctcatgaaatggaaaatgtggacagtggagaaggcccagccaatgaagatgaagacataggaggtgagaagcgccactgctttgatgtcaactataattcaagttacatgtatgagaaagagagtgagctcatacagacccgcatgatggaccaagccatcaataacgccatcagctatcttggcgccgaagccctgcgccccttggtccagacaccgcctgctcccacctcggagatggttccagttatcagcagcatgtatcccatagccctcacccgggctgagatgtcaaacggtgcccctcaagagctggaaaagaaaagcatccaccttccagagaagagcgtgccttctgagagaggcctctctcccaacaatagtggccacgactccacggacactgacagcaaccatgaagaacgccagaatcacatctatcagcaaaatcacatggtcctgtctcgggcccgcaatgggatgccacttctgaaggaggttccccgctcttacgaactcctcaagcccccgcccatctgcccaagagactccgtcaaagtgatcaacaaggaaggggaggtgatggatgtgtatcggtgtgaccactgccgcgtcctcttcctggactatgtgatgttcacgattcacatgggctgccacggcttccgtgaccctttcgagtgtaacatgtgtggatatcgaagccatgatcggtatgagttctcgtctcacatagccagaggagaacacagagccctgctgaag

SEQ ID NO: 6469 - DNA, 1410 bp, Homo sapiens
  source 1..1410: mol_type = genomic DNA
atggaagatatacaaacaaatgcggaactgaaaagcactcaggagcagtctgtgcccgcagaaagtgcagcggttttgaatgactacagtttaaccaaatctcatgaaatggaaaatgtggacagtggagaaggcccagccaatgaagatgaagacataggagatgattcaatgaaagtgaaagatgaatacagtgaaagagatgagaatgttttaaagtcagaacccatgggaaatgcagaagagcctgaaatcccttacagctattcaagagaatataatgaatatgaaaacattaagttggagagacatgttgtctcattcgatagtagcaggccaaccagtggaaagatgaactgcgatgtgtgtggattatcctgcatcagcttcaatgtcttaatggttcataagcgaagccatactggtgaacgcccattccagtgtaatcagtgtggggcatcttttactcagaaaggtaacctcctccgccacattaaactgcacacaggggaaaaaccttttaagtgtcacctctgcaactatgcatgccaaagaagagatgcgctcacggggcatcttaggacacattctgtggagaaaccctacaaatgtgagttttgtggaaggagttacaagcagagaagttcccttgaggagcacaaggagcgctgccgtacatttcttcagagcactgacccaggggacactggtgagaagcgccactgctttgatgtcaactataattcaagttacatgtatgagaaagagagtgagctcatacagacccgcatgatggaccaagccatcaataacgccatcagctatcttggcgccgaagccctgcgccccttggtccagacaccgcctgctcccacctcggagatggttccagttatcagcagcatgtatcccatagccctcacccgggctgagatgtcaaacggtgcccctcaagagctggaaaagaaaagcatccaccttccagagaagagcgtgccttctgagagaggcctctctcccaacaatagtggccacgactccacggacactgacagcaaccatgaagaacgccagaatcacatctatcagcaaaatcacatggtcctgtctcgggcccgcaatgggatgccacttctgaaggaggttccccgctcttacgaactcctcaagcccccgcccatctgcccaagagactccgtcaaagtgatcaacaaggaaggggaggtgatggatgtgtatcggtgtgaccactgccgcgtcctcttcctggactatgtgatgttcacgattcacatgggctgccacggcttccgtgaccctttcgagtgtaacatgtgtggatatcgaagccatgatcggtatgagttctcgtctcacatagccagaggagaacacagagccctgctgaag

SEQ ID NO: 6470 - DNA, 1242 bp, Homo sapiens
  source 1..1242: mol_type = genomic DNA
atggaagatatacaaacaaatgcggaactgaaaagcactcaggagcagtctgtgcccgcagaaagtgcagcggttttgaatgactacagtttaaccaaatctcatgaaatggaaaatgtggacagtggagaaggcccagccaatgaagatgaagacataggagatgattcaatgaaagtgaaagatgaatacagtgaaagagatgagaatgttttaaagtcagaacccatgggaaatgcagaagagcctgaaatcccttacagctattcaagagaatataatgaatatgaaaacattaagttggagagacatgttgtctcattcgatagtagcaggccaaccagtggaaagatgaactgcgatgtgtgtggattatcctgcatcagcttcaatgtcttaatggttcataagcgaagccatactgcaagtgcggaggcaagacacatcaaagcagagatgggaagtgaaagagctctcgtactggacagattagcaagcaatgtggcaaaacgaaaaagctcaatgcctcagaaattcattggtgagaagcgccactgctttgatgtcaactataattcaagttacatgtatgagaaagagagtgagctcatacagacccgcatgatggaccaagccatcaataacgccatcagctatcttggcgccgaagccctgcgccccttggtccagacaccgcctgctcccacctcggagatggttccagttatcagcagcatgtatcccatagccctcacccgggctgagatgtcaaacggtgcccctcaagagctggaaaagaaaagcatccaccttccagagaagagcgtgccttctgagagaggcctctctcccaacaatagtggccacgactccacggacactgacagcaaccatgaagaacgccagaatcacatctatcagcaaaatcacatggtcctgtctcgggcccgcaatgggatgccacttctgaaggaggttccccgctcttacgaactcctcaagcccccgcccatctgcccaagagactccgtcaaagtgatcaacaaggaaggggaggtgatggatgtgtatcggtgtgaccactgccgcgtcctcttcctggactatgtgatgttcacgattcacatgggctgccacggcttccgtgaccctttcgagtgtaacatgtgtggatatcgaagccatgatcggtatgagttctcgtctcacatagccagaggagaacacagagccctgctgaag

SEQ ID NO: 6471 - DNA, 1410 bp, Homo sapiens
  source 1..1410: mol_type = genomic DNA
atggaagatatacaaacaaatgcggaactgaaaagcactcaggagcagtctgtgcccgcagaaagtgcagcggttttgaatgactacagtttaaccaaatctcatgaaatggaaaatgtggacagtggagaaggcccagccaatgaagatgaagacataggagatgattcaatgaaagtgaaagatgaatacagtgaaagagatgagaatgttttaaagtcagaacccatgggaaatgcagaagagcctgaaatcccttacagctattcaagagaatataatgaatatgaaaacattaagttggagagacatgttgtctcattcgatagtagcaggccaaccagtggaaagatgaactgcgatgtgtgtggattatcctgcatcagcttcaatgtcttaatggttcataagcgaagccatactggtgaacgcccattccagtgtaatcagtgtggggcatcttttactcagaaaggtaacctcctccgccacattaaactgcacacaggggaaaaaccttttaagtgtcacctctgcaactatgcatgccaaagaagagatgcgctcacggggcatcttaggacacattctgcaagtgcggaggcaagacacatcaaagcagagatgggaagtgaaagagctctcgtactggacagattagcaagcaatgtggcaaaacgaaaaagctcaatgcctcagaaattcattggtgagaagcgccactgctttgatgtcaactataattcaagttacatgtatgagaaagagagtgagctcatacagacccgcatgatggaccaagccatcaataacgccatcagctatcttggcgccgaagccctgcgccccttggtccagacaccgcctgctcccacctcggagatggttccagttatcagcagcatgtatcccatagccctcacccgggctgagatgtcaaacggtgcccctcaagagctggaaaagaaaagcatccaccttccagagaagagcgtgccttctgagagaggcctctctcccaacaatagtggccacgactccacggacactgacagcaaccatgaagaacgccagaatcacatctatcagcaaaatcacatggtcctgtctcgggcccgcaatgggatgccacttctgaaggaggttccccgctcttacgaactcctcaagcccccgcccatctgcccaagagactccgtcaaagtgatcaacaaggaaggggaggtgatggatgtgtatcggtgtgaccactgccgcgtcctcttcctggactatgtgatgttcacgattcacatgggctgccacggcttccgtgaccctttcgagtgtaacatgtgtggatatcgaagccatgatcggtatgagttctcgtctcacatagccagaggagaacacagagccctgctgaag

SEQ ID NO: 6472 - DNA, 1425 bp, Homo sapiens
  source 1..1425: mol_type = genomic DNA
atggaagatatacaaacaaatgcggaactgaaaagcactcaggagcagtctgtgcccgcagatgattcaatgaaagtgaaagatgaatacagtgaaagagatgagaatgttttaaagtcagaacccatgggaaatgcagaagagcctgaaatcccttacagctattcaagagaatataatgaatatgaaaacattaagttggagagacatgttgtctcattcgatagtagcaggccaaccagtggaaagatgaactgcgatgtgtgtggattatcctgcatcagcttcaatgtcttaatggttcataagcgaagccatactggtgaacgcccattccagtgtaatcagtgtggggcatcttttactcagaaaggtaacctcctccgccacattaaactgcacacaggggaaaaaccttttaagtgtcacctctgcaactatgcatgccaaagaagagatgcgctcacggggcatcttaggacacattctgtggagaaaccctacaaatgtgagttttgtggaaggagttacaagcagagaagttcccttgaggagcacaaggagcgctgccgtacatttcttcagagcactgacccaggggacactgcaagtgcggaggcaagacacatcaaagcagagatgggaagtgaaagagctctcgtactggacagattagcaagcaatgtggcaaaacgaaaaagctcaatgcctcagaaattcattggtgagaagcgccactgctttgatgtcaactataattcaagttacatgtatgagaaagagagtgagctcatacagacccgcatgatggaccaagccatcaataacgccatcagctatcttggcgccgaagccctgcgccccttggtccagacaccgcctgctcccacctcggagatggttccagttatcagcagcatgtatcccatagccctcacccgggctgagatgtcaaacggtgcccctcaagagctggaaaagaaaagcatccaccttccagagaagagcgtgccttctgagagaggcctctctcccaacaatagtggccacgactccacggacactgacagcaaccatgaagaacgccagaatcacatctatcagcaaaatcacatggtcctgtctcgggcccgcaatgggatgccacttctgaaggaggttccccgctcttacgaactcctcaagcccccgcccatctgcccaagagactccgtcaaagtgatcaacaaggaaggggaggtgatggatgtgtatcggtgtgaccactgccgcgtcctcttcctggactatgtgatgttcacgattcacatgggctgccacggcttccgtgaccctttcgagtgtaacatgtgtggatatcgaagccatgatcggtatgagttctcgtctcacatagccagaggagaacacagagccctgctgaag

SEQ ID NO: 6473 - DNA, 1266 bp, Homo sapiens
  source 1..1266: mol_type = genomic DNA
atggaagatatacaaacaaatgcggaactgaaaagcactcaggagcagtctgtgcccgcagaaagtgcagcggttttgaatgactacagtttaaccaaatctcatgaaatggaaaatgtggacagtggagaaggcccagccaatgaagatgaagacataggaggtgaacgcccattccagtgtaatcagtgtggggcatcttttactcagaaaggtaacctcctccgccacattaaactgcacacaggggaaaaaccttttaagtgtcacctctgcaactatgcatgccaaagaagagatgcgctcacggggcatcttaggacacattctgtggagaaaccctacaaatgtgagttttgtggaaggagttacaagcagagaagttcccttgaggagcacaaggagcgctgccgtacatttcttcagagcactgacccaggggacactgcaagtgcggaggcaagacacatcaaagcagagatgggaagtgaaagagctctcgtactggacagattagcaagcaatgtggcaaaacgaaaaagctcaatgcctcagaaattcattggtgagaagcgccactgctttgatgtcaactataattcaagttacatgtatgagaaagagagtgagctcatacagacccgcatgatggaccaagccatcaataacgccatcagctatcttggcgccgaagccctgcgccccttggtccagacaccgcctgctcccacctcggagatggttccagttatcagcagcatgtatcccatagccctcacccgggctgagatgtcaaacggtgcccctcaagagctggaaaagaaaagcatccaccttccagagaagagcgtgccttctgagagaggcctctctcccaacaatagtggccacgactccacggacactgacagcaaccatgaagaacgccagaatcacatctatcagcaaaatcacatggtcctgtctcgggcccgcaatgggatgccacttctgaaggaggttccccgctcttacgaactcctcaagcccccgcccatctgcccaagagactccgtcaaagtgatcaacaaggaaggggaggtgatggatgtgtatcggtgtgaccactgccgcgtcctcttcctggactatgtgatgttcacgattcacatgggctgccacggcttccgtgaccctttcgagtgtaacatgtgtggatatcgaagccatgatcggtatgagttctcgtctcacatagccagaggagaacacagagccctgctgaag

SEQ ID NO: 6474 - DNA, 981 bp, Homo sapiens
  source 1..981: mol_type = genomic DNA
atggaagatatacaaacaaatgcggaactgaaaagcactcaggagcagtctgtgcccgcagaaagtgcagcggttttgaatgactacagtttaaccaaatctcatgaaatggaaaatgtggacagtggagaaggcccagccaatgaagatgaagacataggagcaagtgcggaggcaagacacatcaaagcagagatgggaagtgaaagagctctcgtactggacagattagcaagcaatgtggcaaaacgaaaaagctcaatgcctcagaaattcattggtgagaagcgccactgctttgatgtcaactataattcaagttacatgtatgagaaagagagtgagctcatacagacccgcatgatggaccaagccatcaataacgccatcagctatcttggcgccgaagccctgcgccccttggtccagacaccgcctgctcccacctcggagatggttccagttatcagcagcatgtatcccatagccctcacccgggctgagatgtcaaacggtgcccctcaagagctggaaaagaaaagcatccaccttccagagaagagcgtgccttctgagagaggcctctctcccaacaatagtggccacgactccacggacactgacagcaaccatgaagaacgccagaatcacatctatcagcaaaatcacatggtcctgtctcgggcccgcaatgggatgccacttctgaaggaggttccccgctcttacgaactcctcaagcccccgcccatctgcccaagagactccgtcaaagtgatcaacaaggaaggggaggtgatggatgtgtatcggtgtgaccactgccgcgtcctcttcctggactatgtgatgttcacgattcacatgggctgccacggcttccgtgaccctttcgagtgtaacatgtgtggatatcgaagccatgatcggtatgagttctcgtctcacatagccagaggagaacacagagccctgctgaag

SEQ ID NO: 6475 - DNA, 1125 bp, Homo sapiens
  source 1..1125: mol_type = genomic DNA
atggaagatatacaaacaaatgcggaactgaaaagcactcaggagcagtctgtgcccgcagaaagtgcagcggttttgaatgactacagtttaaccaaatctcatgaaatggaaaatgtggacagtggagaaggcccagccaatgaagatgaagacataggagatgattcaatgaaagtgaaagatgaatacagtgaaagagatgagaatgttttaaagtcagaacccatgggaaatgcagaagagcctgaaatcccttacagctattcaagagaatataatgaatatgaaaacattaagttggagagacatgttgtctcattcgatagtagcaggccaaccagtggaaagatgaactgcgatgtgtgtggattatcctgcatcagcttcaatgtcttaatggttcataagcgaagccatactggtgagaagcgccactgctttgatgtcaactataattcaagttacatgtatgagaaagagagtgagctcatacagacccgcatgatggaccaagccatcaataacgccatcagctatcttggcgccgaagccctgcgccccttggtccagacaccgcctgctcccacctcggagatggttccagttatcagcagcatgtatcccatagccctcacccgggctgagatgtcaaacggtgcccctcaagagctggaaaagaaaagcatccaccttccagagaagagcgtgccttctgagagaggcctctctcccaacaatagtggccacgactccacggacactgacagcaaccatgaagaacgccagaatcacatctatcagcaaaatcacatggtcctgtctcgggcccgcaatgggatgccacttctgaaggaggttccccgctcttacgaactcctcaagcccccgcccatctgcccaagagactccgtcaaagtgatcaacaaggaaggggaggtgatggatgtgtatcggtgtgaccactgccgcgtcctcttcctggactatgtgatgttcacgattcacatgggctgccacggcttccgtgaccctttcgagtgtaacatgtgtggatatcgaagccatgatcggtatgagttctcgtctcacatagccagaggagaacacagagccctgctgaag

SEQ ID NO: 6476 - DNA, 1098 bp, Homo sapiens
  source 1..1098: mol_type = genomic DNA
atggaagatatacaaacaaatgcggaactgaaaagcactcaggagcagtctgtgcccgcagaaagtgcagcggttttgaatgactacagtttaaccaaatctcatgaaatggaaaatgtggacagtggagaaggcccagccaatgaagatgaagacataggagtggagaaaccctacaaatgtgagttttgtggaaggagttacaagcagagaagttcccttgaggagcacaaggagcgctgccgtacatttcttcagagcactgacccaggggacactgcaagtgcggaggcaagacacatcaaagcagagatgggaagtgaaagagctctcgtactggacagattagcaagcaatgtggcaaaacgaaaaagctcaatgcctcagaaattcattggtgagaagcgccactgctttgatgtcaactataattcaagttacatgtatgagaaagagagtgagctcatacagacccgcatgatggaccaagccatcaataacgccatcagctatcttggcgccgaagccctgcgccccttggtccagacaccgcctgctcccacctcggagatggttccagttatcagcagcatgtatcccatagccctcacccgggctgagatgtcaaacggtgcccctcaagagctggaaaagaaaagcatccaccttccagagaagagcgtgccttctgagagaggcctctctcccaacaatagtggccacgactccacggacactgacagcaaccatgaagaacgccagaatcacatctatcagcaaaatcacatggtcctgtctcgggcccgcaatgggatgccacttctgaaggaggttccccgctcttacgaactcctcaagcccccgcccatctgcccaagagactccgtcaaagtgatcaacaaggaaggggaggtgatggatgtgtatcggtgtgaccactgccgcgtcctcttcctggactatgtgatgttcacgattcacatgggctgccacggcttccgtgaccctttcgagtgtaacatgtgtggatatcgaagccatgatcggtatgagttctcgtctcacatagccagaggagaacacagagccctgctgaag

SEQ ID NO: 6477 - DNA, 1293 bp, Homo sapiens
  source 1..1293: mol_type = genomic DNA
atggaagatatacaaacaaatgcggaactgaaaagcactcaggagcagtctgtgcccgcagaaagtgcagcggttttgaatgactacagtttaaccaaatctcatgaaatggaaaatgtggacagtggagaaggcccagccaatgaagatgaagacataggagatgattcaatgaaagtgaaagatgaatacagtgaaagagatgagaatgttttaaagtcagaacccatgggaaatgcagaagagcctgaaatcccttacagctattcaagagaatataatgaatatgaaaacattaagttggagagacatgttgtctcattcgatagtagcaggccaaccagtggaaagatgaactgcgatgtgtgtggattatcctgcatcagcttcaatgtcttaatggttcataagcgaagccatactggtgaacgcccattccagtgtaatcagtgtggggcatcttttactcagaaaggtaacctcctccgccacattaaactgcacacaggggaaaaaccttttaagtgtcacctctgcaactatgcatgccaaagaagagatgcgctcacggggcatcttaggacacattctggtgagaagcgccactgctttgatgtcaactataattcaagttacatgtatgagaaagagagtgagctcatacagacccgcatgatggaccaagccatcaataacgccatcagctatcttggcgccgaagccctgcgccccttggtccagacaccgcctgctcccacctcggagatggttccagttatcagcagcatgtatcccatagccctcacccgggctgagatgtcaaacggtgcccctcaagagctggaaaagaaaagcatccaccttccagagaagagcgtgccttctgagagaggcctctctcccaacaatagtggccacgactccacggacactgacagcaaccatgaagaacgccagaatcacatctatcagcaaaatcacatggtcctgtctcgggcccgcaatgggatgccacttctgaaggaggttccccgctcttacgaactcctcaagcccccgcccatctgcccaagagactccgtcaaagtgatcaacaaggaaggggaggtgatggatgtgtatcggtgtgaccactgccgcgtcctcttcctggactatgtgatgttcacgattcacatgggctgccacggcttccgtgaccctttcgagtgtaacatgtgtggatatcgaagccatgatcggtatgagttctcgtctcacatagccagaggagaacacagagccctgctgaag

SEQ ID NO: 6478 - DNA, 786 bp, Homo sapiens
  source 1..786: mol_type = genomic DNA
atgggaagtgaaagagctctcgtactggacagattagcaagcaatgtggcaaaacgaaaaagctcaatgcctcagaaattcattggtgagaagcgccactgctttgatgtcaactataattcaagttacatgtatgagaaagagagtgagctcatacagacccgcatgatggaccaagccatcaataacgccatcagctatcttggcgccgaagccctgcgccccttggtccagacaccgcctgctcccacctcggagatggttccagttatcagcagcatgtatcccatagccctcacccgggctgagatgtcaaacggtgcccctcaagagctggaaaagaaaagcatccaccttccagagaagagcgtgccttctgagagaggcctctctcccaacaatagtggccacgactccacggacactgacagcaaccatgaagaacgccagaatcacatctatcagcaaaatcacatggtcctgtctcgggcccgcaatgggatgccacttctgaaggaggttccccgctcttacgaactcctcaagcccccgcccatctgcccaagagactccgtcaaagtgatcaacaaggaaggggaggtgatggatgtgtatcggtgtgaccactgccgcgtcctcttcctggactatgtgatgttcacgattcacatgggctgccacggcttccgtgaccctttcgagtgtaacatgtgtggatatcgaagccatgatcggtatgagttctcgtctcacatagccagaggagaacacagagccctgctgaag

SEQ ID NO: 6479 - DNA, 1359 bp, Homo sapiens
  source 1..1359: mol_type = genomic DNA
atggaagatatacaaacaaatgcggaactgaaaagcactcaggagcagtctgtgcccgcagaaagtgcagcggttttgaatgactacagtttaaccaaatctcatgaaatggaaaatgtggacagtggagaaggcccagccaatgaagatgaagacataggagatgattcaatgaaagtgaaagatgaatacagtgaaagagatgagaatgttttaaagtcagaacccatgggaaatgcagaagagcctgaaatcccttacagctattcaagagaatataatgaatatgaaaacattaagttggagagacatgttgtctcattcgatagtagcaggccaaccagtggaaagatgaactgcgatgtgtgtggattatcctgcatcagcttcaatgtcttaatggttcataagcgaagccatactgtggagaaaccctacaaatgtgagttttgtggaaggagttacaagcagagaagttcccttgaggagcacaaggagcgctgccgtacatttcttcagagcactgacccaggggacactgcaagtgcggaggcaagacacatcaaagcagagatgggaagtgaaagagctctcgtactggacagattagcaagcaatgtggcaaaacgaaaaagctcaatgcctcagaaattcattggtgagaagcgccactgctttgatgtcaactataattcaagttacatgtatgagaaagagagtgagctcatacagacccgcatgatggaccaagccatcaataacgccatcagctatcttggcgccgaagccctgcgccccttggtccagacaccgcctgctcccacctcggagatggttccagttatcagcagcatgtatcccatagccctcacccgggctgagatgtcaaacggtgcccctcaagagctggaaaagaaaagcatccaccttccagagaagagcgtgccttctgagagaggcctctctcccaacaatagtggccacgactccacggacactgacagcaaccatgaagaacgccagaatcacatctatcagcaaaatcacatggtcctgtctcgggcccgcaatgggatgccacttctgaaggaggttccccgctcttacgaactcctcaagcccccgcccatctgcccaagagactccgtcaaagtgatcaacaaggaaggggaggtgatggatgtgtatcggtgtgaccactgccgcgtcctcttcctggactatgtgatgttcacgattcacatgggctgccacggcttccgtgaccctttcgagtgtaacatgtgtggatatcgaagccatgatcggtatgagttctcgtctcacatagccagaggagaacacagagccctgctgaag

SEQ ID NO: 6480 - DNA, 1308 bp, Homo sapiens
  source 1..1308: mol_type = genomic DNA
atggaagatatacaaacaaatgcggaactgaaaagcactcaggagcagtctgtgcccgcagatgattcaatgaaagtgaaagatgaatacagtgaaagagatgagaatgttttaaagtcagaacccatgggaaatgcagaagagcctgaaatcccttacagctattcaagagaatataatgaatatgaaaacattaagttggagagacatgttgtctcattcgatagtagcaggccaaccagtggaaagatgaactgcgatgtgtgtggattatcctgcatcagcttcaatgtcttaatggttcataagcgaagccatactggtgaacgcccattccagtgtaatcagtgtggggcatcttttactcagaaaggtaacctcctccgccacattaaactgcacacaggggaaaaaccttttaagtgtcacctctgcaactatgcatgccaaagaagagatgcgctcacggggcatcttaggacacattctgcaagtgcggaggcaagacacatcaaagcagagatgggaagtgaaagagctctcgtactggacagattagcaagcaatgtggcaaaacgaaaaagctcaatgcctcagaaattcattggtgagaagcgccactgctttgatgtcaactataattcaagttacatgtatgagaaagagagtgagctcatacagacccgcatgatggaccaagccatcaataacgccatcagctatcttggcgccgaagccctgcgccccttggtccagacaccgcctgctcccacctcggagatggttccagttatcagcagcatgtatcccatagccctcacccgggctgagatgtcaaacggtgcccctcaagagctggaaaagaaaagcatccaccttccagagaagagcgtgccttctgagagaggcctctctcccaacaatagtggccacgactccacggacactgacagcaaccatgaagaacgccagaatcacatctatcagcaaaatcacatggtcctgtctcgggcccgcaatgggatgccacttctgaaggaggttccccgctcttacgaactcctcaagcccccgcccatctgcccaagagactccgtcaaagtgatcaacaaggaaggggaggtgatggatgtgtatcggtgtgaccactgccgcgtcctcttcctggactatgtgatgttcacgattcacatgggctgccacggcttccgtgaccctttcgagtgtaacatgtgtggatatcgaagccatgatcggtatgagttctcgtctcacatagccagaggagaacacagagccctgctgaag

SEQ ID NO: 6481 - DNA, 1578 bp, Homo sapiens
  source 1..1578: mol_type = genomic DNA
atggaaacagaggctattgatggctatataacgtgtgacaatgagctttcacccgaaagggagcactccaatatggcaattgacctcacctcaagcacacccaatggacagcatgcctcaccaagtcacatgacaagcacaaattcagtaaagctagaaatgcagagtgatgaagagtgtgacaggaaacccctgagccgtgaagatgagatcaggggccatgatgagggtagcagcctagaagaacccctaattgagagcagcgaggtggctgacaacaggaaagtccaggagcttcaaggcgagggaggaatccggcttccgaatggtaaactgaaatgtgacgtctgtggcatggtttgcattgggcccaatgtgcttatggtacataaaaggagtcacactggtgaacgccccttccactgtaaccagtgtggagcttcttttactcagaagggcaaccttctgagacacataaagttacactctggagagaagccgttcaaatgtcctttctgtagctacgcctgtagaagaagggacgccctcacaggacacctcaggacccattctgtgggtaaacctcacaagtgcaactactgtggacgaagctacaagcagcgcagttcactggaggagcacaaggaacgctgccacaactatctccagaatgtcagcatggaggctgctgggcaggtcatgagtcaccatgtacctcctatggaagattgtaaggaacaagagcctattatggacaacaatatttctctggtgccttttgagagacctgctgtcatagagaagctcacggggaatatgggaaaacgtaaaagctccactccacaaaagtttgtgggggaaaagctcatgcgattcagctacccagatattcactttgatatgaacttaacatatgagaaggaggctgagctgatgcagtctcatatgatggaccaagccatcaacaatgcaatcacctaccttggagctgaggcccttcaccctctgatgcagcacccgccaagcacaatcgctgaagtggccccagttataagctcagcttattctcaggtctatcatccaaataggatagaaagacccattagcagggaaactgctgatagtcatgaaaacaacatggatggccccatctctctcatcagaccaaagagtcgaccccaggaaagagaggcctctcccagcaatagctgcctggattccactgactcagaaagcagccatgatgaccaccagtcctaccaaggacaccctgccttaaatcccaagaggaaacaaagcccagcttacatgaaggaggatgtcaaagctttggatactaccaaggctcctaagggctctctgaaggacatctacaaggtcttcaatggagaaggagaacagattagggccttcaagtgtgagcactgccgagtccttttcctagaccatgtcatgtacaccattcacatgggttgccatggctaccgggacccactggaatgcaacatctgtggctacagaagccaggaccgttatgagttttcatcacacattgttcgaggggagcacacattccac

SEQ ID NO: 6482 - DNA, 1500 bp, Homo sapiens
  source 1..1500: mol_type = genomic DNA
atggaaacagaggctattgatggctatataacgtgtgacaatgagctttcacccgaaagggagcactccaatatggcaattgacctcacctcaagcacacccaatggacagcatgcctcaccaagtcacatgacaagcacaaattcagtaaagctagaaatgcagagtgatgaagagtgtgacaggaaacccctgagccgtgaagatgagatcaggggccatgatgagggtagcagcctagaagaacccctaattgagagcagcgaggtggctgacaacaggaaagtccaggagcttcaaggcgagggaggaatccggcttccgaatggtgaacgccccttccactgtaaccagtgtggagcttcttttactcagaagggcaaccttctgagacacataaagttacactctggagagaagccgttcaaatgtcctttctgtagctacgcctgtagaagaagggacgccctcacaggacacctcaggacccattctgtgggtaaacctcacaagtgcaactactgtggacgaagctacaagcagcgcagttcactggaggagcacaaggaacgctgccacaactatctccagaatgtcagcatggaggctgctgggcaggtcatgagtcaccatgtacctcctatggaagattgtaaggaacaagagcctattatggacaacaatatttctctggtgccttttgagagacctgctgtcatagagaagctcacggggaatatgggaaaacgtaaaagctccactccacaaaagtttgtgggggaaaagctcatgcgattcagctacccagatattcactttgatatgaacttaacatatgagaaggaggctgagctgatgcagtctcatatgatggaccaagccatcaacaatgcaatcacctaccttggagctgaggcccttcaccctctgatgcagcacccgccaagcacaatcgctgaagtggccccagttataagctcagcttattctcaggtctatcatccaaataggatagaaagacccattagcagggaaactgctgatagtcatgaaaacaacatggatggccccatctctctcatcagaccaaagagtcgaccccaggaaagagaggcctctcccagcaatagctgcctggattccactgactcagaaagcagccatgatgaccaccagtcctaccaaggacaccctgccttaaatcccaagaggaaacaaagcccagcttacatgaaggaggatgtcaaagctttggatactaccaaggctcctaagggctctctgaaggacatctacaaggtcttcaatggagaaggagaacagattagggccttcaagtgtgagcactgccgagtccttttcctagaccatgtcatgtacaccattcacatgggttgccatggctaccgggacccactggaatgcaacatctgtggctacagaagccaggaccgttatgagttttcatcacacattgttcgaggggagcacacattccac

SEQ ID NO: 6483 - DNA, 864 bp, Homo sapiens
  source 1..864: mol_type = genomic DNA
atggagcctccggaccagtgtagccagtatatgaccagcttgctcagccctgcagtcgacgacgagaaagaactacaggatatgaatgctatggtgctgtcgcttactgaagaggtcaaagaggaggaagaggatgcacagcctgagcctgagcaaggcacagcagcaggagaaaagttaaagtcggcaggagcccaaggcggagaagaaaaagatggcggcggagaagaaaaagatggcggcggcgccggagttcctggccacctatgggaaggaaacctcgagggcaccagcggcagcgatggcaacgttgaggacagcgaccagagcgagaaggaacctgggcagcagtattcgcgcccacagggcgccgtcggggggctggagcctggcaacgcgcagcagcccaacgtccacgccttcaccccattgcagctgcaggagctggagtgcattttccaacgcgagcagttccccagtgagttcctgcgaaggaggctggcaagaagcatgaatgtgactgaactcgcagtgcagatttggtttgagaatagaagagccaaatggaggagacatcagagggcattaatggcaagaaacatgctgcccttcatggcagtgggccagcctgtcatggtaaccgcagctgaggccataacggcacccttgttcatcagcgggatgagagatgattacttctgggaccacagccattccagcagcctgtgtttccccatgccaccctttcctcctccgtccttgccccttccactcatgcttcttccacctatgccacccgctggccaggctgaatttggcccattcccttttgttatcgtgccttctttcacattccccaatgtc

SEQ ID NO: 6484 - DNA, 1389 bp, Homo sapiens
  source 1..1389: mol_type = genomic DNA
atggaaactgaacagccagaagaaaccttccctaacactgaaaccaatggtgaatttggtaaacgccctgcagaagatatggaagaggaacaagcatttaaaagatctagaaacactgatgagatggttgaattacgcattctgcttcagagcaagaatgctggggcagtgattggaaaaggaggcaagaatattaaggctctccgtacagactacaatgccagtgtttcagtcccagacagcagtggccccgagcgcatattgagtatcagtgctgatattgaaacaattggagaaattctgaagaaaatcatccctaccttggaagagggcctgcagttgccatcacccactgcaaccagccagctcccgctcgaatctgatgctgtggaatgcttaaattaccaacactataaaggaagtgactttgactgcgagttgaggctgttgattcatcagagtctagcaggaggaattattggggtcaaaggtgctaaaatcaaagaacttcgagagaacactcaaaccaccatcaagcttttccaggaatgctgtcctcattccactgacagagttgttcttattggaggaaaacccgatagggttgtagagtgcataaagatcatccttgatcttatatctgagtctcccatcaaaggacgtgcacagccttatgatcccaatttttacgatgaaacctatgattatggtggttttacaatgatgtttgatgaccgtcgcggacgcccagtgggatttcccatgcggggaagaggtggttttgacagaatgcctcctggtcggggtgggcgtcccatgcctccatctagaagagattatgatgatatgagccctcgtcgaggaccacctccccctcctcccggacgaggcggccggggtggtagcagagctcggaatcttcctcttcctccaccaccaccacctagagggggagacctcatggcctatgacagaagagggagacctggagaccgttacgacggcatggttggtttcagtgctgatgaaacttgggactctgcaatagatacatggagcccatcagaatggcagatggcttatgaaccacagggtggctccggatatgattattcctatgcagggggtcgtggctcatatggtgatcttggtggacctattattactacacaagtaactattcccaaagatttggctggatctattattggcaaaggtggtcagcggattaaacaaatccgtcatgagtcgggagcttcgatcaaaattgatgagcctttagaaggatccgaagatcggatcattaccattacaggaacacaggaccagatacagaatgcacagtatttgctgcagaacagtgtgaagcagtattctggaaagtttttc

SEQ ID NO: 6485 - DNA, 501 bp, Homo sapiens
  source 1..501: mol_type = genomic DNA
atggaccgcggccgcccagcgggcagccccctcagcgccagcgccgagcccgcgcccctggccgccgccatccgcgactcgcgtcccgggcggaccgggccggggccggcgggccctgggggcggctcgcgttccgggagcgggcggccggcggcggcgaatgcggcgcgggagcgcagccgggtgcagaccctgcggcacgctttcctggagctgcagcgcacgctgccgtccgtgccgcccgacaccaagctgtccaagctggacgtgctgctgctggccaccacctacatcgcgcatctcacccgcagcctgcaggacgacgccgaggcgccggcggacgccgggttgggcgccctgcgcggcgatggctacctgcacccggtcaagaaatggcccatgcgatcaagattgtacatcggtgctactggtcagtttctgaagcattctgtttctggagaaaaaacaaatcatgacaacactccaacagactcacagcct

SEQ ID NO: 6486 - DNA, 5814 bp, Homo sapiens
  source 1..5814: mol_type = genomic DNA
atgcagtcctttcgggagcaaagcagttaccacggaaaccagcaaagctacccacaggaggtacacggctcatcccggctagaagagttcagccctcgtcaggcccagatgttccagaattttggaggtacaggtggcagtagtggcagcagtggcagtggcagtggtggtggacgacgaggagcagcagctgctgcggcagcgatggctagcgagacctctggccatcaaggttaccagggtttcaggaaagaggctggagatttttactacatggcaggcaacaaagaccccgtgactacaggaaccccacagcctcctcagcgaaggccttctgggcctgtgcagagctatggacccccccaggggagcagctttggcaatcagtatgggagtgagggtcatgtgggccagtttcaagcacagcactctggccttggcggtgtgtcacattatcagcaggattacactgggcctttctctccagggagtgctcagtaccaacagcaggcttccagccagcagcagcagcagcaagtccagcagttgagacaacagctttaccagtcccatcagcccctgccacaggccactggccaaccagcatccagctcatcccatctacagccaatgcagcggccctcaactctgccatcctctgctgctggttaccagttaagagtgggtcagtttggccaacactatcagtcttctgcttcctcctcctcctcctcctccttcccttcaccacagcgttttagccagtctggacagagctatgatggcagttacaatgtgaatgctggatctcagtatgaaggacacaatgtgggttctaatgcacaggcttatggaacacaatccaattacagctatcagcctcaatctatgaagaattttgaacaggcaaagattccacaagggacccaacaggggcagcagcagcagcaaccgcagcaacaacaacacccttctcagcatgtgatgcagtatactaacgctgccaccaagctgcccctgcaaagccaagtggggcagtacaaccagcctgaggttcctgtgaggtcccccatgcagtttcaccagaacttcagccccatttctaacccttctccagctgcctctgtggttcagtctccaagctgtagttctaccccatctcctctcatgcagactggggagaatctccagtgtgggcaaggcagtgtgcctatgggttccagaaacagaattttacagttaatgcctcaactcagtccaaccccatcaatgatgcccagtcctaattctcatgctgcaggcttcaaagggtttggactagaaggggtaccagaaaagcgactgacagatcctgggttgagtagtttgagtgctctgagtactcaagtggccaatcttcctaacactgtccagcacatgttactttctgatgccctgactcctcagaagaagacctccaagaggccctcatcttccaagaaagcagatagctgcacaaattctgaaggctcctcacaacctgaagaacagctgaagtcccctatggcagagtcattagatggaggctgctccagcagttcagaggatcaaggcgagagagtgcggcaactaagtggccagagcaccagctctgacaccacctacaagggtggagcctctgagaaagctggctcctcaccggcacaaggtgctcagaatgaaccccccagactcaatgctagtcctgccgcaagagaagaggccacctcaccaggcgctaaggacatgccattgtcatccgacgggaacccaaaggttaatgagaagactgttggggtgattgtctcccgggaagccatgacaggtcgggtagaaaagcctggtggacaagataaaggctcccaagaggatgatcctgcagccactcaaaggccacctagcaatggtggggcaaaggaaaccagtcatgcatcacttccccagccagagcctccaggaggaggagggagcaaaggaaacaagaatggcgataacaactccaaccataatggagaaggaaatggccagagtggccactctgcagcgggccctggttttacgagcagaactgagcctagcaaatctcctggaagtctgcgctatagttacaaagatagtttcgggtcagccgtgccacgaaatgtcagtggctttcctcagtatcctacagggcaagaaaagggagatttcactggccatggggaacgaaagggtagaaatgaaaaattcccaagcctcctgcaggaagtgcttcagggttaccaccaccaccctgacaggagatattctaggagtactcaagagcatcaggggatggctggtagcctagaaggaaccacaaggcccaatgtcttggttagtcaaaccaatgaattagctagcaggggccttctgaacaaaagcattgggtctctattagaaaatccccactggggcccctgggaaaggaaatcaagcagcacagctcctgaaatgaaacagatcaatttgactgactatccaattcccagaaagtttgaaatagagcctcagtcatcagcacatgagcctgggggttccctctctgaaagaagatcagtgatctgtgatatttctccactaagacagattgtcagggacccaggggctcactcactgggacacatgagtgccgacaccagaattgggaggaatgaccgtctcaatccaactttaagtcagtcggtcattcttcctggtggtttggtgtccatggaaaccaagctgaaatcccagagcgggcagataaaagaggaagactttgaacagtctaaatctcaagctagtttcaacaacaagaaatctggagaccactgccatcctcctagcatcaagcatgagtcttaccgcggcaatgccagccctggagcagcaacccatgattccctttcagactatggcccgcaagacagcagacccacgccaatgcggcgggtccctggcagagttggtggtcgggagggcatgaggggtcggtccccttctcaatatcatgactttgcagaaaaattgaaaatgtctcctgggcggagcagaggcccagggggagaccctcatcacatgaatccacacatgaccttttcagagagggctaaccggagttctttacacactcccttttctcccaactcagaaaccctggcctctgcttatcatgcaaatactcgggctcatgcttatggggaccctaacgcaggtttgaattctcagctgcattataagagacagatgtaccaacagcaaccagaggagtataaagactggagcagcggttctgctcagggagtaattgctgcagcacagcacaggcaggaggggccacggaagagtccaaggcagcagcagtttcttgacagagtacggagccctctgaaaaatgacaaagatggtatgatgtatggcccaccagtggggacttaccatgaccccagtgcccaggaggctgggcgctgcctaatgtctagtgatggtctgcctaacaagggcatggaattaaagcatggctcccagaagttacaagaatcctgttgggatctttctcggcaaacttctccagccaaaagcagcggtcctccaggaatgtccagtcaaaaaaggtatgggccgccccatgagactgatggacatggactagctgaggctacacagtcatccaaacctggtagtgttatgctgagacttccaggccaggaggatcattcttctcaaaaccccttaatcatgaggaggcgtgttcgttcttttatctctcccattcccagtaagagacagtcacaagatgtaaagaacagtagcactgaagataaaggtcgcctccttcactcatcaaaagaaggcgctgataaagcattcaattcctatgcccatctttctcacagtcaggatatcaagtctatccctaagagagattcctccaaggaccttccaagtccagatagtagaaactgccctgctgttaccctcacaagccctgctaagaccaaaatactgcccccacggaaaggacggggattgaaattggaagctatagttcagaagattacatccccaaatattaggaggagcgcatcttcgaacagtgcggaggctgggggagacacggttacgcttgatgatatactgtctttgaagagtggtcctcctgaaggtgggagtgttgctgttcaggatgctgacatagagaagagaaaaggtgaggtggcttcggacctagtcagtccagcaaaccaggagttgcacgtagagaaacctcttccaaggtcttcagaagagtggcgtggcagcgtggatgacaaagtgaagacagagacacatgcagaaacagttactgccggaaaggaaccccctggtgccatgacatccacaacctcacagaagcctggtagtaaccaagggagaccagatggttccctgggtggaacagcacctttaatctttccagactcaaagaatgtacctccagtgggcatattggcccctgaggcaaaccccaaggctgaagagaaggagaacgatacagtgacgatttcaccgaagcaagagggtttccctccaaagggatatttcccatcaggaaagaagaaggggagacccattggtagtgtgaataagcaaaagaaacagcagcagccaccgcctccaccccctcagcccccacagataccagaaggttctgcagatggagagccaaagccaaaaaaacagaggcaaaggagggagagaaggaagcctggggcccagccgaggaagcgaaaaaccaaacaagcagttcccattgtggaaccccaagaacctgagatcaaactaaaatatgccacccagccactggataaaactgatgccaagaacaagtctttttacccttacatccatgtagtaaataagtgtgaacttggagccgtttgtacaatcatcaatgctgaggaagaagaacagaccaaattagtgaggggcaggaagggtcagaggtcactgacccctccacctagcagcactgaaagcaaggcgctcccggcctcgtcctttatgctgcagggacctgttgtgacagagtcttcggttatggggcacctggtttgctgtctgtgtggcaagtgggccagttaccggaacatgggtgacctctttggacctttttatccccaagattatgcagccactctcccgaagaatccacctcctaagagggccacagaaatgcagagcaaagttaaggtacggcacaaaagtgcttctaatggctccaagacggacactgaggaggaggaagagcagcagcagcagcagaaggagcagagaagcctggccgcacaccccaggtttaagcggcgccaccgctcggaagactgtggtggaggccctcggtccctgtccagggggctcccttgtaaaaaagcagccactgagggcagcagtgaaaagactgttttggactcgaagccctccgtgcccaccacttcagaaggtggccctgagctggagttacaaatccctgaactacctcttgacagcaatgaattttgggtccatgagggttgtattctctgggccaatggaatctacctggtttgtggcaggctctatggcctgcaggaagcgctggaaatagccagagagatgaaatgttcccactgccaggaggcaggcgccaccttgggctgctacaacaaaggctgctccttccgataccattacccgtgtgccattgatgcagattgtttgctacatgaggagaacttctcggtgaggtgccctaagcacaaggtgagactgtggaga

SEQ ID NO: 6487 - DNA, 5880 bp, Homo sapiens
  source 1..5880: mol_type = genomic DNA
atgcagtcctttcgggagcaaagcagttaccacggaaaccagcaaagctacccacaggaggtacacggctcatcccggctagaagagttcagccctcgtcaggcccagatgttccagaattttggaggtacaggtggcagtagtggcagcagtggcagtggcagtggtggtggacgacgaggagcagcagctgctgcggcagcgatggctagcgagacctctggccatcaaggttaccagggtttcaggaaagaggctggagatttttactacatggcaggcaacaaagaccccgtgactacaggaaccccacagcctcctcagcgaaggccttctgggcctgtgcagagctatggacccccccaggggagcagctttggcaatcagtatgggagtgagggtcatgtgggccagtttcaagcacagcactctggccttggcggtgtgtcacattatcagcaggattacactgggcctttctctccagggagtgctcagtaccaacagcaggcttccagccagcagcagcagcagcaagtccagcagttgagacaacagctttaccagtcccatcagcccctgccacaggccactggccaaccagcatccagctcatcccatctacagccaatgcagcggccctcaactctgccatcctctgctgctggttaccagttaagagtgggtcagtttggccaacactatcagtcttctgcttcctcctcctcctcctcctccttcccttcaccacagcgttttagccagtctggacagagctatgatggcagttacaatgtgaatgctggatctcagtatgaaggacacaatgtgggttctaatgcacaggcttatggaacacaatccaattacagctatcagcctcaatctatgaagaattttgaacaggcaaagattccacaagggacccaacaggggcagcagcagcagcaaccgcagcaacaacaacacccttctcagcatgtgatgcagtatactaacgctgccaccaagctgcccctgcaaagccaagtggggcagtacaaccagcctgaggttcctgtgaggtcccccatgcagtttcaccagaacttcagccccatttctaacccttctccagctgcctctgtggttcagtctccaagctgtagttctaccccatctcctctcatgcagactggggagaatctccagtgtgggcaaggcagtgtgcctatgggttccagaaacagaattttacagttaatgcctcaactcagtccaaccccatcaatgatgcccagtcctaattctcatgctgcaggcttcaaagggtttggactagaaggggtaccagaaaagcgactgacagatcctgggttgagtagtttgagtgctctgagtactcaagtggccaatcttcctaacactgtccagcacatgttactttctgatgccctgactcctcagaagaagacctccaagaggccctcatcttccaagaaagcagatagctgcacaaattctgaaggctcctcacaacctgaagaacagctgaagtcccctatggcagagtcattagatggaggctgctccagcagttcagaggatcaaggcgagagagtgcggcaactaagtggccagagcaccagctctgacaccacctacaagggtggagcctctgagaaagctggctcctcaccggcacaaggtgctcagaatgaaccccccagactcaatgctagtcctgccgcaagagaagaggccacctcaccaggcgctaaggacatgccattgtcatccgacgggaacccaaaggttaatgagaagactgttggggtgattgtctcccgggaagccatgacaggtcgggtagaaaagcctggtggacaagataaaggctcccaagaggatgatcctgcagccactcaaaggccacctagcaatggtggggcaaaggaaaccagtcatgcatcacttccccagccagagcctccaggaggaggagggagcaaaggaaacaagaatggcgataacaactccaaccataatggagaaggaaatggccagagtggccactctgcagcgggccctggttttacgagcagaactgagcctagcaaatctcctggaagtctgcgctatagttacaaagatagtttcgggtcagccgtgccacgaaatgtcagtggctttcctcagtatcctacagggcaagaaaagggagatttcactggccatggggaacgaaagggtagaaatgaaaaattcccaagcctcctgcaggaagtgcttcagggttaccaccaccaccctgacaggagatattctaggagtactcaagagcatcaggggatggctggtagcctagaaggaaccacaaggcccaatgtcttggttagtcaaaccaatgaattagctagcaggggccttctgaacaaaagcattgggtctctattagaaaatccccactggggcccctgggaaaggaaatcaagcagcacagctcctgaaatgaaacagatcaatttgactgactatccaattcccagaaagtttgaaatagagcctcagtcatcagcacatgagcctgggggttccctctctgaaagaagatcagtgatctgtgatatttctccactaagacagattgtcagggacccaggggctcactcactgggacacatgagtgccgacaccagaattgggaggaatgaccgtctcaatccaactttaagtcagtcggtcattcttcctggtggtttggtgtccatggaaaccaagctgaaatcccagagcgggcagataaaagaggaagactttgaacagtctaaatctcaagctagtttcaacaacaagaaatctggagaccactgccatcctcctagcatcaagcatgagtcttaccgcggcaatgccagccctggagcagcaacccatgattccctttcagactatggcccgcaagacagcagacccacgccaatgcggcgggtccctggcagagttggtggtcgggagggcatgaggggtcggtccccttctcaatatcatgactttgcagaaaaattgaaaatgtctcctgggcggagcagaggcccagggggagaccctcatcacatgaatccacacatgaccttttcagagagggctaaccggagttctttacacactcccttttctcccaactcagaaaccctggcctctgcttatcatgcaaatactcgggctcatgcttatggggaccctaacgcaggtttgaattctcagctgcattataagagacagatgtaccaacagcaaccagaggagtataaagactggagcagcggttctgctcagggagtaattgctgcagcacagcacaggcaggaggggccacggaagagtccaaggcagcagcagtttcttgacagagtacggagccctctgaaaaatgacaaagatggtatgatgtatggcccaccagtggggacttaccatgaccccagtgcccaggaggctgggcgctgcctaatgtctagtgatggtctgcctaacaagggcatggaattaaagcatggctcccagaagttacaagaatcctgttgggatctttctcggcaaacttctccagccaaaagcagcggtcctccaggaatgtccagtcaaaaaaggtatgggccgccccatgagactgatggacatggactagctgaggctacacagtcatccaaacctggtagtgttatgctgagacttccaggccaggaggatcattcttctcaaaaccccttaatcatgaggaggcgtgttcgttcttttatctctcccattcccagtaagagacagtcacaagatgtaaagaacagtagcactgaagataaaggtcgcctccttcactcatcaaaagaaggcgctgataaagcattcaattcctatgcccatctttctcacagtcaggatatcaagtctatccctaagagagattcctccaaggaccttccaagtccagatagtagaaactgccctgctgttaccctcacaagccctgctaagaccaaaatactgcccccacggaaaggacggggattgaaattggaagctatagttcagaagattacatccccaaatattaggaggagcgcatcttcgaacagtgcggaggctgggggagacacggttacgcttgatgatatactgtctttgaagagtggtcctcctgaaggtgggagtgttgctgttcaggatgctgacatagagaagagaaaaggtgaggtggcttcggacctagtcagtccagcaaaccaggagttgcacgtagagaaacctcttccaaggtcttcagaagagtggcgtggcagcgtggatgacaaagtgaagacagagacacatgcagaaacagttactgccggaaaggaaccccctggtgccatgacatccacaacctcacagaagcctggtagtaaccaagggagaccagatggttccctgggtggaacagcacctttaatctttccagactcaaagaatgtacctccagtgggcatattggcccctgaggcaaaccccaaggctgaagagaaggagaacgatacagtgacgatttcaccgaagcaagagggtttccctccaaagggatatttcccatcaggaaagaagaaggggagacccattggtagtgtgaataagcaaaagaaacagcagcagccaccgcctccaccccctcagcccccacagataccagaaggttctgcagatggagagccaaagccaaaaaaacagaggcaaaggagggagagaaggaagcctggggcccagccgaggaagcgaaaaaccaaacaagcagttcccattgtggaaccccaagaacctgagatcaaactaaaatatgccacccagccactggataaaactgatgccaagaacaagtctttttacccttacatccatgtagtaaataagtgtgaacttggagccgtttgtacaatcatcaatgctgaggaagaagaacagaccaaattagtgaggggcaggaagggtcagaggtcactgacccctccacctagcagcactgaaagcaaggcgctcccggcctcgtcctttatgctgcagggacctgttgtgacagagtcttcggttatggggcacctggtttgctgtctgtgtggcaagtgggccagttaccggaacatgggtgacctctttggacctttttatccccaagattatgcagccactctcccgaagaatccacctcctaagagggccacagaaatgcagagcaaagttaaggtacggcacaaaagtgcttctaatggctccaagacggacactgaggaggaggaagagcagcagcagcagcagaaggagcagagaagcctggccgcacaccccaggtttaagcggcgccaccgctcggaagactgtggtggaggccctcggtccctgtccagggggctcccttgtaaaaaagcagccactgagggcagcagtgaaaagactgttttggactcgaagccctccgtgcccaccacttcagaaggtggccctgagctggagttacaaatccctgaactacctcttgacagcaatgaattttgggtccatgagggttgtattctctgggccaatggaatctacctggtttgtggcaggctctatggcctgcaggaagcgctggaaatagccagagagatgaaatgttcccactgccaggaggcaggcgccaccttgggctgctacaacaaaggctgctccttccgataccattacccgtgtgccattgatgcagattgtttgctacatgaggagaacttctcggtgaggtgccctaagcacaagcctccccttccgtgccctctcccccccttgcagaacaagaccgcgaaaggcagcctcagcacagagcagtcggagcggggg

SEQ ID NO: 6488 - DNA, 537 bp, Homo sapiens
  source 1..537: mol_type = genomic DNA
atgtccaccggctccctcagcgatgtggaggaccttcaagaggtggagatgttggaatgtgacgggttgaaaatggattcgaacaaggaatttgtgacttccaacgagagcaccgaggagagctccaactgcgagaatgggtctccccagaagggccgcggcggcctgggcaagaggaggaaggcgcccaccaagaagagccccctgagcggggtcagccaggaggggaagcaggtccagcgcaacgccgccaacgcgcgagagcgggcccgcatgcgagtgctgagcaaggccttctccagactcaagaccaccctgccctgggtgccccccgacaccaagctctccaagctggacacgctcaggctggcgtccagctacatcgcccacttgaggcagatcctggctaacgacaaatacgagaacgggtacattcacccggtcaacctgacgtggccctttatggtggccgggaaacccgagagtgacctgaaagaagtggtgaccgcgagccgcttatgtggaaccaccgcgtcc

SEQ ID NO: 6489 - DNA, 318 bp, Homo sapiens
  source 1..318: mol_type = genomic DNA
atgagcgcacgcggtgagggcgcggggcagccgtccacttcagcccagggacaacctgccgccccagcgcctcagaagagaggacgcggccgccccaggaagcagcagcaagaaccaaccggtgagccctctcctaagagacccaggggaagacccaaaggcagcaaaaacaagagtccctctaaagcagctcaaaagaaagcagaagccactggagaaaaacggccaagaggcagacctaggaaatgggacaatctactaccaagaaccagctccaagaagaaaacatctctgggaaacagtaccaaaaggagtcac

SEQ ID NO: 6490 - DNA, 354 bp, Homo sapiens
  source 1..354: mol_type = genomic DNA
atgagcgcacgcggtgagggcgcggggcagccgtccacttcagcccagggacaacctgccgccccagcgcctcagaagagaggacgcggccgccccaggaagcagcagcaagaaccaaccggtgagccctctcctaagagacccaggggaagacccaaaggcagcaaaaacaagagtccctctaaagcagctcaaaagaaagcagaagccactggagaaaaacggccaagaggcagacctaggaaatggccacaacaagttgttcagaagaagcctgctcaggtcaatgttgccttgcctgggaaggaccacccgggcaatcttatatatctactgttctctaaaaatgccact

SEQ ID NO: 6491 - DNA, 327 bp, Homo sapiens
  source 1..327: mol_type = genomic DNA
atgagcgcacgcggtgagggcgcggggcagccgtccacttcagcccagggacaacctgccgccccagcgcctcagaagagaggacgcggccgccccaggaagcagcagcaagaaccaaccggtgagccctctcctaagagacccaggggaagacccaaaggcagcaaaaacaagagtccctctaaagcagctcaaaagaaagcagaagccactggagaaaaacggccaagaggcagacctaggaaatggccacaacaagttgttcagaagaagcctgctcaggaggaaactgaagagacatcctcacaagagtctgccgaagaggac

SEQ ID NO: 6492 - DNA, 441 bp, Homo sapiens
  source 1..441: mol_type = genomic DNA
atgagcgcacgcggtgagggcgcggggcagccgtccacttcagcccagggacaacctgccgccccagcgcctcagaagagaggacgcggccgccccaggaagcagcagcaagaaccaaccggtgagccctctcctaagagacccaggggaagacccaaaggcagcaaaaacaagagtccctctaaagcagctcaaaagaaagcagaagccactggagaaaaacggccaagaggcagacctaggaaatgggctggagtgcagtggtacaatctcggctcattgcaacctccacctcccaggttcaagcaattctcctgcctcaggctcctgagtagttgggattacaggcacccaccaccacacccagctaatttttgtatttttagtagagacagggtttcaccatgttggccaggctggtctcgaactcctgacctcagg

SEQ ID NO: 6493 - DNA, 270 bp, Homo sapiens
  source 1..270: mol_type = genomic DNA
atgagcgcacgcggtgagggcgcggggcagccgtccacttcagcccagggacaacctgccgccccagcgcctcagaagagaggacgcggccgccccaggaagcagcagcaagaaccaaccggtgagccctctcctaagagacccaggggaagacccaaaggcagcaaaaacaagagtccctctaaagcagctcaaaagaaagcagaagccactggagaaaaacggccaagaggcagacctaggaaatgggaggagttttacattgcagct

SEQ ID NO: 6494 - DNA, 714 bp, Homo sapiens
  source 1..714: mol_type = genomic DNA
atgagacagagcggcgcctcccagcccctgctgatcaacatgtacctgccagatcccgtcggagacggtctcttcaaggacgggaagaacccgagctgggggccgctgagccccgcggttcagaaaggcagcggacagatccagctgtggcagtttctgctggagctgctggctgaccgcgcgaacgccggctgcatcgcgtgggagggcggtcacggcgagttcaagctcacggacccggacgaggtggcgcggcggtggggcgagcgcaagagcaagcccaacatgaactacgacaagctgagccgcgccctgcgctactactacgacaagaacatcatgagcaaggtgcatggcaagcgctacgcctaccgcttcgacttccagggcctggcgcaggcctgccagccgccgcccgcgcacgctcatgccgccgccgcagctgctgccgccgccgcggccgcccaggacggcgcgctctacaagctgcccgccggcctcgccccgctgcccttccccggcctctccaaactcaacctcatggccgcctcggccggggtcgcgcccgccggcttctcctactggccgggcccgggccccgccgccaccgctgccgccgccaccgccgcgctctaccccagtcccagcttgcagcccccgcccgggcccttcggggccgtggccgcagcctcgcacttggggggccattaccac

SEQ ID NO: 6495 - DNA, 2103 bp, Homo sapiens
  source 1..2103: mol_type = genomic DNA
atgcagctggtgctgaagatggattcgagcccagacaatgacagctggttggaggatcaatgggagcgctggctcacccatgacatcagcctggaggagtttgaggatgaagacctctcggagatcactgatgagtgtggcatcagcttacagtgcaaagacaccctgtccttacggcccccgcgcgccgggctgctctctgcgggcggcggcggcgcggggagccggttgcaggccgagatgctgcagatggacctgatcgacgcgacgggggacactcccggggccgaggacgacgaggaggacgacgacgaggagcgcgcggcccggcggccgggagcggggccgcccaaggccgagtccggccaggagccggcgtcccgcggccagggccagagccaaggccagagccagggcccgggcagcggggacacgtaccggcccaagcggcccaccacgctcaacctctttccgcaggtgccgcggtctcaggacacactgaataataattctctgggcaaaaagcacagttggcaggatcgggtgtctcgatcatcctcacccctgaagacaggggagcagacaccaccgcatgaacacatctgcctgagcgatgagctgcccccccagagcggccccgcccccaccacagatcgaggcacctccaccgacagcccttgccgccgcagcacagccacccagatggcacctccgggtggtccccctgctgccccgcctgggggtcggggccactcgcatcgagaccgaatccactaccaggccgatgtgcgactagaggccactgaggagatctacctgaccccagtgcagaggcccccagacgctgcagagcccacctccgccttcctgccgcccactgagagccggatgtcagtcagctccgatccagaccctgccgcctacccctccacggcagggcggccgcacccctccatcagtgaagaggaagagggcttcgactgcctgtcgtccccagagcgggctgagcccccaggcggagggtggcgggggagcctgggggagccgccgccacctccacgggcctctctgagctcggacaccagcgccctgtcctatgactctgtcaagtacacgctggtggtagatgagcatgcacagctggagctggtgagcctgcggccgtgcttcggagactacagtgacgagagtgactctgccaccgtctatgacaactgtgcctccgtctcctcgccctatgagtcggccatcggagaggaatatgaggaggccccgcggccccagccccctgcctgcctctccgaggactccacgcctgatgaacccgacgtccatttctccaagaaattcctgaacgtcttcatgagtggccgctcccgctcctccagtgctgagtccttcgggctgttctcctgcatcatcaacggggaggagcaggagcagacccaccgggccatattcaggtttgtgcctcgacacgaagacgaacttgagctggaagtggatgaccctctgctagtggagctccaggctgaagactactggtacgaggcctacaacatgcgcactggtgcccggggtgtctttcctgcctattacgccatcgaggtcaccaaggagcccgagcacatggcagccctggccaaaaacagtgactgggtggaccagttccgggtgaagttcctgggctcagtccaggttccctatcacaagggcaatgacgtcctctgtgctgctatgcaaaagattgccaccacccgccggctcaccgtgcactttaacccgccctccagctgtgtcctggagatcagcgtgcggggtgtgaagataggcgtcaaggccgatgactcccaggaggccaaggggaataaatgtagccactttttccagttaaaaaacatctctttctgcggatatcatccaaagaacaacaagtactttgggttcatcaccaagcaccccgccgaccaccggtttgcctgccacgtctttgtgtctgaagactccaccaaagccctggcagagtccgtggggagagcattccagcagttctacaagcagtttgtggagtacacctgccccacagaagatatctacctggag

SEQ ID NO: 6496 - DNA, 2133 bp, Homo sapiens
  source 1..2133: mol_type = genomic DNA
atggcggagcgagaaagcggcggcctgggagggggggccgcgtccccgcccgccgcctccccgttcctggggctgcacatcgcttcgcctcccaatttcaggctcacccatgacatcagcctggaggagtttgaggatgaagacctctcggagatcactgatgagtgtggcatcagcttacagtgcaaagacaccctgtccttacggcccccgcgcgccgggctgctctctgcgggcggcggcggcgcggggagccggttgcaggccgagatgctgcagatggacctgatcgacgcgacgggggacactcccggggccgaggacgacgaggaggacgacgacgaggagcgcgcggcccggcggccgggagcggggccgcccaaggccgagtccggccaggagccggcgtcccgcggccagggccagagccaaggccagagccagggcccgggcagcggggacacgtaccggcccaagcggcccaccacgctcaacctctttccgcaggtgccgcggtctcaggacacactgaataataattctctgggcaaaaagcacagttggcaggatcgggtgtctcgatcatcctcacccctgaagacaggggagcagacaccaccgcatgaacacatctgcctgagcgatgagctgcccccccagagcggccccgcccccaccacagatcgaggcacctccaccgacagcccttgccgccgcagcacagccacccagatggcacctccgggtggtccccctgctgccccgcctgggggtcggggccactcgcatcgagaccgaatccactaccaggccgatgtgcgactagaggccactgaggagatctacctgaccccagtgcagaggcccccagacgctgcagagcccacctccgccttcctgccgcccactgagagccggatgtcagtcagctccgatccagaccctgccgcctacccctccacggcagggcggccgcacccctccatcagtgaagaggaagagggcttcgactgcctgtcgtccccagagcgggctgagcccccaggcggagggtggcgggggagcctgggggagccgccgccacctccacgggcctctctgagctcggacaccagcgccctgtcctatgactctgtcaagtacacgctggtggtagatgagcatgcacagctggagctggtgagcctgcggccgtgcttcggagactacagtgacgagagtgactctgccaccgtctatgacaactgtgcctccgtctcctcgccctatgagtcggccatcggagaggaatatgaggaggccccgcggccccagccccctgcctgcctctccgaggactccacgcctgatgaacccgacgtccatttctccaagaaattcctgaacgtcttcatgagtggccgctcccgctcctccagtgctgagtccttcgggctgttctcctgcatcatcaacggggaggagcaggagcagacccaccgggccatattcaggtttgtgcctcgacacgaagacgaacttgagctggaagtggatgaccctctgctagtggagctccaggctgaagactactggtacgaggcctacaacatgcgcactggtgcccggggtgtctttcctgcctattacgccatcgaggtcaccaaggagcccgagcacatggcagccctggccaaaaacagtgactgggtggaccagttccgggtgaagttcctgggctcagtccaggttccctatcacaagggcaatgacgtcctctgtgctgctatgcaaaagattgccaccacccgccggctcaccgtgcactttaacccgccctccagctgtgtcctggagatcagcgtgcggggtgtgaagataggcgtcaaggccgatgactcccaggaggccaaggggaataaatgtagccactttttccagttaaaaaacatctctttctgcggatatcatccaaagaacaacaagtactttgggttcatcaccaagcaccccgccgaccaccggtttgcctgccacgtctttgtgtctgaagactccaccaaagccctggcagagtccgtggggagagcattccagcagttctacaagcagtttgtggagtacacctgccccacagaagatatctacctggag

SEQ ID NO: 6497 - DNA, 483 bp, Homo sapiens
  source 1..483: mol_type = genomic DNA
atgaaggcggtgagcccggtgcgcccctcgggccgcaaggcgccgtcgggctgcggcggcggggagctggcgctgcgctgcctggccgagcacggccacagcctgggtggctccgcagccgcggcggcggcggcggcggcagcgcgctgtaaggcggccgaggcggcggccgacgagccggcgctgtgcctgcagtgcgatatgaacgactgctatagccgcctgcggaggctggtgcccaccatcccgcccaacaagaaagtcagcaaagtggagatcctgcagcacgttatcgactacatcctggacctgcagctggcgctggagacgcacccggccctgctgaggcagccaccaccgcccgcgccgccacaccacccggccgggacctgtccagccgcgccgccgcggaccccgctcactgcgctcaacaccgacccggccggcgcggtgaacaagcagggcgacagcattctgtgccgc

SEQ ID NO: 6498 - DNA, 357 bp, Homo sapiens
  source 1..357: mol_type = genomic DNA
atgaaggcgctgagcccggtgcgcggctgctacgaggcggtgtgctgcctgtcggaacgcagtctggccatcgcccggggccgagggaagggcccggcagctgaggagccgctgagcttgctggacgacatgaaccactgctactcccgcctgcgggaactggtacccggagtcccgagaggcactcagcttagccaggtggaaatcctacagcgcgtcatcgactacattctcgacctgcaggtagtcctggccgagccagcccctggaccccctgatggcccccaccttcccatccagacagccgagctcactccggaacttgtcatctccaacgacaaaaggagcttttgccac

SEQ ID NO: 6499 - DNA, 447 bp, Homo sapiens
  source 1..447: mol_type = genomic DNA
atgaaagtcgccagtggcagcaccgccaccgccgccgcgggccccagctgcgcgctgaaggccggcaagacagcgagcggtgcgggcgaggtggtgcgctgtctgtctgagcagagcgtggccatctcgcgctgcgccgggggcgccggggcgcgcctgcctgccctgctggacgagcagcaggtaaacgtgctgctctacgacatgaacggctgttactcacgcctcaaggagctggtgcccaccctgccccagaaccgcaaggtgagcaaggtggagattctccagcacgtcatcgactacatcagggaccttcagttggagctgaactcggaatccgaagttggaacccccgggggccgagggctgccggtccgggctccgctcagcaccctcaacggcgagatcagcgccctgacggccgaggtgagatccagatccgaccac

SEQ ID NO: 6500 - DNA, 465 bp, Homo sapiens
  source 1..465: mol_type = genomic DNA
atgaaagtcgccagtggcagcaccgccaccgccgccgcgggccccagctgcgcgctgaaggccggcaagacagcgagcggtgcgggcgaggtggtgcgctgtctgtctgagcagagcgtggccatctcgcgctgcgccgggggcgccggggcgcgcctgcctgccctgctggacgagcagcaggtaaacgtgctgctctacgacatgaacggctgttactcacgcctcaaggagctggtgcccaccctgccccagaaccgcaaggtgagcaaggtggagattctccagcacgtcatcgactacatcagggaccttcagttggagctgaactcggaatccgaagttggaacccccgggggccgagggctgccggtccgggctccgctcagcaccctcaacggcgagatcagcgccctgacggccgaggcggcatgcgttcctgcggacgatcgcatcttgtgtcgc

SEQ ID NO: 6501 - DNA, 3423 bp, Homo sapiens
  source 1..3423: mol_type = genomic DNA
atggacgacagcggcgagctgggtggtctggagaccatggagaccctcacggagctgggcgacgagctgaccctgggagacatcgacgagatgctgcaatttgtcagtaatcaagtgggagagttccctgacttgttttcagaacagctgtgtagctcctttcctggcagtggtggtagtggtagcagcagcggcagcagtggcagcagcagcagcagcagcaatggcaggggcagcagcagcggagctgtggacccttcagtgcaacggtcattcacccaggtcacattaccttccttctctccctcggcggcctccccacaggctccaactctgcaagtcaaggtttctcccacctcagttcccaccacacccagggcaactcctattcttcagccccgcccccagccccagcctcaacctcaaactcagctgcaacaacagacggtaatgatcacgccaacattcagcaccactccgcagacgaggatcatccagcagcctttgatataccagaatgcagctactagctttcaagtccttcagcctcaagtccaaagcctggtgacatcctcccaggtacagccggtcaccattcagcagcaggtgcagacagtacaggcccagcgggtgctgacacaaacggccaatggcacgctgcagacccttgccccggctacggtgcagacagttgctgcgccacaggtgcagcaggtcccggtcctggtccagcctcagatcatcaagacagattcccttgttttgaccacactgaagacagatggcagccctgttatggctgcggtccagaacccggccctcaccgccctcaccacccctatccagacggctgcccttcaagtaccaaccctggtgggcagcagtgggaccattctgaccacaatgcctgtaatgatggggcaagagaaagtgcccattaagcaggtacctgggggagtcaagcagcttgagccccccaaagaaggagaaaggcggacaacccataatatcattgagaaacgatatcgctcctccatcaatgacaaaatcatcgaattgaaagacctggtcatggggacagacgccaagatgcacaagtctggcgttctgaggaaggccattgattacatcaaatacttgcagcaggtcaatcataaactgcgccaggagaacatggtgctgaagctggcaaatcaaaagaacaagcttctaaagggcatcgacctaggcagtctggtggacaatgaggtggacctgaagatcgaggactttaatcagaatgtccttctgatgtcccccccagcctctgactcagggtcccaggctggcttctctccctactccattgactctgagccaggaagccctctattggatgatgcaaaggtcaaagatgagccagactctcctcctgtggcgctgggcatggtagaccgctcacggattcttctgtgtgtcctcaccttcctgtgcctctcctttaaccccctgacttccctgctgcagtggggaggggcccacgactctgaccagcacccacactcaggctctggccgcagtgtcctgtcattcgagtcaggttctgggggctggtttgactggatgatgcctactcttctcttatggctggtaaatggtgtgattgtcctgagcgtctttgtgaagctgctggttcatggggagccagtgatccggccacactcgcgctcctcggtcaccttctggaggcaccggaaacaggcagatctggatctcgccagaggagattttgcagctgctgccggcaacctacaaacctgcctggcagttttgggccgggcactgcccacctcccgcctggacctggcctgcagcctctcctggaacgtgatccgctacagcctgcagaagctacgcctggtgcgctggctgctcaagaaagtcttccagtgccggcgggccacgccagccactgaggcaggctttgaagacgaagctaagaccagcgcccgggatgcggctctggcctatcaccggctgcaccagctgcacatcacagggaagcttcctgcaggatccgcctgttccgatgtacacatggcgttgtgtgccgtgaacctggctgaatgtgcagaggagaagatcccaccgagcacactggttgagatccatctgactgctgccatggggctcaagacccggtgtggaggcaagctgggcttcctggccagctacttcctcagccgagcccagagcctgtgtggccccgagcacagtgctgttcctgactccctgcgctggctctgccaccccctgggccagaagtttttcatggagcggagctggtctgtgaagtcagctgccaaggagagtctatactgtgcccagaggaacccagctgaccccattgcgcaggtccaccaggccttctgcaagaacctgctggagcgagctatagagtccttggtgaaacctcaggccaagaagaaggctggagaccaggaagaagagagctgtgaattctccagtgctctggagtacttgaaattacttcattcttttgtggactctgtgggggttatgagccccccactctccaggagctccgtgctcaagtccgccctgggtccagacatcatctgtcggtggtggacgtctgcaatcactgtggccatcagctggctccagggagacgatgcagctgtgcgctctcattttaccaaagtggaacgcatccccaaggccctggaagtgacagagagccccctggtgaaggccatcttccatgcctgcagagccatgcatgcctcactccctgggaaagcagatgggcagcagagttccttctgccattgcgagagggccagtggccacctatggagcagcctcaacgtcagtggggccacctctgaccctgccctcaaccacgtggtccagctgctcacctgtgacctgctactgtcgctacggacagcgctctggcaaaaacaggccagtgccagccaggctgtgggggagacctaccacgcgtcaggcgctgaactggcgggcttccaacgggacctgggcagcctgcgcaggctggcacacagcttccgcccagcataccgcaaggtgttcctgcatgaagccaccgtgcgcctgatggcaggagccagccccacccgcacccaccagctgctggaacacagcctgcggcggcgcaccacgcagagcaccaagcacggagaggtggatgcctggcccggccagcgagagcgggccaccgccatcctgctggcctgccgccacctgcccctctccttcctctcctccccgggccagcgggcagtgctgctggccgaagctgcccgcaccctggagaaggtgggcgaccggcgctcctgcaacgactgccagcagatgattgttaagctgggtggtggcactgccattgccgcctcc

SEQ ID NO: 6502 - DNA, 3531 bp, Homo sapiens
  source 1..3531: mol_type = genomic DNA
atggacgagccacccttcagcgaggcggctttggagcaggcgctgggcgagccgtgcgatctggacgcggcgctgctgaccgacatcgaaggtgaagtcggcgcggggaggggtagggccaacggcctggacgccccaagggcgggcgcagatcgcggagccatggattgcactttcgaagacatgcttcagcttatcaacaaccaagacagtgacttccctggcctatttgacccaccctatgctgggagtggggcagggggcacagaccctgccagccccgataccagctccccaggcagcttgtctccacctcctgccacattgagctcctctcttgaagccttcctgagcgggccgcaggcagcgccctcacccctgtcccctccccagcctgcacccactccattgaagatgtacccgtccatgcccgctttctcccctgggcctggtatcaaggaagagtcagtgccactgagcatcctgcagacccccaccccacagcccctgccaggggccctcctgccacagagcttcccagccccagccccaccgcagttcagctccacccctgtgttaggctaccccagccctccgggaggcttctctacaggaagccctcccgggaacacccagcagccgctgcctggcctgccactggcttccccgccaggggtcccgcccgtctccttgcacacccaggtccagagtgtggtcccccagcagctactgacagtcacagctgcccccacggcagcccctgtaacgaccactgtgacctcgcagatccagcaggtcccggtcctgctgcagccccacttcatcaaggcagactcgctgcttctgacagccatgaagacagacggagccactgtgaaggcggcaggtctcagtcccctggtctctggcaccactgtgcagacagggcctttgccgaccctggtgagtggcggaaccatcttggcaacagtcccactggtcgtagatgcggagaagctgcctatcaaccggctcgcagctggcagcaaggccccggcctctgcccagagccgtggagagaagcgcacagcccacaacgccattgagaagcgctaccgctcctccatcaatgacaaaatcattgagctcaaggatctggtggtgggcactgaggcaaagctgaataaatctgctgtcttgcgcaaggccatcgactacattcgctttctgcaacacagcaaccagaaactcaagcaggagaacctaagtctgcgcactgctgtccacaaaagcaaatctctgaaggatctggtgtcggcctgtggcagtggagggaacacagacgtgctcatggagggcgtgaagactgaggtggaggacacactgaccccacccccctcggatgctggctcacctttccagagcagccccttgtcccttggcagcaggggcagtggcagcggtggcagtggcagtgactcggagcctgacagcccagtctttgaggacagcaaggcaaagccagagcagcggccgtctctgcacagccggggcatgctggaccgctcccgcctggccctgtgcacgctcgtcttcctctgcctgtcctgcaaccccttggcctccttgctgggggcccgggggcttcccagcccctcagataccaccagcgtctaccatagccctgggcgcaacgtgctgggcaccgagagcagagatggccctggctgggcccagtggctgctgcccccagtggtctggctgctcaatgggctgttggtgctcgtctccttggtgcttctctttgtctacggtgagccagtcacacggccccactcaggccccgccgtgtacttctggaggcatcgcaagcaggctgacctggacctggcccggggagactttgcccaggctgcccagcagctgtggctggccctgcgggcactgggccggcccctgcccacctcccacctggacctggcttgtagcctcctctggaacctcatccgtcacctgctgcagcgtctctgggtgggccgctggctggcaggccgggcagggggcctgcagcaggactgtgctctgcgagtggatgctagcgccagcgcccgagacgcagccctggtctaccataagctgcaccagctgcacaccatggggaagcacacaggcgggcacctcactgccaccaacctggcgctgagtgccctgaacctggcagagtgtgcaggggatgccgtgtctgtggcgacgctggccgagatctatgtggcggctgcattgagagtgaagaccagtctcccacgggccttgcattttctgacacgcttcttcctgagcagtgcccgccaggcctgcctggcacagagtggctcagtgcctcctgccatgcagtggctctgccaccccgtgggccaccgtttcttcgtggatggggactggtccgtgctcagtaccccatgggagagcctgtacagcttggccgggaacccagtggaccccctggcccaggtgactcagctattccgggaacatctcttagagcgagcactgaactgtgtgacccagcccaaccccagccctgggtcagctgatggggacaaggaattctcggatgccctcgggtacctgcagctgctgaacagctgttctgatgctgcgggggctcctgcctacagcttctccatcagttccagcatggccaccaccaccggcgtagacccggtggccaagtggtgggcctctctgacagctgtggtgatccactggctgcggcgggatgaggaggcggctgagcggctgtgcccgctggtggagcacctgccccgggtgctgcaggagtctgagagacccctgcccagggcagctctgcactccttcaaggctgcccgggccctgctgggctgtgccaaggcagagtctggtccagccagcctgaccatctgtgagaaggccagtgggtacctgcaggacagcctggctaccacaccagccagcagctccattgacaaggccgtgcagctgttcctgtgtgacctgcttcttgtggtgcgcaccagcctgtggcggcagcagcagcccccggccccggccccagcagcccagggcaccagcagcaggccccaggcttccgcccttgagctgcgtggcttccaacgggacctgagcagcctgaggcggctggcacagagcttccggcccgccatgcggagggtgttcctacatgaggccacggcccggctgatggcgggggccagccccacacggacacaccagctcctcgaccgcagtctgaggcggcgggcaggccccggtggcaaaggaggcgcggtggcggagctggagccgcggcccacgcggcgggagcacgcggaggccttgctgctggcctcctgctacctgccccccggcttcctgtcggcgcccgggcagcgcgtgggcatgctggctgaggcggcgcgcacactcgagaagcttggcgatcgccggctgctgcacgactgtcagcagatgctcatgcgcctgggcggtgggaccactgtcacttccagc

SEQ ID NO: 6503 - DNA, 3441 bp, Homo sapiens
  source 1..3441: mol_type = genomic DNA
atggacgagccacccttcagcgaggcggctttggagcaggcgctgggcgagccgtgcgatctggacgcggcgctgctgaccgacatcgaagacatgcttcagcttatcaacaaccaagacagtgacttccctggcctatttgacccaccctatgctgggagtggggcagggggcacagaccctgccagccccgataccagctccccaggcagcttgtctccacctcctgccacattgagctcctctcttgaagccttcctgagcgggccgcaggcagcgccctcacccctgtcccctccccagcctgcacccactccattgaagatgtacccgtccatgcccgctttctcccctgggcctggtatcaaggaagagtcagtgccactgagcatcctgcagacccccaccccacagcccctgccaggggccctcctgccacagagcttcccagccccagccccaccgcagttcagctccacccctgtgttaggctaccccagccctccgggaggcttctctacaggaagccctcccgggaacacccagcagccgctgcctggcctgccactggcttccccgccaggggtcccgcccgtctccttgcacacccaggtccagagtgtggtcccccagcagctactgacagtcacagctgcccccacggcagcccctgtaacgaccactgtgacctcgcagatccagcaggtcccggtcctgctgcagccccacttcatcaaggcagactcgctgcttctgacagccatgaagacagacggagccactgtgaaggcggcaggtctcagtcccctggtctctggcaccactgtgcagacagggcctttgccgaccctggtgagtggcggaaccatcttggcaacagtcccactggtcgtagatgcggagaagctgcctatcaaccggctcgcagctggcagcaaggccccggcctctgcccagagccgtggagagaagcgcacagcccacaacgccattgagaagcgctaccgctcctccatcaatgacaaaatcattgagctcaaggatctggtggtgggcactgaggcaaagctgaataaatctgctgtcttgcgcaaggccatcgactacattcgctttctgcaacacagcaaccagaaactcaagcaggagaacctaagtctgcgcactgctgtccacaaaagcaaatctctgaaggatctggtgtcggcctgtggcagtggagggaacacagacgtgctcatggagggcgtgaagactgaggtggaggacacactgaccccacccccctcggatgctggctcacctttccagagcagccccttgtcccttggcagcaggggcagtggcagcggtggcagtggcagtgactcggagcctgacagcccagtctttgaggacagcaaggcaaagccagagcagcggccgtctctgcacagccggggcatgctggaccgctcccgcctggccctgtgcacgctcgtcttcctctgcctgtcctgcaaccccttggcctccttgctgggggcccgggggcttcccagcccctcagataccaccagcgtctaccatagccctgggcgcaacgtgctgggcaccgagagcagagatggccctggctgggcccagtggctgctgcccccagtggtctggctgctcaatgggctgttggtgctcgtctccttggtgcttctctttgtctacggtgagccagtcacacggccccactcaggccccgccgtgtacttctggaggcatcgcaagcaggctgacctggacctggcccggggagactttgcccaggctgcccagcagctgtggctggccctgcgggcactgggccggcccctgcccacctcccacctggacctggcttgtagcctcctctggaacctcatccgtcacctgctgcagcgtctctgggtgggccgctggctggcaggccgggcagggggcctgcagcaggactgtgctctgcgagtggatgctagcgccagcgcccgagacgcagccctggtctaccataagctgcaccagctgcacaccatggggaagcacacaggcgggcacctcactgccaccaacctggcgctgagtgccctgaacctggcagagtgtgcaggggatgccgtgtctgtggcgacgctggccgagatctatgtggcggctgcattgagagtgaagaccagtctcccacgggccttgcattttctgacacgcttcttcctgagcagtgcccgccaggcctgcctggcacagagtggctcagtgcctcctgccatgcagtggctctgccaccccgtgggccaccgtttcttcgtggatggggactggtccgtgctcagtaccccatgggagagcctgtacagcttggccgggaacccagtggaccccctggcccaggtgactcagctattccgggaacatctcttagagcgagcactgaactgtgtgacccagcccaaccccagccctgggtcagctgatggggacaaggaattctcggatgccctcgggtacctgcagctgctgaacagctgttctgatgctgcgggggctcctgcctacagcttctccatcagttccagcatggccaccaccaccggcgtagacccggtggccaagtggtgggcctctctgacagctgtggtgatccactggctgcggcgggatgaggaggcggctgagcggctgtgcccgctggtggagcacctgccccgggtgctgcaggagtctgagagacccctgcccagggcagctctgcactccttcaaggctgcccgggccctgctgggctgtgccaaggcagagtctggtccagccagcctgaccatctgtgagaaggccagtgggtacctgcaggacagcctggctaccacaccagccagcagctccattgacaaggccgtgcagctgttcctgtgtgacctgcttcttgtggtgcgcaccagcctgtggcggcagcagcagcccccggccccggccccagcagcccagggcaccagcagcaggccccaggcttccgcccttgagctgcgtggcttccaacgggacctgagcagcctgaggcggctggcacagagcttccggcccgccatgcggagggtgttcctacatgaggccacggcccggctgatggcgggggccagccccacacggacacaccagctcctcgaccgcagtctgaggcggcgggcaggccccggtggcaaaggaggcgcggtggcggagctggagccgcggcccacgcggcgggagcacgcggaggccttgctgctggcctcctgctacctgccccccggcttcctgtcggcgcccgggcagcgcgtgggcatgctggctgaggcggcgcgcacactcgagaagcttggcgatcgccggctgctgcacgactgtcagcagatgctcatgcgcctgggcggtgggaccactgtcacttccagc

SEQ ID NO: 6504 - DNA, 2382 bp, Homo sapiens
  source 1..2382: mol_type = genomic DNA
atggaggggtctctggcaggcagcctggctgcaccagatcgtccccaaggcccagagagactgcctggcccggcgccaagggagaacatcgagggtggggccgaagctgctgagggggaaggtggcatcttccggtccacccgttacctgcctgtcaccaaggagggcccccgagacattctggatggcagaggtggcatctctgtggccaactttgacccaggcaccttcagcctgatgcgctgtgacttctgcggggctggcttcgacacacgggccggcctctccagccacgcccgggcccacctacgtgacttcggtatcaccaactgggagctcactgtctcacccatcaacatcctgcaggagctgctggccacctctgctgctgagcagccccccagccccctgggccgagagcctgggggtccgcctggcagcttcctgacctcccgtcggccccgcttacctctcacggtgccctttccacccacctgggctgaggaccctgggccagcctatggagatgcctcaggcccagagccagcacgagacatccgctgcgagttctgtggtgagttcttcgagaaccgcaagggcctctcgagccacgcgcgctcccatctgcggcaaatgggcgtgaccgagtggtacgtcaatggctcgcccatcgacacgctgcgggagatcctgaagagacggacccagtctcggcctggtggacctcccaacccaccagggccaagcccaaaagccctggccaagatgatgggcggcgcaggtcctggcagctcactggaagcccgcagcccctcggaccttcacatctcacccttggccaagaagttgccaccaccaccgggcagccccctgggccactcaccaactgcctctcctcctcctacggcccgaaagatgttcccaggcctggctgcaccctccttgcccaagaagctgaagcctgaacaaatacgggtggagatcaagcgggagatgctgccgggggcccttcatggggaactgcacccatctgagggtccctggggggcaccacgggaagacatgacacccctgaacctgtcgtcccgggcagagccggtgcgcgacatccgctgtgagttctgcggcgagttcttcgagaaccgcaagggcctgtcgagtcacgcgcgctcacacctgcggcagatgggtgtgaccgagtggtccgtcaatggttcgcccatcgacacactgcgagagatcctcaagaagaagtccaagccgtgcctcatcaagaaggagccaccggctggagacctggcccctgccctggctgaggacgggcctcccaccgtggcccctgggcccgtgcagtccccactgccgctgtcgcccctggctggccggccaggcaaaccaggtgcagggccggcccaggttcctcgtgagctcagcctgacgcccatcactggggccaagccctcagccactggctacctgggctcagtggcagccaagcggcccctgcaggaggaccgcctcctcccagcagaggtcaaggccaagacctacatccagactgaactgcccttcaaggcaaagacccttcatgagaagacctcccactcctccaccgaggcctgctgcgagctgtgtggcctttactttgaaaaccgcaaggccctggccagccacgcacgggcacacctgcggcagttcggcgtgaccgagtggtgcgtcaatggctcgcccatcgagacactgagcgagtggatcaaacaccggccccagaaggtgggcgcctaccgcagctacatccagggcggccgccccttcaccaagaagttccgcagtgccggccatggccgtgacagtgacaagcggccgtccctggggctggcacccgggggcctggccgtggtcggccgcagtgccggaggggagccagggcccgaggctggccgggcagccgacggtggtgagcggcctctggcagccagcccgccaggcaccgtgaaggctgaggagcaccagcggcagaacatcaacaaatttgaacgccgacaagcccgccctccagatgcctccgcagcccggggaggcgaggacaccaatgacctacagcagaagctggaggaggtgcggcaacccccaccccgagtccggccagtcccctccctggtgccccggcccccccagacatcacttgtcaagttcgtgggcaacatctacaccctcaaatgcaggttctgtgaggtggaattccagggccccctctccatccaggaagagtgggtgcggcacttacagcggcacatcctggagatgaacttctccaaagcggaccccccacctgaggagtcccaggccccgcaggcacagacagcggcggcagaggctccc

SEQ ID NO: 6505 - DNA, 2904 bp, Homo sapiens
  source 1..2904: mol_type = genomic DNA
atggtggccatggacttgggctctccctcgctccctaagaagagcctgcctgtccctggggccctggagcaggtggccagtcggctgagcagcaaagtggctgcagaggttcctcatggcagcaaacaggagctgcaggacctcaaggcccagagcctgaccacctgcgaggtctgcggtgcctgctttgagacccgaaagggcctgtccagccacgcgcgctcccacctgcggcagctgggagtggcagagtcggaaagcagcggcgcacccatcgacctcctctacgagcttgtgaagcagaagggtctgcctgacgcccaccttgggctgcccccaggcctggctaagaagtccagctcactgaaggaggtggtcgccggggccccccggcccggcttgctcagcctggccaagcccttggatgcccctgctgtcaacaaagccatcaagtcgcctcccggcttctcggccaagggcctgggccacccgcccagctctccactcctcaaaaagacaccactggccctggcgggctcccctacccctaagaatcctgaggacaagagcccccagctgtccctgagcccccggccggcctccccaaaggcacagtggcctcagtctgaggatgaggggcccttgaacctcactttagatagtgacgggggcagagagctggactgccagctgtgcggtgcctggtttgagacccgcaagggcctgtctagccacgcccgtgcccacctgcgccacctgggcgtcagcgatccggacgccaagggatcccccatagacgtgctccacgggctcatcaggagggacggcgtccagatccgcctcccacccaggcgcggcgccctggcccacccggggcggccgcctcccacctccgcggccctctccttgcttccccccccaccgccggccaagaaggccaagctgaaggccgcgggtatggccagcccctgggggaagcaggacctctcggccgccgcagccgccggcattttctgggcctctgatgtggagccgtctcctctcaacctctcctcaggcccagagccagcacgagacatccgctgcgagttctgtggtgagttcttcgagaaccgcaagggcctctcgagccacgcgcgctcccatctgcggcaaatgggcgtgaccgagtggtacgtcaatggctcgcccatcgacacgctgcgggagatcctgaagagacggacccagtctcggcctggtggacctcccaacccaccagggccaagcccaaaagccctggccaagatgatgggcggcgcaggtcctggcagctcactggaagcccgcagcccctcggaccttcacatctcacccttggccaagaagttgccaccaccaccgggcagccccctgggccactcaccaactgcctctcctcctcctacggcccgaaagatgttcccaggcctggctgcaccctccttgcccaagaagctgaagcctgaacaaatacgggtggagatcaagcgggagatgctgccgggggcccttcatggggaactgcacccatctgagggtccctggggggcaccacgggaagacatgacacccctgaacctgtcgtcccgggcagagccggtgcgcgacatccgctgtgagttctgcggcgagttcttcgagaaccgcaagggcctgtcgagtcacgcgcgctcacacctgcggcagatgggtgtgaccgagtggtccgtcaatggttcgcccatcgacacactgcgagagatcctcaagaagaagtccaagccgtgcctcatcaagaaggagccaccggctggagacctggcccctgccctggctgaggacgggcctcccaccgtggcccctgggcccgtgcagtccccactgccgctgtcgcccctggctggccggccaggcaaaccaggtgcagggccggcccaggttcctcgtgagctcagcctgacgcccatcactggggccaagccctcagccactggctacctgggctcagtggcagccaagcggcccctgcaggaggaccgcctcctcccagcagaggtcaaggccaagacctacatccagactgaactgcccttcaaggcaaagacccttcatgagaagacctcccactcctccaccgaggcctgctgcgagctgtgtggcctttactttgaaaaccgcaaggccctggccagccacgcacgggcacacctgcggcagttcggcgtgaccgagtggtgcgtcaatggctcgcccatcgagacactgagcgagtggatcaaacaccggccccagaaggtgggcgcctaccgcagctacatccagggcggccgccccttcaccaagaagttccgcagtgccggccatggccgtgacagtgacaagcggccgtccctggggctggcacccgggggcctggccgtggtcggccgcagtgccggaggggagccagggcccgaggctggccgggcagccgacggtggtgagcggcctctggcagccagcccgccaggcaccgtgaaggctgaggagcaccagcggcagaacatcaacaaatttgaacgccgacaagcccgccctccagatgcctccgcagcccggggaggcgaggacaccaatgacctacagcagaagctggaggaggtgcggcaacccccaccccgagtccggccagtcccctccctggtgccccggcccccccagacatcacttgtcaagttcgtgggcaacatctacaccctcaaatgcaggttctgtgaggtggaattccagggccccctctccatccaggaagagtgggtgcggcacttacagcggcacatcctggagatgaacttctccaaagcggaccccccacctgaggagtcccaggccccgcaggcacagacagcggcggcagaggctccc

SEQ ID NO: 6506 - DNA, 2505 bp, Homo sapiens
  source 1..2505: mol_type = genomic DNA
atggtggccatggacttgggctctccctcgctccctaagaagagcctgcctgtccctggggccctggagcaggtggccagtcggctgagcagcaaagtggctgcagaggttcctcatggcagcaaacaggagctgcaggacctcaaggcccagagcctgaccacctgcgaggtctgcggtgcctgctttgagacccgaaagggcctgtccagccacgcgcgctcccacctgcggcagctgggagtggcagagtcggaaagcagcggcgcacccatcgacctcctctacgagcttgtgaagcagaagggtctgcctgacgcccaccttgggctgcccccaggcctggctaagaagtccagctcactgaaggaggtggtcgccggggccccccggcccggcttgctcagcctggccaagcccttggatgcccctgctgtcaacaaagccatcaagtcgcctcccggcttctcggccaagggcctgggccacccgcccagctctccactcctcaaaaagacaccactggccctggcgggctcccctacccctaagaatcctgaggacaagagcccccagctgtccctgagcccccggccggcctccccaaaggcacagtggcctcagtctgaggatgaggggcccttgaacctcacctcaggcccagagccagcacgagacatccgctgcgagttctgtggtgagttcttcgagaaccgcaagggcctctcgagccacgcgcgctcccatctgcggcaaatgggcgtgaccgagtggtacgtcaatggctcgcccatcgacacgctgcgggagatcctgaagagacggacccagtctcggcctggtggacctcccaacccaccagggccaagcccaaaagccctggccaagatgatgggcggcgcaggtcctggcagctcactggaagcccgcagcccctcggaccttcacatctcacccttggccaagaagttgccaccaccaccgggcagccccctgggccactcaccaactgcctctcctcctcctacggcccgaaagatgttcccaggcctggctgcaccctccttgcccaagaagctgaagcctgaacaaatacgggtggagatcaagcgggagatgctgccgggggcccttcatggggaactgcacccatctgagggtccctggggggcaccacgggaagacatgacacccctgaacctgtcgtcccgggcagagccggtgcgcgacatccgctgtgagttctgcggcgagttcttcgagaaccgcaagggcctgtcgagtcacgcgcgctcacacctgcggcagatgggtgtgaccgagtggtccgtcaatggttcgcccatcgacacactgcgagagatcctcaagaagaagtccaagccgtgcctcatcaagaaggagccaccggctggagacctggcccctgccctggctgaggacgggcctcccaccgtggcccctgggcccgtgcagtccccactgccgctgtcgcccctggctggccggccaggcaaaccaggtgcagggccggcccaggttcctcgtgagctcagcctgacgcccatcactggggccaagccctcagccactggctacctgggctcagtggcagccaagcggcccctgcaggaggaccgcctcctcccagcagaggtcaaggccaagacctacatccagactgaactgcccttcaaggcaaagacccttcatgagaagacctcccactcctccaccgaggcctgctgcgagctgtgtggcctttactttgaaaaccgcaaggccctggccagccacgcacgggcacacctgcggcagttcggcgtgaccgagtggtgcgtcaatggctcgcccatcgagacactgagcgagtggatcaaacaccggccccagaaggtgggcgcctaccgcagctacatccagggcggccgccccttcaccaagaagttccgcagtgccggccatggccgtgacagtgacaagcggccgtccctggggctggcacccgggggcctggccgtggtcggccgcagtgccggaggggagccagggcccgaggctggccgggcagccgacggtggtgagcggcctctggcagccagcccgccaggcaccgtgaaggctgaggagcaccagcggcagaacatcaacaaatttgaacgccgacaagcccgccctccagatgcctccgcagcccggggaggcgaggacaccaatgacctacagcagaagctggaggaggtgcggcaacccccaccccgagtccggccagtcccctccctggtgccccggcccccccagacatcacttgtcaagttcgtgggcaacatctacaccctcaaatgcaggttctgtgaggtggaattccagggccccctctccatccaggaagagtgggtgcggcacttacagcggcacatcctggagatgaacttctccaaagcggaccccccacctgaggagtcccaggccccgcaggcacagacagcggcggcagaggctccc

SEQ ID NO: 6507 - DNA, 1296 bp, Homo sapiens
  source 1..1296: mol_type = genomic DNA
atgagtgagttgaaagactgccccttgcagttccacgacttcaagtctgtggatcacctgaaggtctgtccccgctacacggcagtgctggcacgctctgaggatgatggcatcggcatcgaggagctggacaccctgcagctggagctggagaccctgctgtcttctgccagccggcgcctgcgtgtgcttgaggccgaaacccagatcctcaccgactggcaggataagaaaggtgacagacgattcctgaagctgggtcgagaccatgaacttggagctccccccaaacatgggaagcccaagaagcagaaactggaagggaaggcaggacatgggccgggccctggcccaggacggcccaaatccaaaaaccttcagcccaagatccaggaatatgaattcactgatgaccctatcgacgtgccacggatccccaaaaatgatgcccccaacaggttctgggcttcagtggagccctactgtgctgacatcaccagcgaggaggtccgcacacttgaggagttactgaagcccccagaagatgaggctgagcattacaagatcccacccctggggaagcactactcccagcgctgggcccaggaggacctgctggaggagcagaaggatggggcccgggcagcggctgtggctgacaagaagaaaggcctcatggggccactgaccgaactggacactaaagatgtggatgccctgctgaagaagtctgaggcccagcatgaacagccggaagatggatgcccctttggtgccctgacgcagcgcctcctgcaggccctggtggaggaaaatattatttcccctatggaggattctcctattcctgacatgtctgggaaagaatcaggggctgacggggcaagcacctcccctcgcaatcagaacaagcccttcagtgtgccgcatactaagtccctggagagccgcatcaaggaggagctaattgcccagggccttttggagtctgaggaccgccccgcagaggactccgaggatgaggtccttgctgagcttcgcaaacggcaggctgagctgaaggcacttagtgcccacaaccgcaccaagaagcacgacctgctgaggctggcaaaggaggaggtgagccggcaggagctgaggcagcgggtgcgcatggctgacaacgaggtcatggacgcctttcgcaagatcatggctgcccggcagaagaagcggactcccaccaagaaagaaaaggaccaggcctggaagactctgaaggagcgtgagagcatcctgaagctgctggatggg

SEQ ID NO: 6508 - DNA, 1107 bp, Homo sapiens
  source 1..1107: mol_type = genomic DNA
atgagtgagttgaaagactgccccttgcagttccacgacttcaagtctgtggatcacctgaaggtctgtccccgctacacggcagtgctggcacgctctgaggatgatggcatcggcatcgaggagctggacaccctgcagctggagctggagaccctgctgtcttctgccagccggcgcctgcgtgtgcttgaggccgaaacccagatcctcaccgactggcaggataagaaaggtgacagacgattcctgaagctgggtcgagaccatgaacttggagctccccccaaacatgggaagcccaagaagcagaaactggaagggaaggcaggacatgggccgggccctggcccaggacggcccaaatccaaaaaccttcagcccaagatccaggaatatgaattcactgatgaccctatcgacgtgccacggatccccaaaaatgatgcccccaacaggttctgggcttcagtggagccctactgtgctgacatcaccagcgaggaggtccgcacacttgaggagttactgaagcccccagaagatgaggctgagcattacaagatcccacccctggggaagcactactcccagcgctgggcccaggaggacctgctggaggagcagaaggatggggcccgggcagcggctgtggctgacaagaagaaaggcctcatggggccactgaccgaactggacactaaagatgtggatgccctgctgaagaagtctgaggcccagcatgaacagccggaagatggatgcccctttggtgccctgacgcagcgcctcctgcaggccctggtggaggaaaatattatttcccctatggaggattctcctattcctgacatgtctgggaaagaatcaggggctgacggggcaagcacctcccctcgcaatcagaacaagcccttcagtgtgccgcatactaagtccctggagagccgcatcaaggaggagctaattgcccagggccttttggagtctgaggaccgccccgcagaggactccgaggatgaggtccttgctgagcttcgcaaacggcaggctgagctgaaggcacttagtgcccacaaccgcaccaagaagcacgacctgctgagg

SEQ ID NO: 6509 - DNA, 3177 bp, Homo sapiens
  source 1..3177: mol_type = genomic DNA
atggaggcgaacccagcgggcagcggcgccgggggtggcgggagcagcggcatcgggggcgaggacggggtgcacttccagagctaccccttcgacttcctggaattcctcaaccaccagcgcttcgagcccatggaactgtatggggaacacgccaaggcggtggcggccctgccctgcgcccccggccccccgccgcagcccccgccgcagccccctcccccgcagtatgactacccgccccagtccaccttcaagcccaaggcggaggtgccctcctcgtcctcgtcctcgtcctcctcctcctcctcttcgtcctcctcgtcgtcatcttcgtcctcttcctcttcccaagccaagaagcccgatccgcccctgccgcccgccttcggggcgccccctcctcccctctttgacgctgctttccccactccgcagtggggcatcgtggacctctcggggcaccagcacttgtttgggaacctgaagcgaggagggcccgcgtccgggccgggggtgacgcctgggctgggcgctcccgcgggggccccagggccgcttcctgccccctcgcagaccccgccaggaccccccgcggcggcggcctgcgaccccaccaaggacgacaagggctacttccggagactgaagtacctgatggagcggcgcttcccctgcggcgtgtgccagaagtccttcaagcagtcctcgcacctggtccagcacatgctggtgcactcgggggagaggccctacgaatgcggcgtctgcggccgcacctacaaccacgtgtccagcctcatccgccaccgccgctgccacaaggacgtgccaccggccgcggggggcccgccccagcccggcccccacctcccgccgctgggcctcccagcacccgctgccagcgccgccaccgccgccgccccctccacggtgtcctcgggccctccagccacgcccgtggcgcctgccccctccgcagacgggagcgccgcccctgctggtgttggggtgccccctcctgccaccgggggtggcgatggcccgttcgcctgcccactctgctggaaggttttcaagaagcccagtcacctccaccagcaccagatcatccacacgggcgagaagcccttctcctgctccgtgtgcagcaaaagcttcaaccgcagggagagtctgaagcgccacgtgaagacgcactcggccgacctcctgcgcctgccctgcggcatctgcgggaaggccttccgcgacgcctcctacctcctcaagcaccaggcggcccacgcgggggcgggcgccggggggcctcggcccgtgtacccctgcgacctgtgcggcaagtcctactcggctccgcagagcctgctccgccacaaggccgcccacgccccgcccgctgccgctgcggaggcgcccaaggacggggcggcctcggccccgcagcccccgcccaccttccccccgggcccgtacctcctgccccccgaccctcccaccacagacagcgagaaggcggcggcggccgcggcggcggtggtgtacggcgctgtgcccgtcccgctcctgggcgcccacccgctgctgctcggcggcgcggggaccagcggggcgggaggctcgggcgccagcgtcccaggaaagacgttctgctgcggcatctgcgggcgcggcttcgggcgccgcgagaccctgaagcgccatgagcgcatccacacgggcgagaagccccaccagtgccccgtgtgtgggaagcgcttccgcgaatccttccacttgagcaagcatcacgtggtgcacacgcgcgagcggccctacaagtgcgagctctgcggcaaggtcttcggctacccgcagagcctcacccgccaccgccaggtgcaccggctccagctgccctgcgccctggccggggcagccggcctcccctccacccaaggcacaccgggggcctgtgggcccggggcctcgggcacgtctgcagggcccaccgatgggctgagctacgcctgctcggactgcggcgagcacttcccggatctctttcacgtcatgagtcacaaggaggtccacatggcagagaagccatacggctgcgacgcctgcggcaagaccttcggcttcatcgagaacctcatgtggcacaagctggtccaccaggccgcccccgagcgcctgctcccgcccgcacccggcggcctgcagcccccggacggctccagcggcacggatgcggccagcgtgctggacaacgggctggcgggggaggtgggggcggccgtggcggcactggcaggggtgtctgggggtgaggacgcaggcggggcggcggtggcaggtgctggcgggggtgccagttccggccccgagcgcttcagctgtgccacgtgcggccagagtttcaagcacttcctgggcctcgtgactcacaagtacgtgcacctggtgcgacggaccctgggctgcggcctctgcggccagagcttcgcgggcgcctacgacttgctcctacaccgccgcagccatcggcagaagcggggtttccgctgcccggtgtgcgggaagcgcttctgggaggcggccctgctgatgcgccaccagcgctgccacacggaacagcggccgtaccgatgtggcgtgtgcggccgaggcttcctgcgctcctggtacctgcggcagcaccgcgtggtgcacactggcgagcgggccttcaagtgcggcgtgtgcgccaagcgcttcgcgcagtcgtccagcctggcagagcaccggcggctgcacgctgtggcccggccccagcgctgcagcgcctgtggcaagaccttccgctaccgctccaacctgctggagcaccagcggctgcacctgggcgagcgcgcctaccgctgtgagcactgcggcaagggcttcttctacctgagctccgtgctgcgccaccagcgcgcccatgagccgccgcggcccgagctccgctgccccgcctgcctcaaggccttcaaggatcccggctacttccgtaagcacctggctgcccaccagggcggccggcccttccgctgctcctcctgcggcgagggcttcgccaacacctacggcctcaagaaacaccgcctggcgcacaaggccgagaacctcggggggcctggagcaggggcgggcaccttggccgggaaggatgcc

SEQ ID NO: 6510 - DNA, 570 bp, Homo sapiens
  source 1..570: mol_type = genomic DNA
atgcctgacgagctgacggagcccgggcgcgccacgccggcccgcgcctcctccttcctcatcgagaacctgctggcggccgaggccaagggcgcagggcgcgcgacccagggcgacggcagccgggaggacgaggaggaggacgacgacgaccccgaagacgaggacgccgagcaggcgcggcggcgacggctacagcggcggcgacagttgctcgcgggcaccgggcccggcggggaggcgcgggcccgtgcgctgctcgggccgggcgcgctgggcctcggtcctcggccgccccccggtcccgggccgcccttcgctctgggctgcggaggcgcagcgcgctggtacccacgggcgcacggtggctatggaggcggcctcagtcctgacagcacacagaagattacacctcagcctgtgcagtgtggagaggggcaggtgaccagagctgataaatacaaagtgaacagaagtgacagtgggagcctctggatggcggaggaggccgcagggactggatggtgcagccacaacacggtggagcctttgtcagcctggacccccgag

SEQ ID NO: 6511 - DNA, 1044 bp, Homo sapiens
  source 1..1044: mol_type = genomic DNA
atgcctgacgagctgacggagcccgggcgcgccacgccggcccgcgcctcctccttcctcatcgagaacctgctggcggccgaggccaagggcgcagggcgcgcgacccagggcgacggcagccgggaggacgaggaggaggacgacgacgaccccgaagacgaggacgccgagcaggcgcggcggcgacggctacagcggcggcgacagttgctcgcgggcaccgggcccggcggggaggcgcgggcccgtgcgctgctcgggccgggcgcgctgggcctcggtcctcggccgccccccggtcccgggccgcccttcgctctgggctgcggaggcgcagcgcgctggtacccacgggcgcacggtggctatggaggcggcctcagtcctgacaccagcgaccgggactcaccggagacgggcgaggagatgggccgtgcggagggcgcctggccgcgaggccccgggccgggagcggtgcagcgggaggcagcggagctggcggcgcgtggcccggcggccggcacggaggaggcgtcggagctggccgaggtccctgcggcggctggggagacacgcggcggcgttggcgtgggcggcggccgaaagaagaagacgcgcacagtcttctcccgcagccaggtcttccagctggaatccaccttcgacctgaagcgctacctgagcagcgccgagcgcgccggcctggccgcctccctgcagctcaccgagacgcaggttaagatctggttccagaaccgccgcaacaagtggaagcggcagctggcagccgagctggaggcggccagcctgtccccgccgggagcgcagcgcctggtccgcgtgccggtgctctaccacgaaagccccccggccgcagccgccgctgggcccccggccaccctgcccttcccgctggcgcccgccgcgcccgcgccgcccccaccgctgctcggcttctccggggccctcgcctacccgctggccgccttcccggccgccgcctccgtgccctttctgcgggcgcagatgcctggcctggtg

SEQ ID NO: 6512 - DNA, 1071 bp, Homo sapiens
  source 1..1071: mol_type = genomic DNA
atgccggaacccgggccggacgctgccggcaccgccagcgcacagccccaaccgccgccgccccccccacccgctcccaaggagtccccgttctccatcaagaacctgctcaacggagaccaccaccggccgccccctaagcctcagccgcccccacggacgctcttcgcgccagcctcggctgccgccgccgccgccgctgccgctgccgcggcggccaagggggccctggagggcgccgcgggcttcgcgctctcgcaggtgggcgacctggctttccctcgctttgagatcccggcgcagaggtttgccctgcccgcgcactacctggagcgctccccagcctggtggtacccctacaccctgacccccgccggcggccacctcccgcgacctgaagcctcggagaaggccttgctgagagactcctcccccgcctccggcacagaccgcgactctccggagccactgctcaaggccgaccccgatcacaaggagctggactccaagagcccggacgagatcattctggaggagagcgactccgaggaaagcaaaaaggaaggcgaagcggcgccaggcgcggccggggcgagcgtaggggcggcggcggccactccgggcgcagaagactggaagaagggcgctgaaagtccagagaagaagccggcgtgccgcaagaagaagacgcgcacagtcttctcgcgcagccaggtcttccagctcgagtccaccttcgacatgaagcgctatctgagcagctcggagcgagccggcctggccgcgtccctgcacctcaccgagacgcaggtcaagatctggttccagaaccgccgcaacaagtggaagcggcagctggcggcggagctggaggcggccaacctgagccatgccgcggcgcagcgcatcgtgcgggtgcccatcctctaccacgagaactcggcggccgagggcgcggcggctgcagccgcgggggccccggtgccagtcagccagccgctgctcaccttcccgcaccccgtctactactcgcacccggtggtctcttccgtgccgctgctacggccggtc

SEQ ID NO: 6513 - DNA, 1857 bp, Homo sapiens
  source 1..1857: mol_type = genomic DNA
atggctgctgttgtccaacagaacgacctagtatttgaatttgctagtaacgtcatggaggatgaacgacagcttggtgatccagctatttttcctgccgtaattgtggaacatgttcctggtgctgatattctcaatagttatgccggtctagcctgtgtggaagagcccaatgacatgattactgagagttcactggatgttgctgaagaagaaatcatagacgatgatgatgatgacatcacccttacagttgaagcttcttgtcatgacggggatgaaacaattgaaactattgaggctgctgaggcactcctcaatatggattcccctggccctatgctggatgaaaaacgaataaataataatatatttagttcacctgaagatgacatggttgttgccccagtcacccatgtgtccgtcacattagatgggattcctgaagtgatggaaacacagcaggtgcaagaaaaatatgcagactcaccgggagcctcatcaccagaacagcctaagaggaaaaaaggaagaaaaactaaaccaccacgaccagattccccagccactacgccaaatatatctgtgaagaagaaaaacaaagatggaaagggaaacacaatttatctttgggagtttttactggcactgctccaggacaaggctacttgtcctaaatacatcaagtggacccagcgagagaaaggcatttttaaattggtggattctaaagcagtgtccaggttgtgggggaagcacaaaaacaaacctgatatgaattatgagaccatgggaagagcactcaggtactattaccaaaggggtattctggcaaaagtggaaggtcagcgcttggtgtatcagtttaaagaaatgccaaaagatcttatatatataaatgatgaggatccaagttccagcatagagtcttcagatccatcgctatcttcatcagccacttcaaataggaatcaaaccagccggtcgagagtatcttcaagtccaggggtaaaaggaggagccactacagttctaaaaccagggaattctaaagctgcaaaacccaaagatcctgtggaagttgcacaaccatcagaagttttgaggacagtgcagcccacgcagtctccatatcctacccagctcttccggactgttcatgtagtacagccagtacaggctgtcccagagggagaagcagctagaaccagtaccatgcaggatgaaacattaaattcttccgttcagagtattaggactatacaggctccaacccaagttccagtggttgtgtctcctaggaatcagcagttgcatacagtaacactccaaacagtgccactcacaacagttatagccagcacagatccatcagcaggtactggatctcagaagtttattttacaagccattccatcatcacagcccatgacagtactgaaagaaaatgtcatgctgcagtcacaaaaggcgggctctcctccttcaattgtcttgggccctgcccaggttcagcaggtccttactagcaatgttcagaccatttgcaatggaaccgtcagtgtggcttcctctccatccttcagtgctactgcacctgtggtgaccttttctcctcgcagttcacagctggttgctcacccacctggcactgtaatcacttcagttatcaaaactcaagaaacaaaaactcttacacaggaagtagagaaaaaggaatctgaagatcatttgaaagagaacactgagaaaacggagcagcagccacagccttatgtgatggtagtgtccagttccaatggatttacttctcaggtagctatgaaacaaaacgaactgctggaacccaactctttt

SEQ ID NO: 6514 - DNA, 1785 bp, Homo sapiens
  source 1..1785: mol_type = genomic DNA
atggctgctgttgtccaacagaacgacctagtatttgaatttgctagtaacgtcatggaggatgaacgacagcttggtgatccagctatttttcctgccgtaattgtggaacatgttcctggtgctgatattctcaatagttatgccggtctagcctgtgtggaagagcccaatgacatgattactgagagttcactggatgttgctgaagaagaaatcatagacgatgatgatgatgacatcacccttacagttgaagcttcttgtcatgacggggatgaaacaattgaaactattgaggctgctgaggcactcctcaatatggattcccctggccctatgctggatgaaaaacgaataaatgggattcctgaagtgatggaaacacagcaggtgcaagaaaaatatgcagactcaccgggagcctcatcaccagaacagcctaagaggaaaaaaggaagaaaaactaaaccaccacgaccagattccccagccactacgccaaatatatctgtgaagaagaaaaacaaagatggaaagggaaacacaatttatctttgggagtttttactggcactgctccaggacaaggctacttgtcctaaatacatcaagtggacccagcgagagaaaggcatttttaaattggtggattctaaagcagtgtccaggttgtgggggaagcacaaaaacaaacctgatatgaattatgagaccatgggaagagcactcaggtactattaccaaaggggtattctggcaaaagtggaaggtcagcgcttggtgtatcagtttaaagaaatgccaaaagatcttatatatataaatgatgaggatccaagttccagcatagagtcttcagatccatcgctatcttcatcagccacttcaaataggaatcaaaccagccggtcgagagtatcttcaagtccaggggtaaaaggaggagccactacagttctaaaaccagggaattctaaagctgcaaaacccaaagatcctgtggaagttgcacaaccatcagaagttttgaggacagtgcagcccacgcagtctccatatcctacccagctcttccggactgttcatgtagtacagccagtacaggctgtcccagagggagaagcagctagaaccagtaccatgcaggatgaaacattaaattcttccgttcagagtattaggactatacaggctccaacccaagttccagtggttgtgtctcctaggaatcagcagttgcatacagtaacactccaaacagtgccactcacaacagttatagccagcacagatccatcagcaggtactggatctcagaagtttattttacaagccattccatcatcacagcccatgacagtactgaaagaaaatgtcatgctgcagtcacaaaaggcgggctctcctccttcaattgtcttgggccctgcccaggttcagcaggtccttactagcaatgttcagaccatttgcaatggaaccgtcagtgtggcttcctctccatccttcagtgctactgcacctgtggtgaccttttctcctcgcagttcacagctggttgctcacccacctggcactgtaatcacttcagttatcaaaactcaagaaacaaaaactcttacacaggaagtagagaaaaaggaatctgaagatcatttgaaagagaacactgagaaaacggagcagcagccacagccttatgtgatggtagtgtccagttccaatggatttacttctcaggtagctatgaaacaaaacgaactgctggaacccaactctttt

SEQ ID NO: 6515 - DNA, 1113 bp, Homo sapiens
  source 1..1113: mol_type = genomic DNA
atggctgcaacctgtgagattagcaacatttttagcaactacttcagtgcgatgtacagctcggaggactccaccctggcctctgttccccctgctgccacctttggggccgatgacttggtactgaccctgagcaacccccagatgtcattggagggtacagagaaggccagctggttgggggaacagccccagttctggtcgaagacgcaggttctggactggatcagctaccaagtggagaagaacaagtacgacgcaagcgccattgacttctcacgatgtgacatggatggcgccaccctctgcaattgtgcccttgaggagctgcgtctggtctttgggcctctgggggaccaactccatgcccagctgcgagacctcacttccagctcttctgatgagctcagttggatcattgagctgctggagaaggatggcatggccttccaggaggccctagacccagggccctttgaccagggcagcccctttgcccaggagctgctggacgacggtcagcaagccagcccctaccaccccggcagctgtggcgcaggagccccctcccctggcagctctgacgtctccaccgcagggactggtgcttctcggagctcccactcctcagactccggtggaagtgacgtggacctggatcccactgatggcaagctcttccccagcgatggttttcgtgactgcaagaagggggatcccaagcacgggaagcggaaacgaggccggccccgaaagctgagcaaagagtactgggactgtctcgagggcaagaagagcaagcacgcgcccagaggcacccacctgtgggagttcatccgggacatcctcatccacccggagctcaacgagggcctcatgaagtgggagaatcggcatgaaggcgtcttcaagttcctgcgctccgaggctgtggcccaactatggggccaaaagaaaaagaacagcaacatgacctacgagaagctgagccgggccatgaggtactactacaaacgggagatcctggaacgggtggatggccggcgactcgtctacaagtttggcaaaaactcaagcggctggaaggaggaagaggttctccagagtcggaac

SEQ ID NO: 6516 - DNA, 1599 bp, Homo sapiens
  source 1..1599: mol_type = genomic DNA
atggcgacgtctctgcatgagggacccacgaaccagctggatctgctcatccgggccgtggaagcatcagttcacagcagtaatgcacactgtacagataagacaattgaagctgctgaagccctgcttcatatggaatctcctacctgcttgagggattcaagaagtcctgtggaagtgtttgttcctccttgtgtatcaactccagaattcatccatgctgctatgaggccagatgtcattacagaaactgtagtggaggtgtcaactgaagagtctgaacccatggatacctctcctattccaacatcaccagatagccatgaaccaatgaaaaagaaaaaagttggccgtaaaccaaagacccagcaatcaccaatttccaatgggtctcctgagttaggtataaagaagaaaccaagagaaggaaaaggaaacacaacctatttgtgggagtttcttttagatctacttcaagataaaaatacttgtcccaggtatattaaatggactcagagagaaaaaggcatattcaagctggtggattcaaaggctgtctctaagctttggggaaagcataagaacaaaccagacatgaactatgaaaccatgggacgagctttgagatactactaccaaaggggaattcttgcaaaggttgaaggacagaggcttgtatatcagttcaaggatatgccgaaaaacatagtggtcatagatgatgacaaaagtgaaacctgtaatgaagatttagcaggaactactgatgaaaaatcattagaacgagtgtcactgtctgcagaaagtctcctgaaagcagcatcctctgttcgcagtggaaaaaattcatcccctataaactgctccagagcagagaagggtgtagctagagttgtgaatatcacttcccctgggcacgatgcttcatccaggtctcctactaccactgcatctgtgtcagcaacagcagctccaaggacagttcgtgtggcaatgcaggtacctgttgtaatgacatcattgggtcagaaaatttcaactgtggcagttcagtcagttaatgcaggtgcaccattaataaccagcactagtccaacaacagcgacctctccaaaggtagtcattcagacaatccctactgtgatgccagcttctactgaaaatggagacaaaatcaccatgcagcctgccaaaattattaccatcccagctacacagcttgcacagtgtcaactgcagacaaagtcaaatctgactggatcaggaagcattaacattgttggaaccccattggctgtgagagcacttacccctgtttcaatagcccatggtacacctgtaatgagactatcaatgcctactcagcaggcatctggccagactcctcctcgagttatcagtgcagtcataaaggggccagaggttaaatcggaagcagtggcaaaaaagcaagaacatgatgtgaaaactttgcagctagtagaagaaaaaccagcagatggaaataagacagtgacccacgtagtggttgtcagtgcgccttcagctattgcccttcctgtaactatgaaaacagaaggactagtgacatgtgagaaa

SEQ ID NO: 6517 - DNA, 1563 bp, Homo sapiens
  source 1..1563: mol_type = genomic DNA
atggcgacgtctctgcatgagggacccacgaaccagctggatctgctcatccgggccgtggaagcatcagttcacagcagtaatgcacactgtacagataagacaattgaagctgctgaagccctgcttcatatggaatctcctacctgcttgagggattcaagaagtcctgaattcatccatgctgctatgaggccagatgtcattacagaaactgtagtggaggtgtcaactgaagagtctgaacccatggatacctctcctattccaacatcaccagatagccatgaaccaatgaaaaagaaaaaagttggccgtaaaccaaagacccagcaatcaccaatttccaatgggtctcctgagttaggtataaagaagaaaccaagagaaggaaaaggaaacacaacctatttgtgggagtttcttttagatctacttcaagataaaaatacttgtcccaggtatattaaatggactcagagagaaaaaggcatattcaagctggtggattcaaaggctgtctctaagctttggggaaagcataagaacaaaccagacatgaactatgaaaccatgggacgagctttgagatactactaccaaaggggaattcttgcaaaggttgaaggacagaggcttgtatatcagttcaaggatatgccgaaaaacatagtggtcatagatgatgacaaaagtgaaacctgtaatgaagatttagcaggaactactgatgaaaaatcattagaacgagtgtcactgtctgcagaaagtctcctgaaagcagcatcctctgttcgcagtggaaaaaattcatcccctataaactgctccagagcagagaagggtgtagctagagttgtgaatatcacttcccctgggcacgatgcttcatccaggtctcctactaccactgcatctgtgtcagcaacagcagctccaaggacagttcgtgtggcaatgcaggtacctgttgtaatgacatcattgggtcagaaaatttcaactgtggcagttcagtcagttaatgcaggtgcaccattaataaccagcactagtccaacaacagcgacctctccaaaggtagtcattcagacaatccctactgtgatgccagcttctactgaaaatggagacaaaatcaccatgcagcctgccaaaattattaccatcccagctacacagcttgcacagtgtcaactgcagacaaagtcaaatctgactggatcaggaagcattaacattgttggaaccccattggctgtgagagcacttacccctgtttcaatagcccatggtacacctgtaatgagactatcaatgcctactcagcaggcatctggccagactcctcctcgagttatcagtgcagtcataaaggggccagaggttaaatcggaagcagtggcaaaaaagcaagaacatgatgtgaaaactttgcagctagtagaagaaaaaccagcagatggaaataagacagtgacccacgtagtggttgtcagtgcgccttcagctattgcccttcctgtaactatgaaaacagaaggactagtgacatgtgagaaa

SEQ ID NO: 6518 - DNA, 1512 bp, Homo sapiens
  source 1..1512: mol_type = genomic DNA
atggcgacgtctctgcatgagggacccacgaaccagctggatctgctcatccgggccgtggaagcatcagttcacagcagtaatgcacactgtacagataagacaattgaagctgctgaagccctgcttcatatggaatctcctacctgcttgagggattcaagaagtcctgtggaagtgtttgttcctccttgtgtatcaactccagaattcatccatgctgctatgaggccagatgtcattacagaaactgtagtggaggtgtcaactgaagagtctgaacccatggatacctctcctattccaacatcaccagatagccatgaaccaatgaaaaagaaaaaaggaaacacaacctatttgtgggagtttcttttagatctacttcaagataaaaatacttgtcccaggtatattaaatggactcagagagaaaaaggcatattcaagctggtggattcaaaggctgtctctaagctttggggaaagcataagaacaaaccagacatgaactatgaaaccatgggacgagctttgagatactactaccaaaggggaattcttgcaaaggttgaaggacagaggcttgtatatcagttcaaggatatgccgaaaaacatagtggtcatagatgatgacaaaagtgaaacctgtaatgaagatttagcaggaactactgatgaaaaatcattagaacgagtgtcactgtctgcagaaagtctcctgaaagcagcatcctctgttcgcagtggaaaaaattcatcccctataaactgctccagagcagagaagggtgtagctagagttgtgaatatcacttcccctgggcacgatgcttcatccaggtctcctactaccactgcatctgtgtcagcaacagcagctccaaggacagttcgtgtggcaatgcaggtacctgttgtaatgacatcattgggtcagaaaatttcaactgtggcagttcagtcagttaatgcaggtgcaccattaataaccagcactagtccaacaacagcgacctctccaaaggtagtcattcagacaatccctactgtgatgccagcttctactgaaaatggagacaaaatcaccatgcagcctgccaaaattattaccatcccagctacacagcttgcacagtgtcaactgcagacaaagtcaaatctgactggatcaggaagcattaacattgttggaaccccattggctgtgagagcacttacccctgtttcaatagcccatggtacacctgtaatgagactatcaatgcctactcagcaggcatctggccagactcctcctcgagttatcagtgcagtcataaaggggccagaggttaaatcggaagcagtggcaaaaaagcaagaacatgatgtgaaaactttgcagctagtagaagaaaaaccagcagatggaaataagacagtgacccacgtagtggttgtcagtgcgccttcagctattgcccttcctgtaactatgaaaacagaaggactagtgacatgtgagaaa

SEQ ID NO: 6519 - DNA, 1743 bp, Homo sapiens
  source 1..1743: mol_type = genomic DNA
atgacatcagcagtggttgacagtggaggtactattttggagctttccagcaatggagtagaaaatcaagaggaaagtgaaaaggtttctgaatatccagcagtgattgtggagccagttccaagtgccagattagagcagggctatgcagcccaggttctggtttatgatgatgagacttatatgatgcaagatgtggcagaagaacaagaagttgagaccgagaatgtggaaacagtggaagcatcagttcacagcagtaatgcacactgtacagataagacaattgaagctgctgaagccctgcttcatatggaatctcctacctgcttgagggattcaagaagtcctgaattcatccatgctgctatgaggccagatgtcattacagaaactgtagtggaggtgtcaactgaagagtctgaacccatggatacctctcctattccaacatcaccagatagccatgaaccaatgaaaaagaaaaaagttggccgtaaaccaaagacccagcaatcaccaatttccaatgggtctcctgagttaggtataaagaagaaaccaagagaaggaaaaggaaacacaacctatttgtgggagtttcttttagatctacttcaagataaaaatacttgtcccaggtatattaaatggactcagagagaaaaaggcatattcaagctggtggattcaaaggctgtctctaagctttggggaaagcataagaacaaaccagacatgaactatgaaaccatgggacgagctttgagatactactaccaaaggggaattcttgcaaaggttgaaggacagaggcttgtatatcagttcaaggatatgccgaaaaacatagtggtcatagatgatgacaaaagtgaaacctgtaatgaagatttagcaggaactactgatgaaaaatcattagaacgagtgtcactgtctgcagaaagtctcctgaaagcagcatcctctgttcgcagtggaaaaaattcatcccctataaactgctccagagcagagaagggtgtagctagagttgtgaatatcacttcccctgggcacgatgcttcatccaggtctcctactaccactgcatctgtgtcagcaacagcagctccaaggacagttcgtgtggcaatgcaggtacctgttgtaatgacatcattgggtcagaaaatttcaactgtggcagttcagtcagttaatgcaggtgcaccattaataaccagcactagtccaacaacagcgacctctccaaaggtagtcattcagacaatccctactgtgatgccagcttctactgaaaatggagacaaaatcaccatgcagcctgccaaaattattaccatcccagctacacagcttgcacagtgtcaactgcagacaaagtcaaatctgactggatcaggaagcattaacattgttggaaccccattggctgtgagagcacttacccctgtttcaatagcccatggtacacctgtaatgagactatcaatgcctactcagcaggcatctggccagactcctcctcgagttatcagtgcagtcataaaggggccagaggttaaatcggaagcagtggcaaaaaagcaagaacatgatgtgaaaactttgcagctagtagaagaaaaaccagcagatggaaataagacagtgacccacgtagtggttgtcagtgcgccttcagctattgcccttcctgtaactatgaaaacagaaggactagtgacatgtgagaaa

SEQ ID NO: 6520 - DNA, 1779 bp, Homo sapiens
  source 1..1779: mol_type = genomic DNA
atgacatcagcagtggttgacagtggaggtactattttggagctttccagcaatggagtagaaaatcaagaggaaagtgaaaaggtttctgaatatccagcagtgattgtggagccagttccaagtgccagattagagcagggctatgcagcccaggttctggtttatgatgatgagacttatatgatgcaagatgtggcagaagaacaagaagttgagaccgagaatgtggaaacagtggaagcatcagttcacagcagtaatgcacactgtacagataagacaattgaagctgctgaagccctgcttcatatggaatctcctacctgcttgagggattcaagaagtcctgtggaagtgtttgttcctccttgtgtatcaactccagaattcatccatgctgctatgaggccagatgtcattacagaaactgtagtggaggtgtcaactgaagagtctgaacccatggatacctctcctattccaacatcaccagatagccatgaaccaatgaaaaagaaaaaagttggccgtaaaccaaagacccagcaatcaccaatttccaatgggtctcctgagttaggtataaagaagaaaccaagagaaggaaaaggaaacacaacctatttgtgggagtttcttttagatctacttcaagataaaaatacttgtcccaggtatattaaatggactcagagagaaaaaggcatattcaagctggtggattcaaaggctgtctctaagctttggggaaagcataagaacaaaccagacatgaactatgaaaccatgggacgagctttgagatactactaccaaaggggaattcttgcaaaggttgaaggacagaggcttgtatatcagttcaaggatatgccgaaaaacatagtggtcatagatgatgacaaaagtgaaacctgtaatgaagatttagcaggaactactgatgaaaaatcattagaacgagtgtcactgtctgcagaaagtctcctgaaagcagcatcctctgttcgcagtggaaaaaattcatcccctataaactgctccagagcagagaagggtgtagctagagttgtgaatatcacttcccctgggcacgatgcttcatccaggtctcctactaccactgcatctgtgtcagcaacagcagctccaaggacagttcgtgtggcaatgcaggtacctgttgtaatgacatcattgggtcagaaaatttcaactgtggcagttcagtcagttaatgcaggtgcaccattaataaccagcactagtccaacaacagcgacctctccaaaggtagtcattcagacaatccctactgtgatgccagcttctactgaaaatggagacaaaatcaccatgcagcctgccaaaattattaccatcccagctacacagcttgcacagtgtcaactgcagacaaagtcaaatctgactggatcaggaagcattaacattgttggaaccccattggctgtgagagcacttacccctgtttcaatagcccatggtacacctgtaatgagactatcaatgcctactcagcaggcatctggccagactcctcctcgagttatcagtgcagtcataaaggggccagaggttaaatcggaagcagtggcaaaaaagcaagaacatgatgtgaaaactttgcagctagtagaagaaaaaccagcagatggaaataagacagtgacccacgtagtggttgtcagtgcgccttcagctattgcccttcctgtaactatgaaaacagaaggactagtgacatgtgagaaa

SEQ ID NO: 6521 - DNA, 783 bp, Homo sapiens
  source 1..783: mol_type = genomic DNA
atggtggtggtggcagccgcgccgaacccggccgacgggacccctaaagttctgcttctgtcggggcagcccgcctccgccgccggagccccggccggccaggccctgccgctcatggtgccagcccagagaggggccagcccggaggcagcgagcggggggctgccccaggcgcgcaagcgacagcgcctcacgcacctgagccccgaggagaaggcgctgaggaggaaactgaaaaacagagtagcagctcagactgccagagatcgaaagaaggctcgaatgagtgagctggaacagcaagtggtagatttagaagaagagaaccaaaaacttttgctagaaaatcagcttttacgagagaaaactcatggccttgtagttgagaaccaggagttaagacagcgcttggggatggatgccctggttgctgaagaggaggcggaagccaaggggaatgaagtgaggccagtggccgggtctgctgagtccgcagcactcagactacgtgcacctctgcagcaggtgcaggcccagttgtcacccctccagaacatctccccatggattctggcggtattgactcttcagattcagagtctgatatcctgttgggcattctggacaacttggacccagtcatgttcttcaaatgcccttccccagagcctgccagcctggaggagctcccagaggtctacccagaaggacccagttccttaccagcctccctttctctgtcagtggggacgtcatcagccaagctggaagccattaatgaac

SEQ ID NO: 6522 - DNA, 1128 bp, Homo sapiens
  source 1..1128: mol_type = genomic DNA
atggtggtggtggcagccgcgccgaacccggccgacgggacccctaaagttctgcttctgtcggggcagcccgcctccgccgccggagccccggccggccaggccctgccgctcatggtgccagcccagagaggggccagcccggaggcagcgagcggggggctgccccaggcgcgcaagcgacagcgcctcacgcacctgagccccgaggagaaggcgctgaggaggaaactgaaaaacagagtagcagctcagactgccagagatcgaaagaaggctcgaatgagtgagctggaacagcaagtggtagatttagaagaagagaaccaaaaacttttgctagaaaatcagcttttacgagagaaaactcatggccttgtagttgagaaccaggagttaagacagcgcttggggatggatgccctggttgctgaagaggaggcggaagccaaggggaatgaagtgaggccagtggccgggtctgctgagtccgcagcaggtgcaggcccagttgtcacccctccagaacatctccccatggattctggcggtattgactcttcagattcagagtctgatatcctgttgggcattctggacaacttggacccagtcatgttcttcaaatgcccttccccagagcctgccagcctggaggagctcccagaggtctacccagaaggacccagttccttaccagcctccctttctctgtcagtggggacgtcatcagccaagctggaagccattaatgaactaattcgttttgaccacatatataccaagcccctagtcttagagataccctctgagacagagagccaagctaatgtggtagtgaaaatcgaggaagcacctctcagcccctcagagaatgatcaccctgaattcattgtctcagtgaaggaagaacctgtagaagatgacctcgttccggagctgggtatctcaaatctgctttcatccagccactgcccaaagccatcttcctgcctactggatgcttacagtgactgtggatacgggggttccctttccccattcagtgacatgtcctctctgcttggtgtaaaccattcttgggaggacacttttgccaatgaactctttccccagctgattagtgtc

SEQ ID NO: 6523 - DNA, 705 bp, Homo sapiens
  source 1..705: mol_type = genomic DNA
atgctgcggggcgcgccaggactaggcctcacggcgcggaagggggccgaggactctgcggaggacttggggggcccctgccccgagcccgggggcgattcgggggtgctgggggcgaacggcgcttcctgcagccggggcgaggcggaggagccggcgggcaggaggcgcgcgcggccggtgcggtccaaggcgcggcgcatggccgccaacgtgcgggagcgcaagcgcatcctagactacaacgaggccttcaacgcgctgcgccgggcgctgcggcacgacctgggcggcaagaggctctccaagatcgccacgctgcgcagggccatccaccgcatcgccgcgctctccctggtcctgcgcgccagccccgcgccccgcgggccctgcggacacctggagtgccacggcccggccgcgcgcggggacaccggggacacaggcgccagccccccgccgcctgcagggcccagcctcgcgcgcccagacgccgcccgcccctcggtgccgtccgcgccccgctgcgcctcgtgccccccgcacgcgcccctggcacggcccagtgcggtggccgaggggccgggcctagcacaggcctccgggggaagctggcgccgctgtccgggggcttcctctgccgggccgcctccctggccgcggggctacctgcgatccgcccccgggatgggccatccgcgctcc

SEQ ID NO: 6524 - DNA, 657 bp, Homo sapiens
  source 1..657: mol_type = genomic DNA
atggaccccgcgcccggcgtcctagatccccgcgccgcgccgcccgcgctcctgggcaccccgcaagccgaggtgctggaggacgtgttgcgggagcagttcgggccgctgccccagctggccgctgtctgccggctcaagcggctgccctcgggcggctactcgtccactgaaaacctccagttggtgctggagcggcggcgtgtggccaacgccaaggagcgtgagcggataaaaaatctcaaccgtggttttgccagattgaaggcacttgtgccatttcttccccaaagcaggaagcccagcaaagttgatatccttaaaggtgcgactgaatatatacaggttctcagtgatcttttggaaggagccaaagactcaaagaaacaagacccagatgagcagagctatagtaacaacagttctgaatcacatacatcctcggcaagacagctgtcaagaaacatcacccaacatatcagctgtgctttcggcttgaagaatgaagaggaagggccttgggcagatggtggcagtggtgagccagcacacgcttgtcgccacagtgtgatgtctacgactgaaattatctccccaaccagaagtctggatagattcccagaagtagaactgctgagtcacagacttccacaagta

SEQ ID NO: 6525 - DNA, 4758 bp, Homo sapiens
  source 1..4758: mol_type = genomic DNA
atggagacgtctgcctcagccactgcctccgagaagcaagaagccaaaagtgggatcctggaggccgctggcttccccgacccgggtaaaaaggcctctcctttggtggtggctgcagcggcagcagcagcggtagctgcccaaggagtgccgcagcatctcttgccaccattccatgcgcccctaccgattgacatgcgacaccaggaaggaaggtaccattacgagcctcattctgtccacggtgtgcacgggccccctgccctcagcggcagccctgtcatctctgacatctccttgatccggctttccccgcacccggctggccctggggagtcccccttcaacgccccccacccgtacgtgaacccccacatggagcactacctccgttctgtgcacagcagccccacgctctccatgatctctgcagccaggggcctcagccccgctgatgtggcccaggagcaccttaaggagaggggactgtttggccttcctgctccaggcaccaccccctcagactattaccaccagatgaccctcgtggcaggccaccccgcgccctacggggacctgctgatgcagagcgggggcgctgccagcgcaccccatctccacgactacctcaaccccgtggacgtgtcccgtttctccagcccgcgggtgacgccccgcctgagccgcaagcgggcgctgtccatctccccactctcagacgccagcctggacctgcagcggatgatccgcacctcacccaactcgctagtggcctacatcaacaactcccgaagcagctcagcggccagcggttcctacgggcatctgtcagcgggtgccctcagcccagccttcaccttcccccaccccatcaaccccgtggcctaccagcagattctgagccagcagaggggtctggggtcagcctttggacacacaccacccctgatccagccctcacccaccttcctggcccagcagcccatggccctcacctccatcaatgccacgcccacccagctcagcagcagcagcaactgtctgagtgacaccaaccagaacaagcagagcagtgagtcggccgtcagcagcaccgtcaaccctgtcgccattcacaagcgcagcaaggtcaagaccgagcctgagggcctgcggccggcctcccctctggcgctgacgcagggccaggtgtctggacacggctcatgtgggtgtgcccttcccctctcccaggagcagctggctgacctcaaggaagatctggacagggatgactgtaagcaggaggctgaggtggtcatctatgagaccaactgccactgggaagactgcaccaaggagtacgacacccaggagcagctggtgcatcacatcaacaacgagcacatccacggggagaagaaggagtttgtgtgccgctggcaggcctgcacgcgggagcagaagcccttcaaggcgcagtacatgctggtggtgcacatgcggcgacacacgggcgagaagccccacaagtgcacgttcgagggctgctcgaaggcctactcccgcctggagaacctgaagacacacctgcggtcccacaccggggagaagccatatgtgtgtgagcacgagggctgcaacaaagccttctccaacgcctcggaccgcgccaagcaccagaatcgcacccactccaacgagaaaccctacatctgcaagatcccaggctgcaccaagagatacacagaccccagctctctccggaagcatgtgaaaacggtccacggcccagatgcccacgtcaccaagaagcagcgcaatgacgtgcacctccgcacaccgctgctcaaagagaatggggacagtgaggccggcacggagcctggcggcccagagagcaccgaggccagcagcaccagccaggccgtggaggactgcctgcacgtcagagccatcaagaccgagagctccgggctgtgtcagtccagccccggggcccagtcgtcctgcagcagcgagccctctcctctgggcagtgcccccaacaatgacagtggcgtggagatgccggggacggggcccgggagcctgggagacctgacggcactggatgacacacccccaggggccgacacctcagccctggctgccccctccgctggtggcctccagctgcgcaaacacatgaccaccatgcaccggttcgagcagctcaagaaggagaagctcaagtcactcaaggattcctgctcatgggccgggccgactccacacacgcggaacaccaagctgcctcccctcccgggaagtggctccatcctggaaaacttcagtggcagtgggggcggcgggcccgcggggctgctgccgaacccgcggctgtcggagctgtccgcgagcgaggtgaccatgctgagccagctgcaggagcgccgcgacagctccaccagcacggtcagctcggcctacaccgtgagccgccgctcctccggcatctccccctacttctccagccgccgctccagcgaggcctcgcccctgggcgccggccgcccgcacaacgcgagctccgctgactcctacgaccccatctccacggacgcgtcgcggcgctcgagcgaggccagccagtgcagcggcggctccgggctgctcaacctcacgccggcgcagcagtacagcctgcgggccaagtacgcggcagccactggcggccccccgcccactccgctgccgggcctggagcgcatgagcctgcggaccaggctggcgctgctggacgcgcccgagcgcacgctgcccgccggctgcccacgcccactggggccgcggcgtggcagcgacgggccgacctatggccacggccacgcgggggctgcgcccgccttcccccacgaggctccaggcggcggagccaggcgggccagcgaccctgtgcggcggcccgatgccctgtccctgccgcgggtgcagcgcttccacagcacccacaacgtgaaccccggcccgctgccgccctgtgccgacaggcgaggcctccgcctgcagagccacccgagcaccgacggcggcctggcccgcggcgcctactcgccccggccgcctagcatcagcgagaacgtggcgatggaggccgtggcggcaggagtggacggcgcggggcccgaggccgacctggggctgccggaggacgacctggtgcttccagacgacgtggtgcagtacatcaaggcgcacgccagtggcgctctggacgagggcaccgggcaggtgtatcccacggaaagcactggcttctctgacaaccccagactacccagcccggggctgcacggccagcgcaggatggtggctgcggactccaacgtgggcccctccgcccctatgctgggaggatgccagttaggctttggggcgccctccagcctgaacaaaaataacatgcctgtgcagtggaatgaggtgagctccggcaccgtagacgccctggccagccaggtgaagcctccaccctttcctcagggcaacctggcggtggtgcagcagaagcctgcctttggccagtacccgggctacagtccgcaaggcctacaggctagccctgggggcctggacagcacgcagccacacctgcagccccgcagcggagccccctcccagggcatccccagggtaaactacatgcagcagctgcgacagccagtggcaggcagccagtgtcctggcatgactaccactatgagcccccatgcctgctatggccaagtccacccccagctgagccccagcaccatcagtggggccctcaaccagttcccccaatcctgcagcaacatgccagccaagccagggcatctggggcaccctcagcagacagaagtggcacctgaccccaccacgatgggcaatcgccacagggaacttggggtccccgattcagccctggctggagtgccaccacctcacccagtccagagctacccacagcagagccatcacctggcagcctccatgagccaggagggctaccaccaggtccccagccttctgcctgcccgccagcctggcttcatggagccccaaacaggcccgatgggggtggctacagcaggctttggcctagtgcagccccggcctcccctcgagcccagccccactggccgccaccgtggggtacgtgctgtgcagcagcagctggcctacgccagggccacaggccatgccatggctgccatgccgtccagtcaggaaacagcagaggctgtgcccaagggagcgatgggcaacatggggtcggtgcctccccagccgcctccgcaggacgcaggtggggccccggaccacagcatgctctactactacggccagatccacatgtacgaacaggatggaggcctggagaacctcgggagctgccaggtcatgcggtcccagccaccacagccacaggcctgtcaggacagcatccagccccagcccttgccctcaccaggggtcaaccaggtgtccagcactgtggactcccagctcctggaggccccccagattgacttcgatgccatcatggatgatggcgatcactcgagtttgttctcgggtgctctgagccccagcctcctccacagcctctcccagaactcctcccgcctcaccaccccccgaaactccttgaccctgccctccatccccgcaggcatcagcaacatggctgtcggggacatgagctccatgctcaccagcctcgccgaggagagcaagttcctgaacatgatgacc

SEQ ID NO: 6526 - DNA, 4740 bp, Homo sapiens
  source 1..4740: mol_type = genomic DNA
atggaggcccagtcccacagctccacgaccactgaaaagaaaaaagttgagaattccatagtgaagtgctccactcgaacagatgtgagcgagaaagccgttgcctccagcaccacttctaatgaggatgaaagtcctggacagacttatcacagagagagaagaaacgcaatcactatgcagccacagaatgtccaggggctcagcaaagtcagtgaggaaccttcaacatcgagtgacgagagggcctcattgatcaagaaagagatccatgggtccctgccacacgtggcggagccctctgtgccgtaccgcgggacggtgtttgccatggaccccaggaatggttacatggagccccactaccaccctcctcatcttttccctgccttccatcctcctgtaccaattgatgccagacatcatgagggccgttaccattacgatccatctccgattcctccattgcatatgacttccgccttatctagtagccctacgtatccggacctgcccttcattaggatctccccacaccggaaccccactgctgcttccgagtctcccttcagccctccacatccctacattaatccctacatggactatatccgctccttgcacagcagcccatcgctctccatgatctcagcaacccgtgggctgagccctacagatgcgccccatgcaggagtcagcccagcagaatactatcatcagatggccctgctaactggccagcgcagcccctatgcagacattattccctcagctgccaccgccggcacgggggccatccacatggaatatcttcatgctatggatagcaccagattctccagccccaggctgtcagccaggccgagccgaaaacgtacactgtccatatcaccactctccgatcatagctttgaccttcagaccatgataaggacgtctcccaactccttggtcacgattctcaataattcccgtagcagctcttcagcaagtggctcctatggtcacttatctgcaagtgcaatcagccctgccttgagcttcacctactcttccgcgcccgtctctctccacatgcatcagcagatcctaagccgacaacagagcttaggttcagcctttggacacagccctccactcatccaccctgccccaacttttccaacacagaggcctattccagggatccctacggttctgaaccccgtccaggtcagctccggcccttctgagtcctcacagaacaagcccacgagtgagtctgcagtgagcagcactggtgacccgatgcacaacaagaggtccaagatcaaacccgatgaagacctccccagcccaggggctcgggggcagcaggaacagcccgaaggaacaacccttgtcaaggaggaaggggacaaagatgaaagcaaacaggagcctgaagtcatctatgagacaaactgccactgggaaggctgcgcgagggagttcgacacccaagagcagcttgtgcaccatataaataacgaccatattcatggagagaagaaggagttcgtgtgcaggtggctggactgctcaagagagcagaaacccttcaaagcccagtatatgttggtagtgcatatgagaagacacacgggcgagaagcctcacaaatgcacttttgaaggttgcacaaaggcctactcgagactagaaaacttgaaaacacacttgagatctcacactggagagaaaccatacgtctgtgagcacgaaggttgcaacaaggctttctcaaatgcctctgatcgcgccaaacaccaaaacagaacgcattccaatgagaaaccatatgtgtgcaaaatcccaggctgcactaagcgttacacagacccaagctccctccggaaacatgtgaagacagtgcatggcccagaggctcatgtcaccaagaagcagcgaggggacatccatcctcggccgccacccccgagagattccggcagccattcacagtccaggtcgcctggccgaccgactcagggagcccttggtgagcagcaggacctcagcaacactacctcaaagcgggaagaatgcctccaggtgaaaaccgtcaaggcagagaagccaatgacatctcagccaagccctggtggtcagtcttcatgcagcagccaacagtcccccatcagcaactattccaacagtgggctcgagcttcctctgaccgatggaggtagtataggagacctcagtgccatcgatgaaaccccaatcatggactcaaccatttccactgcaaccacagcccttgctttgcaagccaggagaaacccggcagggaccaaatggatggagcacgtaaaactagaaaggctaaaacaagtgaatggaatgtttccgcgactgaaccccattctaccccctaaagcccctgcggtctctcctctcataggaaatggcacacagtccaacaacacctgcagcttgggtgggcccatgacgcttctcccgggcagaagcgacctctctggggtggacgtcactatgctgaacatgctcaacagaagggacagcagcgccagcaccatcagctcggcctacctgagcagccgccgctcctcagggatctcgccctgcttctccagccgccgctccagcgaggcgtcacaggccgagggccggccgcagaacgtgagcgtggccgactcctacgaccccatctccaccgacgcctcgcgccgctccagcgaagccagccagagcgacggcctgcccagcctgctcagcctcacgcccgcccagcagtaccgcctcaaggccaagtacgcggctgccacaggagggccgccgccgacgcccctgcccaacatggagaggatgagcctgaagacgcgcctggcgctgctcggggatgccctcgagcctggcgtggccctgcctccagttcatgccccgaggaggtgcagcgacgggggagcccacggctacgggcggcgccacctgcagccgcacgatgcgccgggccacggcgtgaggagggccagcgacccggtgcggacaggctccgagggcctggccctgcctcgtgtgccgcgcttcagcagcctcagcagctgcaaccccccggcgatggccacgtccgcggagaagcgcagtctcgtgcttcagaattacacgcggcccgagggcggccagtcccgaaacttccactcgtccccctgtcctcccagcatcaccgagaacgtcaccctggagtccctgaccatggacgctgatgccaacctgaacgatgaggatttcctgccggacgacgtggtgcagtatttaaattcccagaaccaagcagggtacgagcagcacttccccagcgccctcccggacgacagcaaagtgccccacgggcccggtgactttgacgcgcccgggctgccagacagccacgctggccagcagttccatgccctcgagcagccctgccccgagggcagcaaaaccgacctgcccattcagtggaacgaagtcagctccggaagcgccgacctgtcctcctccaagctcaagtgtgggccgcggcccgctgtgccgcagactcgcgcctttgggttctgcaacggcatggtcgtccacccgcagaaccccttgaggagcgggcctgctgggggctatcagaccctcggggagaacagcaacccctacggtggcccagagcacttgatgctccacaacagccccggaagtggcaccagtggaaacgccttccatgaacagccctgtaaggccccgcagtatgggaactgtctcaacaggcagccagtggcccctggtgcactcgacggtgcctgtggtgccgggattcaagcctcaaagctgaagagcacccccatgcaagggagcgggggccagctgaatttcggcctgccggtagcgccaaatgagtcagctggcagcatggtgaatggcatgcagaaccaggacccagtgggacaggggtacctggctcaccagctcctcggcgacagcatgcagcacccgggggcaggccgccccggtcagcagatgcttgggcagattagtgctacctcacacatcaacatctaccaagggccagagagctgcctgccaggggctcacggcatgggcagccagccgtcaagcttggcagttgtcaggggctaccagccatgtgccagctttgggggcagcaggcgccaggctatgccgagggacagccttgctctgcagtcaggacagctcagtgacacaagtcagacctgcagggtgaatggtatcaagatggagatgaaagggcagccccatccgctgtgctctaatctgcagaattactctggtcagttctatgaccaaaccgtgggcttcagtcagcaagacacgaaagctggttcattctctatttcagacgccagctgcctgctacaggggaccagcgccaaaaactctgagttactttccccaggtgctaatcaggtgacaagcacagtggacagcctcgacagccatgacctggaaggggtacagattgacttcgatgccatcatagacgatggggaccactccagcctgatgtcgggggccctgagcccaagtatcattcagaacctttcccatagctcctcccgcctcaccacgcctcgggcgtccctcccattcccagcgctgtccatgagcaccaccaacatggctatcggggacatgagttctttgctgacctccctagcggaagaaagcaaattccttgcagttatgcaa

SEQ ID NO: 6527 - DNA, 3639 bp, Homo sapiens
  source 1..3639: mol_type = genomic DNA
atgggggtggactttgatgtgaagactttctgccacaacttgcgggcgactaagccaccatacgagtgcccggtggagacctgccgaaaggtctacaagagttacagtggtattgagtaccacctgtaccactatgaccacgacaacccaccacccccacaacaaactccactccgcaagcacaagaaaaaggggcgccagtcacgcccagccaacaagcagtcacccagcccctcagaggtctcacagtcaccaggccgtgaggtgatgagctatgcacaggcccagcgcatggtggaggtggacttgcatggccgcgtccaccgcatcagcatctttgacaacctggatgtggtgtcagaggatgaggaagcccccgaggaggcccctgagaatggcagcaacaaggagaacactgagacaccagctgctactcccaagtcaggcaaacataagaacaaggagaagcgcaaggactccaaccatcaccaccaccacaatgtttctgcgagcaccactcccaagctgccagaggtggtctatcgggagctggaacaggacacccctgatgccccaccccggccaacttcctattaccggtacatcgagaagtctgcagaggagctggacgaggaagtagagtatgacatggacgaggaggactacatctggctggatatcatgaatgagcgtcggaagacagagggtgtaagtcccatcccgcaggagatctttgagtacctaatggaccgactggagaaggagtcgtactttgagagtcataataaaggcgaccctaatgcgctagtggacgaggatgctgtttgctgtatctgcaatgatggtgagtgccagaacagcaatgtcatcctcttctgtgacatgtgcaacctggccgtgcaccaggagtgctacggtgtcccctatatccctgagggccagtggctgtgccgccgttgcctgcagtcaccctctcgtgctgtggattgtgccctgtgccccaacaagggcggtgccttcaagcagacagatgacgggcgctgggcccatgtggtgtgtgccttgtggatccctgaggtctgcttcgccaacacggtcttcctagagcctattgacagcattgagcacatcccaccagctcgctggaagctcacctgctacatttgcaaacaacggggctcaggggcctgcatccagtgccacaaggccaactgttacacagctttccatgtgacatgcgcccagcaggctggcctttacatgaagatggagcctgtgcgggagacaggcgccaacggcacctctttcagtgtccgcaagacagcctactgcgacatccacacgcctccaggttcagcacgccgactgcctgccctgtcccacagcgagggtgaggaggatgaagatgaggaggaggatgagggtaagggctggagctcagagaaagtcaagaaggccaaggccaagtcccggatcaaaatgaagaaggcacggaagatcctggcagagaagcgggcagcagcacctgtggtgtcagtgccctgcatcccaccacacaggcttagtaaaatcaccaaccgcctgaccatccaaaggaagagccagttcatgcagaggctgcacagctactggacactgaagcggcagtcacggaatggggtcccattgctacgtcgcctgcagacacacctgcaatctcagaggaactgtgaccaagttgggagagattctgaggataagaactgggcccttaaagaacagctcaagtcctggcagcggctccggcatgacttggagcgagctcggctgctcgtggaattgatccgcaagcgggaaaaactcaaaagggagacgatcaaggttcagcagattgccatggagatgcagctgactcctttcctcatcctccttcgcaaaaccttggagcagctccaagagaaggacacaggcaacatcttcagcgagccggtccctctgtctgaggtacctgactacctagaccacatcaaaaagcccatggactttttcaccatgaagcagaacttggaggcttaccgctacctgaattttgatgattttgaggaggacttcaacctcatcgtcagcaactgcctcaagtataacgccaaggacaccatcttctaccgggcagcagtgcggcttcgtgagcagggtggtgctgtgctccgccaggcccggcgccaggcagaaaaaatgggcattgactttgagacgggcatgcatatcccccacagcctggctggagatgaggccacacaccacactgaagatgccgaggaagagcggctggtcttgctggagaaccagaagcacctgccagtggaagaacagctaaagctgcttctggagcggctggacgaagtgaatgccagcaagcagagtgtgggccgctcacggcgtgcaaagatgatcaagaaagagatgacggcactgcggcggaagcttgcccatcagcgagagacgggacgtgatggccctgagcggcatggcccctcgagccggggtagtctgacaccccacccggcagcctgtgacaaggatgggcagacagatagtgcggcagaggagagcagcagccaggagacaagcaaaggcctgggtcccaacatgtcctcaacccccgcacatgaggtgggcaggagaacctcagttctgttctccaaaaagaacccgaagacagctggaccgcccaagaggccgggccggccccccaaaaaccgggagagccagatgacccccagccacggaggcagtcctgtggggcccccccagctccccatcatgagttccctgcgtcagcgcaagcggggtaggagcccccggcccagttcgagctcagacagcgacagtgataagtccacagaagaccccccaatggacttaccagccaatggcttcagcggtggaaaccaaccagtgaagaagagtttcttggtataccgtaatgactgcagccttccccggagcagctcagactctgagtccagcagcagtagcagtagcagcgctgcttcagaccggaccagcacaacgccctcaaaacaaggccggggcaaaccctccttctctcggggcactttcccagaggacagcagtgaggatacctcaggcactgagaatgaggcctactccgtgggcactggccgcggcgtgggccacagcatggtaaggaagagtctgggccggggagctggctggctgtcagaggatgaggactccccgctggatgctctggacctcgtgtgggccaaatgccgaggctatccatcatacccagctctgatcattgatccaaagatgccccgagaaggtatgttccaccatggggttcccatccctgtgcccccactggaggtgctgaaacttggggagcagatgacccaggaagcccgagagcatctctacctcgtcctcttctttgacaacaaacgaacctggcagtggctgcccaggaccaagctggttcctctgggtgtgaaccaggacctagacaaggagaagatgctggagggccgcaagtccaacatccgcaagtcagtacagatcgcctaccacagggctctgcagcaccgcagcaaggtgcaaggcgagcagagcagtgagaccagcgatagtgat

SEQ ID NO: 6528 - DNA, 3357 bp, Homo sapiens
  source 1..3357: mol_type = genomic DNA
atgggggtggactttgatgtgaagactttctgccacaacttgcgggcgactaagccaccatacgagtgcccggtggagacctgccgaaaggtctacaagagttacagtggtattgagtaccacctgtaccactatgaccacgacaacccaccacccccacaacaaactccactccgcaagcacaagaaaaaggggcgccagtcacgcccagccaacaagcagtcacccagcccctcagaggtctcacagtcaccaggccgtgaggtgatgagctatgcacaggcccagcgcatggtggaggtggacttgcatggccgcgtccaccgcatcagcatctttgacaacctggatgtggtgtcagaggatgaggaagcccccgaggaggcccctgagaatggcagcaacaaggagaacactgagacaccagctgctactcccaagtcaggcaaacataagaacaaggagaagcgcaaggactccaaccatcaccaccaccacaatgtttctgcgagcaccactcccaagctgccagaggtggtctatcgggagctggaacaggacacccctgatgccccaccccggccaacttcctattaccggtacatcgagaagtctgcagaggagctggacgaggaagtagagtatgacatggacgaggaggactacatctggctggatatcatgaatgagcgtcggaagacagagggtgtaagtcccatcccgcaggagatctttgagtacctaatggaccgactggagaaggagtcgtactttgagagtcataataaaggcgaccctaatgcgctagtggacgaggatgctgtttgctgtatctgcaatgatggtgagtgccagaacagcaatgtcatcctcttctgtgacatgtgcaacctggccgtgcaccaggagtgctacggtgtcccctatatccctgagggccagtggctgtgccgccgttgcctgcagtcaccctctcgtgctgtggattgtgccctgtgccccaacaagggcggtgccttcaagcagacagatgacgggcgctgggcccatgtggtgtgtgccttgtggatccctgaggtctgcttcgccaacacggtcttcctagagcctattgacagcattgagcacatcccaccagctcgctggaagctcacctgctacatttgcaaacaacggggctcaggggcctgcatccagtgccacaaggccaactgttacacagctttccatgtgacatgcgcccagcaggctggcctttacatgaagatggagcctgtgcgggagacaggcgccaacggcacctctttcagtgtccgcaagacagcctactgcgacatccacacgcctccaggttcagcacgccgactgcctgccctgtcccacagcgagggtgaggaggatgaagatgaggaggaggatgagggtaagggctggagctcagagaaagtcaagaaggccaaggccaagtcccggatcaaaatgaagaaggcacggaagatcctggcagagaagcgggcagcagcacctgtggtgtcagtgccctgcatcccaccacacaggcttagtaaaatcaccaaccgcctgaccatccaaaggaagagccagttcatgcagaggctgcacagctactggacactgaagcggcagtcacggaatggggtcccattgctacgtcgcctgcagacacacctgcaatctcagaggaactgtgaccaagttgggagagattctgaggataagaactgggcccttaaagaacagctcaagtcctggcagcggctccggcatgacttggagcgagctcggctgctcgtggaattgatccgcaagcgggaaaaactcaaaagggagacgatcaaggttcagcagattgccatggagatgcagctgactcctttcctcatcctccttcgcaaaaccttggagcagctccaagagaaggacacaggcaacatcttcagcgagccggtccctctgtctgaggtacctgactacctagaccacatcaaaaagcccatggactttttcaccatgaagcagaacttggaggcttaccgctacctgaattttgatgattttgaggaggacttcaacctcatcgtcagcaactgcctcaagtataacgccaaggacaccatcttctaccgggcagcagtgcggcttcgtgagcagggtggtgctgtgctccgccaggcccggcgccaggcagaaaaaatgggcattgactttgagacgggcatgcatatcccccacagcctggctggagatgaggccacacaccacactgaagatgcagccgaggaagagcggctggtcttgctggagaaccagaagcacctgccagtggaagaacagctaaagctgcttctggagcggctggacgaagtgaatgccagcaagcagagtgtgggccgctcacggcgtgcaaagatgatcaagaaagagatgacggcactgcggcggaagcttgcccatcagcgagagacgggacgtgatggccctgagcggcatggcccctcgagccggggtagtctgacaccccacccggcagcctgtgacaaggatgggcagacagatagtgcggcagaggagagcagcagccaggagacaagcaaagacttaccagccaatggcttcagcggtggaaaccaaccagtgaagaagagtttcttggtataccgtaatgactgcagccttccccggagcagctcagactctgagtccagcagcagtagcagtagcagcgctgcttcagaccggaccagcacaacgccctcaaaacaaggccggggcaaaccctccttctctcggggcactttcccagaggacagcagtgaggatacctcaggcactgagaatgaggcctactccgtgggcactggccgcggcgtgggccacagcatggtaaggaagagtctgggccggggagctggctggctgtcagaggatgaggactccccgctggatgctctggacctcgtgtgggccaaatgccgaggctatccatcatacccagctctgatcattgatccaaagatgccccgagaaggtatgttccaccatggggttcccatccctgtgcccccactggaggtgctgaaacttggggagcagatgacccaggaagcccgagagcatctctacctcgtcctcttctttgacaacaaacgaacctggcagtggctgcccaggaccaagctggttcctctgggtgtgaaccaggacctagacaaggagaagatgctggagggccgcaagtccaacatccgcaagtcagtacagatcgcctaccacagggctctgcagcaccgcagcaaggtgcaaggcgagcagagcagtgagaccagcgatagtgat

SEQ ID NO: 6529 - DNA, 3642 bp, Homo sapiens
  source 1..3642: mol_type = genomic DNA
atgggggtggactttgatgtgaagactttctgccacaacttgcgggcgactaagccaccatacgagtgcccggtggagacctgccgaaaggtctacaagagttacagtggtattgagtaccacctgtaccactatgaccacgacaacccaccacccccacaacaaactccactccgcaagcacaagaaaaaggggcgccagtcacgcccagccaacaagcagtcacccagcccctcagaggtctcacagtcaccaggccgtgaggtgatgagctatgcacaggcccagcgcatggtggaggtggacttgcatggccgcgtccaccgcatcagcatctttgacaacctggatgtggtgtcagaggatgaggaagcccccgaggaggcccctgagaatggcagcaacaaggagaacactgagacaccagctgctactcccaagtcaggcaaacataagaacaaggagaagcgcaaggactccaaccatcaccaccaccacaatgtttctgcgagcaccactcccaagctgccagaggtggtctatcgggagctggaacaggacacccctgatgccccaccccggccaacttcctattaccggtacatcgagaagtctgcagaggagctggacgaggaagtagagtatgacatggacgaggaggactacatctggctggatatcatgaatgagcgtcggaagacagagggtgtaagtcccatcccgcaggagatctttgagtacctaatggaccgactggagaaggagtcgtactttgagagtcataataaaggcgaccctaatgcgctagtggacgaggatgctgtttgctgtatctgcaatgatggtgagtgccagaacagcaatgtcatcctcttctgtgacatgtgcaacctggccgtgcaccaggagtgctacggtgtcccctatatccctgagggccagtggctgtgccgccgttgcctgcagtcaccctctcgtgctgtggattgtgccctgtgccccaacaagggcggtgccttcaagcagacagatgacgggcgctgggcccatgtggtgtgtgccttgtggatccctgaggtctgcttcgccaacacggtcttcctagagcctattgacagcattgagcacatcccaccagctcgctggaagctcacctgctacatttgcaaacaacggggctcaggggcctgcatccagtgccacaaggccaactgttacacagctttccatgtgacatgcgcccagcaggctggcctttacatgaagatggagcctgtgcgggagacaggcgccaacggcacctctttcagtgtccgcaagacagcctactgcgacatccacacgcctccaggttcagcacgccgactgcctgccctgtcccacagcgagggtgaggaggatgaagatgaggaggaggatgagggtaagggctggagctcagagaaagtcaagaaggccaaggccaagtcccggatcaaaatgaagaaggcacggaagatcctggcagagaagcgggcagcagcacctgtggtgtcagtgccctgcatcccaccacacaggcttagtaaaatcaccaaccgcctgaccatccaaaggaagagccagttcatgcagaggctgcacagctactggacactgaagcggcagtcacggaatggggtcccattgctacgtcgcctgcagacacacctgcaatctcagaggaactgtgaccaagttgggagagattctgaggataagaactgggcccttaaagaacagctcaagtcctggcagcggctccggcatgacttggagcgagctcggctgctcgtggaattgatccgcaagcgggaaaaactcaaaagggagacgatcaaggttcagcagattgccatggagatgcagctgactcctttcctcatcctccttcgcaaaaccttggagcagctccaagagaaggacacaggcaacatcttcagcgagccggtccctctgtctgaggtacctgactacctagaccacatcaaaaagcccatggactttttcaccatgaagcagaacttggaggcttaccgctacctgaattttgatgattttgaggaggacttcaacctcatcgtcagcaactgcctcaagtataacgccaaggacaccatcttctaccgggcagcagtgcggcttcgtgagcagggtggtgctgtgctccgccaggcccggcgccaggcagaaaaaatgggcattgactttgagacgggcatgcatatcccccacagcctggctggagatgaggccacacaccacactgaagatgcagccgaggaagagcggctggtcttgctggagaaccagaagcacctgccagtggaagaacagctaaagctgcttctggagcggctggacgaagtgaatgccagcaagcagagtgtgggccgctcacggcgtgcaaagatgatcaagaaagagatgacggcactgcggcggaagcttgcccatcagcgagagacgggacgtgatggccctgagcggcatggcccctcgagccggggtagtctgacaccccacccggcagcctgtgacaaggatgggcagacagatagtgcggcagaggagagcagcagccaggagacaagcaaaggcctgggtcccaacatgtcctcaacccccgcacatgaggtgggcaggagaacctcagttctgttctccaaaaagaacccgaagacagctggaccgcccaagaggccgggccggccccccaaaaaccgggagagccagatgacccccagccacggaggcagtcctgtggggcccccccagctccccatcatgagttccctgcgtcagcgcaagcggggtaggagcccccggcccagttcgagctcagacagcgacagtgataagtccacagaagaccccccaatggacttaccagccaatggcttcagcggtggaaaccaaccagtgaagaagagtttcttggtataccgtaatgactgcagccttccccggagcagctcagactctgagtccagcagcagtagcagtagcagcgctgcttcagaccggaccagcacaacgccctcaaaacaaggccggggcaaaccctccttctctcggggcactttcccagaggacagcagtgaggatacctcaggcactgagaatgaggcctactccgtgggcactggccgcggcgtgggccacagcatggtaaggaagagtctgggccggggagctggctggctgtcagaggatgaggactccccgctggatgctctggacctcgtgtgggccaaatgccgaggctatccatcatacccagctctgatcattgatccaaagatgccccgagaaggtatgttccaccatggggttcccatccctgtgcccccactggaggtgctgaaacttggggagcagatgacccaggaagcccgagagcatctctacctcgtcctcttctttgacaacaaacgaacctggcagtggctgcccaggaccaagctggttcctctgggtgtgaaccaggacctagacaaggagaagatgctggagggccgcaagtccaacatccgcaagtcagtacagatcgcctaccacagggctctgcagcaccgcagcaaggtgcaaggcgagcagagcagtgagaccagcgatagtgat

SEQ ID NO: 6530 - DNA, 3318 bp, Homo sapiens
  source 1..3318: mol_type = genomic DNA
atgttcaactcgatgaccccaccaccaatcagtagctatggcgagccctgctgtctccggcccctccccagtcagggggcccccagtgtggggacagaaggactgtctggcccgcccttctgccaccaagctaacctcatgtccggcccccacagttatgggccagccagagagaccaacagctgcaccgagggcccactcttttcttctccccggagtgcagtcaagttgaccaagaagcgggcactgtccatctcacctctgtcggatgccagcctggacctgcagacggttatccgcacctcacccagctccctcgtagctttcatcaactcgcgatgcacatctccaggaggctcctacggtcatctctccattggcaccatgagcccatctctgggattcccagcccagatgaatcaccaaaaagggccctcgccttcctttggggtccagccttgtggtccccatgactctgcccggggtgggatgatcccacatcctcagtcccggggacccttcccaacttgccagctgaagtctgagctggacatgctggttggcaagtgccgggaggaacccttggaaggtgatatgtccagccccaactccacaggcatacaggatcccctgttggggatgctggatgggcgggaggacctcgagagagaggagaagcgtgagcctgaatctgtgtatgaaactgactgccgttgggatggctgcagccaggaatttgactcccaagagcagctggtgcaccacatcaacagcgagcacatccacggggagcggaaggagttcgtgtgccactgggggggctgctccagggagctgaggcccttcaaagcccagtacatgctggtggttcacatgcgcagacacactggcgagaagccacacaagtgcacgtttgaagggtgccggaagtcatactcacgcctcgaaaacctgaagacgcacctgcggtcacacacgggtgagaagccatacatgtgtgagcacgagggctgcagtaaagccttcagcaatgccagtgaccgagccaagcaccagaatcggacccattccaatgagaagccgtatgtatgtaagctccctggctgcaccaaacgctatacagatcctagctcgctgcgaaaacatgtcaagacagtgcatggtcctgacgcccatgtgaccaaacggcaccgtggggatggccccctgcctcgggcaccatccatttctacagtggagcccaagagggagcgggaaggaggtcccatcagggaggaaagcagactgactgtgccagagggtgccatgaagccacagccaagccctggggcccagtcatcctgcagcagtgaccactccccggcagggagtgcagccaatacagacagtggtgtggaaatgactggcaatgcagggggcagcactgaagacctctccagcttggacgagggaccttgcattgctggcactggtctgtccactcttcgccgccttgagaacctcaggctggaccagctacatcaactccggccaatagggacccggggtctcaaactgcccagcttgtcccacaccggtaccactgtgtcccgccgcgtgggccccccagtctctcttgaacgccgcagcagcagctccagcagcatcagctctgcctatactgtcagccgccgctcctccctggcctctcctttcccccctggctccccaccagagaatggagcatcctccctgcctggccttatgcctgcccagcactacctgcttcgggcaagatatgcttcagccagagggggtggtacttcgcccactgcagcatccagcctggatcggataggtggtcttcccatgcctccttggagaagccgagccgagtatccaggatacaaccccaatgcaggggtcacccggagggccagtgacccagcccaggctgctgaccgtcctgctccagctagagtccagaggttcaagagcctgggctgtgtccataccccacccactgtggcagggggaggacagaactttgatccttacctcccaacctctgtctactcaccacagccccccagcatcactgagaatgctgccatggatgctagagggctacaggaagagccagaagttgggacctccatggtgggcagtggtctgaacccctatatggacttcccacctactgatactctgggatatgggggacctgaaggggcagcagctgagccttatggagcgaggggtccaggctctctgcctcttgggcctggtccacccaccaactatggccccaacccctgtccccagcaggcctcatatcctgaccccacccaagaaacatggggtgagttcccttcccactctgggctgtacccaggccccaaggctctaggtggaacctacagccagtgtcctcgacttgaacattatggacaagtgcaagtcaagccagaacaggggtgcccagtggggtctgactccacaggactggcaccctgcctcaatgcccaccccagtgaggggcccccacatccacagcctctcttttcccattacccccagccctctcctccccaatatctccagtcaggcccctatacccagccaccccctgattatcttccttcagaacccaggccttgcctggactttgattcccccacccattccacagggcagctcaaggctcagcttgtgtgtaattatgttcaatctcaacaggagctactgtgggagggtgggggcagggaagatgcccccgcccaggaaccttcctaccagagtcccaagtttctggggggttcccaggttagcccaagccgtgctaaagctccagtgaacacatatggacctggctttggacccaacttgcccaatcacaagtcaggttcctatcccaccccttcaccatgccatgaaaattttgtagtgggggcaaatagggcttcacatagggcagcagcaccacctcgacttctgcccccattgcccacttgctatgggcctctcaaagtgggaggcacaaaccccagctgtggtcatcctgaggtgggcaggctaggagggggtcctgccttgtaccctcctcccgaaggacaggtatgtaaccccctggactctcttgatcttgacaacactcagctggactttgtggctattctggatgagccccaggggctgagtcctcctccttcccatgatcagcggggcagctctggacataccccacctccctctgggccccccaacatggctgtgggcaacatgagtgtcttactgagatccctacctggggaaacagaattcctcaactctagtgcc

SEQ ID NO: 6531 - DNA, 2934 bp, Homo sapiens
  source 1..2934: mol_type = genomic DNA
atgagcccatctctgggattcccagcccagatgaatcaccaaaaagggccctcgccttcctttggggtccagccttgtggtccccatgactctgcccggggtgggatgatcccacatcctcagtcccggggacccttcccaacttgccagctgaagtctgagctggacatgctggttggcaagtgccgggaggaacccttggaaggtgatatgtccagccccaactccacaggcatacaggatcccctgttggggatgctggatgggcgggaggacctcgagagagaggagaagcgtgagcctgaatctgtgtatgaaactgactgccgttgggatggctgcagccaggaatttgactcccaagagcagctggtgcaccacatcaacagcgagcacatccacggggagcggaaggagttcgtgtgccactgggggggctgctccagggagctgaggcccttcaaagcccagtacatgctggtggttcacatgcgcagacacactggcgagaagccacacaagtgcacgtttgaagggtgccggaagtcatactcacgcctcgaaaacctgaagacgcacctgcggtcacacacgggtgagaagccatacatgtgtgagcacgagggctgcagtaaagccttcagcaatgccagtgaccgagccaagcaccagaatcggacccattccaatgagaagccgtatgtatgtaagctccctggctgcaccaaacgctatacagatcctagctcgctgcgaaaacatgtcaagacagtgcatggtcctgacgcccatgtgaccaaacggcaccgtggggatggccccctgcctcgggcaccatccatttctacagtggagcccaagagggagcgggaaggaggtcccatcagggaggaaagcagactgactgtgccagagggtgccatgaagccacagccaagccctggggcccagtcatcctgcagcagtgaccactccccggcagggagtgcagccaatacagacagtggtgtggaaatgactggcaatgcagggggcagcactgaagacctctccagcttggacgagggaccttgcattgctggcactggtctgtccactcttcgccgccttgagaacctcaggctggaccagctacatcaactccggccaatagggacccggggtctcaaactgcccagcttgtcccacaccggtaccactgtgtcccgccgcgtgggccccccagtctctcttgaacgccgcagcagcagctccagcagcatcagctctgcctatactgtcagccgccgctcctccctggcctctcctttcccccctggctccccaccagagaatggagcatcctccctgcctggccttatgcctgcccagcactacctgcttcgggcaagatatgcttcagccagagggggtggtacttcgcccactgcagcatccagcctggatcggataggtggtcttcccatgcctccttggagaagccgagccgagtatccaggatacaaccccaatgcaggggtcacccggagggccagtgacccagcccaggctgctgaccgtcctgctccagctagagtccagaggttcaagagcctgggctgtgtccataccccacccactgtggcagggggaggacagaactttgatccttacctcccaacctctgtctactcaccacagccccccagcatcactgagaatgctgccatggatgctagagggctacaggaagagccagaagttgggacctccatggtgggcagtggtctgaacccctatatggacttcccacctactgatactctgggatatgggggacctgaaggggcagcagctgagccttatggagcgaggggtccaggctctctgcctcttgggcctggtccacccaccaactatggccccaacccctgtccccagcaggcctcatatcctgaccccacccaagaaacatggggtgagttcccttcccactctgggctgtacccaggccccaaggctctaggtggaacctacagccagtgtcctcgacttgaacattatggacaagtgcaagtcaagccagaacaggggtgcccagtggggtctgactccacaggactggcaccctgcctcaatgcccaccccagtgaggggcccccacatccacagcctctcttttcccattacccccagccctctcctccccaatatctccagtcaggcccctatacccagccaccccctgattatcttccttcagaacccaggccttgcctggactttgattcccccacccattccacagggcagctcaaggctcagcttgtgtgtaattatgttcaatctcaacaggagctactgtgggagggtgggggcagggaagatgcccccgcccaggaaccttcctaccagagtcccaagtttctggggggttcccaggttagcccaagccgtgctaaagctccagtgaacacatatggacctggctttggacccaacttgcccaatcacaagtcaggttcctatcccaccccttcaccatgccatgaaaattttgtagtgggggcaaatagggcttcacatagggcagcagcaccacctcgacttctgcccccattgcccacttgctatgggcctctcaaagtgggaggcacaaaccccagctgtggtcatcctgaggtgggcaggctaggagggggtcctgccttgtaccctcctcccgaaggacaggtatgtaaccccctggactctcttgatcttgacaacactcagctggactttgtggctattctggatgagccccaggggctgagtcctcctccttcccatgatcagcggggcagctctggacataccccacctccctctgggccccccaacatggctgtgggcaacatgagtgtcttactgagatccctacctggggaaacagaattcctcaactctagtgcc

SEQ ID NO: 6532 - DNA, 3195 bp, Homo sapiens
  source 1..3195: mol_type = genomic DNA
atgttcaactcgatgaccccaccaccaatcagtagctatggcgagccctgctgtctccggcccctccccagtcagggggcccccagtgtggggacagaagtcaagttgaccaagaagcgggcactgtccatctcacctctgtcggatgccagcctggacctgcagacggttatccgcacctcacccagctccctcgtagctttcatcaactcgcgatgcacatctccaggaggctcctacggtcatctctccattggcaccatgagcccatctctgggattcccagcccagatgaatcaccaaaaagggccctcgccttcctttggggtccagccttgtggtccccatgactctgcccggggtgggatgatcccacatcctcagtcccggggacccttcccaacttgccagctgaagtctgagctggacatgctggttggcaagtgccgggaggaacccttggaaggtgatatgtccagccccaactccacaggcatacaggatcccctgttggggatgctggatgggcgggaggacctcgagagagaggagaagcgtgagcctgaatctgtgtatgaaactgactgccgttgggatggctgcagccaggaatttgactcccaagagcagctggtgcaccacatcaacagcgagcacatccacggggagcggaaggagttcgtgtgccactgggggggctgctccagggagctgaggcccttcaaagcccagtacatgctggtggttcacatgcgcagacacactggcgagaagccacacaagtgcacgtttgaagggtgccggaagtcatactcacgcctcgaaaacctgaagacgcacctgcggtcacacacgggtgagaagccatacatgtgtgagcacgagggctgcagtaaagccttcagcaatgccagtgaccgagccaagcaccagaatcggacccattccaatgagaagccgtatgtatgtaagctccctggctgcaccaaacgctatacagatcctagctcgctgcgaaaacatgtcaagacagtgcatggtcctgacgcccatgtgaccaaacggcaccgtggggatggccccctgcctcgggcaccatccatttctacagtggagcccaagagggagcgggaaggaggtcccatcagggaggaaagcagactgactgtgccagagggtgccatgaagccacagccaagccctggggcccagtcatcctgcagcagtgaccactccccggcagggagtgcagccaatacagacagtggtgtggaaatgactggcaatgcagggggcagcactgaagacctctccagcttggacgagggaccttgcattgctggcactggtctgtccactcttcgccgccttgagaacctcaggctggaccagctacatcaactccggccaatagggacccggggtctcaaactgcccagcttgtcccacaccggtaccactgtgtcccgccgcgtgggccccccagtctctcttgaacgccgcagcagcagctccagcagcatcagctctgcctatactgtcagccgccgctcctccctggcctctcctttcccccctggctccccaccagagaatggagcatcctccctgcctggccttatgcctgcccagcactacctgcttcgggcaagatatgcttcagccagagggggtggtacttcgcccactgcagcatccagcctggatcggataggtggtcttcccatgcctccttggagaagccgagccgagtatccaggatacaaccccaatgcaggggtcacccggagggccagtgacccagcccaggctgctgaccgtcctgctccagctagagtccagaggttcaagagcctgggctgtgtccataccccacccactgtggcagggggaggacagaactttgatccttacctcccaacctctgtctactcaccacagccccccagcatcactgagaatgctgccatggatgctagagggctacaggaagagccagaagttgggacctccatggtgggcagtggtctgaacccctatatggacttcccacctactgatactctgggatatgggggacctgaaggggcagcagctgagccttatggagcgaggggtccaggctctctgcctcttgggcctggtccacccaccaactatggccccaacccctgtccccagcaggcctcatatcctgaccccacccaagaaacatggggtgagttcccttcccactctgggctgtacccaggccccaaggctctaggtggaacctacagccagtgtcctcgacttgaacattatggacaagtgcaagtcaagccagaacaggggtgcccagtggggtctgactccacaggactggcaccctgcctcaatgcccaccccagtgaggggcccccacatccacagcctctcttttcccattacccccagccctctcctccccaatatctccagtcaggcccctatacccagccaccccctgattatcttccttcagaacccaggccttgcctggactttgattcccccacccattccacagggcagctcaaggctcagcttgtgtgtaattatgttcaatctcaacaggagctactgtgggagggtgggggcagggaagatgcccccgcccaggaaccttcctaccagagtcccaagtttctggggggttcccaggttagcccaagccgtgctaaagctccagtgaacacatatggacctggctttggacccaacttgcccaatcacaagtcaggttcctatcccaccccttcaccatgccatgaaaattttgtagtgggggcaaatagggcttcacatagggcagcagcaccacctcgacttctgcccccattgcccacttgctatgggcctctcaaagtgggaggcacaaaccccagctgtggtcatcctgaggtgggcaggctaggagggggtcctgccttgtaccctcctcccgaaggacaggtatgtaaccccctggactctcttgatcttgacaacactcagctggactttgtggctattctggatgagccccaggggctgagtcctcctccttcccatgatcagcggggcagctctggacataccccacctccctctgggccccccaacatggctgtgggcaacatgagtgtcttactgagatccctacctggggaaacagaattcctcaactctagtgcc

SEQ ID NO: 6533 - DNA, 1128 bp, Homo sapiens
  source 1..1128: mol_type = genomic DNA
atggcagccctaggggacattcaggagtccccttctgtcccgtcccctgtcagtctctcatcaccggggacacctggaacccagcaccacgagcctcagcttcacctccatgggcatcaacatggctcccctggctccagccctaaggtgctctcccagccgtccgacctggatctccaagacgtagaggaagtggagatcggcagagacaccttctggcccgactccgagcccaagccggagcaggctccacgctctcctggctctcaggcccctgacgagggggcgggcggggcgctgcgcagcctcctgaggagccttccccgcagggcccggtgcagcgccggcttcgggcctgaatccagcgcggagcggccggcgggccagccgcctggggccgtcccttgcgcccagccgcggggcgcctggcgcgtgacgctcgtgcagcaagcagcggccgggcccgagggtgcgcccgagcgggctgccgagctgggagtcaacttcggtcggagccggcagggcagcgcgcggggggccaagccgcacaggtgcgaggcctgcggcaagagtttcaagtataactcgctgctcctgaagcaccagcgcatccacacgggcgagaagccctacgcctgccacgagtgcggcaagcgcttccgcggctggtcgggcttcatccagcaccaccgcatccacacgggcgagaagccctacgagtgcggccagtgcggccgcgccttcagccacagctcgcacttcacgcagcacctgcgcatccacaacggcgagaagccctacaagtgcggcgagtgcggccaggccttcagccagagctccaacctggtgcgccaccagcggctgcacacgggtgagaagccctacgcctgcagccagtgcggcaaggccttcatctggagctccgtgctcatcgagcaccagcgcatccacactggcgagaagccctacgagtgctccgactgcggcaaagccttccgcggccgctcgcacttcttccggcacctgcggacccacacgggcgagaagcccttcgcgtgtggcgcctgcggcaaggccttcggccagagctcccagctcatccagcaccagcgggtgcactaccgcgag

SEQ ID NO: 6534 - DNA, 1290 bp, Homo sapiens
  source 1..1290: mol_type = genomic DNA
atggccgccaacatgtacagggtcggagactacgtctactttgagaactcctccagcaacccatacctgatccggagaatcgaggagctcaacaagacggccaatgggaacgtggaggccaaagtggtgtgcttctaccggaggcgggacatctccagcaccctcatcgccctggccgacaagcacgcaaccctgtcagtctgctataaggccggaccgggggcggacaacggcgaggaaggggaaatagaagaggaaatggagaacccggaaatggtggacctgcccgagaaactaaagcaccagctgcggcatcgggagctgttcctctcccggcagctggagtctctgcccgccacgcacatcaggggcaagtgcagcgtcaccctgctcaacgagaccgagtcgctcaagtcctacctggagcgggaggatttcttcttctattctctagtctacgacccacagcagaagaccctgctggcagataaaggagagattcgagtaggaaaccggtaccaggcagacatcaccgacttgttaaaagaaggcgaggaggatggccgagaccagtccaggttggagacccaggtgtgggaggcgcacaacccactcacagacaagcagatcgaccagttcctggtggtggcccgctctgtgggcaccttcgcacgggccctggactgcagcagctccgtccgacagcccagcctgcacatgagcgccgcagctgcctcccgagacatcaccctgttccacgccatggatactctccacaagaacatctacgacatctccaaggccatctcggcgctggtgccgcagggcgggcccgtgctctgcagggacgagatggaggagtggtctgcatcagaggccaaccttttcgaggaagccctggaaaaatatgggaaggatttcacggacattcagcaagattttctcccgtggaagtcgctgaccagcatcattgagtactactacatgtggaagaccaccgacagatacgtgcagcagaaacgcttgaaagcagctgaagctgagagcaagttaaagcaagtttatattcccaactataacaagccaaatccgaaccaaatcagcgtcaacaacgtcaaggccggtgtggtgaacggcacgggggcgccgggccagagccctggggctggccgggcctgcgagagctgttacatgtcgtctctgcgcatcttgttggacatattggaagaaatatggtggcttgaaaatgccaacccggttagatggagagaggccaggaccaaaccgcag

SEQ ID NO: 6535 - DNA, 2145 bp, Homo sapiens
  source 1..2145: mol_type = genomic DNA
atggccgccaacatgtacagggtcggagactacgtctactttgagaactcctccagcaacccatacctgatccggagaatcgaggagctcaacaagacggccaatgggaacgtggaggccaaagtggtgtgcttctaccggaggcgggacatctccagcaccctcatcgccctggccgacaagcacgcaaccctgtcagtctgctataaggccggaccgggggcggacaacggcgaggaaggggaaatagaagaggaaatggagaacccggaaatggtggacctgcccgagaaactaaagcaccagctgcggcatcgggagctgttcctctcccggcagctggagtctctgcccgccacgcacatcaggggcaagtgcagcgtcaccctgctcaacgagaccgagtcgctcaagtcctacctggagcgggaggatttcttcttctattctctagtctacgacccacagcagaagaccctgctggcagataaaggagagattcgagtaggaaaccggtaccaggcagacatcaccgacttgttaaaagaaggcgaggaggatggccgagaccagtccaggttggagacccaggtgtgggaggcgcacaacccactcacagacaagcagatcgaccagttcctggtggtggcccgctctgtgggcaccttcgcacgggccctggactgcagcagctccgtccgacagcccagcctgcacatgagcgccgcagctgcctcccgagacatcaccctgttccacgccatggatactctccacaagaacatctacgacatctccaaggccatctcggcgctggtgccgcagggcgggcccgtgctctgcagggacgagatggaggagtggtctgcatcagaggccaaccttttcgaggaagccctggaaaaatatgggaaggatttcacggacattcagcaagattttctcccgtggaagtcgctgaccagcatcattgagtactactacatgtggaagaccaccgacagatacgtgcagcagaaacgcttgaaagcagctgaagctgagagcaagttaaagcaagtttatattcccaactataacaagccaaatccgaaccaaatcagcgtcaacaacgtcaaggccggtgtggtgaacggcacgggggcgccgggccagagccctggggctggccgggcctgcgagagctgttacaccacacagtcttaccagtggtattcttggggtccccctaacatgcagtgtcgtctctgcgcatcttgttggacatattggaagaaatatggtggcttgaaaatgccaacccggttagatggagagaggccaggaccaaaccgcagtaacatgagtccccacggcctcccagcccggagcagcgggagccccaagtttgccatgaagaccaggcaggctttctatctgcacacgacgaagctgacgcggatcgcccggcgcctgtgccgtgagatcctgcgcccgtggcacgctgcgcggcacccctacctgcccatcaacagcgcggccatcaaggccgagtgcacggcgcggctgcccgaagcctcccagagcccgctggtgctgaagcaggcggtacgcaagccgctggaagccgtgcttcggtatcttgagacccacccccgcccccccaagcctgaccccgtgaaaagcgtgtccagcgtgctcagcagcctgacgcccgccaaggtggcccccgtcatcaacaacggctcccccaccatcctgggcaagcgcagctacgagcagcacaacggggtggacggcaacatgaagaagcgcctcttgatgcccagtaggggtctggcaaaccacggacaggccaggcacatgggaccaagccggaacctcctgctcaacgggaagtcctaccccaccaaagtgcgcctgatccgggggggctccctgcccccagtcaagcggcggcggatgaactggatcgacgccccggatgacgtgttctacatggccacagaggagaccaggaagatccgcaagctgctctcatcctcggaaaccaagcgtgctgcccgccggccctacaagcccatcgccctgcgccagagccaggccctgccgccgcggccaccgccacctgcgcccgtcaacgacgagcccatcgtcatcgaggac

SEQ ID NO: 6536 - DNA, 1485 bp, Homo sapiens
  source 1..1485: mol_type = genomic DNA
atggagatgaaggtctgggacccagacaaccctctcacagaccggcagatcgaccagtttcttgtggtggcccgagctgtgggaacctttgcaagagccctagattgtagcagctccattcggcagccaagcttgcacatgagtgcagctgctgcctcccgagatatcactctgtttcacgccatggataccttgcaaaggaacggctacgacctggctaaggccatgtcgaccctggtaccccagggaggcccggtgctgtgtcgggatgagatggaggaatggtcagcctcagaggccatgctatttgaggaggccctagagaagtatgggaaggacttcaatgatattcgccaggattttctaccctggaagtcacttgccagcatagtccagttttattacatgtggaaaaccacagaccggtatattcagcagaaaaggttgaaagctgctgaagcagacagcaaactgaaacaggtctacattcccacctacactaagccaaaccctaaccagatcatttctgtgggttcaaaacctggcatgaatggggctggatttcagaagggcctgacttgtgagagttgccacaccacacagtctgctcagtggtatgcctggggcccacctaacatgcagtgccgcctctgtgcttcctgttggatctactggaagaagtatgggggactgaagaccccaactcagcttgagggggccactcggggcaccacggagccacactcaaggggtcatttatccagacctgaagctcaaagtctctctccttacacaaccagcgccaacagggccaagctactggctaagaacagacaaactttcctgcttcagaccacaaagctgacccgtcttgccagacgcatgtgcagggacctattacagccaaggagggccgcccgacggccttatgctcctatcaatgccaatgccatcaaagcagagtgctccattcgacttcctaaggccgccaagactccattgaagattcaccctctggtgcggctgcccctggcaactatcgtcaaagatctggtggcccaggcacccctgaaaccaaaaacacctcggggtaccaagacaccgatcaacagaaaccagctgtcccagaaccggggactggggggcattatggtgaaacgggcctatgagactatggcaggggcaggggttcctttctctgccaatggaaggcctctggcttcagggattcgttcaagctcacagccagcagccaagcgtcagaaactaaacccagctgatgcccccaatcctgtggtgtttgtggccacaaaggataccagggccctacggaaggctctgacccatctggaaatgcggcgagctgctcgccgacccaacttgcccctgaaggtgaagccaacgctgattgcagtgcggccccctgtccctctacctgcaccctcacatcctgccagcaccaatgagcctattgtcctggaggac

SEQ ID NO: 6537 - DNA, 2004 bp, Homo sapiens
  source 1..2004: mol_type = genomic DNA
atggcggccaacatgtaccgggtgggagattacgtctattttgagaactcttccagcaatccttacctggttagacggattgaggagctcaacaagactgcaaatggaaatgtggaggcaaaggttgtctgtcttttccggcgcagggacatttctagtagcctcaacagcctggctgatagtaatgccagggagtttgaagaggaatcaaagcagccaggggtgtctgagcagcagcgccatcaactgaagcaccgggaactttttctttctcggcaatttgaatcattaccagccacccacatacgggggaaatgcagtgtgaccctcttgaatgagacagatatcttgagccagtacctggaaaaggaggactgctttttttactcactggtgtttgaccccgtgcagaagacacttctcgctgatcagggcgagattagagttggttgcaaataccaagctgagatcccagatcgcctagtagagggagaatctgataatcggaaccagcagaagatggagatgaaggtctgggacccagacaaccctctcacagaccggcagatcgaccagtttcttgtggtggcccgagctgtgggaacctttgcaagagccctagattgtagcagctccattcggcagccaagcttgcacatgagtgcagctgctgcctcccgagatatcactctgtttcacgccatggataccttgcaaaggaacggctacgacctggctaaggccatgtcgaccctggtaccccagggaggcccggtgctgtgtcgggatgagatggaggaatggtcagcctcagaggccatgctatttgaggaggccctagagaagtatgggaaggacttcaatgatattcgccaggattttctaccctggaagtcacttgccagcatagtccagttttattacatgtggaaaaccacagaccggtatattcagcagaaaaggttgaaagctgctgaagcagacagcaaactgaaacaggtctacattcccacctacactaagccaaaccctaaccagatcatttctgtgggttcaaaacctggcatgaatggggctggatttcagaagggcctgacttgtgagagttgccacaccacacagtctgctcagtggtatgcctggggcccacctaacatgcagtgccgcctctgtgcttcctgttggatctactggaagaagtatgggggactgaagaccccaactcagcttgagggggccactcggggcaccacggagccacactcaaggggtcatttatccagacctgaagctcaaagtctctctccttacacaaccagcgccaacagggccaagctactggctaagaacagacaaactttcctgcttcagaccacaaagctgacccgtcttgccagacgcatgtgcagggacctattacagccaaggagggccgcccgacggccttatgctcctatcaatgccaatgccatcaaagcagagtgctccattcgacttcctaaggccgccaagactccattgaagattcaccctctggtgcggctgcccctggcaactatcgtcaaagatctggtggcccaggcacccctgaaaccaaaaacacctcggggtaccaagacaccgatcaacagaaaccagctgtcccagaaccggggactggggggcattatggtgaaacgggcctatgagactatggcaggggcaggggttcctttctctgccaatggaaggcctctggcttcagggattcgttcaagctcacagccagcagccaagcgtcagaaactaaacccagctgatgcccccaatcctgtggtgtttgtggccacaaaggataccagggccctacggaaggctctgacccatctggaaatgcggcgagctgctcgccgacccaacttgcccctgaaggtgaagccaacgctgattgcagtgcggccccctgtccctctacctgcaccctcacatcctgccagcaccaatgagcctattgtcctggaggac

SEQ ID NO: 6538 - DNA, 1611 bp, Homo sapiens
  source 1..1611: mol_type = genomic DNA
atgctcgcagataagcatgctaaagaaattgaggaagaatctgaaacaacagttgaggctgacttgaccgataagcagaaacatcagttgaaacatagggaactctttttgtcacgccagtatgaatctctgcccgcaacacatatcaggggaaagtgcagtgttgcccttctgaatgagacagaatcagtattgtcatatcttgataaggaggataccttcttctactcattggtctatgacccctcattgaaaacactattagctgacaaaggtgaaatcagagtgggacctagatatcaagcagacattccagaaatgctgttagaaggagaatcagatgagagggaacaatcaaaattggaagttaaagtttgggatccaaatagcccacttacggatcgacagattgaccagtttttagttgtagcacgtgctgttgggacattcgccagagccctggattgcagcagttctgtgaggcagcctagtttgcatatgagtgctgctgcagcttcccgagacatcaccttgtttcacgctatggatacattgtatagacacagctatgatttgagcagtgccattagtgtcttagtaccactcggaggacctgttttatgcagagatgaaatggaggaatggtcagcctctgaagctagcttatttgaagaggcactggaaaaatatggcaaagacttcaatgacatacggcaagattttcttccttggaaatcattgactagcatcattgaatattattacatgtggaaaactactgacagatatgtgcaacagaaacgtctaaaagcagcagaagctgagagtaaactgaaacaagtatatatcccaacctacaaaccaaatcccaaccaaatatccactagtaatgggaagcctggtgctgtgaatggagctgtggggaccacgttccagcctcagaatcctctcttagggagagcctgtgagagctgctatgctacacagtctcaccagtggtattcttggggcccacctaatatgcagtgtagattatgtgcaatttgttggctttattggaaaaaatatggaggcttgaaaatgcccacccagtcagaagaagagaagttatctcctagcccaactacagaggaccctcgtgttagaagtcacgtgtcccgccaggccatgcagggaatgccagtccgaaacactgggagtccaaagtctgcagtgaagacccgccaagctttcttccttcatactacatatttcacaaaatttgctcgtcaggtctgcaaaaataccctccggctgcggcaggcagcaagacggccgtttgttgctattaattatgctgccattagggcagaatatgcagacagacatgctgaactatctggaagtccactgaaaagcaaaagcactaggaagcctttggcatgtatcattgggtatttagagatccatcctgcaaagaaacctaatgtaattcgatctacaccaagcctgcaaaccccaactaccaagcggatgctaacaactccaaatcacacatctctgagcattctggggaaaagaaactacagtcatcacaatggtctggatgaactcacgtgctgtgtgtcagac

SEQ ID NO: 6539 - DNA, 1545 bp, Homo sapiens
  source 1..1545: mol_type = genomic DNA
atggcggccaacatgtaccgggtcggagattatgtctactttgagaattcctccagcaacccatacctaataagaaggatagaagaactcaacaagactgcaagtggcaacgtggaagcaaaagtagtatgcttttatagacgacgtgatatttccaacacacttataatgctcgcagataagcatgctaaagaaattgaggaagaatctgaaacaacagttgaggctgacttgaccgataagcagaaacatcagttgaaacatagggaactctttttgtcacgccagtatgaatctctgcccgcaacacatatcaggggaaagtgcagtgttgcccttctgaatgagacagaatcagtattgtcatatcttgataaggaggataccttcttctactcattggtctatgacccctcattgaaaacactattagctgacaaaggtgaaatcagagtgggacctagatatcaagcagacattccagaaatgctgttagaaggagaatcagatgagagggaacaatcaaaattggaagttaaagtttgggatccaaatagcccacttacggatcgacagattgaccagtttttagttgtagcacgtgctgttgggacattcgccagagccctggattgcagcagttctgtgaggcagcctagtttgcatatgagtgctgctgcagcttcccgagacatcaccttgtttcacgctatggatacattgtatagacacagctatgatttgagcagtgccattagtgtcttagtaccactcggaggacctgttttatgcagagatgaaatggaggaatggtcagcctctgaagctagcttatttgaagaggcactggaaaaatatggcaaagacttcaatgacatacggcaagattttcttccttggaaatcattgactagcatcattgaatattattacatgtggaaaactactgacagatatgtgcaacagaaacgtctaaaagcagcagaagctgagagtaaactgaaacaagtatatatcccaacctacagcaaaccaaatcccaaccaaatatccactagtaatgggaagcctggtgctgtgaatggagctgtggggaccacgttccagcctcagaatcctctcttagggagagcctgtgagagctgctatgctacacagtctcaccagtggtattcttggggcccacctaatatgcagtgtagattatgtgcaatttgttggctttattggaaaaaatatggaggcttgaaaatgcccacccagtcagaagaagagaagttatctcctagcccaactacagaggaccctcgtgttagaagtcacgtgtcccgccaggccatgcagggaatgccagtccgaaacactgggagtccaaagtctgcagtgaagacccgccaagctttcttccttcatactacatatttcacaaaatttgctcgtcaggtctgcaaaaataccctccggctgcggcaggcagcaagacggccgtttgttgctattaattatgctgccattagggcagaatgtaagatgcttttaaattct

SEQ ID NO: 6540 - DNA, 1782 bp, Homo sapiens
  source 1..1782: mol_type = genomic DNA
atggcggccaacatgtaccgggtcggagattatgtctactttgagaattcctccagcaacccatacctaataagaaggatagaagaactcaacaagactgcaagtggcaacgtggaagcaaaagtagtatgcttttatagacgacgtgatatttccaacacacttataatgctcgcagataagcatgctaaagaaattgaggaagaatctgaaacaacagttgaggctgacttgaccgataagcagaaacatcagttgaaacatagggaactctttttgtcacgccagtatgaatctctgcccgcaacacatatcaggggaaagtgcagtgttgcccttctgaatgagacagaatcagtattgtcatatcttgataaggaggataccttcttctactcattggtctatgacccctcattgaaaacactattagctgacaaaggtgaaatcagagtgggacctagatatcaagcagacattccagaaatgctgttagaaggagaatcagatgagagggaacaatcaaaattggaagttaaagtttgggatccaaatagcccacttacggatcgacagattgaccagtttttagttgtagcacgtgctgttgggacattcgccagagccctggattgcagcagttctgtgaggcagcctagtttgcatatgagtgctgctgcagcttcccgagacatcaccttgtttcacgctatggatacattgtatagacacagctatgatttgagcagtgccattagtgtcttagtaccactcggaggacctgttttatgcagagatgaaatggaggaatggtcagcctctgaagctagcttatttgaagaggcactggaaaaatatggcaaagacttcaatgacatacggcaagattttcttccttggaaatcattgactagcatcattgaatattattacatgtggaaaactactgacagatatgtgcaacagaaacgtctaaaagcagcagaagctgagagtaaactgaaacaagtatatatcccaacctacagcaaaccaaatcccaaccaaatatccactagtaatgggaagcctggtgctgtgaatggagctgtggggaccacgttccagcctcagaatcctctcttagggagagcctgtgagagctgctatgctacacagtctcaccagtggtattcttggggcccacctaatatgcagtgtagattatgtgcaatttgttggctttattggaaaaaatatggaggcttgaaaatgcccacccagtcagaagaagagaagttatctcctagcccaactacagaggaccctcgtgttagaagtcacgtgtcccgccaggccatgcagggaatgccagtccgaaacactgggagtccaaagtctgcagtgaagacccgccaagctttcttccttcatactacatatttcacaaaatttgctcgtcaggtctgcaaaaataccctccggctgcggcaggcagcaagacggccgtttgttgctattaattatgctgccattagggcagaatatgcagacagacatgctgaactatctggaagtccactgaaaagcaaaagcactaggaagcctttggcatgtatcattgggtatttagagatccatcctgcaaagaaacctaatgtaattcgatctacaccaagcctgcaaaccccaactaccaagcggatgctaacaactccaaatcacacatctctgagcattctggggaaaagaaactacagtcatcacaatggtctggatgaactcacgtgctgtgtgtcagac

SEQ ID NO: 6541 - DNA, 1674 bp, Homo sapiens
  source 1..1674: mol_type = genomic DNA
atggcagtgccggcggctttgatccctccgacccagctggtcccccctcaacccccaatctccacgtctgcttcctcctctggcaccaccacctccacctcttcggcgacttcgtctccggctccttccatcggacccccggcgtcctctgggccaactctgttccgcccggagcccatcgcttcggcggcggcggcggcggccacagtcacctctaccggcggcggcggcggcggcggcggcagcggaggcggcggcggcagcagcggcaacggaggcggcggtggcggcggcggcggtggcagcaactgcaaccccaacctggcggccgcgagcaacggcagcggcggcggcggcggcggcatcagcgctggcggcggcgtcgcttccagcacccccatcaacgccagcaccggcagcagcagcagcagcagtagcagcagcagcagcagcagcagtagtagcagcagcagcagtagcagcagcagctgcggccccctccccgggaaacccgtgtactcaaccccgtccccagtggaaaacacccctcagaataatgagtgcaaaatggtggatctgaggggggccaaagtggcttccttcacggtggagggctgcgagctgatctgcctgccccaggctttcgacctgttcctgaagcacttggtggggggcttgcatacggtctacaccaagctgaagcggctggagatcacgccggtggtgtgcaatgtggaacaagttcgcatcctgaggggactgggcgccatccagccaggagtgaaccgctgcaaactcatctccaggaaggacttcgagaccctctacaatgactgcaccaacgcaagttctagacctggaaggcctcctaagaggactcaaagtgtcacctccccagagaactctcacatcatgccgcattctgtccctggtctcatgtctcctgggataattccaccaacaggtctgacagcagccgctgcagcagctgctgctgctaccaatgcagctattgctgaagcaatgaaggtgaaaaaaatcaaattagaagccatgagcaactatcatgccagtaataaccaacatggagcagactctgaaaacggggacatgaattcaagtgtcgatgagaccccgctttctacaccaaccgcaagagacagccttgacaaactctctctaactgggcatggacaaccactgcctccaggttttccatctccttttctgtttcctgatggactgtcttccatcgagactcttctgactaacatacaggggctgttgaaagttgccatagataatgccagagctcaagagaaacaggtccaactggaaaaaactgagctgaagatggattttttaagggaaagagaactaagggaaacacttgagaagcagttggctatggaacaaaagaatagagccatagttcaaaagaggctaaagaaggagaagaaggcaaagagaaaattgcaggaagcacttgagtttgagacgaaacggcgtgaacaagcagaacagacgctaaaacaggcagcttcaacagatagtctcagggtcttaaatgactctctgaccccagagatagaggctgaccgcagtggcggcagaacagatgctgaaaggacaatacaagatggaagactgtatttgaaaactactgtcatgtac

SEQ ID NO: 6542 - DNA, 1512 bp, Homo sapiens
  source 1..1512: mol_type = genomic DNA
atggcagtgccggcggctttgatccctccgacccagctggtcccccctcaacccccaatctccacgtctgcttcctcctctggcaccaccacctccacctcttcggcgacttcgtctccggctccttccatcggacccccggcgtcctctgggccaactctgttccgcccggagcccatcgcttcggcggcggcggcggcggccacagtcacctctaccggcggcggcggcggcggcggcggcagcggaggcggcggcggcagcagcggcaacggaggcggcggtggcggcggcggcggtggcagcaactgcaaccccaacctggcggccgcgagcaacggcagcggcggcggcggcggcggcatcagcgctggcggcggcgtcgcttccagcacccccatcaacgccagcaccggcagcagcagcagcagcagtagcagcagcagcagcagcagcagtagtagcagcagcagcagtagcagcagcagctgcggccccctccccgggaaacccgtgtactcaaccccgtccccagtggaaaacacccctcagaataatgagtgcaaaatggtggatctgaggggggccaaagtggcttccttcacggtggagggctgcgagctgatctgcctgccccaggctttcgacctgttcctgaagcacttggtggggggcttgcatacggtctacaccaagctgaagcggctggagatcacgccggtggtgtgcaatgtggaacaagttcgcatcctgaggggactgggcgccatccagccaggagtgaaccgctgcaaactcatctccaggaaggacttcgagaccctctacaatgactgcaccaacgcaagttctagacctggaaggcctcctaagaggactcaaagtgtcacctccccagagaactctcacatcatgccgcattctgtccctggtctcatgtctcctgggataattccaccaacagatgagaccccgctttctacaccaaccgcaagagacagccttgacaaactctctctaactgggcatggacaaccactgcctccaggttttccatctccttttctgtttcctgatggactgtcttccatcgagactcttctgactaacatacaggggctgttgaaagttgccatagataatgccagagctcaagagaaacaggtccaactggaaaaaactgagctgaagatggattttttaagggaaagagaactaagggaaacacttgagaagcagttggctatggaacaaaagaatagagccatagttcaaaagaggctaaagaaggagaagaaggcaaagagaaaattgcaggaagcacttgagtttgagacgaaacggcgtgaacaagcagaacagacgctaaaacaggcagcttcaacagatagtctcagggtcttaaatgactctctgaccccagagatagaggctgaccgcagtggcggcagaacagatgctgaaaggacaatacaagatggaagactgtatttgaaaactactgtcatgtac

SEQ ID NO: 6543 - DNA, 2274 bp, Homo sapiens
  source 1..2274: mol_type = genomic DNA
atggcagtgccggcggctttgatccctccgacccagctggtcccccctcaacccccaatctccacgtctgcttcctcctctggcaccaccacctccacctcttcggcgacttcgtctccggctccttccatcggacccccggcgtcctctgggccaactctgttccgcccggagcccatcgcttcggcggcggcggcggcggccacagtcacctctaccggcggcggcggcggcggcggcggcagcggaggcggcggcggcagcagcggcaacggaggcggcggtggcggcggcggcggtggcagcaactgcaaccccaacctggcggccgcgagcaacggcagcggcggcggcggcggcggcatcagcgctggcggcggcgtcgcttccagcacccccatcaacgccagcaccggcagcagcagcagcagcagtagcagcagcagcagcagcagcagtagtagcagcagcagcagtagcagcagcagctgcggccccctccccgggaaacccgtgtactcaaccccgtccccagtggaaaacacccctcagaataatgagtgcaaaatggtggatctgaggggggccaaagtggcttccttcacggtggagggctgcgagctgatctgcctgccccaggctttcgacctgttcctgaagcacttggtggggggcttgcatacggtctacaccaagctgaagcggctggagatcacgccggtggtgtgcaatgtggaacaagttcgcatcctgaggggactgggcgccatccagccaggagtgaaccgctgcaaactcatctccaggaaggacttcgagaccctctacaatgactgcaccaacgcaagttctagacctggaaggcctcctaagaggactcaaagtgtcacctccccagagaactctcacatcatgccgcattctgtccctggtctcatgtctcctgggataattccaccaacaggtctgacagcagccgctgcagcagctgctgctgctaccaatgcagctattgctgaagcaatgaaggtgaaaaaaatcaaattagaagccatgagcaactatcatgccagtaataaccaacatggagcagactctgaaaacggggacatgaattcaagtgtcggcagcagtgatggttcctgggataaggaaacactgccctcttccccatcccagggacctcaggcctctataacccacccccgcatgcctggagcacgtagccttccacttagtcatcctctcaaccatcttcagcagagccaccttctgccaaatggactggaacttccttttatgatgatgccccaccctctaattcctgtcagcctacctccagcatctgtcaccatggcaatgagccagatgaaccacctcagcaccattgcaaatatggcagcagcagcacaagttcagagtcccccatccagagttgagacatcagttattaaggagcgtgttcctgatagcccctcacctgccccctctctggaggaggggagaaggcctggcagtcacccatcatcacatcgcagcagcagcgtgtccagctcccctgctcggactgagagctcttctgacagaatcccggtccatcagaatgggttgtccatgaaccagatgctgatgggcttatcaccaaatgtacttcctgggcccaaagagggagatttggccggtcatgacatgggacatgagtcaaaaaggatgcatattgaaaaagatgagaccccgctttctacaccaaccgcaagagacagccttgacaaactctctctaactgggcatggacaaccactgcctccaggttttccatctccttttctgtttcctgatggactgtcttccatcgagactcttctgactaacatacaggggctgttgaaagttgccatagataatgccagagctcaagagaaacaggtccaactggaaaaaactgagctgaagatggattttttaagggaaagagaactaagggaaacacttgagaagcagttggctatggaacaaaagaatagagccatagttcaaaagaggctaaagaaggagaagaaggcaaagagaaaattgcaggaagcacttgagtttgagacgaaacggcgtgaacaagcagaacagacgctaaaacaggcagcttcaacagatagtctcagggtcttaaatgactctctgaccccagagatagaggctgaccgcagtggcggcagaacagatgctgaaaggacaatacaagatggaagactgtatttgaaaactactgtcatgtac

SEQ ID NO: 6544 - DNA, 2118 bp, Homo sapiens
  source 1..2118: mol_type = genomic DNA
atggcagtgccggcggctttgatccctccgacccagctggtcccccctcaacccccaatctccacgtctgcttcctcctctggcaccaccacctccacctcttcggcgacttcgtctccggctccttccatcggacccccggcgtcctctgggccaactctgttccgcccggagcccatcgcttcggcggcggcggcggcggccacagtcacctctaccggcggcggcggcggcggcggcggcagcggaggcggcggcggcagcagcggcaacggaggcggcggtggcggcggcggcggtggcagcaactgcaaccccaacctggcggccgcgagcaacggcagcggcggcggcggcggcggcatcagcgctggcggcggcgtcgcttccagcacccccatcaacgccagcaccggcagcagcagcagcagcagtagcagcagcagcagcagcagcagtagtagcagcagcagcagtagcagcagcagctgcggccccctccccgggaaacccgtgtactcaaccccgtccccagtggaaaacacccctcagaataatgagtgcaaaatggtggatctgaggggggccaaagtggcttccttcacggtggagggctgcgagctgatctgcctgccccaggctttcgacctgttcctgaagcacttggtggggggcttgcatacggtctacaccaagctgaagcggctggagatcacgccggtggtgtgcaatgtggaacaagttcgcatcctgaggggactgggcgccatccagccaggagtgaaccgctgcaaactcatctccaggaaggacttcgagaccctctacaatgactgcaccaacgcaagttctagacctggaaggcctcctaagaggactcaaagtgtcacctccccagagaactctcacatcatgccgcattctgtccctggtctcatgtctcctgggataattccaccaacaggtctgacagcagccgctgcagcagctgctgctgctaccaatgcagctattgctgaagcaatgaaggtgaaaaaaatcaaattagaagccatgagcaactatcatgccagtaataaccaacatggagcagactctgaaaacggggacatgaattcaagtgtcggactggaacttccttttatgatgatgccccaccctctaattcctgtcagcctacctccagcatctgtcaccatggcaatgagccagatgaaccacctcagcaccattgcaaatatggcagcagcagcacaagttcagagtcccccatccagagttgagacatcagttattaaggagcgtgttcctgatagcccctcacctgccccctctctggaggaggggagaaggcctggcagtcacccatcatcacatcgcagcagcagcgtgtccagctcccctgctcggactgagagctcttctgacagaatcccggtccatcagaatgggttgtccatgaaccagatgctgatgggcttatcaccaaatgtacttcctgggcccaaagagggagatttggccggtcatgacatgggacatgagtcaaaaaggatgcatattgaaaaagatgagaccccgctttctacaccaaccgcaagagacagccttgacaaactctctctaactgggcatggacaaccactgcctccaggttttccatctccttttctgtttcctgatggactgtcttccatcgagactcttctgactaacatacaggggctgttgaaagttgccatagataatgccagagctcaagagaaacaggtccaactggaaaaaactgagctgaagatggattttttaagggaaagagaactaagggaaacacttgagaagcagttggctatggaacaaaagaatagagccatagttcaaaagaggctaaagaaggagaagaaggcaaagagaaaattgcaggaagcacttgagtttgagacgaaacggcgtgaacaagcagaacagacgctaaaacaggcagcttcaacagatagtctcagggtcttaaatgactctctgaccccagagatagaggctgaccgcagtggcggcagaacagatgctgaaaggacaatacaagatggaagactgtatttgaaaactactgtcatgtac

SEQ ID NO: 6545 - DNA, 1797 bp, Homo sapiens
  source 1..1797: mol_type = genomic DNA
atggctgtctccgcatctccagtgatctctgcaacttccagcggcgccggcgtcccggggggcttattccgggccgaacccctgtactcgactcccagagagccccctcgtcttactcctaatatgatcaatagtttcgtggttaataaccacagcaacagtgccggaggcggcggcaggggcaacaccaacaccaacgagtgccgcatggtcgacatgcacgggatgaaggtggcttcgttcctgatggacggccaggaactgatctgcctgccgcaagtctttgatctttttctcaagcacctggtgggaggcttgcacactgtgtacaccaagctgaagagactggatatatcccccgtggtgtgtactgttgagcaggtccggatcctccgcgggctgggggccatccagcccggggtaaaccgctgcaaactcatcaccaggaaagacttcgaaactttgttcaccgattgcaccaatgccagaaggaagaggcaaatgacaagaaaacaagctgttaacagttcaagacccggcaggccccctaagcgttctttgggagtgttgcaggaaaatgcccgccttctgacccatgcagtcccaggcctcttatcgccaggacttatcactccgacaggtataacagctgcagcgatggctgaggcgatgaaacttcagaagatgaagcttatggctatgaacactcttcagggaaatggaagccaaaatgggaccgaatcagagcctgatgatcttaattctaacacaggtggaagtgaatcctcctgggataaagataagatgcagtctccatttgctgcacctggaccccaacatggaattgctcatgcagccctagctggccagccaggcattgggggtgctccaaccctcaatccactgcagcagaaccacctgctaaccaatagactggatctgccatttatgatgatgcctcatcccctacttccagtcagcttacctcctgcatcagttgccatggcaatgaatcagatgaaccatctcaatactattgccaacatggctgctgcagcacagattcacagtccactctccagagctggtacctctgttataaaggagcggatcccagagagtccttctcctgctccttctctagaagagaatcatcgtcctgggagccagacctcttcccacaccagcagcagtgtgtccagctctccctctcagatggatcatcatttggaaagaatggaagaggtaccagttcaaattccaataatgaagtcacccttggacaagatacagctgactcctgggcaggcattgcccgctggattccctggaccattcatttttgctgatagtctgtcctccgtggagactctgttgaccaacattcagggtctgctgaaagttgctttggataatgctcgcatccaggagaagcagattcaacaagaaaagaaggagctgcgactggagctctatagagagagagaaattagagaaaaccttgaaagacaacttgcagttgagcttcaaagcagaactactatgcaaaagcgcctgaagaaggagaaaaaaaccaagagaaaattgcaggaagccttggaatttgaatcaaagcgccgggagcaagtggagcaggcacttaagcaagccaccactagtgacagtggcctgaggatgttaaaagatactggaattccagatattgaaatagaaaacaatgggactcctcatgatagtgctgctatgcaaggaggtaactattactgtttagaaatggcacaacagttgtattcagcc

SEQ ID NO: 6546 - DNA, 1296 bp, Homo sapiens
  source 1..1296: mol_type = genomic DNA
atgacaagaaaacaagctgttaacagttcaagacccggcaggccccctaagcgttctttgggagtgttgcaggaaaatgcccgccttctgacccatgcagtcccaggcctcttatcgccaggacttatcactccgacaggtataacagctgcagcgatggctgaggcgatgaaacttcagaagatgaagcttatggctatgaacactcttcagggaaatggaagccaaaatgggaccgaatcagagcctgatgatcttaattctaacacaggtggaagtgaatcctcctgggataaagataagatgcagtctccatttgctgcacctggaccccaacatggaattgctcatgcagccctagctggccagccaggcattgggggtgctccaaccctcaatccactgcagcagaaccacctgctaaccaatagactggatctgccatttatgatgatgcctcatcccctacttccagtcagcttacctcctgcatcagttgccatggcaatgaatcagatgaaccatctcaatactattgccaacatggctgctgcagcacagattcacagtccactctccagagctggtacctctgttataaaggagcggatcccagagagtccttctcctgctccttctctagaagagaatcatcgtcctgggagccagacctcttcccacaccagcagcagtgtgtccagctctccctctcagatggatcatcatttggaaagaatggaagaggtaccagttcaaattccaataatgaagtcacccttggacaagatacagctgactcctgggcaggcattgcccgctggattccctggaccattcatttttgctgatagtctgtcctccgtggagactctgttgaccaacattcagggtctgctgaaagttgctttggataatgctcgcatccaggagaagcagattcaacaagaaaagaaggagctgcgactggagctctatagagagagagaaattagagaaaaccttgaaagacaacttgcagttgagcttcaaagcagaactactatgcaaaagcgcctgaagaaggagaaaaaaaccaagagaaaattgcaggaagccttggaatttgaatcaaagcgccgggagcaagtggagcaggcacttaagcaagccaccactagtgacagtggcctgaggatgttaaaagatactggaattccagatattgaaatagaaaacaatgggactcctcatgatagtgctgctatgcaaggaggtaactattactgtttagaaatggcacaacagttgtattcagcc

SEQ ID NO: 6547 - DNA, 1713 bp, Homo sapiens
  source 1..1713: mol_type = genomic DNA
atggctgtctccgcatctccagtgatctctgcaacttccagcggcgccggcgtcccggggggcttattccgggccgaacccctgtactcgactcccagagagccccctcgtcttactcctaatatgatcaatagtttcgtggttaataaccacagcaacagtgccggaggcggcggcaggggcaacaccaacaccaacgagtgccgcatggtcgacatgcacgggatgaaggtggcttcgttcctgatggacggccaggaactgatctgcctgccgcaagtctttgatctttttctcaagcacctggtgggaggcttgcacactgtgtacaccaagctgaagagactggatatatcccccgtggtgtgtactgttgagcaggtccggatcctccgcgggctgggggccatccagcccggggtaaaccgctgcaaactcatcaccaggaaagacttcgaaactttgttcaccgattgcaccaatgccagttcaagacccggcaggccccctaagcgttctttgggagtgttgcaggaaaatgcccgccttctgacccatgcagtcccaggcctcttatcgccaggacttatcactccgacaggtataacagctgcagcgatggctgaggcgatgaaacttcagaagatgaagcttatggctatgaacactcttcagggaaatggaagccaaaatgggaccgaatcagagcctgatgatcttaattctaacacaggtggaagtgaatcctcctgggataaagataagatgcagtctccatttgctgcacctggaccccaacatggaattgctcatgcagccctagctggccagccaggcattgggggtgctccaaccctcaatccactgcagcagaaccacctgctaaccaatagactggatctgccatttatgatgatgcctcatcccctacttccagtcagcttacctcctgcatcagttgccatggcaatgaatcagatgaaccatctcaatactattgccaacatggctgctgcagcacagattcacagtccactctccagagctggtacctctgttataaaggagcggatcccagagagtccttctcctgctccttctctagaagagaatcatcgtcctgggagccagacctcttcccacaccagcagcagtgtgtccagctctccctctcagatggatcatcatttggaaagaatggaagaggtaccagttcaaattccaataatgaagtcacccttggacaagatacagctgactcctgggcaggcattgcccgctggattccctggaccattcatttttgctgatagtctgtcctccgtggagactctgttgaccaacattcagggtctgctgaaagttgctttggataatgctcgcatccaggagaagcagattcaacaagaaaagaaggagctgcgactggagctctatagagagagagaaattagagaaaaccttgaaagacaacttgcagttgagcttcaaagcagaactactatgcaaaagcgcctgaagaaggagaaaaaaaccaagagaaaattgcaggaagccttggaatttgaatcaaagcgccgggagcaagtggagcaggcacttaagcaagccaccactagtgacagtggcctgaggatgttaaaagatactggaattccagatattgaaatagaaaacaatgggactcctcatgatagtgctgctatgcaagcc

SEQ ID NO: 6548 - DNA, 1524 bp, Homo sapiens
  source 1..1524: mol_type = genomic DNA
atgtattcgtccccgctctgcctcacccaggatgagttccacccgttcatcgaggccctgctgcctcacgtccgcgccttcgcctacacctggttcaacctgcaggcgcggaagcgcaagtacttcaagaagcacgagaagcggatgtcgaaggacgaggagcgtgcggtcaaggacgagctgctgggcgagaagcccgaggtcaagcagaagtgggcgtcgcggctgctggccaagctgcgcaaggacatccggcccgagtgccgcgaggacttcgtgctgagcatcaccggcaagaaggcgccgggctgcgtgctctccaaccccgaccagaagggcaagatgcggcgcatcgactgtctccggcaggcggacaaggtgtggcggctggacctggtcatggtcatcctgttcaagggcatcccgctggagagcaccgacggcgagcgcctggtcaaggctgcgcagtgcggtcacccggtcctgtgcgtgcagccgcaccacattggcgtggccgtcaaggagctggacctctacctggcctacttcgtgcgtgagcgagatgcagagcaaagcggcagtccccggacagggatgggctctgaccaggaggacagcaagcccatcacgctggacacgaccgacttccaggagagctttgtcacctccggcgtgttcagcgtcactgagctcatccaagtgtcccggacacccgtggtgactggaacaggacccaacttctccctgggggagctgcaggggcacctggcatacgacctgaacccagccagcactggcctcagaagaacgctgcccagcacctcctccagtgggagcaagcggcacaaatcgggctcgatggaggaagacgtggacacgagccctggcggcgattactacacttcgcccagctcgcccacgagtagcagccgcaactggacggaggacatggaaggaggcatctcgtccccggtgaagaagacagagatggacaagtcaccattcaacagcccgtccccccaggactctccccgcctctccagcttcacccagcaccaccggcccgtcatcgccgtgcacagcgggatcgcccggagcccacacccgtcctccgctctgcatttccctacgacgtccatcctaccccagacggcctccacctacttcccccacacggccatccgctacccacctcatctcaacccccaggacccgctcaaagatcttgtctcgctggcctgcgacccagccagccagcaacctggaccgttaaatggaagtggtcagctcaaaatgcccagccactgcctttctgctcagatgctggcacctccgcccccggggctgccacggctggcgctcccccctgccaccaaacccgccaccacctccgagggaggagccacgtcgccgacctcgccttcctactctccgcccgacacgtcccctgcaaaccgttcctttgtgggattaggaccaagggatcctgcgggcatttatcaggcacagtcctggtatctggga

SEQ ID NO: 6549 - DNA, 1317 bp, Homo sapiens
  source 1..1317: mol_type = genomic DNA
atgtattcgtccccgctctgcctcacccaggatgagttccacccgttcatcgaggccctgctgcctcacgtccgcgccttcgcctacacctggttcaacctgcaggcgcggaagcgcaagtacttcaagaagcacgagaagcggatgtcgaaggacgaggagcgtgcggtcaaggacgagctgctgggcgagaagcccgaggtcaagcagaagtgggcgtcgcggctgctggccaagctgcgcaaggacatccggcccgagtgccgcgaggacttcgtgctgagcatcaccggcaagaaggcgccgggctgcgtgctctccaaccccgaccagaagggcaagatgcggcgcatcgactgtctccggcaggcggacaaggtgtggcggctggacctggtcatggtcatcctgttcaagggcatcccgctggagagcaccgacggcgagcgcctggtcaaggctgcgcagtgcggtcacccggtcctgtgcgtgcagccgcaccacattggcgtggccgtcaaggagctggacctctacctggcctacttcgtgcgtgagcgagatgcagagcaaagcggcagtccccggacagggatgggctctgaccaggaggacagcaagcccatcacgctggacacgaccgacttccaggagagctttgtcacctccggcgtgttcagcgtcactgagctcatccaagtgtcccggacacccgtggtgactggaacaggacccaacttctccctgggggagctgcaggggcacctggcatacgacctgaacccagccagcactggcctcagaagaacgctgcccagcacctcctccagtgggagcaagcggcacaaatcgggctcgatggaggaagacgtggacacgagccctggcggcgattactacacttcgcccagctcgcccacgagtagcagccgcaactggacggaggacatggaaggaggcatctcgtccccggtgaagaagacagagatggacaagtcaccattcaacagcccgtccccccaggactctccccgcctctccagcttcacccagcaccaccggcccgtcatcgccgtgcacagcgggatcgcccggagcccacacccgtcctccgctctgcatttccctacgacgtccatcctaccccagacggcctccacctacttcccccacacggccatccgctacccacctcatctcaacccccaggacccgctcaaagatcttgtctcgctggcctgcgacccagccagccagcaacctggaccgcctactctccgcccgacacgtcccctgcaaaccgttcctttgtgggat

SEQ ID NO: 6550 - DNA, 1290 bp, Homo sapiens
  source 1..1290: mol_type = genomic DNA
atggatgagttccacccgttcatcgaggccctgctgcctcacgtccgcgccttcgcctacacctggttcaacctgcaggcgcggaagcgcaagtacttcaagaagcacgagaagcggatgtcgaaggacgaggagcgtgcggtcaaggacgagctgctgggcgagaagcccgaggtcaagcagaagtgggcgtcgcggctgctggccaagctgcgcaaggacatccggcccgagtgccgcgaggacttcgtgctgagcatcaccggcaagaaggcgccgggctgcgtgctctccaaccccgaccagaagggcaagatgcggcgcatcgactgtctccggcaggcggacaaggtgtggcggctggacctggtcatggtcatcctgttcaagggcatcccgctggagagcaccgacggcgagcgcctggtcaaggctgcgcagtgcggtcacccggtcctgtgcgtgcagccgcaccacattggcgtggccgtcaaggagctggacctctacctggcctacttcgtgcgtgagcgagatgcagagcaaagcggcagtccccggacagggatgggctctgaccaggaggacagcaagcccatcacgctggacacgaccgacttccaggagagctttgtcacctccggcgtgttcagcgtcactgagctcatccaagtgtcccggacacccgtggtgactggaacaggacccaacttctccctgggggagctgcaggggcacctggcatacgacctgaacccagccagcactggcctcagaagaacgctgcccagcacctcctccagtgggagcaagcggcacaaatcgggctcgatggaggaagacgtggacacgagccctggcggcgattactacacttcgcccagctcgcccacgagtagcagccgcaactggacggaggacatggaaggaggcatctcgtccccggtgaagaagacagagatggacaagtcaccattcaacagcccgtccccccaggactctccccgcctctccagcttcacccagcaccaccggcccgtcatcgccgtgcacagcgggatcgcccggagcccacacccgtcctccgctctgcatttccctacgacgtccatcctaccccagacggcctccacctacttcccccacacggccatccgctacccacctcatctcaacccccaggacccgctcaaagatcttgtctcgctggcctgcgacccagccagccagcaacctggaccgcctactctccgcccgacacgtcccctgcaaaccgttcctttgtgggat

SEQ ID NO: 6551 - DNA, 1284 bp, Homo sapiens
  source 1..1284: mol_type = genomic DNA
atgtattcgtccccgctctgcctcacccaggatgagttccacccgttcatcgaggccctgctgcctcacgtccgcgccttcgcctacacctggttcaacctgcaggcgcggaagcgcaagtacttcaagaagcacgagaagcggatgtcgaaggacgaggagcgtgcggtcaaggacgagctgctgggcgagaagcccgaggtcaagcagaagtgggcgtcgcggctgctggccaagctgcgcaaggacatccggcccgagtgccgcgaggacttcgtgctgagcatcaccggcaagaaggcgccgggctgcgtgctctccaaccccgaccagaagggcaagatgcggcgcatcgactgtctccggcaggcggacaaggtgtggcggctggacctggtcatggtcatcctgttcaagggcatcccgctggagagcaccgacggcgagcgcctggtcaaggctgcgcagtgcggtcacccggtcctgtgcgtgcagccgcaccacattggcgtggccgtcaaggagctggacctctacctggcctacttcgtgcgtgagcgagatgcagagcaaagcggcagtccccggacagggatgggctctgaccaggaggacagcaagcccatcacgctggacacgaccgacttccaggagagctttgtcacctccggcgtgttcagcgtcactgagctcatccaagtgtcccggacacccgtggtgactggaacaggacccaacttctccctgggggagctgcaggggcacctggcatacgacctgaacccagccagcactggcctcagaagaacgctgcccagcacctcctccagtgggagcaagcggcacaaatcgggctcgatggaggaagacgtggacacgagccctggcggcgattactacacttcgcccagctcgcccacgagtagcagccgcaactggacggaggacatggaaggaggcatctcgtccccggtgaagaagacagagatggacaagtcaccattcaacagcccgtccccccaggactctccccgcctctccagcttcacccagcaccaccggcccgtcatcgccgtgcacagcgggatcgcccggagcccacacccgtcctccgctctgcatttccctacgacgtccatcctaccccagacggcctccacctacttcccccacacggccatccgctacccacctcatctcaacccccaggacccgctcaaagatcttgtctcgctggcctgcgacccagccagccagcaacctggaccgtcctggtatctggga

SEQ ID NO: 6552 - DNA, 1497 bp, Homo sapiens
  source 1..1497: mol_type = genomic DNA
atggatgagttccacccgttcatcgaggccctgctgcctcacgtccgcgccttcgcctacacctggttcaacctgcaggcgcggaagcgcaagtacttcaagaagcacgagaagcggatgtcgaaggacgaggagcgtgcggtcaaggacgagctgctgggcgagaagcccgaggtcaagcagaagtgggcgtcgcggctgctggccaagctgcgcaaggacatccggcccgagtgccgcgaggacttcgtgctgagcatcaccggcaagaaggcgccgggctgcgtgctctccaaccccgaccagaagggcaagatgcggcgcatcgactgtctccggcaggcggacaaggtgtggcggctggacctggtcatggtcatcctgttcaagggcatcccgctggagagcaccgacggcgagcgcctggtcaaggctgcgcagtgcggtcacccggtcctgtgcgtgcagccgcaccacattggcgtggccgtcaaggagctggacctctacctggcctacttcgtgcgtgagcgagatgcagagcaaagcggcagtccccggacagggatgggctctgaccaggaggacagcaagcccatcacgctggacacgaccgacttccaggagagctttgtcacctccggcgtgttcagcgtcactgagctcatccaagtgtcccggacacccgtggtgactggaacaggacccaacttctccctgggggagctgcaggggcacctggcatacgacctgaacccagccagcactggcctcagaagaacgctgcccagcacctcctccagtgggagcaagcggcacaaatcgggctcgatggaggaagacgtggacacgagccctggcggcgattactacacttcgcccagctcgcccacgagtagcagccgcaactggacggaggacatggaaggaggcatctcgtccccggtgaagaagacagagatggacaagtcaccattcaacagcccgtccccccaggactctccccgcctctccagcttcacccagcaccaccggcccgtcatcgccgtgcacagcgggatcgcccggagcccacacccgtcctccgctctgcatttccctacgacgtccatcctaccccagacggcctccacctacttcccccacacggccatccgctacccacctcatctcaacccccaggacccgctcaaagatcttgtctcgctggcctgcgacccagccagccagcaacctggaccgttaaatggaagtggtcagctcaaaatgcccagccactgcctttctgctcagatgctggcacctccgcccccggggctgccacggctggcgctcccccctgccaccaaacccgccaccacctccgagggaggagccacgtcgccgacctcgccttcctactctccgcccgacacgtcccctgcaaaccgttcctttgtgggattaggaccaagggatcctgcgggcatttatcaggcacagtcctggtatctggga

SEQ ID NO: 6553 - DNA, 1710 bp, Homo sapiens
  source 1..1710: mol_type = genomic DNA
atgatgtattctcccatctgtctcactcaggatgaatttcacccattcatcgaggcacttcttccacatgtccgtgcaattgcctatacttggttcaacctgcaggctcgaaaacgcaagtactttaaaaagcatgagaagcgaatgtcaaaggatgaagaaagagcagtcaaagatgagcttctcagtgaaaagcctgaaatcaaacagaagtgggcatccaggctccttgccaaactgcgcaaagatattcgccaggagtatcgagaggactttgtgctcaccgtgactggcaagaagcacccgtgctgtgtcttatccaatcccgaccagaagggtaagattaggagaatcgactgcctgcgacaggcagacaaagtctggcgtctggatctagtcatggtgatcctgttcaaaggcatccccttggaaagtaccgatggagagcggctcatgaaatccccacattgcacaaacccagcactttgtgtccagccacatcatatcacagtatcagttaaggagcttgatttgtttttggcatactacgtgcaggagcaagattctggacaatcaggaagtccaagccacaatgatcctgccaagaatcctccaggttaccttgaggatagttttgtaaaatctggagtcttcaatgtatcagaacttgtaagagtatccagaacgcccataacccagggaactggagtcaacttcccaattggagaaatcccaagccaaccatactatcatgacatgaactcgggggtcaatcttcagaggtctctgtcttctccaccaagcagcaaaagacccaaaactatatccatagatgaaaatatggaaccaagtcctacaggagacttttacccctctccaagttcaccagctgctggaagtcgaacatggcacgaaagagatcaagatatgtcttctccgactactatgaagaagcctgaaaagccattgttcagctctgcatctccacaggattcttccccaagactgagcactttcccccagcaccaccatcccggaatacctggagttgcacacagtgtcatctcaactcgaactccacctccaccttcaccgttgccatttccaacacaagctatccttcctccagccccatcgagctacttttctcatccaacaatcagatatcctccccacctgaatcctcaggatactctgaagaactatgtaccttcttatgacccatccagtccacaaaccagccagcctaacggcagtggtcaagtagtagggaaagtgcctggccatttcactcctgtcttggcaccctctccccatcccagtgcagtgcgacctgtgaccctgagcatgacagatactaaacccatcactacatccactgaaggtgaggcagcttcacctacagcaaccacctacacagcctcaggcacatctcaagccaatcgatatgtgggactaagcccaagagacccatccttcctacatcagcaacagctgaggatttgtgactggaccatgaatcaaaacggcaggcatttataccccagtaccagtgaggatacattgggaattacttggcaaagtcctggtacctgggctagcttggttcctttccaagtgtcaaataggacacccatcttaccggccaatgtccaaaattacggtttgaacataattggagaacctttccttcaagcagaaacaagcaac

SEQ ID NO: 6554 - DNA, 1338 bp, Homo sapiens
  source 1..1338: mol_type = genomic DNA
atggaaagaatcccagtgtctgtggacttctgggttgtctgctgtgcagttctgaaatgtaaccctgggattcctaaaagaatgtcaactctgtgctttggattttctgatgaatttcacccattcatcgaggcacttcttccacatgtccgtgcaattgcctatacttggttcaacctgcaggctcgaaaacgcaagtactttaaaaagcatgagaagcgaatgtcaaaggatgaagaaagagcagtcaaagatgagcttctcagtgaaaagcctgaaatcaaacagaagtgggcatccaggctccttgccaaactgcgcaaagatattcgccaggagtatcgagaggactttgtgctcaccgtgactggcaagaagcacccgtgctgtgtcttatccaatcccgaccagaagggtaagattaggagaatcgactgcctgcgacaggcagacaaagtctggcgtctggatctagtcatggtgatcctgttcaaaggcatccccttggaaagtaccgatggagagcggctcatgaaatccccacattgcacaaacccagcactttgtgtccagccacatcatatcacagtatcagttaaggagcttgatttgtttttggcatactacgtgcaggagcaagattctggacaatcaggaagtccaagccacaatgatcctgccaagaatcctccaggttaccttgaggatagttttgtaaaatctggagtcttcaatgtatcagaacttgtaagagtatccagaacgcccataacccagggaactggagtcaacttcccaattggagaaatcccaagccaaccatactatcatgacatgaactcgggggtcaatcttcagaggtctctgtcttctccaccaagcagcaaaagacccaaaactatatccatagatgaaaatatggaaccaagtcctacaggagacttttacccctctccaagttcaccagctgctggaagtcgaacatggcacgaaagagatcaagatatgtcttctccgactactatgaagaagcctgaaaagccattgttcagctctgcatctccacaggattcttccccaagactgagcactttcccccagcaccaccatcccggaatacctggagttgcacacagtgtcatctcaactcgaactccacctccaccttcaccgttgccatttccaacacaagctatccttcctccagccccatcgagctacttttctcatccaacaatcagatatcctccccacctgaatcctcaggatactctgaagaactatgtaccttcttatgacccatccagtccacaaaccagccagtcctggtacctgggc

SEQ ID NO: 6555 - DNA, 924 bp, Homo sapiens
  source 1..924: mol_type = genomic DNA
atgctcacttttctgtggcaacgtgattctggacaatcaggaagtccaagccacaatgatcctgccaagaatcctccaggttaccttgaggatagttttgtaaaatctggagtcttcaatgtatcagaacttgtaagagtatccagaacgcccataacccagggaactggagtcaacttcccaattggagaaatcccaagccaaccatactatcatgacatgaactcgggggtcaatcttcagaggtctctgtcttctccaccaagcagcaaaagacccaaaactatatccatagatgaaaatatggaaccaagtcctacaggagacttttacccctctccaagttcaccagctgctggaagtcgaacatggcacgaaagagatcaagatatgtcttctccgactactatgaagaagcctgaaaagccattgttcagctctgcatctccacaggattcttccccaagactgagcactttcccccagcaccaccatcccggaatacctggagttgcacacagtgtcatctcaactcgaactccacctccaccttcaccgttgccatttccaacacaagctatccttcctccagccccatcgagctacttttctcatccaacaatcagatatcctccccacctgaatcctcaggatactctgaagaactatgtaccttcttatgacccatccagtccacaaaccagccagctgaggatttgtgactggaccatgaatcaaaacggcaggcatttataccccagtaccagtgaggatacattgggaattacttggcaaagtcctggtacctgggctagcttggttcctttccaagtgtcaaataggacacccatcttaccggccaatgtccaaaattacggtttgaacataattggagaacctttccttcaagcagaaacaagcaac

SEQ ID NO: 6556 - DNA, 927 bp, Homo sapiens
  source 1..927: mol_type = genomic DNA
atgaactcgggggtcaatcttcagaggtctctgtcttctccaccaagcagcaaaagacccaaaactatatccatagatgaaaatatggaaccaagtcctacaggagacttttacccctctccaagttcaccagctgctggaagtcgaacatggcacgaaagagatcaagatatgtcttctccgactactatgaagaagcctgaaaagccattgttcagctctgcatctccacaggattcttccccaagactgagcactttcccccagcaccaccatcccggaatacctggagttgcacacagtgtcatctcaactcgaactccacctccaccttcaccgttgccatttccaacacaagctatccttcctccagccccatcgagctacttttctcatccaacaatcagatatcctccccacctgaatcctcaggatactctgaagaactatgtaccttcttatgacccatccagtccacaaaccagccagcctaacggcagtggtcaagtagtagggaaagtgcctggccatttcactcctgtcttggcaccctctccccatcccagtgcagtgcgacctgtgaccctgagcatgacagatactaaacccatcactacatccactgaagcctacacagcctcaggcacatctcaagccaatcgatatgtgggactaagcccaagagacccatccttcctacatcagcaacagctgaggatttgtgactggaccatgaatcaaaacggcaggcatttataccccagtaccagtgaggatacattgggaattacttggcaaagtcctggtacctgggctagcttggttcctttccaagtgtcaaataggacacccatcttaccggccaatgtccaaaattacggtttgaacataattggagaacctttccttcaagcagaaacaagcaac

SEQ ID NO: 6557 - DNA, 1461 bp, Homo sapiens
  source 1..1461: mol_type = genomic DNA
atgatgtattctcccatctgtctcactcaggatgaatttcacccattcatcgaggcacttcttccacatgtccgtgcaattgcctatacttggttcaacctgcaggctcgaaaacgcaagtactttaaaaagcatgagaagcgaatgtcaaaggatgaagaaagagcagtcaaagatgagcttctcagtgaaaagcctgaaatcaaacagaagtgggcatccaggctccttgccaaactgcgcaaagatattcgccaggagtatcgagaggactttgtgctcaccgtgactggcaagaagcacccgtgctgtgtcttatccaatcccgaccagaagggtaagattaggagaatcgactgcctgcgacaggcagacaaagtctggcgtctggatctagtcatggtgatcctgttcaaaggcatccccttggaaagtaccgatggagagcggctcatgaaatccccacattgcacaaacccagcactttgtgtccagccacatcatatcacagtatcagttaaggagcttgatttgtttttggcatactacgtgcaggagcaagattctggacaatcaggaagtccaagccacaatgatcctgccaagaatcctccaggttaccttgaggatagttttgtaaaatctggagtcttcaatgtatcagaacttgtaagagtatccagaacgcccataacccagggaactggagtcaacttcccaattggagaaatcccaagccaaccatactatcatgacatgaactcgggggtcaatcttcagaggtctctgtcttctccaccaagcagcaaaagacccaaaactatatccatagatgaaaatatggaaccaagtcctacaggagacttttacccctctccaagttcaccagctgctggaagtcgaacatggcacgaaagagatcaagatatgtcttctccgactactatgaagaagcctgaaaagccattgttcagctctgcatctccacaggattcttccccaagactgagcactttcccccagcaccaccatcccggaatacctggagttgcacacagtgtcatctcaactcgaactccacctccaccttcaccgttgccatttccaacacaagctatccttcctccagccccatcgagctacttttctcatccaacaatcagatatcctccccacctgaatcctcaggatactctgaagaactatgtaccttcttatgacccatccagtccacaaaccagccagctgaggatttgtgactggaccatgaatcaaaacggcaggcatttataccccagtaccagtgaggatacattgggaattacttggcaaagtcctggtacctgggctagcttggttcctttccaagtgtcaaataggacacccatcttaccggccaatgtccaaaattacggtttgaacataattggagaacctttccttcaagcagaaacaagcaac

SEQ ID NO: 6558 - DNA, 1482 bp, Homo sapiens
  source 1..1482: mol_type = genomic DNA
atgatgtattctcccatctgtctcactcaggatgaatttcacccattcatcgaggcacttcttccacatgtccgtgcaattgcctatacttggttcaacctgcaggctcgaaaacgcaagtactttaaaaagcatgagaagcgaatgtcaaaggatgaagaaagagcagtcaaagatgagcttctcagtgaaaagcctgaaatcaaacagaagtgggcatccaggctccttgccaaactgcgcaaagatattcgccaggagtatcgagaggactttgtgctcaccgtgactggcaagaagcacccgtgctgtgtcttatccaatcccgaccagaagggtaagattaggagaatcgactgcctgcgacaggcagacaaagtctggcgtctggatctagtcatggtgatcctgttcaaaggcatccccttggaaagtaccgatggagagcggctcatgaaatccccacattgcacaaacccagcactttgtgtccagccacatcatatcacagtatcagttaaggagcttgatttgtttttggcatactacgtgcaggagcaagattctggacaatcaggaagtccaagccacaatgatcctgccaagaatcctccaggttaccttgaggatagttttgtaaaatctggagtcttcaatgtatcagaacttgtaagagtatccagaacgcccataacccagggaactggagtcaacttcccaattggagaaatcccaagccaaccatactatcatgacatgaactcgggggtcaatcttcagaggtctctgtcttctccaccaagcagcaaaagacccaaaactatatccatagatgaaaatatggaaccaagtcctacaggagacttttacccctctccaagttcaccagctgctggaagtcgaacatggcacgaaagagatcaagatatgtcttctccgactactatgaagaagcctgaaaagccattgttcagctctgcatctccacaggattcttccccaagactgagcactttcccccagcaccaccatcccggaatacctggagttgcacacagtgtcatctcaactcgaactccacctccaccttcaccgttgccatttccaacacaagctatccttcctccagccccatcgagctacttttctcatccaacaatcagatatcctccccacctgaatcctcaggatactctgaagaactatgtaccttcttatgacccatccagtccacaaaccagccagcctaacggcagtggtcaagtagtagggaaagtgcctggccatttcactcctgtcttggcaccctctccccatcccagtgcagtgcgacctgtgaccctgagcatgacagatactaaacccatcactacatccactgaagcctacacagcctcaggcacatctcaagccaatcgatatgtgggactaagcccaagagacccatccttcctacatcagcaacagtcctggtacctgggc

SEQ ID NO: 6559 - DNA, 1248 bp, Homo sapiens
  source 1..1248: mol_type = genomic DNA
atgcaatacagtgcgatggatgaatttcacccattcatcgaggcacttcttccacatgtccgtgcaattgcctatacttggttcaacctgcaggctcgaaaacgcaagtactttaaaaagcatgagaagcgaatgtcaaaggatgaagaaagagcagtcaaagatgagcttctcagtgaaaagcctgaaatcaaacagaagtgggcatccaggctccttgccaaactgcgcaaagatattcgccaggagtatcgagaggactttgtgctcaccgtgactggcaagaagcacccgtgctgtgtcttatccaatcccgaccagaagggtaagattaggagaatcgactgcctgcgacaggcagacaaagtctggcgtctggatctagtcatggtgatcctgttcaaaggcatccccttggaaagtaccgatggagagcggctcatgaaatccccacattgcacaaacccagcactttgtgtccagccacatcatatcacagtatcagttaaggagcttgatttgtttttggcatactacgtgcaggagcaagattctggacaatcaggaagtccaagccacaatgatcctgccaagaatcctccaggttaccttgaggatagttttgtaaaatctggagtcttcaatgtatcagaacttgtaagagtatccagaacgcccataacccagggaactggagtcaacttcccaattggagaaatcccaagccaaccatactatcatgacatgaactcgggggtcaatcttcagaggtctctgtcttctccaccaagcagcaaaagacccaaaactatatccatagatgaaaatatggaaccaagtcctacaggagacttttacccctctccaagttcaccagctgctggaagtcgaacatggcacgaaagagatcaagatatgtcttctccgactactatgaagaagcctgaaaagccattgttcagctctgcatctccacaggattcttccccaagactgagcactttcccccagcaccaccatcccggaatacctggagttgcacacagtgtcatctcaactcgaactccacctccaccttcaccgttgccatttccaacacaagctatccttcctccagccccatcgagctacttttctcatccaacaatcagatatcctccccacctgaatcctcaggatactctgaagaactatgtaccttcttatgacccatccagtccacaaaccagccagtcctggtacctgggc

SEQ ID NO: 6560 - DNA, 1683 bp, Homo sapiens
  source 1..1683: mol_type = genomic DNA
atgatgtattctcccatctgtctcactcaggatgaatttcacccattcatcgaggcacttcttccacatgtccgtgcaattgcctatacttggttcaacctgcaggctcgaaaacgcaagtactttaaaaagcatgagaagcgaatgtcaaaggatgaagaaagagcagtcaaagatgagcttctcagtgaaaagcctgaaatcaaacagaagtgggcatccaggctccttgccaaactgcgcaaagatattcgccaggagtatcgagaggactttgtgctcaccgtgactggcaagaagcacccgtgctgtgtcttatccaatcccgaccagaagggtaagattaggagaatcgactgcctgcgacaggcagacaaagtctggcgtctggatctagtcatggtgatcctgttcaaaggcatccccttggaaagtaccgatggagagcggctcatgaaatccccacattgcacaaacccagcactttgtgtccagccacatcatatcacagtatcagttaaggagcttgatttgtttttggcatactacgtgcaggagcaagattctggacaatcaggaagtccaagccacaatgatcctgccaagaatcctccaggttaccttgaggatagttttgtaaaatctggagtcttcaatgtatcagaacttgtaagagtatccagaacgcccataacccagggaactggagtcaacttcccaattggagaaatcccaagccaaccatactatcatgacatgaactcgggggtcaatcttcagaggtctctgtcttctccaccaagcagcaaaagacccaaaactatatccatagatgaaaatatggaaccaagtcctacaggagacttttacccctctccaagttcaccagctgctggaagtcgaacatggcacgaaagagatcaagatatgtcttctccgactactatgaagaagcctgaaaagccattgttcagctctgcatctccacaggattcttccccaagactgagcactttcccccagcaccaccatcccggaatacctggagttgcacacagtgtcatctcaactcgaactccacctccaccttcaccgttgccatttccaacacaagctatccttcctccagccccatcgagctacttttctcatccaacaatcagatatcctccccacctgaatcctcaggatactctgaagaactatgtaccttcttatgacccatccagtccacaaaccagccagcctaacggcagtggtcaagtagtagggaaagtgcctggccatttcactcctgtcttggcaccctctccccatcccagtgcagtgcgacctgtgaccctgagcatgacagatactaaacccatcactacatccactgaagcctacacagcctcaggcacatctcaagccaatcgatatgtgggactaagcccaagagacccatccttcctacatcagcaacagctgaggatttgtgactggaccatgaatcaaaacggcaggcatttataccccagtaccagtgaggatacattgggaattacttggcaaagtcctggtacctgggctagcttggttcctttccaagtgtcaaataggacacccatcttaccggccaatgtccaaaattacggtttgaacataattggagaacctttccttcaagcagaaacaagcaac

SEQ ID NO: 6561 - DNA, 1662 bp, Homo sapiens
  source 1..1662: mol_type = genomic DNA
atgcaaatgtgccgcccggcctcctcctcggttctctacgtgcccacgcggtggcccggggggtgcggggcaacctggcaaagttgcccaagtcctccaccgagacgcacacgcataccccagcgcccggcagttatgtattctccgctctgtctcacccaggatgaatttcatcctttcatcgaagcacttctgccccacgtccgagcctttgcctacacatggttcaacctgcaggcccgaaaacgaaaatacttcaaaaaacatgaaaagcgtatgtcaaaagaagaagagagagccgtgaaggatgaattgctaagtgaaaaaccagaggtcaagcagaagtgggcatctcgacttctggcaaagttgcggaaagatatccgacccgaatatcgagaggattttgttcttacagttacagggaaaaaacctccatgttgtgttctttccaacccagaccagaaaggcaagatgcgaagaattgactgcctccgccaggcagataaagtctggaggttggaccttgttatggtgattttgtttaaaggtattccgctggaaagtactgatggcgagcgccttgtaaagtccccacaatgctctaatccagggctctgtgtccaaccccatcacataggggtttctgttaaggaactcgatttatatttggcatactttgtgcatgcagcagattcaagtcaatctgaaagtcccagccagccaagtgacgctgacattaaggaccagccagaaaatggacatttgggcttccaggacagttttgtcacatcaggtgtttttagtgtcactgagctagtaagagtgtcacagacaccaatagctgcaggaactggcccaaatttttctctctcagatttggaaagttcttcatactacagcatgagtccaggagcaatgaggaggtctttacccagcacatcctctacgagctccacaaagcgcctcaagtctgtggaggatgaaatggacagtcctggtgaggagccattttatacaggccaagggcgctccccaggaagtggcagtcagtcaagtggatggcatgaagtggagccaggaatgccatctccaaccacactgaagaagtcggagaagtctggtttcagcagcccctccccttcacagacctcctccctgggaacggcgttcacacagcatcaccgacctgtcattacaggacccagagcaagtccgcatgcaacaccatcgactcttcatttcccgacatcacccattatccagcagcctgggccttacttctcacacccagccatccgctatcaccctcaggagacgctgaaagaatttgtccaacttgtctgccctgatgctggtcagcaggctggacaggtggggttcctcaatcccaatgggagcagccaaggcaaggtgcacaacccattccttcccaccccaatgttgccaccgccaccgccaccaccgatggccaggcctgtgcctctgccggtgccagacacaaagcctccaaccacgtcaacagaaggaggtgcagcctcccccacgtcaccaacctactcgacacccagcacctcccccgcaaaccgattcgtcagtgttggaccacgggatccaagctttgtaaatatccctcaacagacacagtcctggtacctggga

SEQ ID NO: 6562 - DNA, 1503 bp, Homo sapiens
  source 1..1503: mol_type = genomic DNA
atggatgaatttcatcctttcatcgaagcacttctgccccacgtccgagcctttgcctacacatggttcaacctgcaggcccgaaaacgaaaatacttcaaaaaacatgaaaagcgtatgtcaaaagaagaagagagagccgtgaaggatgaattgctaagtgaaaaaccagaggtcaagcagaagtgggcatctcgacttctggcaaagttgcggaaagatatccgacccgaatatcgagaggattttgttcttacagttacagggaaaaaacctccatgttgtgttctttccaacccagaccagaaaggcaagatgcgaagaattgactgcctccgccaggcagataaagtctggaggttggaccttgttatggtgattttgtttaaaggtattccgctggaaagtactgatggcgagcgccttgtaaagtccccacaatgctctaatccagggctctgtgtccaaccccatcacataggggtttctgttaaggaactcgatttatatttggcatactttgtgcatgcagcagattcaagtcaatctgaaagtcccagccagccaagtgacgctgacattaaggaccagccagaaaatggacatttgggcttccaggacagttttgtcacatcaggtgtttttagtgtcactgagctagtaagagtgtcacagacaccaatagctgcaggaactggcccaaatttttctctctcagatttggaaagttcttcatactacagcatgagtccaggagcaatgaggaggtctttacccagcacatcctctacgagctccacaaagcgcctcaagtctgtggaggatgaaatggacagtcctggtgaggagccattttatacaggccaagggcgctccccaggaagtggcagtcagtcaagtggatggcatgaagtggagccaggaatgccatctccaaccacactgaagaagtcggagaagtctggtttcagcagcccctccccttcacagacctcctccctgggaacggcgttcacacagcatcaccgacctgtcattacaggacccagagcaagtccgcatgcaacaccatcgactcttcatttcccgacatcacccattatccagcagcctgggccttacttctcacacccagccatccgctatcaccctcaggagacgctgaaagaatttgtccaacttgtctgccctgatgctggtcagcaggctggacaggtggggttcctcaatcccaatgggagcagccaaggcaaggtgcacaacccattccttcccaccccaatgttgccaccgccaccgccaccaccgatggccaggcctgtgcctctgccggtgccagacacaaagcctccaaccacgtcaacagaaggaggtgcagcctcccccacgtcaccaacctactcgacacccagcacctcccccgcaaaccgattcgtcagtgttggaccacgggatccaagctttgtaaatatccctcaacagacacagtcctggtacctggga

SEQ ID NO: 6563 - DNA, 1527 bp, Homo sapiens
  source 1..1527: mol_type = genomic DNA
atgtattctccgctctgtctcacccaggatgaatttcatcctttcatcgaagcacttctgccccacgtccgagcctttgcctacacatggttcaacctgcaggcccgaaaacgaaaatacttcaaaaaacatgaaaagcgtatgtcaaaagaagaagagagagccgtgaaggatgaattgctaagtgaaaaaccagaggtcaagcagaagtgggcatctcgacttctggcaaagttgcggaaagatatccgacccgaatatcgagaggattttgttcttacagttacagggaaaaaacctccatgttgtgttctttccaacccagaccagaaaggcaagatgcgaagaattgactgcctccgccaggcagataaagtctggaggttggaccttgttatggtgattttgtttaaaggtattccgctggaaagtactgatggcgagcgccttgtaaagtccccacaatgctctaatccagggctctgtgtccaaccccatcacataggggtttctgttaaggaactcgatttatatttggcatactttgtgcatgcagcagattcaagtcaatctgaaagtcccagccagccaagtgacgctgacattaaggaccagccagaaaatggacatttgggcttccaggacagttttgtcacatcaggtgtttttagtgtcactgagctagtaagagtgtcacagacaccaatagctgcaggaactggcccaaatttttctctctcagatttggaaagttcttcatactacagcatgagtccaggagcaatgaggaggtctttacccagcacatcctctacgagctccacaaagcgcctcaagtctgtggaggatgaaatggacagtcctggtgaggagccattttatacaggccaagggcgctccccaggaagtggcagtcagtcaagtggatggcatgaagtggagccaggaatgccatctccaaccacactgaagaagtcggagaagtctggtttcagcagcccctccccttcacagacctcctccctgggaacggcgttcacacagcatcaccgacctgtcattacaggacccagagcaagtccgcatgcaacaccatcgactcttcatttcccgacatcacccattatccagcagcctgggccttacttctcacacccagccatccgctatcaccctcaggagacgctgaaagaatttgtccaacttgtctgccctgatgctggtcagcaggctggacaggtggggttcctcaatcccaatgggagcagccaaggcaaggtgcacaacccattccttcccaccccaatgttgccaccgccaccgccaccaccgatggccaggcctgtgcctctgccggtgccagacacaaagcctccaaccacgtcaacagaaggaggtgcagcctcccccacgtcaccaacctactcgacacccagcacctcccccgcaaaccgattcgtcagtgttggaccacgggatccaagctttgtaaatatccctcaacagacacagtcctggtacctggga

SEQ ID NO: 6564 - DNA, 1494 bp, Homo sapiens
  source 1..1494: mol_type = genomic DNA
atgtattctccgctctgtctcacccaggatgaatttcatcctttcatcgaagcacttctgccccacgtccgagcctttgcctacacatggttcaacctgcaggcccgaaaacgaaaatacttcaaaaaacatgaaaagcgtatgtcaaaagaagaagagagagccgtgaaggatgaattgctaagtgaaaaaccagaggtcaagcagaagtgggcatctcgacttctggcaaagttgcggaaagatatccgacccgaatatcgagaggattttgttcttacagttacagggaaaaaacctccatgttgtgttctttccaacccagaccagaaaggcaagatgcgaagaattgactgcctccgccaggcagataaagtctggaggttggaccttgttatggtgattttgtttaaaggtattccgctggaaagtactgatggcgagcgccttgtaaagtccccacaatgctctaatccagggctctgtgtccaaccccatcacataggggtttctgttaaggaactcgatttatatttggcatactttgtgcatgcagcagattcaagtcaatctgaaagtcccagccagccaagtgacgctgacattaaggaccagccagaaaatggacatttgggcttccaggacagttttgtcacatcaggtgtttttagtgtcactgagctagtaagagtgtcacagacaccaatagctgcaggaactggcccaaatttttctctctcagatttggaaagttcttcatactacagcatgagtccaggagcaatgaggaggtctttacccagcacatcctctacgagctccacaaagcgcctcaagtctgtggaggatgaaatggacagtcctggtgaggagccattttatacaggccaagggcgctccccaggaagtggcagtcagtcaagtggatggcatgaagtggagccaggaatgccatctccaaccacactgaagaagtcggagaagtctggtttcagcagcccctccccttcacagacctcctccctgggaacggcgttcacacagcatcaccgacctgtcattacaggacccagagcaagtccgcatgcaacaccatcgactcttcatttcccgacatcacccattatccagcagcctgggccttacttctcacacccagccatccgctatcaccctcaggagacgctgaaagaatttgtccaacttgtctgccctgatgctggtcagcaggctggacaggtggggttcctcaatcccaatgggagcagccaaggcaaggtgcacaacccattccttcccaccccaatgttgccaccgccaccgccaccaccgatggccaggcctgtgcctctgccggtgccagacacaaagcctccaaccacgtcaacagaaggaggtgcagcctcccccacgtcaccaatcctggtacctgggataaaagttgcagcgtcccaccatccaccagacagaccacctgaccccttctcaactctg

SEQ ID NO: 6565 - DNA, 1608 bp, Homo sapiens
  source 1..1608: mol_type = genomic DNA
atgtttgaacagctgaagccaatcgaacctgtacagaagacgctcccatgggtgggcgaggtagctgccaccctgcaggaagccatgaagagagattgctggagggaggcacgggtgaagaagaagccagtcacctttgaggatgtggcagtgaatttcacccaggaagagtgggactgtctagatgccagccagagggtcctttaccaggatgttatgtcggaaacctttaagaatctaacatctgtggccagaatctttctgcataagccagagctaatcaccaagcttgagcaagaagaggaacagtggagagagtttgtccatctcccaaacacagaaggcctttcagaaggcaagaagaaagagcttcgagaacaacatcccagtctgagagatgaggggactagtgatgacaaggtcttccttgcatgcagaggggccggccagtgccccctatctgccccagctgggactatggacaggacccgggtgcttcaagcatcccaggctgggccaccctttttttgctacacctgtggcaaatgtttcagcaggcgctcctacctctatagccaccagtttgttcacaatcccaagctgactaacagctgcagtcagtgtgggaagttgtttcggagccccaagtccctcagctatcacagacgcatgcatcttggggagaggcccttctgttgcacgctctgtgacaagacctactgtgatgcttctggactaagtcgtcaccgccgcgtccatctgggttaccggccccattcatgctctgtgtgtgggaagagcttccgggaccagtctgagctcaaacgccaccagaagatacaccaaaaccaggagccagtggatggaaaccaggagtgtactttgaggattccaggcacccaggctgaattccagacacccatcgccagaagccagaggtccatccaggggcttttggatgtgaaccatgcaccagtggccaggtcccaggaacccatatttagaactgagggtcctatggcccagaaccaggcatctgtacttaagaaccaagcacctgtgaccaggacccaggcacccatcactggaaccctctgtcaggatgccagatccaactctcatccagtgaagccctcaagactcaatgtcttctgttgcccccattgttctttgacttttagcaagaaatcctatctctccagacaccagaaggcccacctcacagagccgcccaactactgcttccattgcagcaagtctttcagctcattttccaggctggtcagacaccagcagacccactggaagcagaagagctacctttgccctatctgtgacctctcctttggggagaaagagggccttatggatcactggaggggctataaaggcaaggacctgtgccagagcagccaccataaatgccgggtgatcctgggccagtggcttggcttctctcatgatgtccccactatggctggggaggaatggaagcatggaggtgatcaatctccccccaggatccatacccccaggagaagaggcctaagagagaaggcctgcaaaggagacaaaacaaaggaggcagtgagcatcttgaaacataaa

SEQ ID NO: 6566 - DNA, 1437 bp, Homo sapiens
  source 1..1437: mol_type = genomic DNA
atgggttcccccgccgccccggagggagcgctgggctacgtccgcgagttcactcgccactcctccgacgtgctgggcaacctcaacgagctgcgcctgcgcgggatcctcactgacgtcacgctgctggttggcgggcaacccctcagagcacacaaggcagttctcatcgcctgcagtggcttcttctattcaattttccggggccgtgcgggagtcggggtggacgtgctctctctgcccgggggtcccgaagcgagaggcttcgcccctctattggacttcatgtacacttcgcgcctgcgcctctctccagccactgcaccagcagtcctagcggccgccacctatttgcagatggagcacgtggtccaggcatgccaccgcttcatccaggccagctatgaacctctgggcatctccctgcgccccctggaagcagaacccccaacacccccaacggcccctccaccaggtagtcccaggcgctccgaaggacacccagacccacctactgaatctcgaagctgcagtcaaggcccccccagtccagccagccctgaccccaaggcctgcaactggaaaaagtacaagtacatcgtgctaaactctcaggcctcccaagcagggagcctggtcggggagagaagttctggtcaaccttgcccccaagccaggctccccagtggagacgaggcctccagcagcagcagcagcagcagcagcagcagtgaagaaggacccattcctggtccccagagcaggctctctccaactgctgccactgtgcagttcaaatgtggggctccagccagtaccccctacctcctcacatcccaggctcaagacacctctggatcaccctctgaacgggctcgtccactaccgggaagtgaatttttcagctgccagaactgtgaggctgtggcagggtgctcatcggggctggactccttggttcctggggacgaagacaaaccctataagtgtcagctgtgccggtcttcgttccgctacaagggcaaccttgccagtcatcgtacagtgcacacaggggaaaagccttaccactgctcaatctgcggagcccgttttaaccggccagcaaacctgaaaacgcacagccgcatccattcgggagagaagccgtataagtgtgagacgtgcggctcgcgctttgtacaggtggcacatctgcgggcgcacgtgctgatccacaccggggagaagccctacccttgccctacctgcggaacccgcttccgccacctgcagaccctcaagagccacgttcgcatccacaccggagagaagccttaccactgcgacccctgtggcctgcatttccggcacaagagtcaactgcggctgcatctgcgccagaaacacggagctgctaccaacaccaaagtgcactaccacattctcggggggccc

SEQ ID NO: 6567 - DNA, 1506 bp, Homo sapiens
  source 1..1506: mol_type = genomic DNA
atgtactccccgtactgcctcacccaggatgagttccacccgttcatcgaggcactgctgcctcacgtccgcgctttctcctacacctggttcaacctgcaggcgcggaagcgcaagtacttcaagaagcatgaaaagcggatgtcgaaggacgaggagcgggcggtgaaggacgagctgctgggcgagaagcccgagatcaagcagaagtgggcatcccggctgctggccaagctgcgcaaggacatccggcccgagttccgcgaggacttcgtgctgaccatcacgggcaagaagcccccctgctgcgtgctctccaaccccgaccagaagggcaagatccggcggattgactgcctgcgccaggctgacaaggtgtggcggctggacctggtcatggtgattttgtttaaggggatccccctggaaagtactgatggggagcggctctacaagtcgcctcagtgctcgaaccccggcctgtgcgtccagccacatcacattggagtcacaatcaaagaactggatctttatctggcttactttgtccacactccggaatccggacaatcagatagttcaaaccagcaaggagatgcggacatcaaaccactgcccaacgggcacttaagtttccaggactgttttgtgacttccggggtctggaatgtgacggagctggtgagagtatcacagactcctgttgcaacagcatcagggcccaacttctccctggcggacctggagagtcccagctactacaacatcaaccaggtgaccctggggcggcggtccatcacctcccctccttccaccagcaccaccaagcgccccaagtccatcgatgacagtgagatggagagccctgttgatgacgtgttctatcccgggacaggccgttccccagcagctggcagcagccagtccagcgggtggcccaacgatgtggatgcaggcccggcttctctaaagaagtcaggaaagctggacttctgcagtgccctctcctctcagggcagctccccgcgcatggctttcacccaccacccgctgcctgtgcttgctggagtcagaccagggagcccccgggccacagcatcagccctgcacttcccctccacgtccatcatccagcagtcgagcccgtatttcacgcacccgaccatccgctaccaccaccaccacgggcaggactcactgaaggagtttgtgcagtttgtgtgctcggatggctcgggccaggccaccggacagcccaacggtagcggccagggcaaagtcccggggtcatttttgctaccgccgccgcctccagtggccagacctgtgccccttcctatgcctgattccaaatccaccagcactgccccagacggcgccgccttgactcctccatcaccttcattcgcaacgacaggcgcctcctctgccaaccggtttgtcagcatcggaccccgggacggcaactttctgaacatcccacagcagtctcagtcctggttcctc

SEQ ID NO: 6568 - DNA, 1323 bp, Homo sapiens
  source 1..1323: mol_type = genomic DNA
atgtactccccgtactgcctcacccaggatgagttccacccgttcatcgaggcactgctgcctcacgtccgcgctttctcctacacctggttcaacctgcaggcgcggaagcgcaagtacttcaagaagcatgaaaagcggatgtcgaaggacgaggagcgggcggtgaaggacgagctgctgggcgagaagcccgagatcaagcagaagtgggcatcccggctgctggccaagctgcgcaaggacatccggcccgagttccgcgaggacttcgtgctgaccatcacgggcaagaagcccccctgctgcgtgctctccaaccccgaccagaagggcaagatccggcggattgactgcctgcgccaggctgacaaggtgtggcggctggacctggtcatggtgattttgtttaaggggatccccctggaaagtactgatggggagcggctctacaagtcgcctcagtgctcgaaccccggcctgtgcgtccagccacatcacattggagtcacaatcaaagaactggatctttatctggcttactttgtccacactccggaatccggacaatcagatagttcaaaccagcaaggagatgcggacatcaaaccactgcccaacgggcacttaagtttccaggactgttttgtgacttccggggtctggaatgtgacggagctggtgagagtatcacagactcctgttgcaacagcatcagggcccaacttctccctggcggacctggagagtcccagctactacaacatcaaccaggtgaccctggggcggcggtccatcacctcccctccttccaccagcaccaccaagcgccccaagtccatcgatgacagtgagatggagagccctgttgatgacgtgttctatcccgggacaggccgttccccagcagctggcagcagccagtccagcgggtggcccaacgatgtggatgcaggcccggcttctctaaagaagtcaggaaagctggacttctgcagtgccctctcctctcagggcagctccccgcgcatggctttcacccaccacccgctgcctgtgcttgctggagtcagaccagggagcccccgggccacagcatcagccctgcacttcccctccacgtccatcatccagcagtcgagcccgtatttcacgcacccgaccatccgctaccaccaccaccacgggcaggactcactgaaggagtttgtgcagtttgtgtgctcggatggctcgggccaggccaccggacagcattcgcaacgacaggcgcctcctctgccaaccggtttgtcagcatcggaccccgggacggcaactttc

SEQ ID NO: 6569 - DNA, 1482 bp, Homo sapiens
  source 1..1482: mol_type = genomic DNA
atggatgagttccacccgttcatcgaggcactgctgcctcacgtccgcgctttctcctacacctggttcaacctgcaggcgcggaagcgcaagtacttcaagaagcatgaaaagcggatgtcgaaggacgaggagcgggcggtgaaggacgagctgctgggcgagaagcccgagatcaagcagaagtgggcatcccggctgctggccaagctgcgcaaggacatccggcccgagttccgcgaggacttcgtgctgaccatcacgggcaagaagcccccctgctgcgtgctctccaaccccgaccagaagggcaagatccggcggattgactgcctgcgccaggctgacaaggtgtggcggctggacctggtcatggtgattttgtttaaggggatccccctggaaagtactgatggggagcggctctacaagtcgcctcagtgctcgaaccccggcctgtgcgtccagccacatcacattggagtcacaatcaaagaactggatctttatctggcttactttgtccacactccggaatccggacaatcagatagttcaaaccagcaaggagatgcggacatcaaaccactgcccaacgggcacttaagtttccaggactgttttgtgacttccggggtctggaatgtgacggagctggtgagagtatcacagactcctgttgcaacagcatcagggcccaacttctccctggcggacctggagagtcccagctactacaacatcaaccaggtgaccctggggcggcggtccatcacctcccctccttccaccagcaccaccaagcgccccaagtccatcgatgacagtgagatggagagccctgttgatgacgtgttctatcccgggacaggccgttccccagcagctggcagcagccagtccagcgggtggcccaacgatgtggatgcaggcccggcttctctaaagaagtcaggaaagctggacttctgcagtgccctctcctctcagggcagctccccgcgcatggctttcacccaccacccgctgcctgtgcttgctggagtcagaccagggagcccccgggccacagcatcagccctgcacttcccctccacgtccatcatccagcagtcgagcccgtatttcacgcacccgaccatccgctaccaccaccaccacgggcaggactcactgaaggagtttgtgcagtttgtgtgctcggatggctcgggccaggccaccggacagcccaacggtagcggccagggcaaagtcccggggtcatttttgctaccgccgccgcctccagtggccagacctgtgccccttcctatgcctgattccaaatccaccagcactgccccagacggcgccgccttgactcctccatcaccttcattcgcaacgacaggcgcctcctctgccaaccggtttgtcagcatcggaccccgggacggcaactttctgaacatcccacagcagtctcagtcctggttcctc

SEQ ID NO: 6570 - DNA, 1299 bp, Homo sapiens
  source 1..1299: mol_type = genomic DNA
atggatgagttccacccgttcatcgaggcactgctgcctcacgtccgcgctttctcctacacctggttcaacctgcaggcgcggaagcgcaagtacttcaagaagcatgaaaagcggatgtcgaaggacgaggagcgggcggtgaaggacgagctgctgggcgagaagcccgagatcaagcagaagtgggcatcccggctgctggccaagctgcgcaaggacatccggcccgagttccgcgaggacttcgtgctgaccatcacgggcaagaagcccccctgctgcgtgctctccaaccccgaccagaagggcaagatccggcggattgactgcctgcgccaggctgacaaggtgtggcggctggacctggtcatggtgattttgtttaaggggatccccctggaaagtactgatggggagcggctctacaagtcgcctcagtgctcgaaccccggcctgtgcgtccagccacatcacattggagtcacaatcaaagaactggatctttatctggcttactttgtccacactccggaatccggacaatcagatagttcaaaccagcaaggagatgcggacatcaaaccactgcccaacgggcacttaagtttccaggactgttttgtgacttccggggtctggaatgtgacggagctggtgagagtatcacagactcctgttgcaacagcatcagggcccaacttctccctggcggacctggagagtcccagctactacaacatcaaccaggtgaccctggggcggcggtccatcacctcccctccttccaccagcaccaccaagcgccccaagtccatcgatgacagtgagatggagagccctgttgatgacgtgttctatcccgggacaggccgttccccagcagctggcagcagccagtccagcgggtggcccaacgatgtggatgcaggcccggcttctctaaagaagtcaggaaagctggacttctgcagtgccctctcctctcagggcagctccccgcgcatggctttcacccaccacccgctgcctgtgcttgctggagtcagaccagggagcccccgggccacagcatcagccctgcacttcccctccacgtccatcatccagcagtcgagcccgtatttcacgcacccgaccatccgctaccaccaccaccacgggcaggactcactgaaggagtttgtgcagtttgtgtgctcggatggctcgggccaggccaccggacagcattcgcaacgacaggcgcctcctctgccaaccggtttgtcagcatcggaccccgggacggcaactttc

SEQ ID NO: 6571 - DNA, 1170 bp, Homo sapiens
  source 1..1170: mol_type = genomic DNA
atgatgcagagtgcgactgtccccgcggaaggggctgtcaaggggctcccggagatgctaggtgtgccgatgcaacagattccccagtgcgctggctgcaaccagcacatcctggacaagttcatcctgaaggtcctggacagacactggcacagctcctgcctcaagtgtgcagactgccagatgcagctggcggacaggtgcttctccagggctgggagcgtctactgcaaggaggacttcttcaagcgcttcggcacaaaatgcacggcctgccagcagggtatccccccaacccaggtggtccgcaaggcccaggactttgtctaccacctgcactgctttgcttgcatcatctgcaaccggcagctggccacgggggacgaattctacctcatggaggacgggcggctggtgtgcaaggaagactacgagacagccaagcagaacgatgactcagaggctggagctaagcggccccggaccaccatcacagccaagcagctggagacattaaagaatgcatacaagaactcccccaagcctgcccggcacgtgagggagcagctgtcctcagagacaggcctggacatgagggtcgtacaggtttggtttcagaacagaagggccaaagagaaacgcctgaagaaggatgcagggcggcaccgctgggggcagttctataagagcgtcaagaggagccggggcagcagcaagcaggagaaggagagctctgcagaggactgtggggttagtgacagtgagctgagcttccgagaggatcaaattctctcagaacttggccacaccaataggatttatggcaacgtgggggacgttacaggcggacagttaatgaatgggagcttctccatggacgggacaggacaatcctatcaggacttgagggatgggagcccctatggaatcccccagtctccatcctccatatcgtccctgccatcccacgctcctttgctcaatgggctggattacacggtggacagtaatttgggcatcattgcgcatgcagggcagggagtaagccagacgctgagagccatggctgggggacccacctctgacatctccacaggaagcagtgtaggctatcccgactttccaactagcccaggctcttggctcgatgaaatggatcatcctcctttt

SEQ ID NO: 6572 - DNA, 1293 bp, Homo sapiens
  source 1..1293: mol_type = genomic DNA
atgttagttcacagtttttcagccatggaccgtcacgacggcaccagcaacgggacggcacggttgccccagctgggcactgtaggtcaatctccctacacgagcgccccgccgctgtcccacacccccaatgccgacttccagcccccatacttccccccaccctaccagcctatctacccccagtcgcaagatccttactcccacgtcaacgacccctacagcctgaaccccctgcacgcccagccgcagccgcagcacccaggctggcccggccagaggcagagccaggagtctgggctcctgcacacgcaccgggggctgcctcaccagctgtcgggcctggatcctcgcagggactacaggcggcacgaggacctcctgcacggcccacacgcgctcagctcaggactcggagacctctcgatccactccttacctcacgccatcgaggaggtcccgcatgtagaagacccgggtattaacatcccagatcaaactgtaattaagaaaggccccgtgtccctgtccaagtccaacagcaatgccgtctccgccatccctattaacaaggacaacctcttcggcggcgtggtgaaccccaacgaagtcttctgttcagttccgggtcgcctctcgctcctcagctccacctcgaagtacaaggtcacggtggcggaagtgcagcggcggctctcaccacccgagtgtctcaacgcgtcgctgctgggcggagtgctccggagggcgaagtctaaaaatggaggaagatctttaagagaaaaactggacaaaataggattaaatctgcctgcagggagacgtaaagctgccaacgttaccctgctcacatcactagtagagggagaagctgtccacctagccagggactttgggtacgtgtgcgaaaccgaatttcctgccaaagcagtagctgaatttctcaaccgacaacattccgatcccaatgagcaagtgacaagaaaaaacatgctcctggctacaaaacagatatgcaaagagttcaccgacctgctggctcaggaccgatctcccctggggaactcacggcccaaccccatcctggagcccggcatccagagctgcttgacccacttcaacctcatctcccacggcttcggcagccccgcggtgtgtgccgcggtcacggccctgcagaactatctcaccgaggccctcaaggccatggacaaaatgtacctcagcaacaaccccaatagccacacggacaacaacgccaaaagcagtgacaaagaggagaagcacagaaag

SEQ ID NO: 6573 - DNA, 1296 bp, Homo sapiens
  source 1..1296: mol_type = genomic DNA
atgttatttgagcagggtcagcaggccctggagcttcctgagtgcacaatgcagaaggctgcttactatgaaaacccaggactgtttggaggctatggctacagcaaaactacggacacttacggctacagcaccccccaccagccctacccaccccctgctgctgccagctccctggacactgactatccaggttctgcctgctccatccagagctctgcccctctgagagccccagcccacaaaggagctgaactcaatggcagctgcatgcggccgggcactgggaacagccagggtgggggtggtggcagccagcctcctggtctgaactcagagcagcagccaccacaaccccctcctccaccaccgaccctgcccccatcttcacccaccaatcctggaggtggagtgcctgccaagaagcccaaaggtgggcccaatgcttctagctcctcagccaccatcagcaagcagatcttcccctggatgaaagagtctcgacagaactccaagcagaagaacagctgtgccactgcaggagagagctgcgaggacaagagcccgccaggcccagcatccaagcgggtacgcacggcatacacgagcgcgcagctggtggaattggaaaaggaattccacttcaaccgctacttgtgccggccgcgccgcgtggagatggccaacctgctgaatctcacggaacgccagatcaagatctggttccagaaccggcgcatgaagtacaagaaggaccagaaggccaagggcatcctgcactcgccggctagccagtcccctgagcgcagcccaccgctcggcggcgccgctggccacgtggcctactccggccagctgccgccagtgcccggcctggcctacgacgcgccctcgccgcctgctttcgccaaatcacagcccaatatgtacggcctggccgcctacacggcgccactcagcagctgcctgccacaacagaagcgctacgcagcgccggagttcgagccccatcccatggcgagcaacggcggcggcttcgccagcgccaacctgcagggcagcccggtgtacgtgggcggcaacttcgtcgagtccatggcgcccgcgtccgggcctgtcttcaacctgggccacctctcgcacccgtcgtcggccagcgtggactacagttgcgccgcgcagattccaggcaaccaccaccatggaccttgcgaccctcatcccacctacacagatctctcggcccaccactcgtctcagggacgactgccggaggctcccaaactgacgcatctg

SEQ ID NO: 6574 - DNA, 1428 bp, Homo sapiens
  source 1..1428: mol_type = genomic DNA
atggcgtcacgcatagggttgcgcatgcagctcatgcgggagcaggcgcagcaggaggagcagcgggagcgcatgcagcaacaggctgtcatgcattacatgcagcagcagcagcagcagcaacagcagcagctcggagggccgcccaccccggccatcaatacccccgtccacttccagtcgccaccacctgtgcctggggaggtgttgaaggtgcagtcctacctggagaatcccacatcctaccatctgcagcagtcgcagcatcagaaggtgcgggagtacctgtccgagacctatgggaacaagtttgctgcccacatcagcccagcccagggctctccgaaacccccaccagccgcctccccaggggtgcgagctggacacgtgctgtcctcctccgctggcaacagtgctcccaatagccccatggccatgctgcacattggctccaaccctgagagggagttggatgatgtcattgacaacattatgcgtctggacgatgtccttggctacatcaatcctgaaatgcagatgcccaacacgctacccctgtccagcagccacctgaatgtgtacagcagcgacccccaggtcacagcctccctggtgggcgtcaccagcagctcctgccctgcggacctgacccagaagcgagagctcacagatgctgagagcagggccctggccaaggagcggcagaagaaagacaatcacaacttaattgaaaggagacgaaggttcaacatcaatgaccgcatcaaggagttgggaatgctgatccccaaggccaatgacctggacgtgcgctggaacaagggcaccatcctcaaggcctctgtggattacatccggaggatgcagaaggacctgcaaaagtccagggagctggagaaccactctcgccgcctggagatgaccaacaagcagctctggctccgtatccaggagctggagatgcaggctcgagtgcacggcctccctaccacctccccgtccggcatgaacatggctgagctggcccagcaggtggtgaagcaggagctgcctagcgaagagggcccaggggaggccctgatgctgggggctgaggtccctgaccctgagccactgccagctctgcccccgcaagccccgctgcccctgcccacccagccaccatccccattccatcacctggacttcagccacagcctgagctttgggggcagggaggacgagggtcccccgggctaccccgaacccctggcgccggggcatggctccccattccccagcctgtccaagaaggatctggacctcatgctcctggacgactcactgctaccgctggcctctgatccacttctgtccaccatgtcccccgaggcctccaaggccagcagccgccggagcagcttcagcatggaggagggcgatgtgctg

SEQ ID NO: 6575 - DNA, 468 bp, Homo sapiens
  source 1..468: mol_type = genomic DNA
atgacgactaatcccaaaccgaataaggcattaaaggtcaagaaggaggcgggcgagaacgccccggtgctcagcgatgatgagctggtgtccatgtcggtgcgggagctgaaccagcacctgcggggtctcaccaaggaggaggtgacccgcctgaagcagcgtcggcgcacactcaagaaccgcggctacgcggccagctgccgcatcaagcgggtgacgcagaaggaggagctggagcggcagcgcgtggagctgcagcaggaggtggagaagctggcgcgtgagaacagcagcatgcggctggagctggacgccctgcgctccaagtacgaggcgctgcagaccttcgcgcgcaccgtggcccggggacctgtggcgccctccaaggtggccaccaccagcgtcatcaccatcgtcaagtccaccgagctctcctccacctccgtgcccttctcggctgcatcc

SEQ ID NO: 6576 - DNA, 1140 bp, Homo sapiens
  source 1..1140: mol_type = genomic DNA
atgatgttctcgggcttcaacgcagactacgaggcgtcatcctcccgctgcagcagcgcgtccccggccggggatagcctctcttactaccactcacccgcagactccttctccagcatgggctcgcctgtcaacgcgcaggacttctgcacggacctggccgtctccagtgccaacttcattcccacggtcactgccatctcgaccagtccggacctgcagtggctggtgcagcccgccctcgtctcctctgtggccccatcgcagaccagagcccctcaccctttcggagtccccgccccctccgctggggcttactccagggctggcgttgtgaagaccatgacaggaggccgagcgcagagcattggcaggaggggcaaggtggaacagttatctccagaagaagaagagaaaaggagaatccgaagggaaaggaataagatggctgcagccaaatgccgcaaccggaggagggagctgactgatacactccaagcggagacagaccaactagaagatgagaagtctgctttgcagaccgagattgccaacctgctgaaggagaaggaaaaactagagttcatcctggcagctcaccgacctgcctgcaagatccctgatgacctgggcttcccagaagagatgtctgtggcttcccttgatctgactgggggcctgccagaggttgccaccccggagtctgaggaggccttcaccctgcctctcctcaatgaccctgagcccaagccctcagtggaacctgtcaagagcatcagcagcatggagctgaagaccgagccctttgatgacttcctgttcccagcatcatccaggcccagtggctctgagacagcccgctccgtgccagacatggacctatctgggtccttctatgcagcagactgggagcctctgcacagtggctccctggggatggggcccatggccacagagctggagcccctgtgcactccggtggtcacctgtactcccagctgcactgcttacacgtcttccttcgtcttcacctaccccgaggctgactccttccccagctgtgcagctgcccaccgcaagggcagcagcagcaatgagccttcctctgactcgctcagctcacccacgctgctggccctg

SEQ ID NO: 6577 - DNA, 1140 bp, Homo sapiens; identical to SEQ ID NO: 6576
  source 1..1140: mol_type = genomic DNA

SEQ ID NO: 6578 - DNA, 1926 bp, Homo sapiens
  source 1..1926: mol_type = genomic DNA
atgtcttccaagcgaccagcctctccgtatggggaagcagatggagaggtagccatggtgacaagcagacagaaagtggaagaagaggagagtgacgggctcccagcctttcaccttcccttgcatgtgagttttcccaacaagcctcactctgaggaatttcagccagtttctctgctgacgcaagagacttgtggccataggactcccacttctcagcacaatacaatggaagttgatggcaataaagttatgtcttcatttgccccacacaactcatctacctcacctcagaaggcagaagaaggtgggcgacagagtggcgagtccttgtctagtacagccctgggaactcctgaacggcgcaagggcagtttagctgatgttgttgacaccttgaagcagaggaaaatggaagagctcatcaaaaacgagccggaagaaacccccagtattgaaaaactactctcaaaggactggaaagacaagcttcttgcaatgggatcggggaactttggcgaaataaaagggactcccgagagcttagctgagaaagaaaggcaactcatgggtatgatcaaccagctgaccagcctccgagagcagctgttggctgcccacgatgagcagaagaaactagctgcctctcagattgagaaacagcgtcagcaaatggagctggccaagcagcaacaagaacaaattgcaagacagcagcagcagcttctacagcaacaacacaaaatcaatttgctccagcaacagatccaggttcaaggtcagctgccgccattaatgattcccgtattccctcctgatcaacggacactggctgcagctgcccagcaaggattcctcctccctccaggcttcagctataaggctggatgtagtgacccttaccctgttcagctgatcccaactaccatggcagctgctgccgcagcaacaccaggcttaggcccactccaactgcagcagttatatgctgcccagctagctgcaatgcaggtatctccaggagggaagctgccaggcataccccaaggcaaccttggtgctgctgtatctcctaccagcattcacacagacaagagcacaaacagcccaccacccaaaagcaaggaaaaaacaacactggagagtctgactcagcaactggcagttaaacagaatgaagaaggaaaatttagccatgcaatgatggatttcaatctgagtggagattctgatggaagtgctggagtctcagagtcaagaatttatagggaatcccgagggcgtggtagcaatgaaccccacataaagcgtccaatgaatgccttcatggtgtgggctaaagatgaacggagaaagatccttcaagcctttcctgacatgcacaactccaacatcagcaagatattgggatctcgctggaaagctatgacaaacctagagaaacagccatattatgaggagcaagcccgtctcagcaagcagcacctggagaagtaccctgactataagtacaagcccaggccaaagcgcacctgcctggtggatggcaaaaagctgcgcattggtgaatacaaggcaatcatgcgcaacaggcggcaggaaatgcggcagtacttcaatgttgggcaacaagcacagatccccattgccactgctggtgttgtgtaccctggagccatcgccatggctgggatgccctcccctcacctgccctcggagcactcaagcgtgtctagcagcccagagcctgggatgcctgttatccagagcacttacggtgtgaaaggagaggagccacatatcaaagaagagatacaggccgaggacatcaatggagaaatttatgatgagtacgacgaggaagaggatgatccagatgtagattatgggagtgacagtgaaaaccatattgcaggacaagccaac

SEQ ID NO: 6579 - DNA, 699 bp, Homo sapiens
  source 1..699: mol_type = genomic DNA
atgagttcctattttgtgaatcccactttccccgggagccttcccagcggccaggactccttcttgggccagctgcccctctaccaggctggctatgacgcgctgaggcccttcccggcctcgtacggggcgtcgagtctcccggacaagacgtacacctcaccttgtttctaccaacagtccaactcggtcctggcctgcaaccgggcgtcctacgagtacggggcctcgtgtttctattctgataaggacctcagtggcgcctcgccctcgggcagtggcaagcagaggggccccggggactacctgcacttttctcccgagcagcagtacaaacccgacagcagcagcgggcagggcaaagcactccatgacgaaggcgccgaccggaagtacacgagcccggtttacccttggatgcagcggatgaactcctgcgcgggtgctgtgtatgggagccatgggcgccgaggccgccagacctacacgcgctaccagacactggagctggagaaggagttccacttcaaccgctacctgacacggcgccgccgcatcgagatcgccaacgcgctctgcctcaccgagcgccagatcaagatctggttccagaaccgccgcatgaagtggaaaaaggaaaacaagctcatcaattccacgcagcccagcggggaggactcagaggcaaaggcgggcgag

SEQ ID NO: 6580 - DNA, 1794 bp, Homo sapiens
  source 1..1794: mol_type = genomic DNA
atgccctgtatccaagcccaatatgggacaccagcaccgagtccgggaccccgtgaccacctggcaagcgaccccctgacccctgagttcatcaagcccaccatggacctggccagccccgaggcagcccccgctgcccccactgccctgcccagcttcagcaccttcatggacggctacacaggagagtttgacaccttcctctaccagctgccaggaacagtccagccatgctcctcagcctcctcctcggcctcctccacatcctcgtcctcagccacctcccctgcctctgcctccttcaagttcgaggacttccaggtgtacggctgctaccccggccccctgagcggcccagtggatgaggccctgtcctccagtggctctgactactatggcagcccctgctcggccccgtcgccctccacgcccagcttccagccgccccagctctctccctgggatggctccttcggccacttctcgcccagccagacttacgaaggcctgcgggcatggacagagcagctgcccaaagcctctgggcccccacagcctccagccttcttttccttcagtcctcccaccggccccagccccagcctggcccagagccccctgaagttgttcccctcacaggccacccaccagctgggggagggagagagctattccatgcctacggccttcccaggtttggcacccacttctccacaccttgagggctcggggatactggatacacccgtgacctcaaccaaggcccggagcggggccccaggtggaagtgaaggccgctgtgctgtgtgtggggacaacgcttcatgccagcattatggtgtccgcacatgtgagggctgcaagggcttcttcaagcgcacagtgcagaaaaacgccaagtacatctgcctggctaacaaggactgccctgtggacaagaggcggcgaaaccgctgccagttctgccgcttccagaagtgcctggcggtgggcatggtgaaggaagttgtccgaacagacagcctgaaggggcggcggggccggctaccttcaaaacccaagcagcccccagatgcctcccctgccaatctcctcacttccctggtccgtgcacacctggactcagggcccagcactgccaaactggactactccaagttccaggagctggtgctgccccactttgggaaggaagatgctggggatgtacagcagttctacgacctgctctccggttctctggaggtcatccgcaagtgggcggagaagatccctggctttgctgagctgtcaccggctgaccaggacctgttgctggagtcggccttcctggagctcttcatcctccgcctggcgtacaggtctaagccaggcgagggcaagctcatcttctgctcaggcctggtgctacaccggctgcagtgtgcccgtggcttcggggactggattgacagtatcctggccttctcaaggtccctgcacagcttgcttgtcgatgtccctgccttcgcctgcctctctgcccttgtcctcatcaccgaccggcatgggctgcaggagccgcggcgggtggaggagctgcagaaccgcatcgccagctgcctgaaggagcacgtggcagctgtggcgggcgagccccagccagccagctgcctgtcacgtctgttgggcaaactgcccgagctgcggaccctgtgcacccagggcctgcagcgcatcttctacctcaagctggaggacttggtgccccctccacccatcattgacaagatcttcatggacacgctgcccttc

SEQ ID NO: 6581 - DNA, 867 bp, Homo sapiens
  source 1..867: mol_type = genomic DNA
atgacaggagtgtttgacagaagggtccccagcatccgatccggcgacttccaagctccgttccagacgtccgcagctatgcaccatccgtctcaggaatcgccaactttgcccgagtcttcagctaccgattctgactactacagccctacggggggagccccgcacggctactgctctcctacctcggcttcctatggcaaagctctcaacccctaccagtatcagtatcacggcgtgaacggctccgccgggagctacccagccaaagcttatgccgactatagctacgctagctcctaccaccagtacggcggcgcctacaaccgcgtcccaagcgccaccaaccagccagagaaagaagtgaccgagcccgaggtgagaatggtgaatggcaaaccaaagaaagttcgtaaacccaggactatttattccagctttcagctggccgcattacagagaaggtttcagaagactcagtacctcgccttgccggaacgcgccgagctggccgcctcgctgggattgacacaaacacaggtgaaaatctggtttcagaacaaaagatccaagatcaagaagatcatgaaaaacggggagatgcccccggagcacagtcccagctccagcgacccaatggcgtgtaactcgccgcagtctccagcggtgtgggagccccagggctcgtcccgctcgctcagccaccaccctcatgcccaccctccgacctccaaccagtccccagcgtccagctacctggagaactctgcatcctggtacacaagtgcagccagctcaatcaattcccacctgccgccgccgggctccttacagcacccgctggcgctggcctccgggacactctat

SEQ ID NO: 6582 - DNA, 1326 bp, Homo sapiens
  source 1..1326: mol_type = genomic DNA
atgtcaaacaaagatcgacacattgattccagctgttcgtccttcatcaagacggaaccttccagcccagcctccctgacggacagcgtcaaccaccacagccctggtggctcttcagacgccagtgggagctacagttcaaccatgaatggccatcagaacggacttgactcgccacctctctacccttctgctcctatcctgggaggtagtgggcctgtcaggaaactgtatgatgactgctccagcaccattgttgaagatccccagaccaagtgtgaatacatgctcaactcgatgcccaagagactgtgtttagtgtgtggtgacatcgcttctgggtaccactatggggtagcatcatgtgaagcctgcaaggcattcttcaagaggacaattcaaggcaatatagaatacagctgccctgccacgaatgaatgtgaaatcacaaagcgcagacgtaaatcctgccaggcttgccgcttcatgaagtgtttaaaagtgggcatgctgaaagaaggggtgcgtcttgacagagtacgtggaggtcggcagaagtacaagcgcaggatagatgcggagaacagcccatacctgaaccctcagctggttcagccagccaaaaagccattgctctggtctgatcctgcagataacaagattgtctcacatttgttggtggctgaaccggagaagatctatgccatgcctgaccctactgtccccgacagtgacatcaaagccctcactacactgtgtgacttggccgaccgagagttggtggttatcattggatgggcgaagcatattccaggcttctccacgctgtccctggcggaccagatgagccttctgcagagtgcttggatggaaattttgatccttggtgtcgtataccggtctctttcgtttgaggatgaacttgtctatgcagacgattatataatggacgaagaccagtccaaattagcaggccttcttgatctaaataatgctatcctgcagctggtaaagaaatacaagagcatgaagctggaaaaagaagaatttgtcaccctcaaagctatagctcttgctaattcagactccatgcacatagaagatgttgaagccgttcagaagcttcaggatgtcttacatgaagcgctgcaggattatgaagctggccagcacatggaagaccctcgtcgagctggcaagatgctgatgacactgccactcctgaggcagacctctaccaaggccgtgcagcatttctacaacatcaaactagaaggcaaagtcccaatgcacaaactttttttggaaatgttggaggccaaggtc

SEQ ID NO: 6583 - DNA, 1305 bp, Homo sapiens
  source 1..1305: mol_type = genomic DNA
atgtcaaacaaagatcgacacattgattccagctgttcgtccttcatcaagacggaaccttccagcccagcctccctgacggacagcgtcaaccaccacagccctggtggctcttcagacgccagtgggagctacagttcaaccatgaatggccatcagaacggacttgactcgccacctctctacccttctgctcctatcctgggaggtagtgggcctgtcaggaaactgtatgatgactgctccagcaccattgttgaagatccccagaccaagtgtgaatacatgctcaactcgatgcccaagagactgtgtttagtgtgtggtgacatcgcttctgggtaccactatggggtagcatcatgtgaagcctgcaaggcattcttcaagaggacaattcaaggcaatatagaatacagctgccctgccacgaatgaatgtgaaatcacaaagcgcagacgtaaatcctgccaggcttgccgcttcatgaagtgtttaaaagtgggcatgctgaaagaaggggtgcgtcttgacagagtacgtggaggtcggcagaagtacaagcgcaggatagatgcggagaacagcccatacctgaaccctcagctggttcagccagccaaaaagccatataacaagattgtctcacatttgttggtggctgaaccggagaagatctatgccatgcctgaccctactgtccccgacagtgacatcaaagccctcactacactgtgtgacttggccgaccgagagttggtggttatcattggatgggcgaagcatattccaggcttctccacgctgtccctggcggaccagatgagccttctgcagagtgcttggatggaaattttgatccttggtgtcgtataccggtctctttcatttgaggatgaacttgtctatgcagacgattatataatggacgaagaccagtccaaattagcaggccttcttgatctaaataatgctatcctgcagctggtaaagaaatacaagagcatgaagctggaaaaagaagaatttgtcaccctcaaagctatagctcttgctaattcagactccatgcacatagaagatgttgaagccgttcagaagcttcaggatgtcttacatgaagcgctgcaggattatgaagctggccagcacatggaagaccctcgtcgagctggcaagatgctgatgacactgccactcctgaggcagacctctaccaaggccgtgcagcatttctacaacatcaaactagaaggcaaagtcccaatgcacaaactttttttggaaatgttggaggccaaggtc

SEQ ID NO: 6584 - DNA, 2199 bp, Homo sapiens
  source 1..2199: mol_type = genomic DNA
atggagcggcggagcgagagcccgtgtctgcgggacagccccgaccggcggagcggcagcccggacgtcaaggggcctcccccagtgaaggtggcccggctggagcagaacggcagccccatgggagcccgcgggaggcccaacggcgccgtggccaaggccgtgggaggtttgatgattcctgtcttttgtgtcgtggagcagttggacggctctcttgaatatgacaacagagaagaacacgccgagtttgtcctggtgcggaaagatgtgctttttagccagctggtggagactgcgctcctggccctggggtattctcacagctctgcggcccaggcccaaggaataatcaagctgggaaggtggaaccctctccccctcagttatgtgacagatgcacccgacgcgacagtggccgacatgctacaagatgtctatcatgttgtgacgttgaaaatccaattacaaagttgttcaaagttggaagacttgcctgcggagcagtggaaccatgccacagtccgcaatgccttaaaggaactgctcaaagagatgaaccagagcacattagccaaagaatgccctctctcccagagtatgatttcatccattgtaaatagcacatattatgccaatgtgtcagcaaccaagtgccaggagtttgggagatggtataaaaagtacaagaagattaaagtggaaagagtggaacgagaaaacctttcagactattgtgttctgggccagcgtccaatgcatttaccaaatatgaaccagctggcatccctggggaaaaccaacgaacagtctcctcacagccaaattcaccacagtactccaatccgaaaccaagtgcccgcattacagcccatcatgagccctggtcttctttctccccagcttagtccacaacttgtaaggcaacaaatagccatggcccatctgataaaccaacagattgccgttagccggctcctggctcaccagcatcctcaagccatcaaccagcagttcctgaaccatccacccatccccagagcagttaagccagagccaaccaactcttccgtggaagtctctccagatatctaccagcaagtcagagatgagctgaagagggccagtgtgtcccaagctgtctttgcaagagtggcattcaaccgcacacagggattgttgtctgagattctgcgtaaggaagaagaccctcggacagcctctcagtctcttctagtaaacctgagggccatgcagaatttcctcaatctgccagaagtggagcgagatcgcatctaccaggatgagagggagcggagcatgaatcccaatgtgagcatggtctcctcggcctccagcagtcccagctcctcccgaacccctcaggccaaaacctcgacaccgacaacagacctccctattaaggtggacggcgccaacatcaacatcacagctgccatttatgacgagatccaacaggagatgaaaagggccaaggtgtctcaagccctgtttgccaaagtggctgcaaataaaagtcagggctggctgtgtgaactgctccgctggaaggagaacccaagcccagaaaaccgcaccctctgggaaaacctctgtaccatccgtcgcttcctgaaccttccccagcatgagagggatgtcatctatgaggaggagtcaaggcatcaccacagcgaacgcatgcaacacgtggtccagcttccccctgagccggtgcaggtacttcatagacagcagtctcagccagccaaggagagttcccctcccagagaagaagcgcctcccccacctcctccgactgaagacagttgtgccaaaaagccccggtctcgcacaaagatctccttagaagccctggggatcctccaaagctttattcatgatgtaggcctgtacccagaccaggaagccatccacactctttcggctcagctggatctccccaaacacaccatcatcaagttcttccagaaccagcggtaccacgtgaagcaccacgggaagctgaaagagcacctgggctccgcggtggacgtggctgaatataaggacgaggagctgctgaccgagtcagaggagaacgacagcgaggaaggctccgaggagatgtacaaagtggaggctgaggaggaaaatgctgacaaaagcaaggcagcacctgccgaaattgaccagaga

SEQ ID NO: 6585 - DNA, 1068 bp, Homo sapiens
  source 1..1068: mol_type = genomic DNA
atgaccaaatcgtacagcgagagtgggctgatgggcgagcctcagccccaaggtcctccaagctggacagacgagtgtctcagttctcaggacgaggagcacgaggcagacaagaaggaggacgacctcgaaaccatgaacgcagaggaggactcactgaggaacgggggagaggaggaggacgaagatgaggacctggaagaggaggaagaagaggaagaggaggatgacgatcaaaagcccaagagacgcggccccaaaaagaagaagatgactaaggctcgcctggagcgttttaaattgagacgcatgaaggctaacgcccgggagcggaaccgcatgcacggactgaacgcggcgctagacaacctgcgcaaggtggtgccttgctattctaagacgcagaagctgtccaaaatcgagactctgcgcttggccaagaactacatctgggctctgtcggagatcctgcgctcaggcaaaagcccagacctggtctccttcgttcagacgctttgcaagggcttatcccaacccaccaccaacctggttgcgggctgcctgcaactcaatcctcggacttttctgcctgagcagaaccaggacatgcccccccacctgccgacggccagcgcttccttccctgtacacccctactcctaccagtcgcctgggctgcccagtccgccttacggtaccatggacagctcccatgtcttccacgttaagcctccgccgcacgcctacagcgcagcgctggagcccttctttgaaagccctctgactgattgcaccagcccttcctttgatggacccctcagcccgccgctcagcatcaatggcaacttctctttcaaacacgaaccgtccgccgagtttgagaaaaattatgcctttaccatgcactatcctgcagcgacactggcaggggcccaaagccacggatcaatcttctcaggcaccgctgcccctcgctgcgagatccccatagacaatattatgtccttcgatagccattcacatcatgagcgagtcatgagtgcccagctcaatgccatatttcatgat

SEQ ID NO: 6586 - DNA, 960 bp, Homo sapiens
  source 1..960: mol_type = genomic DNA
atggagctactgtcgccaccgctccgcgacgtagacctgacggcccccgacggctctctctgctcctttgccacaacggacgacttctatgacgacccgtgtttcgactccccggacctgcgcttcttcgaagacctggacccgcgcctgatgcacgtgggcgcgctcctgaaacccgaagagcactcgcacttccccgcggcggtgcacccggccccgggcgcacgtgaggacgagcatgtgcgcgcgcccagcgggcaccaccaggcgggccgctgcctactgtgggcctgcaaggcgtgcaagcgcaagaccaccaacgccgaccgccgcaaggccgccaccatgcgcgagcggcgccgcctgagcaaagtaaatgaggcctttgagacactcaagcgctgcacgtcgagcaatccaaaccagcggttgcccaaggtggagatcctgcgcaacgccatccgctatatcgagggcctgcaggctctgctgcgcgaccaggacgccgcgccccctggcgccgcagccgccttctatgcgccgggcccgctgcccccgggccgcggcggcgagcactacagcggcgactccgacgcgtccagcccgcgctccaactgctccgacggcatgatggactacagcggccccccgagcggcgcccggcggcggaactgctacgaaggcgcctactacaacgaggcgcccagcgaacccaggcccgggaagagtgcggcggtgtcgagcctagactgcctgtccagcatcgtggagcgcatctccaccgagagccctgcggcgcccgccctcctgctggcggacgtgccttctgagtcgcctccgcgcaggcaagaggctgccgcccccagcgagggagagagcagcggcgaccccacccagtcaccggacgccgccccgcagtgccctgcgggtgcgaaccccaacccgatataccaggtgctc

SEQ ID NO: 6587 - DNA, 726 bp, Homo sapiens
  source 1..726: mol_type = genomic DNA
atgagctcctacttcgtcaaccccctgttctccaaatacaaagccggcgagtccctggaaccggcctattacgactgccggttccctcagagcgtgggcaggagccatgcgctggtgtacgggcccggcggctcggcgcccggcttccagcacgcttcgcaccacgttcaagacttcttccaccacggcacctccggcatctccaactcaggctaccagcagaacccgtgctcgcttagctgccacggagacgcctccaaattctatggctacgaggcgctccccagacagtccctttatggggctcagcaagaggcgagcgtggtgcaatatcccgactgtaaatcctccgccaacactaacagtagcgaaggacaaggccacttaaatcaaaactcgtctcccagcctcatgtttccatggatgagaccccacgctccggggaggcgcagtggacggcaaacttacagccggtatcagaccttggaactagaaaaggagtttctctttaatccttatttgacacgaaaacgtcggattgaagtctctcatgccctgggactgaccgagagacaagtgaagatctggttccagaaccgaaggatgaagtggaaaaaggagaacaacaaggataaactgccgggagcccgagatgaggagaaggtggaggaagaaggaaatgaggaagaggagaaagaagaggaggaaaaggaagaaaacaaggac

SEQ ID NO: 6588 - DNA, 672 bp, Homo sapiens
  source 1..672: mol_type = genomic DNA
atgagttcctatttcgtgaactccaccttccccgtcactctggccagcgggcaggagtccttcctgggccagctaccgctctattcgtcgggctatgcggacccgctgagacattaccccgcgccctacgggccagggccgggccaggacaagggctttgccacttcctcctattacccgccggcgggcggtggctacggccgagcggcgccctgcgactacgggccggcgccggccttctaccgcgagaaagagtcggcctgcgcactctccggcgccgacgagcagcccccgttccaccccgagccgcggaagtcggactgcgcgcaggacaagagcgtgttcggcgagacagaagagcagaagtgctccactccggtctacccgtggatgcagcggatgaattcgtgcaacagttcctcctttgggcccagcggccggcgaggccgccagacatacacacgttaccagacgctggagctggagaaggagtttcactacaatcgctacctgacgcggcggcggcgcatcgagatcgcgcacgccctgtgcctgacggagaggcagatcaagatatggttccagaaccgacgcatgaagtggaaaaaggagagcaaactgctcagcgcgtctcagctcagtgccgaggaggaggaagaaaaacaggccgag

SEQ ID NO: 6589 - DNA, 1518 bp, Homo sapiens
  source 1..1518: mol_type = genomic DNA
atgccggcggccgcggtgcaggaagcggtcggcgtgtgctcctacgggatgcagctcagctgggacatcaacgatccgcagatgcctcaggagctggccctctttgaccaattccgagagtggcctgacggctatgtgcgcttcatctacagcagcgatgagaagaaggcacagcgtcacctgagcggctgggccatgcgcaacaccaacaaccacaatggccacatcctcaagaagtcgtgcctgggtgtggtggtgtgtacacaggcctgcaccctgcccgacggttcccgcctgcagctgaggccggccatctgcgacaaggcacggctgaaacagcagaagaaggcatgccctaactgtcattctgctttggagttgattccttgtcgagggcacagcggataccccgtaaccaacttttggcggcttgatggcaacgcgatcttttttcaggccaagggagttcatgatcatccaagaccagagagcaaatcagagacagaagctagaagaagcgccatcaagagacaaatggcctctttctaccaaccccagaaaaagagaattcgagaatccgaggcagaagaaaatcaagacagcagtggtcatttcagcaacatacctcccttggaaaatccagaagactttgatatagttactgaaaccagcttccctattccagggcagccttgcccttccttcccaaagtctgatgtttacaaagctacctgtgacctagccacctttcaaggagacaaaatgccacccttccagaaatactcaagcccaagaatctatttgcctaggccaccttgcagctatgaattggcaaaccctggttatacaaattcaagcccatatcccaccctttataaggattccaccagtatccctaatgacacagactgggttcatctgaacacactacaatgtaatgtcaattcatacagcagctatgagagaagctttgatttcaccaacaaacagcatggctggaaaccagctcttggaaaacccagccttgtggaaaggactaaccatgggcagtttcaggccatggccactcgcccttattataacccagagcttccctgcaggtacctcacgactccaccaccaggtgcccctgccctacaaaccgtgatcaccaccaccactaaagtgtcctaccaggcctaccagccccctgctatgaaatacagtgacagtgtgcgagaggtgaagagcctttcgagctgtaactatgctcctgaagatactgggatgtctgtctatccagaaccctggggtcctccggtgacagtcaccagggcagcctctccttcagggccacctcctatgaaaattgcaggagattgccgggccatcagacccactgtggctattccccacgagccagtttcctctaggacagatgaagcagagacttgggatgtgtgtctgtctgggctgggctccgcagtcagttactcagacagagtgggtcccttctttacctacaacaatgaggatttt

SEQ ID NO: 6590 - DNA, 969 bp, Homo sapiens
  source 1..969: mol_type = genomic DNA
atggccgcggagctgagcatggggccagagctgcccaccagcccgctggccatggagtatgtcaacgacttcgacctgctcaagttcgacgtgaagaaggagccactggggcgcgcggagcgtccgggcaggccctgcacacgcctgcagccagccggctcggtgtcctccacaccgctcagcactccgtgtagctccgtgccctcgtcgcccagcttcagcccgaccgaacagaagacacacctcgaggatctgtactggatggcgagcaactaccagcagatgaaccccgaggcgctcaacctgacgcccgaggacgcggtggaagcgctcatcggctcgcacccagtgccacagccgctgcaaagcttcgacagctttcgcggcgctcaccaccaccaccatcaccaccaccctcacccgcaccacgcgtacccgggcgccggcgtggcccacgacgagctgggcccgcacgctcacccgcaccatcaccatcatcaccaagcgtcgccgccgccgtccagcgccgctagcccggcgcaacagctgcccactagccaccccgggcccgggccgcacgcgacggcctcggcgacggcggcgggcggcaacggcagcgtggaggaccgcttctccgatgaccagctcgtgtccatgtccgtgcgcgagctgaaccgccacctgcggggcttcaccaaggacgaggtgatccgcctgaagcagaagcggcggaccctgaagaaccggggctacgcccagtcttgcaggtataaacgcgtccagcagaagcaccacctggagaatgagaagacgcagctcattcagcaggtggagcagcttaagcaggaggtgtcccggctggcccgcgagagagacgcctacaaggtcaagtgcgagaaactcgccaactccggcttcagggaggcgggctccaccagcgacagcccctcctctcccgagttctttctg

SEQ ID NO: 6591 - DNA, 480 bp, Homo sapiens
  source 1..480: mol_type = genomic DNA
atggaggagggctccagctcgcccgtgtcccccgtggacagcctgggcaccagcgaggaggagctcgagaggcagcccaagcgcttcggccggaagcggcgctacagcaagaagtcgagcgaagatggcagcccgaccccgggcaagcgcggcaagaagggcagccccagcgcgcagtccttcgaggagctgcagagccagcgcatcctggccaacgtgcgcgagcgccagcgcacccagtcgctcaacgaggccttcgcggcgctgcgcaagatcatccccacgctgccctctgacaagctgagcaagatccagacgctcaagctggccgccaggtacatagacttcctctaccaggtcctgcagagcgacgagatggacaataagatgaccagctgcagctacgtggcccacgagcgcctcagctacgccttctccgtgtggcgcatggagggcgcgtggtccatgtccgcctcccac

SEQ ID NO: 6592 - DNA, 2310 bp, Homo sapiens
  source 1..2310: mol_type = genomic DNA
atgttcccgcagagccggcacccgacgccgcaccaggctgcaggccagcccttcaagttcactatcccggagtccctggaccggattaaagaggaattccagttcctgcaggcgcagtatcacagccttaaattggaatgtgagaaactggcaagtgaaaagacagaaatgcagaggcactatgtgatgtattatgaaatgtcatatggattaaacattgaaatgcacaaacagactgaaatcgccaagagattgaatacgatttgtgcacaagtcatcccatttctgtctcaggaacatcaacaacaggtggcccaggctgttgaacgtgccaaacaggtgaccatggcagagttgaatgccatcatcgggcagcagcagttgcaagctcagcatctttctcatggccacggacccccagttccccttacgcctcacccttcgggacttcagcctcctggaatcccgcccctcgggggcagtgccggccttcttgcgctgtccagtgctctgagtgggcagtctcacttggcaataaaagatgacaagaagcaccacgatgcagagcaccacagagacagagagccgggcacaagtaattccctcctggtcccagacagtctaagaggcacagataaacgcagaaatggacctgaattttccaatgacatcaagaaaaggaaggtggatgataaggactccagccactatgacagtgatggtgacaaaagcgatgacaacttagttgtggatgtgtctaatgaggacccttcttctccgcgagcaagccctgcccactcgccccgggaaaatggaatcgacaaaaatcgcctgctaaagaaggatgcttctagcagtccagcttccacggcctcctcggcaagttccacttctttgaaatccaaagaaatgagcttgcatgaaaaagccagcacgcctgttctgaaatccagcacaccaacgcctcggagcgacatgccaacgccgggcaccagcgccactccaggcctccgtccaggtctcggcaagcctccagccatagaccccctcgttaaccaagcggcagctggcttgaggacacccctggcagtgcccggcccatatcctgctccttttgggatggtcccccacgctggcatgaacggcgagctgaccagcccaggcgctgcctacgccagtttacacaacatgtcgccccagatgagcgccgcagccgccgcggccgccgtggtggcctacgggcgctcccccatggtggggtttgatcctccccctcacatgagagtacctaccattcctccaaacctggcaggaatccctggggggaaacctgcatactccttccacgttactgcagacggtcagatgcagcctgtcccttttccccccgacgccctcatcggacccggaatcccccggcatgctcgccagatcaacaccctcaaccacggggaggtggtgtgcgctgtgaccatcagcaaccccacgagacacgtgtacacaggcgggaagggctgcgtcaaggtctgggacatcagccaccctggcaataagagccctgtctcccagctcgactgtctgaacagagacaattatatccgttcctgtaaattgctacccgatggctgcactctcatagtgggaggggaagccagtactttgtccatttgggacctggcggctccaaccccgcgcatcaaggcggagctgacgtcctcggcccccgcctgctacgccctggccatcagccccgattccaaggtctgcttctcatgctgcagcgacggcaacatcgctgtgtgggatctgcacaaccagacactagtgaggcaattccagggccacacagacggagccagctgtattgacatttctaatgatggcaccaagctctggacgggtggtttggacaacacagtcaggtcctgggacctgcgcgaggggcggcagctgcagcagcacgacttcacctcccagatcttctccctggggtactgccccaccggggagtggctggcagtgggcatggagagcagcaatgtggaggtgctgcacgtgaacaagcctgacaagtaccagctgcacctgcatgagagctgcgtgctgtccctgaaatttgcttactgtggtaaatggtttgtgagtactggaaaagataacctcctcaatgcttggcggaccccctatggagccagcatattccagtccaaagagtcctcgtcagtgcttagctgtgacatctctgtggatgataagtacatagtcactggctcgggggacaagaaggctacagtctatgaagtcatctac

SEQ ID NO: 6593 - DNA, 2310 bp, Homo sapiens; identical to SEQ ID NO: 6592
  source 1..2310: mol_type = genomic DNA

SEQ ID NO: 6594 - DNA, 1224 bp, Homo sapiens; identical to SEQ ID NO: 4329
  source 1..1224: mol_type = genomic DNA

SEQ ID NO: 6595 - DNA, 951 bp, Homo sapiens
  source 1..951: mol_type = genomic DNA
atgtcccacggccccaagcagcccggcgcggccgccgcgccggcgggcggcaaggctccgggccagcatgggggcttcgtggtgactgtcaagcaagagcgcggcgagggtccacgcgcgggcgagaaggggtcccacgaggaggagccggtgaagaaacgcggctggcccaagggcaagaagcggaagaagattctgccgaatgggcccaaggcaccggtcacgggctacgtgcgcttcctgaacgagcggcgcgagcagatccgcacgcgccacccggatctgccctttcccgagatcaccaagatgctgggcgccgagtggagcaagctgcagccaacggaaaagcagcggtacctggatgaggccgagagagagaagcagcagtacatgaaggagctgcgggcgtaccagcagtctgaagcctataagatgtgcacggagaagatccaggagaagaagatcaagaaagaagactcgagctctgggctcatgaacactctcctgaatggacacaagggtggggactgcgatggcttctccaccttcgatgttcccatcttcactgaagagttcttggaccaaaacaaagcgcgtgaggcggagcttcggcgcttgcggaagatgaatgtggccttcgaggagcagaacgcggtactgcagaggcacacgcagagcatgagcagcgcgcgcgagcgtctggagcaggagctggcgctggaggagcggaggacgctggcgctgcagcagcagctccaggccgtgcgccaggcgctcaccgccagcttcgcctcactgccggtgccgggcacgggcgaaacgcccacgctgggcactctggacttctacatggcccggcttcacggagccatcgagcgcgaccccgcccagcacgagaagctcatcgtccgcatcaaggaaatcctggcccaggtcgccagcgagcacctg

SEQ ID NO: 6596 - DNA, 1251 bp, Homo sapiens
  source 1..1251: mol_type = genomic DNA
atgcgactctccaaaaccctcgtcgacatggacatggccgactacagtgctgcactggacccagcctacaccaccctggaatttgagaatgtgcaggtgttgacgatgggcaatgacacgtccccatcagaaggcaccaacctcaacgcgcccaacagcctgggtgtcagcgccctgtgtgccatctgcggggaccgggccacgggcaaacactacggtgcctcgagctgtgacggctgcaagggcttcttccggaggagcgtgcggaagaaccacatgtactcctgcagatttagccggcagtgcgtggtggacaaagacaagaggaaccagtgccgctactgcaggctcaagaaatgcttccgggctggcatgaagaaggaagccgtccagaatgagcgggaccggatcagcactcgaaggtcaagctatgaggacagcagcctgccctccatcaatgcgctcctgcaggcggaggtcctgtcccgacagatcacctcccccgtctccgggatcaacggcgacattcgggcgaagaagattgccagcatcgcagatgtgtgtgagtccatgaaggagcagctgctggttctcgttgagtgggccaagtacatcccagctttctgcgagctccccctggacgaccaggtggccctgctcagagcccatgctggcgagcacctgctgctcggagccaccaagagatccatggtgttcaaggacgtgctgctcctaggcaatgactacattgtccctcggcactgcccggagctggcggagatgagccgggtgtccatacgcatccttgacgagctggtgctgcccttccaggagctgcagatcgatgacaatgagtatgcctacctcaaagccatcatcttctttgacccagatgccaaggggctgagcgatccagggaagatcaagcggctgcgttcccaggtgcaggtgagcttggaggactacatcaacgaccgccagtatgactcgcgtggccgctttggagagctgctgctgctgctgcccaccttgcagagcatcacctggcagatgatcgagcagatccagttcatcaagctcttcggcatggccaagattgacaacctgttgcaggagatgctgctgggaggtccgtgccaagcccaggaggggcggggttggagtggggactccccaggagacaggcctcacacagtgagctcacccctcagctccttggcttccccactgtgccgctttgggcaagttgct

SEQ ID NO: 6597 - DNA, 1422 bp, Homo sapiens
  source 1..1422: mol_type = genomic DNA
atgcgactctccaaaaccctcgtcgacatggacatggccgactacagtgctgcactggacccagcctacaccaccctggaatttgagaatgtgcaggtgttgacgatgggcaatgacacgtccccatcagaaggcaccaacctcaacgcgcccaacagcctgggtgtcagcgccctgtgtgccatctgcggggaccgggccacgggcaaacactacggtgcctcgagctgtgacggctgcaagggcttcttccggaggagcgtgcggaagaaccacatgtactcctgcagatttagccggcagtgcgtggtggacaaagacaagaggaaccagtgccgctactgcaggctcaagaaatgcttccgggctggcatgaagaaggaagccgtccagaatgagcgggaccggatcagcactcgaaggtcaagctatgaggacagcagcctgccctccatcaatgcgctcctgcaggcggaggtcctgtcccgacagatcacctcccccgtctccgggatcaacggcgacattcgggcgaagaagattgccagcatcgcagatgtgtgtgagtccatgaaggagcagctgctggttctcgttgagtgggccaagtacatcccagctttctgcgagctccccctggacgaccaggtggccctgctcagagcccatgctggcgagcacctgctgctcggagccaccaagagatccatggtgttcaaggacgtgctgctcctaggcaatgactacattgtccctcggcactgcccggagctggcggagatgagccgggtgtccatacgcatccttgacgagctggtgctgcccttccaggagctgcagatcgatgacaatgagtatgcctacctcaaagccatcatcttctttgacccagatgccaaggggctgagcgatccagggaagatcaagcggctgcgttcccaggtgcaggtgagcttggaggactacatcaacgaccgccagtatgactcgcgtggccgctttggagagctgctgctgctgctgcccaccttgcagagcatcacctggcagatgatcgagcagatccagttcatcaagctcttcggcatggccaagattgacaacctgttgcaggagatgctgctgggagggtcccccagcgatgcaccccatgcccaccaccccctgcaccctcacctgatgcaggaacatatgggaaccaacgtcatcgttgccaacacaatgcccactcacctcagcaacggacagatgtgtgagtggccccgacccaggggacaggcagccacccctgagaccccacagccctcaccgccaggtggctcagggtctgagccctataagctcctgccgggagccgtcgccacaatcgtcaagcccctctctgccatcccccagccgaccatcaccaagcaggaagttatc

SEQ ID NO: 6598 - DNA, 2355 bp, Homo sapiens
  source 1..2355: mol_type = genomic DNA
atgagcgaccaagatcactccatggatgaaatgacagctgtggtgaaaattgaaaaaggagttggtggcaataatgggggcaatggtaatggtggtggtgccttttcacaggctcgaagtagcagcacaggcagtagcagcagcactggaggaggagggcaggagtcccagccatcccctttggctctgctggcagcaacttgcagcagaattgagtcacccaatgagaacagcaacaactcccagggcccgagtcagtcagggggaacaggtgagcttgacctcacagccacacaactttcacagggtgccaatggctggcagatcatctcttcctcctctggggctacccctacctcaaaggaacagagtggcagcagtaccaatggcagcaatggcagtgagtcttccaagaatcgcacagtctctggtgggcagtatgttgtggctgccgctcccaacttacagaaccagcaagttctgacaggactacctggagtgatgcctaatattcagtatcaagtaatcccacagttccagaccgttgatgggcaacagctgcagtttgctgccactggggcccaagtgcagcaggatggttctggtcaaatacagatcataccaggtgcaaaccaacagattatcacaaatcgaggaagtggaggcaacatcattgctgctatgccaaacctactccagcaggctgtccccctccaaggcctggctaataatgtactctcaggacagactcagtatgtgaccaatgtaccagtggccctgaatgggaacatcaccttgctacctgtcaacagcgtttctgcagctaccttgactcccagctctcaggcagtcacgatcagcagctctgggtcccaggagagtggctcacagcctgtcacctcagggactaccatcagttctgccagcttggtatcatcacaagccagttccagctcctttttcaccaatgccaatagctactcaactactactaccaccagcaacatgggaattatgaactttactaccagtggatcatcagggaccaactctcaaggccagacaccccagagggtcagtgggctacaggggtctgatgctctgaacatccagcaaaaccagacatctggaggctcattgcaagcaggccagcaaaaagaaggagagcaaaaccagcagacacagcagcaacaaattcttatccagcctcagctagttcaagggggacaggccctccaggccctccaagcagcaccattgtcagggcagacctttacaactcaagccatctcccaggaaaccctccagaacctccagcttcaggctgttccaaactctggtcccatcatcatccggacaccaacagtggggcccaatggacaggtcagttggcagactctacagctgcagaacctccaagttcagaacccacaagcccaaacaatcaccttagccccaatgcagggtgtttccttggggcagaccagcagcagcaacaccactctcacacccattgcctcagctgcttccattcctgctggcacagtcactgtgaatgctgctcaactctcctccatgccaggcctccagaccattaacctcagtgcattgggtacttcaggaatccaggtgcacccaattcaaggcctgccgttggctatagcaaatgccccaggtgatcatggagctcagcttggtctccatggggctggtggtgatggaatacatgatgacacagcaggtggagaggaaggagaaaacagcccagatgcccaaccccaagccggtcggaggacccggcgggaagcatgcacctgcccctactgtaaagacagtgaaggaaggggctcgggggatcctggcaaaaagaaacagcatatttgccacatccaaggctgtgggaaagtgtatggcaagacctctcacctgcgggcacacttgcgctggcatacaggcgagaggccatttatgtgtacctggtcatactgtgggaaacgcttcacacgttcggatgagctacagaggcacaaacgtacacacacaggtgagaagaaatttgcctgccctgagtgtcctaagcgcttcatgaggagtgaccacctgtcaaaacatatcaagacccaccagaataagaagggaggcccaggtgtagctctgagtgtgggcactttgcccctggacagtggggcaggttcagaaggcagtggcactgccactccttcagcccttattaccaccaatatggtagccatggaggccatctgtccagagggcattgcccgtcttgccaacagtggcatcaacgtcatgcaggtggcagatctgcagtccattaatatcagtggcaatggcttc

SEQ ID NO: 6599 - DNA, 2511 bp, Homo sapiens
  source 1..2511: mol_type = genomic DNA
atggcggaaccttcccaggccccgaccccggccccggctgcgcagccccggccccttcagtccccagcccctgccccaactccgactcctgcacccagcccggcttcagccccgattccgactcccaccccggcaccagcccctgccccagctgcagccccagccggcagcacagggactggggggcccggggtaggaagtgggggggccgggagcgggggggatccggctcgacctggcctgagccagcagcagcgcgccagtcagaggaaggcgcaagtccgggggctgccgcgcgccaagaagcttgagaagctaggggtcttctcggcttgcaaggccaatgaaacctgtaagtgtaatggctggaaaaaccccaagccccccactgcaccccgcatggatctgcagcagccagctgccaacctgagtgagctgtgccgcagttgtgagcaccccttggctgaccacgtatcccacttggagaatgtgtcagaggatgagataaaccgactgctggggatggtggtggatgtggagaatctcttcatgtctgttcacaaggaagaggacacagacaccaagcaggtctatttctacctcttcaagctactgcggaaatgcatcctgcagatgacccggcctgtggtggaggggtccctgggcagccctccatttgagaaacctaatattgagcagggtgtgctgaactttgtgcagtacaagtttagtcacctggctccccgggagcggcagacgatgttcgagctctcaaagatgttcttgctctgccttaactactggaagcttgagacacctgcccagtttcggcagaggtctcaggctgaggacgtggctacctacaaggtcaattacaccagatggctctgttactgccacgtgccccagagctgtgatagcctcccccgctacgaaaccactcatgtctttgggcgaagccttctccggtccattttcaccgttacccgccggcagctgctggaaaagttccgagtggagaaggacaaattggtgcccgagaagaggaccctcatcctcactcacttccccaaattcctgtccatgctggaggaggagatctatggggcaaactctccaatctgggagtcaggcttcaccatgccaccctcagaggggacacagctggttccccggccagcttcagtcagtgcagcggttgttcccagcacccccatcttcagccccagcatgggtgggggcagcaacagctccctgagtctggattctgcaggggccgagcctatgccaggcgagaagaggacgctcccagagaacctgaccctggaggatgccaagcggctccgtgtgatgggtgacatccccatggagctggtcaatgaggtcatgctgaccatcactgaccctgctgccatgctggggcctgagacgagcctgctttcggccaatgcggcccgggatgagacagcccgcctggaggagcgccgcggcatcatcgagttccatgtcatcggcaactcactgacgcccaaggccaaccggcgggtgttgctgtggctcgtggggctgcagaatgtcttttcccaccagctgccgcgcatgcctaaggagtatatcgcccgcctcgtctttgacccgaagcacaagactctggccttgatcaaggatgggcgggtcatcggtggcatctgcttccgcatgtttcccacccagggcttcacggagattgtcttctgtgctgtcacctcgaatgagcaggtcaagggttatgggacccacctgatgaaccacctgaaggagtatcacatcaagcacaacattctctacttcctcacctacgccgacgagtacgccatcggctacttcaaaaagcagggtttctccaaggacatcaaggtgcccaagagccgctacctgggctacatcaaggactacgagggagcgacgctgatggagtgtgagctgaatccccgcatcccctacacggagctgtcccacatcatcaagaagcagaaagagatcatcaagaagctgattgagcgcaaacaggcccagatccgcaaggtctacccggggctcagctgcttcaaggagggcgtgaggcagatccctgtggagagcgttcctggcattcgagagacaggctggaagccattggggaaggagaaggggaaggagctgaaggaccccgaccagctctacacaaccctcaaaaacctgctggcccaaatcaagtctcaccccagtgcctggcccttcatggagcctgtgaagaagtcggaggcccctgactactacgaggtcatccgcttccccattgacctgaagaccatgactgagcggctgcgaagccgctactacgtgacccggaagctctttgtggccgacctgcagcgggtcatcgccaactgtcgcgagtacaaccccccggacagcgagtactgccgctgtgccagcgccctggagaagttcttctacttcaagctcaaggagggaggcctcattgacaag

SEQ ID NO: 6600 - DNA, 2799 bp, Homo sapiens
  source 1..2799: mol_type = genomic DNA
atgactgaactgaaggcaaagggtccccgggctccccacgtggcgggcggcccgccctcccccgaggtcggatccccactgctgtgtcgcccagccgcaggtccgttcccggggagccagacctcggacaccttgcccgaagtttcggccatacctatctccctggacgggctactcttccctcggccctgccagggacaggacccctccgacgaaaagacgcaggaccagcagtcgctgtcggacgtggagggcgcatattccagagctgaagctacaaggggtgctggaggcagcagttctagtcccccagaaaaggacagcggactgctggacagtgtcttggacactctgttggcgccctcaggtcccgggcagagccaacccagccctcccgcctgcgaggtcaccagctcttggtgcctgtttggccccgaacttcccgaagatccaccggctgcccccgccacccagcgggtgttgtccccgctcatgagccggtccgggtgcaaggttggagacagctccgggacggcagctgcccataaagtgctgccccggggcctgtcaccagcccggcagctgctgctcccggcctctgagagccctcactggtccggggccccagtgaagccgtctccgcaggccgctgcggtggaggttgaggaggaggatggctctgagtccgaggagtctgcgggtccgcttctgaagggcaaacctcgggccctgggtggcgcggcggctggaggaggagccgcggctgtcccgccgggggcggcagcaggaggcgtcgccctggtccccaaggaagattcccgcttctcagcgcccagggtcgccctggtggagcaggacgcgccgatggcgcccgggcgctccccgctggccaccacggtgatggatttcatccacgtgcctatcctgcctctcaatcacgccttattggcagcccgcactcggcagctgctggaagacgaaagttacgacggcggggccggggctgccagcgcctttgccccgccgcggagttcaccctgtgcctcgtccaccccggtcgctgtaggcgacttccccgactgcgcgtacccgcccgacgccgagcccaaggacgacgcgtaccctctctatagcgacttccagccgcccgctctaaagataaaggaggaggaggaaggtgcggaggcctccgcgcgctccccgcgttcctaccttgtggccggtgccaaccccgcagccttcccggatttcccgttggggccaccgcccccgctgccgccgcgagcgaccccatccagacccggggaagcggcggtgacggccgcacccgccagtgcctcagtctcgtctgcgtcctcctcggggtcgaccctggagtgcatcctgtacaaagcggagggcgcgccgccccagcagggcccgttcgcgccgccgccctgcaaggcgccgggcgcgagcggctgcctgctcccgcgggacggcctgccctccacctccgcctctgccgccgccgccggggcggcccccgcgctctaccctgcactcggcctcaacgggctcccgcagctcggctaccaggccgccgtgctcaaggagggcctgccgcaggtctacccgccctatctcaactacctgaggccggattcagaagccagccagagcccacaatacagcttcgagtcattacctcagaagatttgtttaatctgtggggatgaagcatcaggctgtcattatggtgtccttacctgtgggagctgtaaggtcttctttaagagggcaatggaagggcagcacaactacttatgtgctggaagaaatgactgcatcgttgataaaatccgcagaaaaaactgcccagcatgtcgccttagaaagtgctgtcaggctggcatggtccttggaggtcgaaaatttaaaaagttcaataaagtcagagttgtgagagcactggatgctgttgctctcccacagccagtgggcgttccaaatgaaagccaagccctaagccagagattcactttttcaccaggtcaagacatacagttgattccaccactgatcaacctgttaatgagcattgaaccagatgtgatctatgcaggacatgacaacacaaaacctgacacctccagttctttgctgacaagtcttaatcaactaggcgagaggcaacttctttcagtagtcaagtggtctaaatcattgccaggttttcgaaacttacatattgatgaccagataactctcattcagtattcttggatgagcttaatggtgtttggtctaggatggagatcctacaaacacgtcagtgggcagatgctgtattttgcacctgatctaatactaaatgaacagcggatgaaagaatcatcattctattcattatgccttaccatgtggcagatcccacaggagtttgtcaagcttcaagttagccaagaagagttcctctgtatgaaagtattgttacttcttaatacaattcctttggaagggctacgaagtcaaacccagtttgaggagatgaggtcaagctacattagagagctcatcaaggcaattggtttgaggcaaaaaggagttgtgtcgagctcacagcgtttctatcaacttacaaaacttcttgataacttgcatgatcttgtcaaacaacttcatctgtactgcttgaatacatttatccagtcccgggcactgagtgttgaatttccagaaatgatgtctgaagttattgctgcacaattacccaagatattggcagggatggtgaaaccccttctctttcataaaaag

SEQ ID NO: 6601 - DNA, 1401 bp, Homo sapiens
  source 1..1401: mol_type = genomic DNA
atggcaaccatagaagaaattgcacatcaaattattgaacaacagatgggagagattgttacagagcagcaaactgggcagaaaatccagattgtgacagcacttgatcataatacccaaggcaagcagttcattctgacaaatcacgacggctctactccaagcaaagtcattctggccaggcaagattccactccgggaaaagttttccttacaactccagatgcagcaggtgtcaaccagttattttttaccactcctgatctgtctgcacaacacctgcagctcctaacagataattctccagaccaaggaccaaataaggtttttgatctttgcgtagtatgtggagacaaagcatcaggacgtcattatggagcagtaacttgtgaaggctgcaaaggattttttaaaagaagcatccgaaaaaatttagtatattcatgtcgaggatcaaaggattgtattattaataagcaccaccgaaaccgctgtcaatactgcaggttacagagatgtattgcgtttggaatgaagcaagactctgtccaatgtgaaagaaaacccattgaagtatcacgagaaaaatcttccaactgtgccgcttcaacagaaaaaatctatatccgaaaggaccttcgtagcccattaactgcaactccaacttttgtaacagatagtgaaagtacaaggtcaacaggactgttagattcaggaatgttcatgaatattcatccatctggagtaaaaactgagtcagctgtgctgatgacatcagataaggctgaatcatgtcagggagatttaagtacattggccaatgtggttacatcattagcgaatcttggaaaaactaaagatctttctcaaaatagtaatgaaatgtctatgattgaaagcttaagcaatgatgatacctctttgtgtgaatttcaagaaatgcagaccaacggtgatgtttcaagggcatttgacactcttgcaaaagcattgaatcctggagagagcacagcctgccagagctcagtagcgggcatggaaggaagtgtacacctaatcactggagattcaagcataaattacaccgaaaaagaggggccacttctcagcgattcacatgtagctttcaggctcaccatgccttctcctatgcctgagtacctgaatgtgcactacattggggagtctgcctccagactgctgttcttatcaatgcactgggcactttcgattccttctttccaggctctagggcaagaaaacagcatatcactggtgaaagcttactggaatgaactttttactcttggtcttgcccagtgctggcaagtgatgaatgtagcaactatattagcaacatttgtcaattgtcttcacaatagtcttcaacaagcagagggg

SEQ ID NO: 6602 - DNA, 1944 bp, Homo sapiens
  source 1..1944: mol_type = genomic DNA
atggctacaaatatggaggggctggttcagcacagagtggggacccagcaggtggctgaggtaacacgtacacagacctctcggccggaatctccagggatgaccagcccctccccacgcatccagataatctccaccgactctgctgtagcctcacctcagcgcattcagggctctgaacctgcctctggcccattgagtgttttcacatctttgaacaaagagaagattgtcacagaccagcagacaggacagaaaatccagatagtcaccgcagtggacgcctccggatcccccaaacagcagttcatcctgaccagcccagatggagctggaactgggaaggtgatcctggcttccccagagacatccagcgccaagcaactcatattcaccacctcagacaacctcgtccctggcaggatccagattgtcacggattctgcctctgtggagcgtttactggggaagacggacgtccagcggccccaggtggtagagtactgtgtggtctgtggcgacaaagcctccggccgtcactatggggctgtcagttgtgaaggttgcaaaggtttcttcaaaaggagtgtgaggaaaaatttgacctacagctgccggagcaaccaagactgcatcatcaataaacatcaccggaaccgctgtcagttttgccggctgaaaaaatgcttagagatgggcatgaaaatggaatctgtgcagagtgaacggaagcccttcgatgtgcaacgggagaaaccaagcaattgtgctgcttcaactgagaaaatctatatccggaaagacctgagaagtcccctgatagctactcccacgtttgtggcagacaaagatggagcaagacaaacaggtcttcttgatccagggatgcttgtgaacatccagcagcctttgatacgtgaggatggtacagttctcctggccacggattctaaggctgaaacaagccagggagctctgggcacactggcaaatgtagtgacctcccttgccaacctaagtgaatctttgaacaacggtgacacttcagaaatccagccagaggaccagtctgcaagtgagataactcgggcatttgataccttagctaaagcacttaataccacagacagctcctcttctccaagcttggcagatgggatagacaccagtggaggagggagcatccacgtcatcagcagagaccagtcgacacccatcattgaggttgaaggccccctcctttcagacacacacgtcacatttaagctaacaatgcccagtccaatgccagagtacctcaacgtgcactacatctgtgagtctgcatcccgtctgcttttcctctcaatgcactgggctcggtcaatcccagcctttcaggcacttgggcaggactgcaacaccagccttgtgcgggcctgctggaatgagctcttcaccctcggcctggcccagtgtgcccaggtcatgagtctctccaccatcctggctgccattgtcaaccacctgcagaacagcatccaggaagataaactttctggtgaccggataaagcaagtcatggagcacatctggaagctgcaggagttctgtaacagcatggcgaagctggatatagatggctatgagtatgcataccttaaagctatagttctctttagccccgatcatccaggtttgaccagcacaagccagattgaaaaattccaagaaaaggcacagatggagttgcaggactatgttcagaaaacctactcagaagacacctaccgattggcccggatcctcgttcgcctgccggcactcaggctgatgagctccaacataacagaagaacttttttttactggtctcattggcaatgtttcgatagacagcataatcccctacatcctcaagatggagacagcagagtataatggccagatcaccggagccagtcta

SEQ ID NO: 6603 - DNA, 1845 bp, Homo sapiens
  source 1..1845: mol_type = genomic DNA
atgaccagcccctccccacgcatccagataatctccaccgactctgctgtagcctcacctcagcgcattcagggctctgaacctgcctctggcccattgagtgttttcacatctttgaacaaagagaagattgtcacagaccagcagacaggacagaaaatccagatagtcaccgcagtggacgcctccggatcccccaaacagcagttcatcctgaccagcccagatggagctggaactgggaaggtgatcctggcttccccagagacatccagcgccaagcaactcatattcaccacctcagacaacctcgtccctggcaggatccagattgtcacggattctgcctctgtggagcgtttactggggaagacggacgtccagcggccccaggtggtagagtactgtgtggtctgtggcgacaaagcctccggccgtcactatggggctgtcagttgtgaaggttgcaaaggtttcttcaaaaggagtgtgaggaaaaatttgacctacagctgccggagcaaccaagactgcatcatcaataaacatcaccggaaccgctgtcagttttgccggctgaaaaaatgcttagagatgggcatgaaaatggaatctgtgcagagtgaacggaagcccttcgatgtgcaacgggagaaaccaagcaattgtgctgcttcaactgagaaaatctatatccggaaagacctgagaagtcccctgatagctactcccacgtttgtggcagacaaagatggagcaagacaaacaggtcttcttgatccagggatgcttgtgaacatccagcagcctttgatacgtgaggatggtacagttctcctggccacggattctaaggctgaaacaagccagggagctctgggcacactggcaaatgtagtgacctcccttgccaacctaagtgaatctttgaacaacggtgacacttcagaaatccagccagaggaccagtctgcaagtgagataactcgggcatttgataccttagctaaagcacttaataccacagacagctcctcttctccaagcttggcagatgggatagacaccagtggaggagggagcatccacgtcatcagcagagaccagtcgacacccatcattgaggttgaaggccccctcctttcagacacacacgtcacatttaagctaacaatgcccagtccaatgccagagtacctcaacgtgcactacatctgtgagtctgcatcccgtctgcttttcctctcaatgcactgggctcggtcaatcccagcctttcaggcacttgggcaggactgcaacaccagccttgtgcgggcctgctggaatgagctcttcaccctcggcctggcccagtgtgcccaggtcatgagtctctccaccatcctggctgccattgtcaaccacctgcagaacagcatccaggaagataaactttctggtgaccggataaagcaagtcatggagcacatctggaagctgcaggagttctgtaacagcatggcgaagctggatatagatggctatgagtatgcataccttaaagctatagttctctttagccccgatcatccaggtttgaccagcacaagccagattgaaaaattccaagaaaaggcacagatggagttgcaggactatgttcagaaaacctactcagaagacacctaccgattggcccggatcctcgttcgcctgccggcactcaggctgatgagctccaacataacagaagaacttttttttactggtctcattggcaatgtttcgatagacagcataatcccctacatcctcaagatggagacagcagagtataatggccagatcaccggagccagtcta

SEQ ID NO: 6604 - DNA, 1944 bp, Homo sapiens
  source 1..1944: mol_type = genomic DNA
atggctacaaatatggaggggctggttcagcacagagtggggacccagcaggtggctgaggtaacacgtacacagacctctcggccggaatctccagggatgaccagcccctccccacgcatccagataatctccaccgactctgctgtagcctcacctcagcgcattcagggctctgaacctgcctctggcccattgagtgttttcacatctttgaacaaagagaagattgtcacagaccagcagacaggacagaaaatccagatagtcaccgcagtggacgcctccggatcccccaaacagcagttcatcctgaccagcccagatggagctggaactgggaaggtgatcctggcttccccagagacatccagcgccaagcaactcatattcaccacctcagacaacctcgtccctggcaggatccagattgtcacggattctgcctctgtggagcgtttactggggaagacggacgtccagcggccccaggtggtagagtactgtgtggtctgtggcgacaaagcctccggccgtcactatggggctgtcagttgtgaaggttgcaaaggtttcttcaaaaggagtgtgaggaaaaatttgacctacagctgccggagcaaccaagactgcatcatcaataaacatcaccggaaccgctgtcagttttgccggctgaaaaaatgcttagagatgggcatgaaaatggaatctgtgcagagtgaacggaagcccttcgatgtgcaacgggagaaaccaagcaattgtgctgcttcaactgagaaaatttatatccggaaagacctgagaagtcccctgatagctactcccacgtttgtggcagacaaagatggagcaagacaaacaggtcttcttgatccagggatgcttgtgaacatccagcagcctttgatacgtgaggatggtacagttctcctggccacggattctaaggctgaaacaagccagggagctctgggcacactggcaaatgtagtgacctcccttgccaacctaagtgaatctttgaacaacggtgacacttcagaaatccagccagaggaccagtctgcaagtgagataactcgggcatttgataccttagctaaagcacttaataccacagacagctcctcttctccaagcttggcagatgggatagacaccagtggaggagggagcatccacgtcatcagcagagaccagtcgacacccatcattgaggttgaaggccccctcctttcagacacacacgtcacatttaagctaacaatgcccagtccaatgccagagtacctcaacgtgcactacatctgtgagtctgcatcccgtctgcttttcctctcaatgcactgggctcggtcaatcccagcctttcaggcacttgggcaggactgcaacaccagccttgtgcgggcctgctggaatgagctcttcaccctcggcctggcccagtgtgcccaggtcatgagtctctccaccatcctggctgccattgtcaaccacctgcagaacagcatccaggaagataaactttctggtgaccggataaagcaagtcatggagcacatctggaagctgcaggagttctgtaacagcatggcgaagctggatatagatggctatgagtatgcataccttaaagctatagttctctttagccccgatcatccaggtttgaccagcacaagccagattgaaaaattccaagaaaaggcacagatggagttgcaggactatgttcagaaaacctactcagaagacacctaccgattggcccggatcctcgttcgcctgccggcactcaggctgatgagctccaacataacagaagaacttttttttactggtctcattggcaatgtttcgatagacagcataatcccctacatcctcaagatggagacagcagagtataatggccagatcaccggagccagtcta

SEQ ID NO: 6605 - DNA, 1845 bp, Homo sapiens; identical to SEQ ID NO: 6603
  source 1..1845: mol_type = genomic DNA

SEQ ID NO: 6606 - DNA, 1410 bp, Homo sapiens
  source 1..1410: mol_type = genomic DNA
atggcgggcgagaaccaccagtggcagggcagcatcctctacaacatgcttatgagcgcgaagcaaacgcgcgcggctcctgaggctccagagacgcggctggtggatcagtgctggggctgttcgtgcggcgatgagcccggggtgggcagagaggggctgctgggcgggcggaacgtggcgctcctgtaccgctgctgcttttgcggtaaagaccacccacggcagggcagcatcctctacagcatgctgacgagcgcaaagcaaacgtacgcggcaccgaaggcgcccgaggcgacgctgggtccgtgctggggctgttcgtgcggctctgatcccggggtgggcagagcggggcttccgggtgggcggcccgtggcactcctgtaccgctgctgcttttgtggtgaagaccacccgcggcagggcagcatcctctacagcttgctcactagctcaaagcaaacgcacgtggctccggcagcgcccgaggcacggccagggggcgcgtggtgggaccgctcctacttcgcgcagaggccagggggtaaagaggcgctaccaggcgggcgggccacggcgcttctgtaccgctgctgcttttgcggtgaagaccacccgcagcagggcagcaccctctactgcgtgcccacgagcacaaatcaagcgcaggcggctccggaggagcggccgagggccccctggtgggacacctcctctggtgcgctgcggccggtggcgctcaagagtccacaggtggtctgcgaggcagcctcagcgggcctgttgaagacgctgcgcttcgtcaagtacttgccctgcttccaggtgctgcccctggaccagcagctggtgctggtgcgcaactgctgggcgtccctgctcatgcttgagctggcccaggaccgcttgcagttcgagactgtggaagtctcggagcccagcatgctgcagaagatcctcaccaccaggcggcgggagaccgggggcaacgagccactgcccgtgcccacgctgcagcaccatttggcaccgccggcggaggccaggaaggtgccctccgcctcccaggtccaagccatcaagtgctttctttccaaatgctggagtctgaacatcagtaccaaggagtacgcctacctcaaggggaccgtgctctttaacccggacgtgccgggcctgcagtgcgtgaagtacattcagggactccagtggggaactcagcaaatactcagtgaacacaccaggatgacgcaccaagggccccatgacagattcatcgaacttaatagtacccttttcctgctgagattcatcaatgccaatgtcattgctgaactgttcttcaggcccatcatcggcacagtcagcatggatgatatgatgctggaaatgctctgtacaaagata

SEQ ID NO: 6607 - DNA, 1410 bp, Homo sapiens
  source 1..1410: mol_type = genomic DNA
atggcgggcgagaaccaccagtggcagggcagcatcctctacaacatgcttatgagcgcgaagcaaacgcgcgcggctcctgaggctccagagacgcggctggtggatcagtgctggggctgttcgtgcggcgatgagcccggggtgggcagagaggggctgctgggcgggcggaacgtggcgctcctgtaccgctgctgcttttgcggtaaagaccacccacggcagggcagcatcctctacagcatgctgacgagcgcaaagcaaacgtacgcggcaccgaaggcgcccgaggcgacgctgggtccgtgctggggctgttcgtgcggctctgatcccggggtgggcagagcggggcttccgggtgggcggcccgtggcactcctgtaccgctgctgcttttgtggtgaagaccacccgcggcagggcagcatcctctacagcttgctcactagctcaaagcaaacgcacgtggctccggcagcgcccgaggcacgaccagggggcgcgtggtgggaccgctcctacttcgcgcagaggccagggggtaaagaggcgctaccaggcgggcgggccacggcgcttctgtaccgctgctgcttttgcggtgaagaccacccgcagcagggcagcaccctctactgcgtgcccacgagcacaaatcaagcgcaggcggctccggaggagcggccgagggccccctggtgggacacctcctctggtgcgctgcggccggtggcgctcaagagtccacaggtggtctgcgaggcagcctcagcgggcctgttgaagacgctgcgcttcgtcaagtacttgccctgcttccaggtgctgcccctggaccagcagctggtgctggtgcgcaactgctgggcgtccctgctcatgcttgagctggcccaggaccgcttgcagttcgagactgtggaagtctcggagcccagcatgctgcagaagatcctcaccaccaggcggcgggagaccgggggcaacgagccactgcccgtgcccacgctgcagcaccatttggcaccgccggcggaggccaggaaggtgccctccgcctcccaggtccaagccatcaagtgctttctttccaaatgctggagtctgaacatcagtaccaaggagtacgcctacctcaaggggaccgtgctctttaacccggacgtgccgggcctgcagtgcgtgaagtacattcagggactccagtggggaactcagcaaatactcagtgaacacaccaggatgacgcaccaagggccccatgacagattcatcgaacttaatagtacccttttcctgctgagattcatcaatgccaatgtcattgctgaactgttcttcaggcccatcatcggcacagtcagcatggatgatatgatgctggaaatgctctgtacaaagata

SEQ ID NO: 6608 - DNA, 1410 bp, Homo sapiens; identical to SEQ ID NO: 6607
  source 1..1410: mol_type = genomic DNA

SEQ ID NO: 6609 - DNA, 1350 bp, Homo sapiens
  source 1..1350: mol_type = genomic DNA
atgcctcacaactccatcagatctggccatggagggctgaaccagctgggaggggcctttgtgaatggcagacctctgccggaagtggtccgccagcgcatcgtagacctggcccaccagggtgtaaggccctgcgacatctctcgccagctccgcgtcagccatggctgcgtcagcaagatccttggcaggtactacgagactggcagcatccggcctggagtgatagggggctccaagcccaaggtggccacccccaaggtggtggagaagattggggactacaaacgccagaaccctaccatgtttgcctgggagatccgagaccggctcctggctgagggcgtctgtgacaatgacactgtgcccagtgtcagctccattaatagaatcatccggaccaaagtgcagcaaccattcaacctccctatggacagctgcgtggccaccaagtccctgagtcccggacacacgctgatccccagctcagctgtaactcccccggagtcaccccagtcggattccctgggctccacctactccatcaatgggctcctgggcatcgctcagcctggcagcgacaagaggaaaatggatgacagtgatcaggatagctgccgactaagcattgactcacagagcagcagcagcggaccccgaaagcaccttcgcacggatgccttcagccagcaccacctcgagccgctcgagtgcccatttgagcggcagcactacccagaggcctatgcctcccccagccacaccaaaggcgagcagggcctctacccgctgcccttgctcaacagcaccctggacgacgggaaggccaccctgaccccttccaacacgccactggggcgcaacctctcgactcaccagacctaccccgtggtggcagatcctcactcacccttcgccataaagcaggaaacccccgaggtgtccagttctagctccaccccttcctctttatctagctccgcctttttggatctgcagcaagtcggctccggggtcccgcccttcaatgcctttccccatgctgcctccgtgtacgggcagttcacgggccaggccctcctctcagggcgagagatggtggggcccacgctgcccggatacccaccccacatccccaccagcggacagggcagctatgcctcctctgccatcgcaggcatggtggcaggaagtgaatactctggcaatgcctatggccacaccccctactcctcctacagcgaggcctggcgcttccccaactccagcttgctgagttccccatattattacagttccacatcaaggccgagtgcaccgcccaccactgccacggcctttgaccatctg

SEQ ID NO: 6610 - DNA, 1554 bp, Homo sapiens
  source 1..1554: mol_type = genomic DNA
atggacagggccccacagagacagcaccgagcctcacgggagctgctggctgcaaagaagacccacacctcacaaattgaagtgatcccttgcaaaatctgtggggacaagtcgtctgggatccactacggggttatcacctgtgaggggtgcaagggcttcttccgccggagccagcgctgtaacgcggcctactcctgcacccgtcagcagaactgccccatcgaccgcaccagccgaaaccgatgccagcactgccgcctgcagaaatgcctggcgctgggcatgtcccgagatgctgtcaagttcggccgcatgtccaagaagcagagggacagcctgcatgcagaagtgcagaaacagctgcagcagcggcaacagcagcaacaggaaccagtggtcaagacccctccagcaggggcccaaggagcagataccctcacctacaccttggggctcccagacgggcagctgcccctgggctcctcgcctgacctgcctgaggcttctgcctgtccccctggcctcctgaaagcctcaggctctgggccctcatattccaacaacttggccaaggcagggctcaatggggcctcatgccaccttgaatacagccctgagcggggcaaggctgagggcagagagagcttctatagcacaggcagccagctgacccctgaccgatgtggacttcgttttgaggaacacaggcatcctgggcttggggaactgggacagggcccagacagctacggcagccccagtttccgcagcacaccggaggcaccctatgcctccctgacagagatagagcacctggtgcagagcgtctgcaagtcctacagggagacatgccagctgcggctggaggacctgctgcggcagcgctccaacatcttctcccgggaggaagtgactggctaccagaggaagtccatgtgggagatgtgggaacggtgtgcccaccacctcaccgaggccattcagtacgtggtggagttcgccaagaggctctcaggctttatggagctctgccagaatgaccagattgtgcttctcaaagcaggagcaatggaagtggtgctggttaggatgtgccgggcctacaatgctgacaaccgcacggtcttttttgaaggcaaatacggtggcatggagctgttccgagccttgggctgcagcgagctcatcagctccatctttgacttctcccactccctaagtgccttgcacttttccgaggatgagattgccctctacacagcccttgttctcatcaatgcccatcggccagggctccaagagaaaaggaaagtagaacagctgcagtacaatctggagctggcctttcatcatcatctctgcaagactcatcgccaaagcatcctggcaaagctgccacccaaggggaagcttcggagcctgtgtagccagcatgtggaaaggctgcagatcttccagcacctccaccccatcgtggtccaagccgctttccctccactctacaaggagctcttcagcactgaaaccgagtcacctgtggggctgtccaag

SEQ ID NO: 6611 - DNA, 1428 bp, Homo sapiens
  source 1..1428: mol_type = genomic DNA
atgggatcaaaaatgaatctcattgaacattcccatttacctaccacagatgaattttctttttctgaaaatttatttggtgttttaacagaacaagtggcaggtcctctgggacagaacctggaagtggaaccatactcgcaatacagcaatgttcagtttccccaagttcaaccacagatttcctcgtcatcctattattccaacctgggtttctacccccagcagcctgaagagtggtactctcctggaatatatgaactcaggcgtatgccagctgagactctctaccagggagaaactgaggtagcagagatgcctgtaacaaagaagccccgcatgggcgcgtcagcagggaggatcaaaggggatgagctgtgtgttgtttgtggagacagagcctctggataccactataatgcactgacctgtgaggggtgtaaaggtttcttcaggagaagcattaccaaaaacgctgtgtacaagtgtaaaaacgggggcaactgtgtgatggatatgtacatgcgaagaaagtgtcaagagtgtcgactaaggaaatgcaaagagatgggaatgttggctgaatgtatgtatacaggcttgttaactgaaattcagtgtaaatctaagcgactgagaaaaaatgtgaagcagcatgcagatcagaccgtgaatgaagacagtgaaggtcgtgacttgcgacaagtgacctcgacaacaaagtcatgcagggagaaaactgaactcaccccagatcaacagactcttctacattttattatggattcatataacaaacagaggatgcctcaggaaataacaaataaaattttaaaagaagaattcagtgcagaagaaaattttctcattttgacggaaatggcaaccaatcatgtacaggttcttgtagaattcacaaaaaagctaccaggatttcagactttggaccatgaagaccagattgctttgctgaaagggtctgcggttgaagctatgttccttcgttcagctgagattttcaataagaaacttccgtctgggcattctgacctattggaagaaagaattcgaaatagtggtatctctgatgaatatataacacctatgtttagtttttataaaagtattggggaactgaaaatgactcaagaggagtatgctctgcttacagcaattgttatcctgtctccagatagacaatacataaaggatagagaggcagtagagaagcttcaggagccacttcttgatgtgctacaaaagttgtgtaagattcaccagcctgaaaatcctcaacactttgcctgtctcctgggtcgcctgactgaattacggacattcaatcatcaccacgctgagatgctgatgtcatggagagtaaacgaccacaagtttaccccacttctctgtgaaatctgggacgtgcag

SEQ ID NO: 6612 - DNA, 1416 bp, Homo sapiens
  source 1..1416: mol_type = genomic DNA
atgggatcaaaaatgaatctcattgaacattcccatttacctaccacagatgaattttctttttctgaaaatttatttggtgttttaacagaacaagtggcaggtcctctgggacagaacctggaagtggaaccatactcgcaatacagcaatgttcagtttccccaagttcaaccacagatttcctcgtcatcctattattccaacctgggtttctacccccagcagcctgaagagtggtactctcctggaatatatgaactcaggcgtatgccagctgagactctctaccagggagaaactgaggtagcagagatgcctgtaacaaagaagccccgcatgggcgcgtcagcagggaggatcaaaggggatgagctgtgtgttgtttgtggagacagagcctctggataccactataatgcactgacctgtgaggggtgtaaaggtttcttcaggagaagcattaccaaaaacgctgtgtacaagtgtaaaaacgggggcaactgtgtgatggatatgtacatgcgaagaaagtgtcaagagtgtcgactaaggaaatgcaaagagatgggaatgttggctgaatgcttgttaactgaaattcagtgtaaatctaagcgactgagaaaaaatgtgaagcagcatgcagatcagaccgtgaatgaagacagtgaaggtcgtgacttgcgacaagtgacctcgacaacaaagtcatgcagggagaaaactgaactcaccccagatcaacagactcttctacattttattatggattcatataacaaacagaggatgcctcaggaaataacaaataaaattttaaaagaagaattcagtgcagaagaaaattttctcattttgacggaaatggcaaccaatcatgtacaggttcttgtagaattcacaaaaaagctaccaggatttcagactttggaccatgaagaccagattgctttgctgaaagggtctgcggttgaagctatgttccttcgttcagctgagattttcaataagaaacttccgtctgggcattctgacctattggaagaaagaattcgaaatagtggtatctctgatgaatatataacacctatgtttagtttttataaaagtattggggaactgaaaatgactcaagaggagtatgctctgcttacagcaattgttatcctgtctccagatagacaatacataaaggatagagaggcagtagagaagcttcaggagccacttcttgatgtgctacaaaagttgtgtaagattcaccagcctgaaaatcctcaacactttgcctgtctcctgggtcgcctgactgaattacggacattcaatcatcaccacgctgagatgctgatgtcatggagagtaaacgaccacaagtttaccccacttctctgtgaaatctgggacgtgcag

SEQ ID NO: 6613 - DNA, 1083 bp, Homo sapiens
  source 1..1083: mol_type = genomic DNA
atggagcagccacaggaggaagcccctgaggtccgggaagaggaggagaaagaggaagtggcagaggcagaaggagccccagagctcaatgggggaccacagcatgcacttccttccagcagctacacagacctctcccggagctcctcgccaccctcactgctggaccaactgcagatgggctgtgacggggcctcatgcggcagcctcaacatggagtgccgggtgtgcggggacaaggcatcgggcttccactacggtgttcatgcatgtgaggggtgcaagggcttcttccgtcgtacgatccgcatgaagctggagtacgagaagtgtgagcgcagctgcaagattcagaagaagaaccgcaacaagtgccagtactgccgcttccagaagtgcctggcactgggcatgtcacacaacgctatccgttttggtcggatgccggaggctgagaagaggaagctggtggcagggctgactgcaaatgaggggagccagtacaacccacaggtggccgacctgaaggccttctccaagcacatctacaatgcctacctgaaaaacttcaacatgaccaaaaagaaggcccgcagcatcctcaccggcaaagccagccacacggcgccctttgtgatccacgacatcgagacattgtggcaggcagagaaggggctggtgtggaagcagttggtgaatggcctgcctccctacaaggagatcagcgtgcacgtcttctaccgctgccagtgcaccacagtggagaccgtgcgggagctcactgagttcgccaagagcatccccagcttcagcagcctcttcctcaacgaccaggttacccttctcaagtatggcgtgcacgaggccatcttcgccatgctggcctctatcgtcaacaaggacgggctgctggtagccaacggcagtggctttgtcacccgtgagttcctgcgcagcctccgcaaacccttcagtgatatcattgagcctaagtttgaatttgctgtcaagttcaacgccctggaacttgatgacagtgacctggccctattcattgcggccatcattctgtgtggaggtgag

SEQ ID NO: 6614 - DNA, 1380 bp, Homo sapiens
  source 1..1380: mol_type = genomic DNA
atgtcctctcctaccacgagttccctggatacccccctgcctggaaatggcccccctcagcctggcgccccttcttcttcacccactgtaaaggaggagggtccggagccgtggcccgggggtccggaccctgatgtcccaggcactgatgaggccagctcagcctgcagcacagactgggtcatcccagatcccgaagaggaaccagagcgcaagcgaaagaagggcccagccccgaagatgctgggccacgagctttgccgtgtctgtggggacaaggcctccggcttccactacaacgtgctcagctgcgaaggctgcaagggcttcttccggcgcagtgtggtccgtggtggggccaggcgctatgcctgccggggtggcggaacctgccagatggacgctttcatgcggcgcaagtgccagcagtgccggctgcgcaagtgcaaggaggcagggatgagggagcagtgcgtcctttctgaagaacagatccggaagaagaagattcggaaacagcagcaggagtcacagtcacagtcgcagtcacctgtggggccgcagggcagcagcagctcagcctctgggcctggggcttcccctggtggatctgaggcaggcagccagggctccggggaaggcgagggtgtccagctaacagcggctcaagaactaatgatccagcagttggtggcggcccaactgcagtgcaacaaacgctccttctccgaccagcccaaagtcacgccctggcccctgggcgcagacccccagtcccgagatgcccgccagcaacgctttgcccacttcacggagctggccatcatctcagtccaggagatcgtggacttcgctaagcaagtgcctggtttcctgcagctgggccgggaggaccagatcgccctcctgaaggcatccactatcgagatcatgctgctagagacagccaggcgctacaaccacgagacagagtgtatcaccttcttgaaggacttcacctacagcaaggacgacttccaccgtgcaggcctgcaggtggagttcatcaaccccatcttcgagttctcgcgggccatgcggcggctgggcctggacgacgctgagtacgccctgctcatcgccatcaacatcttctcggccgaccggcccaacgtgcaggagccgggccgcgtggaggcgttgcagcagccctacgtggaggcgctgctgtcctacacgcgcatcaagaggccgcaggaccagctgcgcttcccgcgcatgctcatgaagctggtgagcctgcgcacgctgagctctgtgcactcggagcaggtcttcgccttgcggctccaggacaagaagctgccgcctctgctgtcggagatctgggacgtccacgag

SEQ ID NO: 6615 - DNA, 3075 bp, Homo sapiens
  source 1..3075: mol_type = genomic DNA
atgcatcggaaaaaggtggataaccgaatccggattctcattgagaatggagtagctgagcggcaaagatctctctttgttgtagttggggatcgaggaaaagatcaggtggtaatacttcatcacatgttatccaaagcaactgtgaaggctcggccttcagtgctgtggtgttataagaaagagctggggtttagcagtcaccggaagaaaagaatgcgacagctgcagaagaaaataaagaatggaacactgaacataaagcaggacgacccctttgaactcttcatagcagccacaaacattcgctactgctactacaacgagacccacaagatcctgggcaataccttcggcatgtgtgtgctgcaggattttgaagccttaactccaaacttgctggccaggactgtagaaacagtggaaggtggtgggctagtggtcatcctcctacggaccatgaactcactcaagcaattgtacacagtgactatggatgtgcattccaggtacagaactgaggcccatcaggatgtggtgggaagatttaatgaaaggtttattctgtctctggcctcttgtaagaagtgtctcgtcattgatgaccagctcaacatcctgcccatctcctcccacgttgccaccatggaggccctgcctccccagactccggatgagagtcttggtccttctgatctggagctgagggagttgaaggagagcttgcaggacacccagcctgtgggtgtgttggtggactgctgtaagactctagaccaggccaaagctgtcttgaaatttatcgagggcatctctgaaaagaccctgaggagtactgttgcactcacagctgctcgaggacggggaaaatctgcagccctgggattggcgattgctggggcggtggcatttgggtactccaatatctttgttacctccccaagccctgataacctccatactctgtttgaatttgtatttaaaggatttgatgctctgcaatatcaggaacatctggattatgagattatccagtctctaaatcctgaatttaacaaagcagtgatcagagtgaatgtatttcgagaacacaggcagactattcagtatatacatcctgcagatgctgtgaagctgggccaggctgaactagttgtgattgatgaagctgccgccatccccctccccttggtgaagagcctacttggcccctaccttgttttcatggcatccaccatcaatggctatgagggcactggccggtcactgtccctcaagctaattcagcagctccgtcaacagagcgcccagagccaggtcagcaccactgctgagaataagaccacgacgacagccagattggcatcagcgcggacactgtatgaggtttccctccaggagtcaatccgatacgcccctggggatgcagtggagaagtggctgaatgacttgctgtgcctggattgcctcaacatcactcggatagtctcaggctgccccttgcctgaagcttgtgaactgtactatgttaatagagataccctcttttgctaccacaaggcctctgaagttttcctccaacggcttatggccctctacgtggcttctcactacaagaactctcccaatgatctccagatgctctccgatgcacctgctcaccatctcttctgccttctgcctcccgtgccccccacccagaatgcccttccagaagtgcttgctgttatccaggtgtgccttgaaggggagatttctcgccagtccatcttgaacagtctgtctcgaggcaagaaggcttcaggggacctgattccatggacagtgtcagaacagttccaagatccagactttggtggtctgtctggtggaagggtcgttcgcattgctgttcacccagattatcaagggatgggctatggcagccgtgctctgcagctgctgcagatgtactatgaaggcaggtttccttgtctggaggaaaaggtccttgagacaccacaggaaattcacaccgtaagcagcgaggctgtcagcttgttggaagaggtcatcactccccggaaggacctgcctcctttactcctcaaattgaatgagaggcctgccgaacgcctggattacctgggtgtttcctatggcttgacccccaggctcctcaagttctggaaacgagctggatttgttcctgtttatctgagacagaccccgaatgacctgaccggagagcactcgtgcatcatgctgaagacgctcactgatgaggatgaggctgaccagggaggctggcttgcagccttctggaaagatttccgacggcggttcctagccttgctctcctaccagttcagtaccttctctccttccctggctctgaacatcattcagaacaggaacatggggaagccagcccagcctgccctgagccgggaggagctggaagcactcttcctcccctatgacctgaagcggctggagatgtattcacggaatatggtggactatcacctcatcatggacatgatcccggccatctctcgcatctatttcctgaaccagctgggggacctggccctgtctgcggctcagtcggctcttctcttggggattggcctgcagcataagtctgtggaccagctggaaaaggagattgagctgccctcgggccagttgatgggacttttcaaccggatcatccgcaaagttgtgaagctatttaatgaagttcaggaaaaggccattgaggagcagatggtggcagcgaaggatgtggtcatggagcccacgatgaagaccctcagtgacgacctagatgaagcagcaaaggaatttcaggagaaacacaagaaggaagtagggaagctgaagagcatggacctctctgaatacataatccgtggggacgatgaagagtggaatgaagttttgaacaaagctgggccgaacgcctcgatcatcagcctgaaaagtgacaagaaaaggaagttagaggccaaacaagaacccaaacagagcaagaagttgaagaacagagagacaaagaacaaaaaagatatgaaactgaagcggaagaaa

SEQ ID NO: 6616 - DNA, 1560 bp, Homo sapiens
  source 1..1560: mol_type = genomic DNA
atgtctcaggataatgacacattgatgagagacatcctggggcatgagctcgctgctatgaggctgcagaagctggaacagcagcggcggctgtttgaaaagaagcagcgacagaagcgccaggagctcctcatggttcaggccaatcctgacgcttccccgtggctttggcgctcttgtctgcgggaggagcgccttttaggtgacagaggccttgggaaccctttcctccggaagaaagtgtcagaggcacatctgccctctggcatccacagtgccctgggcaccgtgagctgtggtggagacggcaggggcgagcgcggcctcccgacaccgcggacagaagcagtgttcaggaatctcggtctccagtcccctttcttatcctggctcccagacaattccgatgcagaattggaggaagtctccgtggagaatggttccgtctctcccccaccttttaaacagtctccgagaatccgacgcaagggttggcaagcccaccaacgacctgggacccgtgcagagggtgagagtgactcccaggatatgggagatgcacacaagtcacccaatatgggaccaaaccctggaatggatggtgactgtgtatatgaaaacttggccttccaaaaggaagaagacttggaaaagaagagagaggcctctgagtctacagggacgaactcctcagcagcacacaacgaagagttgtccaaggccctgaaaggcgagggtggcacggacagcgaccatatgaggcacgaagcctccttggcaatccgctccccctgccctgggctggaggaggacatggaagcctacgtgctgcggccagcgctcccgggcaccatgatgcagtgctacctcacccgtgacaagcacggcgtggacaagggcttgttccccctctactacctctacctggagacctctgacagcctgcagcgcttcctcctggctgggcgaaagagaagaaggagcaaaacttctaattacctcatctccctggatcctacacacctatctcgggacggggacaatttcgtgggcaaagtcagatccaatgtcttcagcaccaagttcaccatctttgacaatggggtgaatcctgaccgggagcatttaaccaggaatactgcccggatcagacaggagctgggggctgtgtgttatgagcccaacgtcttaggatacctggggcctcggaaaatgactgtgattctcccaggaaccaacagccagaaccagcgaatcaatgtccagccactaaatgaacaggagtcgctactgagtcgttaccaacgtggggacaaacaagggttgcttttgttgcacaacaaaaccccgtcgtgggacaaggagaacggtgtctacacgctcaatttccatggtcgagtcactcgggcttcggtgaagaacttccaaatcgtggatcccaaacaccaagaacatctggtgctccagttcggccgagtgggcccagacacattcaccatggacttctgctttccatttagcccgctccaggccttcagcatctgcttgtccagtttcaat

SEQ ID NO: 6617 - DNA, 2118 bp, Homo sapiens
  source 1..2118: mol_type = genomic DNA
atgaccacgttgaaggaggcagtgaccttcaaggacgtggctgtggtcttcactgaggaagagctgaggctgctggaccttgcccagaggaaactgtaccgagaagtgatgctggagaacttcaggaacctgctctcagtggggcatcaatcactccacagagatactttccacttcctaaaggaagaaaagttttggatgatggagacagcaacccaaagagaagggaatttaggaggcaagatccaaatggagatggagactgtttcagaatcaggaacacatgaaggcttgttcagtcatcaaacctgggaacaaatttcaagtgacttaaccaggtttcaagactccatggtaaacagctttcagttctccaaacaagatgatatgccctgccaggttgatgcaggactatctataattcacgtaagacagaaaccttctgagggtaggacgtgtaaaaagtcctttagtgatgtctccgtccttgatcttcatcaacaactacagtcaagagagaagtctcatacatgtgatgaatgtggaaagagtttctgttatagctcagctcttcgtattcatcagagagttcacatgggggagaaactctataattgtgatgtgtgtggtaaggaattcaatcagagctcacatctgcaaattcatcagagaatccacactggagagaaaccattcaaatgtgagcagtgtgggaaaggctttagtcgtagatcaggactttatgttcatcgtaaattacacacaggagtgaaacctcatatttgtgagaaatgtgggaaggccttcattcatgattcccagcttcaggaacatcaaagaatccatactggggagaagccattcaaatgtgatatatgttgtaagagcttccgtagtagagcaaatcttaataggcattccatggttcacatgcgagagaaaccattcagatgtgatacatgtggtaagagctttggtctgaaatcagcacttaatagtcatcgcatggtccacacaggagagaaacggtacaaatgtgaggaatgtggaaaacgcttcatttataggcaagatctttataagcatcaaatagaccacacaggggagaagccatataattgtaaagaatgtggaaagagcttcagatgggcctcaggtctttcaagacatgtgcgagtccacagtggagagacaacattcaaatgtgaagaatgtgggaagggattttatacaaattcacaacgttattctcaccagagagcgcacagtggagaaaagccatatagatgtgaggagtgtgggaagggctacaaaaggaggttggatcttgactttcatcagagggtccacagaggagagaaaccctataattgtaaggaatgtgggaagagctttggctgggcctcgtgtcttttgaatcatcagagaatccacagtggagaaaaaccatttaaatgtgaagaatgtgggaaaagatttactcagaattcacaactttatacccatcgtagagtccacagtggagaaaaaccattcaaatgtgaagagtgtgggaaaagatttactcagaattcacaactttattctcatcgcagagtccacactggagtaaagccatacaaatgtgaagagtgtgggaagggcttcaacagtaagtttaatcttgacatgcaccagagggtccacaccggagagagaccttataattgtaaagaatgtgggaagagctttagccgggcctcaagtattttgaatcataagagactccatggtgatgaaaagccattcaaatgtgaagagtgtgggaagagatttactgagaattcacagcttcattcccatcagagggttcacactggggaaaagccatacaaatgtgagaagtgtggaaagagcttcagatgggcctcaactcatctaacccatcagagactccacagtagagaaaaactacttcaatgtgaggactgtgggaagagcattgtgcacagttcatgccttaaagaccaacaaagagaccaaagtggagagaaaacatctaaatgtgaggactgtgggaagcgctacaagaggcgcttgaatcttgatacgcttttgtcattatttttaaatgacaca

SEQ ID NO: 6618 - DNA, 771 bp, Homo sapiens
  source 1..771: mol_type = genomic DNA
atgagcaccagccaaccaggggcctgcccatgccagggagctgcaagccgccccgccattctctacgcacttctgagctccagcctcaaggctgtcccccgaccccgtagccgctgcctatgtaggcagcaccggcccgtccagctatgtgcacctcatcgcacctgccgggaggccttggatgttctggccaagacagtggccttcctcaggaacctgccatccttctggcagctgcctccccaggaccagcggcggctgctgcagggttgctggggccccctcttcctgcttgggttggcccaagatgctgtgacctttgaggtggctgaggccccggtgcccagcatactcaagaagattctgctggaggagcccagcagcagtggaggcagtggccaactgccagacagaccccagccctccctggctgcggtgcagtggcttcaatgctgtctggagtccttctggagcctggagcttagccccaaggaatatgcctgcctgaaagggaccatcctcttcaaccccgatgtgccaggcctccaagccgcctcccacattgggcacctgcagcaggaggctcactgggtgctgtgtgaagtcctggaaccctggtgcccagcagcccaaggccgcctgacccgtgtcctcctcacggcctccaccctcaagtccattccgaccagcctgcttggggacctcttctttcgccctatcattggagatgttgacatcgctggccttcttggggacatgcttttgctcagg

SEQ ID NO: 6619 - DNA, 771 bp, Homo sapiens; identical to SEQ ID NO: 6618
  source 1..771: mol_type = genomic DNA

SEQ ID NO: 6620 - DNA, 1293 bp, Homo sapiens
  source 1..1293: mol_type = genomic DNA
atgcccaaccccaggcctggcaagccctcggccccttccttggcccttggcccatccccaggagcctcgcccagctggagggctgcacccaaagcctcagacctgctgggggcccggggcccagggggaaccttccagggccgagatcttcgaggcggggcccatgcctcctcttcttccttgaaccccatgccaccatcgcagctgcagctgcccacactgcccctagtcatggtggcaccctccggggcacggctgggccccttgccccacttacaggcactcctccaggacaggccacatttcatgcaccagctctcaacggtggatgcccacgcccggacccctgtgctgcaggtgcaccccctggagagcccagccatgatcagcctcacaccacccaccaccgccactggggtcttctccctcaaggcccggcctggcctcccacctgggatcaacgtggccagcctggaatgggtgtccagggagccggcactgctctgcaccttcccaaatcccagtgcacccaggaaggacagcaccctttcggctgtgccccagagctcctacccactgctggcaaatggtgtctgcaagtggcccggatgtgagaaggtcttcgaagagccagaggacttcctcaagcactgccaggcggaccatcttctggatgagaagggcagggcacaatgtctcctccagagagagatggtacagtctctggagcagcagctggtgctggagaaggagaagctgagtgccatgcaggcccacctggctgggaaaatggcactgaccaaggcttcatctgtggcatcatccgacaagggctcctgctgcatcgtagctgctggcagccaaggccctgtcgtcccagcctggtctggcccccgggaggcccctgacagcctgtttgctgtccggaggcacctgtggggtagccatggaaacagcacattcccagagttcctccacaacatggactacttcaagttccacaacatgcgaccccctttcacctacgccacgctcatccgctgggccatcctggaggctccagagaagcagcggacactcaatgagatctaccactggttcacacgcatgtttgccttcttcagaaaccatcctgccacctggaagaacgccatccgccacaacctgagtctgcacaagtgctttgtgcgggtggagagcgagaagggggctgtgtggaccgtggatgagctggagttccgcaagaaacggagccagaggcccagcaggtgttccaaccctacacctggcccc

SEQ ID NO: 6621 - DNA, 1467 bp, Homo sapiens
  source 1..1467: mol_type = genomic DNA
atgaaagagttggatccaaagaatgacatttcggaagacaagctctccgttgttggggaggccacggggggacccacgaggaatggtgccaggggtcctggctcagaaggagtgtgggaaccaggcagctggccagagaggccgcggggagatgcaggtgcagagtgggagccattgggaattccccaggggaacaaactcttagggggctcagtacccgcatgtcatgaactgaaggcatttgccaaccaaggctgtgtcctggtcccaccacggctggacgaccccacagaaaagggggcctgtccacccgtaaggcgtggcaagaacttctccagcacttcagacctcagtaagccccccatgccctgcgaggagaagaaaacctacgactgcagcgagtgtggcaaggcctttagccgaagctcgtccctgataaagcaccaaaggatccacacgggagaaaagccgtttgagtgtgacacctgtgggaagcacttcatcgagcgctcgtccctcaccatccaccagcgggtgcacacgggcgagaagccctatgcctgcggggactgcggcaaggccttcagccagcgcatgaacctcactgtgcaccagcgcacgcacacgggcgagaagccgtatgtgtgcgacgtgtgtggcaaggccttccggaagacttcctctctcacccagcacgagcggatccacacgggggagaagccctacgcgtgcggggactgcggcaaggccttcagccagaacatgcacctcatcgtgcaccagcgcacgcacaccggggagaagccgtacgtgtgccccgagtgcgggcgagccttcagccagaacatgcacctgaccgagcaccagcgcacgcacaccggggagaagccgtacgcctgcaaggagtgcggcaaggccttcaacaagagctcctctctcaccctgcaccagaggaaccacaccggcgagaagccctacgtgtgcggcgagtgcggcaaggccttcagccagagctcctacctcatccagcaccagcgcttccacatcggcgtgaagccgttcgagtgcagcgagtgcggcaaggccttcagcaagaactcctcgctcacgcagcaccagcgcatccacaccggcgagaagccctacgagtgctacatctgcaagaagcacttcacggggcgctcgtccctcatcgtgcaccagatcgtgcacaccggggagaagccctacgtgtgcggcgagtgcggcaaggccttcagccagagcgcctacctcatcgagcaccagcggatccacaccggcgagaagccgtacaggtgcggccagtgcgggaagtccttcatcaagaactcctccctcactgtgcaccagcggatccacacgggcgagaagccctaccgatgcggcgagtgcgggaagaccttcagccgcaacacgaacctgacgcgccacctgcggattcacacc

SEQ ID NO: 6622 - DNA, 2064 bp, Homo sapiens
  source 1..2064: mol_type = genomic DNA
atggctcggaaattagtgatgttcagggatgttgccattgacttctctcaggaagagtgggaatgcctggactctgctcagagagatttgtatagagatgtgatgttggagaactatagcaacttggtatcactagacttgccttcaaggtgtgcaagtaaggacttatctccagaaaagaacacttatgaaacagaattatcccaatgggaaatgagtgacagacttgaaaactgtgatcttgaagagtccaattccagggattatttggaagccaaaggcaagatggagaagcaacaagaaaatcagaaggaatatttcaggcaagggatgatcatatatgacaaaatgtccattttcaaccagcatacttacttatctcaacattcaagatgtcattctactgagaaaccctataaatgtaaggaatgtgggaaagccttcagacgagcctcacacctaacacaacatcaaagtattcatactggtgaaaaaccctatgaatgtaagcaatgcgggaaggcctttagtcgtgattcacaactcagtcttcatcagagacttcatactggtgagaaaccctatgcatgtaaggaatgtgggaaggcctttactcaaagctcacaacttattttacatcatagaattcatactggtgaaaaaccatataaatgtgaagaatgtgggaaagcctttattcgtagctcacaacttacccgacatcaaaaagttcatactggtgagaaaccttatgaatgtaaagaatgtgggaaggcctttactcagaattcacaacttacactacaccagagacttcatactggtgaaaagctctatgaatgtaaagaatgtaggaaggtctttactcagctctcacaacttattctgcataagagaattcataccggtgagaaaccctatgaatgtaaggaatgtggaaaagcttttatttgtggctcacagctttctcaacatcagaaaattcataatggggaaaaaccatatgaatgtaaggaatgtggaagggcctttattcggggctcactactgatgcaacatcagaggattcatactggtgaaaaaccctataaatgtgaagaatgtgggaaggcctttatccgtggctcacaacttactcaacaccagagaattcacaccaatgaaaagccctatgaatgtaaggaatgtggaaagatgtttagtcatggctcacaacttactcaacatcagagaatacacactggtgagaaaccctatcaatgtaaggaatgtggaaaagcgtttaatcgtggctcactccttacacgacaccagaggattcatactggtgagaaaccctatgaatgtaaagaatgtggaaaaacctttagtcgtggctcagaacttactcaacatgagcgaattcacacaggtgagaaaccctatgaatgtaaggaatgtgggaaatcttttattcgtggttcccagcttactcaacatcagagaatccatactggtgagaaaccttatgaatgtaaagaatgtagaatggcctttactcagagttcacatctttcccaacatcaaagacttcacactggtgagaaaccctatgtgtgtaatgaatgtggaaaggcctttgcgcgtggcttactacttatacaacatcagagaattcatactggtgagaaaccatatcaatgtaaggaatgtgggaaagcctttattcgtggttcacagttgactcaacatcagcgaattcacactggagaaaaaccctatgaatgcaaggagtgtggcaaggcctttagtcatggctctcagcttactctacatcagagaatccatactggtgagaagccctatgaatgcagagaatgtagaaaggcctttactcagagttcacatctttctcggcatcagagaattcatactggtgagaaaccatatcaatgtaaggaatgtgggaaggcctttactcgtggttcacagctaactcaacatcagagaattcatatcagtgagaaatcttttgaatataaggaatgtgggattgactttagtcatggctcacaagtttacatg

SEQ ID NO: 6623 - DNA, 2217 bp, Homo sapiens
  source 1..2217: mol_type = genomic DNA
atggcgcctcagaagcacggcggtgggggagggggcggctcggggcccagcgcggggtccgggggaggcggcttcgggggttcggcggcggtggcggcggcgacggcttcgggcggcaaatccggcggcgggagctgtggagggggtggcagttactcggcctcctcctcctcctccgcggcggcagcggcgggggctgcggtgttaccggtgaagaagccgaaaatggagcacgtccaggctgaccacgagcttttcctccaggcctttgagaagccaacacagatctatagatttcttcgaactcggaatctcatagcaccaatatttttgcacagaactcttacttacatgtctcatcgaaactccagaacaaacatcaaaaggaaaacatttaaagttgatgatatgttatcaaaagtagagaaaatgaaaggagagcaagaatctcatagcttgtcagctcatttgcagcttacgtttactggtttcttccacaaaaatgataagccatcaccaaactcagaaaatgaacaaaattctgttaccctggaagtcctgcttgtgaaagtttgccacaaaaaaagaaaggatgtaagttgtccaataaggcaagttcccacaggtaaaaagcaggtgcctttgaatcctgacctcaatcaaacaaaacccggaaatttcccgtcccttgcagtttccagtaatgaatttgaacctagtaacagccatatggtgaagtcttactcgttgctatttagagtgactcgtccaggaagaagagagtttaatggaatgattaatggagaaaccaatgaaaatattgatgtcaatgaagagcttccagccagaagaaaacgaaatcgtgaggatggggaaaagacatttgttgcacaaatgacagtatttgataaaaacaggcgcttacagcttttagatggggaatatgaagtagccatgcaggaaatggaagaatgtccaataagcaagaaaagagcaacatgggagactattcttgatgggaagaggctgcctccattcgaaacattttctcagggacctacgttgcagttcactcttcgttggacaggagagaccaatgataaatctacggctcctattgccaaacctcttgccactagaaattcagagagtctccatcaggaaaacaagcctggttcagttaaacctactcaaactattgctgttaaagaatcattgactacagatctacaaacaagaaaagaaaaggatactccaaatgaaaaccgacaaaaattaagaatattttatcagtttctctataacaacaatacaaggcaacaaactgaagcaagagatgacctgcattgcccttggtgtactctgaactgccgcaaactttatagtttactcaagcatcttaaactctgccatagcagatttatcttcaactatgtttatcatccaaaaggtgctaggatagatgtttctatcaatgagtgttatgatggctcctatgcaggaaatcctcaggatattcatcgccaacctggatttgcttttagtcgcaacggaccagttaagagaacacctatcacacatattcttgtgtgcaggccaaaacgaacaaaagcaagcatgtctgaatttcttgaatctgaagatggggaagtagaacagcaaagaacatatagtagtggccacaatcgtctgtatttccatagtgatacctgcttacctctccgtccacaagaaatggaagtagatagtgaagatgaaaaggatcctgaatggctaagagaaaaaaccattacacaaattgaagagttttctgatgttaatgaaggagagaaagaagtgatgaaactctggaatctccatgtcatgaagcatgggtttattgctgacaatcaaatgaatcatgcctgtatgctgtttgtagaaaattatggacagaaaataattaagaagaatttatgtcgaaacttcatgcttcatctagtcagcatgcatgactttaatcttattagcataatgtcaatagataaagctgttaccaagctccgtgaaatgcagcaaaaattagaaaagggggaatctgcttcccctgcaaacgaagaaataactgaagaacaaaatgggacagcaaatggatttagtgaaattaactcaaaagagaaagctttggaaacagatagtgtctcaggggtttcaaaacagagcaaaaaacaaaaactc

SEQ ID NO: 6624 - DNA, 1473 bp, Homo sapiens
  source 1..1473: mol_type = genomic DNA
atgtctacagcctctgccgcctcctcctcctcctcgtcttcggccggtgagatgatcgaagccccttcccaggtcctcaactttgaagagatcgactacaaggagatcgaggtggaagaggttgttggaagaggagcctttggagttgtttgcaaagctaagtggagagcaaaagatgttgctattaaacaaatagaaagtgaatctgagaggaaagcgtttattgtagagcttcggcagttatcccgtgtgaaccatcctaatattgtaaagctttatggagcctgcttgaatccagtgtgtcttgtgatggaatatgctgaagggggctctttatataatgtgctgcatggtgctgaaccattgccatattatactgctgcccacgcaatgagttggtgtttacagtgttcccaaggagtggcttatcttcacagcatgcaacccaaagcgctaattcacagggacctgaaaccaccaaacttactgctggttgcaggggggacagttctaaaaatttgtgattttggtacagcctgtgacattcagacacacatgaccaataacaaggggagtgctgcttggatggcacctgaagtttttgaaggtagtaattacagtgaaaaatgtgacgtcttcagctggggtattattctttgggaagtgataacgcgtcggaaaccctttgatgagattggtggcccagctttccgaatcatgtgggctgttcataatggtactcgaccaccactgataaaaaatttacctaagcccattgagagcctgatgactcgttgttggtctaaagatccttcccagcgcccttcaatggaggaaattgtgaaaataatgactcacttgatgcggtactttccaggagcagatgagccattacagtatccttgtcagtattcagatgaaggacagagcaactctgccaccagtacaggctcattcatggacattgcttctacaaatacgagtaacaaaagtgacactaatatggagcaagttcctgccacaaatgatactattaagcgcttagaatcaaaattgttgaaaaatcaggcaaagcaacagagtgaatctggacgtttaagcttgggagcctcccgtgggagcagtgtggagagcttgcccccaacctctgagggcaagaggatgagtgctgacatgtctgaaatagaagctaggatcgccgcaaccacaggcaacggacagccaagacgtagatccatccaagacttgactgtaactggaacagaacctggtcaggtgagcagtaggtcatccagtcccagtgtcagaatgattactacctcaggaccaacctcagaaaagccaactcgaagtcatccatggacccctgatgattccacagataccaatggatcagataactccatcccaatggcttatcttacactggatcaccaactacaggcaagaactagttgcagaactggaccagga

SEQ ID NO: 6625 - DNA, 1341 bp, Homo sapiens
  source 1..1341: mol_type = genomic DNA
atgggggaaccccgggctggggccgccctggacgatggcagcggctggacgggcagtgaggaaggcagtgaggagggtaccggcggcagtgagggggctgggggtgacgggggcccggatgcagagggggtgtggagcccagacattgagcagagcttccaggaggccctggccatctatccaccctgcggccgccggaaaataattttgtctgatgaaggcaagatgtatggtcggaatgaactgatcgcccgctacatcaagctgagaacggggaagacccgaactcgaaaacaggtttctagtcacatccaggttttggcccgaaggaaatcaagggaaatccagtccaagttgaaggaccaggtttccaaggacaaggctttccagacaatggcaaccatgtcctctgcccagctcatctccgcgccttctctgcaggccaaactgggtcccactggtcctcaggcctctgagcttttccagttttggtctggaggatctgggcccccctggaatgttccagatgtgaagccattctcacagacaccgttcaccttgtcactgactcccccatctactgacctcccagggtacgagcccccccaagccctctcacccctgcccccacctaccccatcgcccccagcctggcaggctcggggcctgggcaccgcccggttgcagctggtagagttctcagccttcgtggaaccgccagatgcagttgattcttaccagaggcacctgttcgtgcacatcagccagcactgccccagccccggagcgccgccgctcgagagtgtggacgtccggcagatctacgacaaattccctgagaaaaagggtggcctccgagagctatatgatcgtggccccccccatgccttcttcctggtcaagttctgggcggacctgaactggggcccaagtggtgaggaggcaggggccggtggcagcatcagcagtggtggcttctacggagtgagcagccagtatgagagcctggaacacatgaccctcacctgttcctccaaggtctgctcttttggcaagcaggtggtggagaaggtggagacggaacgggcccagctggaggacggcagatttgtgtaccgcctgctgcgctcgcccatgtgcgagtacctggtgaatttcttgcacaagttgcggcagctgcctgagcgatacatgatgaacagcgtcctggaaaacttcaccatcctccaggtggtgacaaacagagacacccaggaactgctgctctgcaccgcctatgtcttcgaggtctccaccagcgagcgtggggcccagcatcacatttaccgcctggtcagggac

SEQ ID NO: 6626 - DNA, 1458 bp, Homo sapiens
  source 1..1458: mol_type = genomic DNA
atggtagctgggatgttagggctcagggaagaaaagtcagaagaccaggacctccagggcctcaaggacaaacccctcaagtttaaaaaggtgaagaaagataagaaagaagagaaagagggcaagcatgagcccgtgcagccatcagcccaccactctgctgagcccgcagaggcaggcaaagcagagacatcagaagggtcaggctccgccccggctgtgccggaagcttctgcctcccccaaacagcggcgctccatcatccgtgaccggggacccatgtatgatgaccccaccctgcctgaaggctggacacggaagcttaagcaaaggaaatctggccgctctgctgggaagtatgatgtgtatttgatcaatccccagggaaaagcctttcgctctaaagtggagttgattgcgtacttcgaaaaggtaggcgacacatccctggaccctaatgattttgacttcacggtaactgggagagggagcccctcccggcgagagcagaaaccacctaagaagcccaaatctcccaaagctccaggaactggcagaggccggggacgccccaaagggagcggcaccacgagacccaaggcggccacgtcagagggtgtgcaggtgaaaagggtcctggagaaaagtcctgggaagctccttgtcaagatgccttttcaaacttcgccagggggcaaggctgaggggggtggggccaccacatccacccaggtcatggtgatcaaacgccccggcaggaagcgaaaagctgaggccgaccctcaggccattcccaagaaacggggccgaaagccggggagtgtggtggcagccgctgccgccgaggccaaaaagaaagccgtgaaggagtcttctatccgatctgtgcaggagaccgtactccccatcaagaagcgcaagacccgggagacggtcagcatcgaggtcaaggaagtggtgaagcccctgctggtgtccaccctcggtgagaagagcgggaaaggactgaagacctgtaagagccctgggcggaaaagcaaggagagcagccccaaggggcgcagcagcagcgcctcctcaccccccaagaaggagcaccaccaccatcaccaccactcagagtccccaaaggcccccgtgccactgctcccacccctgcccccacctccacctgagcccgagagctccgaggaccccaccagcccccctgagccccaggacttgagcagcagcgtctgcaaagaggagaagatgcccagaggaggctcactggagagcgacggctgccccaaggagccagctaagactcagcccgcggttgccaccgccgccacggccgcagaaaagtacaaacaccgaggggagggagagcgcaaagacattgtttcatcctccatgccaaggccaaacagagaggagcctgtggacagccggacgcccgtgaccgagagagttagc

SEQ ID NO: 6627 - DNA, 1569 bp, Homo sapiens
  source 1..1569: mol_type = genomic DNA
atggagtcagctccggcagcccccgaccccgccgccagcgagccaggcagcagcggcgcggacgcggccgccggctccagggagaccccgctgaaccaggaatccgcccgcaagagcgagccgcctgccccggtgcgcagacagagctattccagcaccagcagaggtatctcagtaacgaagaagacacatacatctcaaattgaaattattccatgcaagatctgtggagacaaatcatcaggaatccattatggtgtcattacatgtgaaggctgcaagggctttttcaggagaagtcagcaaagcaatgccacctactcctgtcctcgtcagaagaactgtttgattgatcgaaccagtagaaaccgctgccaacactgtcgattacagaaatgccttgccgtagggatgtctcgagatgctgtaaaatttggccgaatgtcaaaaaagcagagagacagcttgtatgcagaagtacagaaacaccggatgcagcagcagcagcgcgaccaccagcagcagcctggagaggctgagccgctgacgcccacctacaacatctcggccaacgggctgacggaacttcacgacgacctcagtaactacattgacgggcacacccctgaggggagtaaggcagactccgccgtcagcagcttctacctggacatacagccttccccagaccagtcaggtcttgatatcaatggaatcaaaccagaaccaatatgtgactacacaccagcatcaggcttctttccctactgttcgttcaccaacggcgagacttccccaactgtgtccatggcagaattagaacaccttgcacagaatatatctaaatcgcatctggaaacctgccaatacttgagagaagagctccagcagataacgtggcagacctttttacaggaagaaattgagaactatcaaaacaagcagcgggaggtgatgtggcaattgtgtgccatcaaaattacagaagctatacagtatgtggtggagtttgccaaacgcattgatggatttatggaactgtgtcaaaatgatcaaattgtgcttctaaaagcaggttctctagaggtggtgtttatcagaatgtgccgtgcctttgactctcagaacaacaccgtgtactttgatgggaagtatgccagccccgacgtcttcaaatccttaggttgtgaagactttattagctttgtgtttgaatttggaaagagtttatgttctatgcacctgactgaagatgaaattgcattattttctgcatttgtactgatgtcagcagatcgctcatggctgcaagaaaaggtaaaaattgaaaaactgcaacagaaaattcagctagctcttcaacacgtcctacagaagaatcaccgagaagatggaatactaacaaagttaatatgcaaggtgtctacattaagagccttatgtggacgacatacagaaaagctaatggcatttaaagcaatatacccagacattgtgcgacttcattttcctccattatacaaggagttgttcacttcagaatttgagccagcaatgcaaattgatggg

SEQ ID NO: 6628 - DNA, 891 bp, Homo sapiens
  source 1..891: mol_type = genomic DNA
atgatgtcttatcttaagcaaccgccttacgcagtcaatgggctgagtctgaccacttcgggtatggacttgctgcacccctccgtgggctacccggggccctgggcttcttgtcccgcagccaccccccggaaacagcgccgggagaggacgacgttcactcgggcgcagctagatgtgctggaagcactgtttgccaagacccggtacccagacatcttcatgcgagaggaggtggcactgaaaatcaacttgcccgagtcgagggtgcaggtatggtttaagaatcgaagagctaagtgccgccaacaacagcaacaacagcagaatggaggtcaaaacaaagtgagacctgccaaaaagaagacatctccagctcgggaagtgagttcagagagtggaacaagtggccaattcactcccccctctagcacctcagtcccgaccattgccagcagcagtgctcctgtgtctatctggagcccagcttccatctccccactgtcagatcccttgtccacctcctcttcctgcatgcagaggtcctatcccatgacctatactcaggcttcaggttatagtcaaggatatgctggctcaacttcctactttgggggcatggactgtggatcatatttgacccctatgcatcaccagcttcccggaccaggggccacactcagtcccatgggtaccaatgcagtcaccagccatctcaatcagtccccagcttctctttccacccagggatatggagcttcaagcttgggttttaactcaaccactgattgcttggattataaggaccaaactgcctcctggaagcttaacttcaatgctgactgcttggattataaagatcagacatcctcgtggaaattccaggttttg

SEQ ID NO: 6629 - DNA, 1380 bp, Homo sapiens
  source 1..1380: mol_type = genomic DNA
atgggtagcaacagtgggcaggctggccgccacatctataaatccctagctgatgatggcccctttgactctgtggagccgcctaaaagacccaccagcagactcatcatgcacagcatggccatgttcggaagagagttctgctacgcggtggaggcagcgtatgtgaccccagtcctgctcagcgtaggtctgcccagcagcctgtacagcattgtgtggttcctcagccccatcctgggattcctgctgcagcccgtggtcggatcggccagcgaccactgccggtccaggtggggccgccggagaccctacatcctcaccctgggagtcatgatgctcgtgggcatggctctgtacctcaatggggctactgttgtagcagctttgattgctaacccaaggaggaagctggtttgggccataagtgtcaccatgataggtgtcgttctctttgattttgctgccgacttcattgatgggcccatcaaagcctacttatttgatgtctgctcccatcaggacaaggagaagggcctccactaccatgccctcttcacaggttttggaggtgccctgggttaccttttgggtgctatagactgggcccatctggagctgggaagactgttgggtacagaattccaggtcatgttcttcttctctgcattggtgctcactttgtgttttactgttcatctgtgcagtatctctgaagccccacttacagaggttgcaaagggcattcccccacagcaaacccctcaggaccctccattgtcatcagatggaatgtacgagtatggttctatcgagaaagttaaaaatggttacgtaaatccagagctggcaatgcagggagcaaaaaacaaaaatcatgctgaacagactcgcagggcaatgacattaaagtcactgctgagagcactggtgaacatgcctcctcactaccgctacctttgcatcagccacctcattggatggacagccttcctgtccaacatgctgttcttcacagatttcatgggccagattgtgtaccgcggggatccctatagtgcacacaactccacagagtttctcatctacgaaagaggagtcgaggttggatgttggggcttgtgcatcaactccgtgttttcctcactttattcttactttcagaaagttttggtatcctacattggattaaagggtctttacttcacgggatatttgctgtttggcctggggacgggatttattgggctcttcccgaatgtctactccaccctggtcctgtgcagcctgtttggtgtaatgtccagcaccctgtacactgtgccctttaacctcattactgagtaccaccgcgaggaagaaaaggaggtgtgctgtcat

SEQ ID NO: 6630 - DNA, 2226 bp, Homo sapiens; identical to SEQ ID NO: 6044
  source 1..2226: mol_type = genomic DNA

SEQ ID NO: 6631 - DNA, 402 bp, Homo sapiens
  source 1..402: mol_type = genomic DNA
atgaaagccttcagtcccgtgaggtccgttaggaaaaacagcctgtcggaccacagcctgggcatctcccggagcaaaacccctgtggacgacccgatgagcctgctatacaacatgaacgactgctactccaagctcaaggagctggtgcccagcatcccccagaacaagaaggtgagcaagatggaaatcctgcagcacgtcatcgactacatcttggacctgcagatcgccctggactcgcatcccactattgtcagcctgcatcaccagagacccgggcagaaccaggcgtccaggacgccgctgaccaccctcaacacggatatcagcatcctgtccttgcaggcttctgaattcccttctgagttaatgtcaaatgacagcaaagcactgtgtggc

SEQ ID NO: 6632 - DNA, 933 bp, Homo sapiens
  source 1..933: mol_type = genomic DNA
atggacttaaaactaaaagactgtgaattttggtatagtctccatggccaggtcccagggctgctggactgggacatgaggaatgagttatttctgccttgtaccacagaccagtgctctttagctgagcaaatccttgccaaatacagagtcggagtaatgaagcccccagaaatgcctcagaagaggagacccagtcctgatggagatggtcctccctgtgaacccaatctgtggatgtgggtggaccccaatatcctgtgcccccttggcagccaggaggccccaaagcccagtggaaaagaggatctgacaaacatttctcctttccctcagcccccacaaaaagacgaagggtctaactgctcagaggacaaagtggtagagtctctgccatcttcctccagtgagcagtctcctttacagaagcagggtatccattcccccagtgactttgagctcacagaagaggaggctgaggaaccagacgacaactccctccagtcccctgaaatgaaatgttaccagagccagaaactatggcaaatcaacaaccaagagaagtcctggcaaaggccccctctcaattgtagccaccttattgccctagcattaagaaacaacccccactgtggcctcagtgtgcaggagatctacaatttcacccgacagcatttcccctttttctggacagctccggatggctggaagagcaccattcattacaacctctgcttcctggacagctttgagaaggtgccagacagccttaaggatgaagataatgcaagacctcgctcttgcctttggaagctcactaaggaggggcaccgccgcttttgggaggagactcgtgtcttagcctttgctcaaagggagagaatccaagagtgcatgagtcagccagagttgttgacctctctctttgatctt

SEQ ID NO: 6633 - DNA, 1230 bp, Homo sapiens
  source 1..1230: mol_type = genomic DNA
atgcacaggaagcacctccaggagattccagacctgagtagcaacgttgccaccagcttcacgtggggatgggattccagcaagacttctgaactgctgtcaggcatgggggtctccgccctggagaaagaggagcccgacagtgagaacatcccccaggaactgctctcaaacctgggccacccggagagccccccacggaaacggctgaagagcaaagggagtgacaaagactttgtgattgtccgcaggcctaagctaaatcgagagaactttccaggtgtttcatgggactcccttccggatgagctgctcttgggaatcttttcctgtctgtgcctccctgagctgctaaaggtctctggtgtttgtaagaggtggtatcgcctagcgtctgatgagtctctatggcagaccttagacctcacaggtaaaaatctgcacccggatgtgactggtcggttgctgtctcaaggggtgattgccttccgctgcccacgatcatttatggaccaaccattggctgaacatttcagcccttttcgtgtacagcacatggacctatcgaactcagttatagaagtgtccaccctccacggcatactgtctcagtgttccaagttgcagaatctaagcctggaaggcctgcggctttcggatcccattgtcaatactctcgcaaaaaactcaaatttagtgcgacttaacctttctgggtgttctggattctctgaatttgccctgcagactttgctaagcagctgttccagactggatgagctgaacctctcctggtgttttgatttcactgaaaagcatgtacaggtggctgttgcgcatgtgtcagagaccatcacccagctgaatcttagcggctacagaaagaatctccagaaatcagatctctctactttagttagaagatgccccaatcttgtccatctagacttaagtgatagtgtcatgctaaagaatgactgctttcaggaatttttccagctcaactacctccaacacctatcactcagtcggtgctatgatataatacctgaaactttactattagtgacaagagctggggttaggatccggttggactctgacatcggatgccctcaaacatacagaacttccaaactcaagtccagccataagctattttgccaacatgtcagagtaatctgtatttttgtatgtgatttctacttttatagacttgttttaaaacaa

SEQ ID NO: 6634 - DNA, 1272 bp, Homo sapiens
  source 1..1272: mol_type = genomic DNA
atgcacaggaagcacctccaggagattccagacctgagtagcaacgttgccaccagcttcacgtggggatgggattccagcaagacttctgaactgctgtcaggcatgggggtctccgccctggagaaagaggagcccgacagtgagaacatcccccaggaactgctctcaaacctgggccacccggagagccccccacggaaacggctgaagagcaaagggagtgacaaagactttgtgattgtccgcaggcctaagctaaatcgagagaactttccaggtgtttcatgggactcccttccggatgagctgctcttgggaatcttttcctgtctgtgcctccctgagctgctaaaggtctctggtgtttgtaagaggtggtatcgcctagcgtctgatgagtctctatggcagaccttagacctcacaggtaaaaatctgcacccggatgtgactggtcggttgctgtctcaaggggtgattgccttccgctgcccacgatcatttatggaccaaccattggctgaacatttcagcccttttcgtgtacagcacatggacctatcgaactcagttatagaagtgtccaccctccacggcatactgtctcagtgttccaagttgcagaatctaagcctggaaggcctgcggctttcggatcccattgtcaatactctcgcaaaaaactcaaatttagtgcgacttaacctttctgggtgttctggattctctgaatttgccctgcagactttgctaagcagctgttccagactggatgagctgaacctctcctggtgttttgatttcactgaaaagcatgtacaggtggctgttgcgcatgtgtcagagaccatcacccagctgaatcttagcggctacagaaagaatctccagaaatcagatctctctactttagttagaagatgccccaatcttgtccatctagacttaagtgatagtgtcatgctaaagaatgactgctttcaggaatttttccagctcaactacctccaacacctatcactcagtcggtgctatgatataatacctgaaactttacttgaacttggagaaattcccacactaaaaacactacaagtttttggaatcgtgccagatggtacccttcaactgttaaaggaagcccttcctcatctacagattaattgctcccatttcaccaccattgccaggccaactattggcaacaaaaagaaccaggagatatggggcatcaaatgccgactgacactgcaaaagcccagttgtcta

SEQ ID NO: 6635 - DNA, 1230 bp, Homo sapiens; identical to SEQ ID NO: 6633
  source 1..1230: mol_type = genomic DNA

SEQ ID NO: 6636 - DNA, 816 bp, Homo sapiens
  source 1..816: mol_type = genomic DNA
atgaaaggcaagaaaggtattgttgcagcatctggcagtgagactgaggatgaggacagcatggacattcccttggacctttcttcatccgctggctcaggcaagagaaggagaaggggcaacctacccaaggagtctgtgcagattcttcgggattggctgtatgagcaccgttacaatgcctatccttcagagcaagaaaaagcgttgctgtcccagcaaacacacctgtctacgctacaggtctgtaactggttcatcaacgcccgccgcaggctcctccctgacatgctgagaaaggatggcaaagatccaaatcagttcacaatttcccgccgtggggccaagatttctgaaacgagctctgtggagtccgtgatgggcatcaaaaacttcatgccagctctagaggagaccccatttcattcctgtacagctgggccaaacccaaccctagggaggccactgtctcctaagccgtcatccccgggatcagttttggctcgtccatcagtgatctgccataccactgtgactgcattgaaagatgtccctttctctctctgccagtcggtcggtgtgggacaaaacacagatatacagcagatagcggccaaaaacttcacagacacctctctcatgtacccagaggacacttgtaaatctggaccaagtacgaatacacagagtggtcttttcaacactcctccccctactccaccggacctcaaccaggacttcagtggatttcagcttctagtggatgttgcactcaaacgggctgcagagatggagcttcaggcaaaacttacagct

SEQ ID NO: 6637 - DNA, 1398 bp, Homo sapiens
  source 1..1398: mol_type = genomic DNA
atggaggtggcgccggagcagccgcgctggatggcgcacccggccgtgctgaatgcgcagcaccccgactcacaccacccgggcctggcgcacaactacatggaacccgcgcagctgctgcctccagacgaggtggacgtcttcttcaatcacctcgactcgcagggcaacccctactatgccaaccccgctcacgcgcgggcgcgcgtctcctacagccccgcgcacgcccgcctgaccggaggccagatgtgccgcccacacttgttgcacagcccgggtttgccctggctggacgggggcaaagcagccctctctgccgctgcggcccaccaccacaacccctggaccgtgagccccttctccaagacgccactgcacccctcagctgctggaggccctggaggcccactctctgtgtacccaggggctgggggtgggagcgggggaggcagcgggagctcagtggcctccctcacccctacagcagcccactctggctcccaccttttcggcttcccacccacgccacccaaagaagtgtctcctgaccctagcaccacgggggctgcgtctccagcctcatcttccgcggggggtagtgcagcccgaggagaggacaaggacggcgtcaagtaccaggtgtcactgacggagagcatgaagatggaaagtggcagtcccctgcgcccaggcctagctactatgggcacccagcctgctacacaccaccccatccccacctacccctcctatgtgccggcggctgcccacgactacagcagcggactcttccaccccggaggcttcctggggggaccggcctccagcttcacccctaagcagcgcagcaaggctcgttcctgttcagaaggccgggagtgtgtcaactgtggggccacagccacccctctctggcggcgggacggcaccggccactacctgtgcaatgcctgtggcctctaccacaagatgaatgggcagaaccgaccactcatcaagcccaagcgaagactgacgacaaccaccaccttatggcgccgaaacgccaacggggaccctgtctgcaacgcctgtggcctctactacaagctgcacaatgttaacaggccactgaccatgaagaaggaagggatccagactcggaaccggaagatgtccaacaagtccaagaagagcaagaaaggggcggagtgcttcgaggagctgtcaaagtgcatgcaggagaagtcatcccccttcagtgcagctgccctggctggacacatggcacctgtgggccacctcccgcccttcagccactccggacacatcctgcccactccgacgcccatccacccctcctccagcctctccttcggccacccccacccgtccagcatggtgaccgccatgggc

SEQ ID NO: 6638 - DNA, 1440 bp, Homo sapiens
  source 1..1440: mol_type = genomic DNA
atggaggtggcgccggagcagccgcgctggatggcgcacccggccgtgctgaatgcgcagcaccccgactcacaccacccgggcctggcgcacaactacatggaacccgcgcagctgctgcctccagacgaggtggacgtcttcttcaatcacctcgactcgcagggcaacccctactatgccaaccccgctcacgcgcgggcgcgcgtctcctacagccccgcgcacgcccgcctgaccggaggccagatgtgccgcccacacttgttgcacagcccgggtttgccctggctggacgggggcaaagcagccctctctgccgctgcggcccaccaccacaacccctggaccgtgagccccttctccaagacgccactgcacccctcagctgctggaggccctggaggcccactctctgtgtacccaggggctgggggtgggagcgggggaggcagcgggagctcagtggcctccctcacccctacagcagcccactctggctcccaccttttcggcttcccacccacgccacccaaagaagtgtctcctgaccctagcaccacgggggctgcgtctccagcctcatcttccgcggggggtagtgcagcccgaggagaggacaaggacggcgtcaagtaccaggtgtcactgacggagagcatgaagatggaaagtggcagtcccctgcgcccaggcctagctactatgggcacccagcctgctacacaccaccccatccccacctacccctcctatgtgccggcggctgcccacgactacagcagcggactcttccaccccggaggcttcctggggggaccggcctccagcttcacccctaagcagcgcagcaaggctcgttcctgttcagaaggccgggagtgtgtcaactgtggggccacagccacccctctctggcggcgggacggcaccggccactacctgtgcaatgcctgtggcctctaccacaagatgaatgggcagaaccgaccactcatcaagcccaagcgaagactgtcggccgccagaagagccggcacctgttgtgcaaattgtcagacgacaaccaccaccttatggcgccgaaacgccaacggggaccctgtctgcaacgcctgtggcctctactacaagctgcacaatgttaacaggccactgaccatgaagaaggaagggatccagactcggaaccggaagatgtccaacaagtccaagaagagcaagaaaggggcggagtgcttcgaggagctgtcaaagtgcatgcaggagaagtcatcccccttcagtgcagctgccctggctggacacatggcacctgtgggccacctcccgcccttcagccactccggacacatcctgcccactccgacgcccatccacccctcctccagcctctccttcggccacccccacccgtccagcatggtgaccgccatgggc

SEQ ID NO: 6639 - DNA, 894 bp, Homo sapiens
  source 1..894: mol_type = genomic DNA
atggagaacttccaaaaggtggaaaagatcggagagggcacgtacggagttgtgtacaaagccagaaacaagttgacgggagaggtggtggcgcttaagaaaatccgcctggacactgagactgagggtgtgcccagtactgccatccgagagatctctctgcttaaggagcttaaccatcctaatattgtcaagctgctggatgtcattcacacagaaaataaactctacctggtttttgaatttctgcaccaagatctcaagaaattcatggatgcctctgctctcactggcattcctcttcccctcatcaagagctatctgttccagctgctccagggcctagctttctgccattctcatcgggtcctccaccgagaccttaaacctcagaatctgcttattaacacagagggggccatcaagctagcagactttggactagccagagcttttggagtccctgttcgtacttacacccatgaggtggtgaccctgtggtaccgagctcctgaaatcctcctgggctgcaaatattattccacagctgtggacatctggagcctgggctgcatctttgctgagatggtgactcgccgggccctattccctggagattctgagattgaccagctcttccggatctttcggactctggggaccccagatgaggtggtgtggccaggagttacttctatgcctgattacaagccaagtttccccaagtgggcccggcaagattttagtaaagttgtacctcccctggatgaagatggacggagcttgttatcgcaaatgctgcactacgaccctaacaagcggatttcggccaaggcagccctggctcaccctttcttccaggatgtgaccaagccagtaccccatcttcgactc

SEQ ID NO: 6640 - DNA, 843 bp, Homo sapiens
  source 1..843: mol_type = genomic DNA
atgagtcagcagcggccggcgaggaagttacccagtctcctcctggacccgacggaggagacggttcgccgtcggtgccgagaccccatcaacgtggagggcctgctgccatcaaaaataaggattaatttagaagataatgtacaatatgtgtccatgagaaaagctctaaaagtgaagagacctcgttttgatgtatcgctggtttatttaactcgaaaatttatggatcttgtcagatctgctcccgggggtattcttgacttaaacaaggttgcaacgaaactgggagtccgaaagcggagagtgtatgacatcaccaatgtcttagatggaatcgacctcgttgaaaagaaatccaagaaccatattagatggataggatctgatcttagcaattttggagcagttccccaacaaaagaagctacaggaggaactttctgacttatcagcaatggaagatgctttggatgagttaattaaggattgtgctcagcagctgtttgagttaacagatgacaaagaaaatgaaagactagcatatgtgacctatcaagacattcatagcattcaggccttccatgaacagatcgtcattgcagttaaagctccagcagaaaccagattggatgttccagctcccagagaagactctatcacagtgcacataaggagcaccaacggacctatcgatgtctatttgtgtgaagtggagcagggtcagaccagtaacaaaaggtctgaaggtgtcgggacctcttcatctgagagcactcatccagaaggccctgaggaagaagaaaatcctcagcaaagtgaagaattgcttgaagtaagcaac

SEQ ID NO: 6641 - DNA, 528 bp, Homo sapiens
  source 1..528: mol_type = genomic DNA
atggcttcctcgtctggcaacgatgatgatctcactatccccagagctgctatcaataaaatgatcaaagagactcttcctaatgtccgggtggccaacgatgctcgagagctggtggtgaactgctgcactgaattcattcaccttatatcttctgaagccaatgagatttgtaacaaatcggaaaagaagaccatctcaccagagcatgtcatacaagcactagaaagtttgggatttggctcttacatcagtgaagtaaaagaagtcttgcaagagtgtaaaacagtagcattaaaaagaagaaaggccagttctcgtttggaaaaccttggcattcctgaagaagagttattgagacagcaacaagaattatttgcaaaagctagacagcaacaagcagaattggcccaacaggaatggcttcaaatgcagcaagctgcccaacaagcccagcttgctgctgcctcagccagtgcatctaatcaggcgggatcttctcaggatgaagaagatgatgatgatatc

SEQ ID NO: 6642 - DNA, 1005 bp, Homo sapiens
  source 1..1005: mol_type = genomic DNA
atgtccacagaaggaggatttggtggtactagcagcagtgatgcccagcaaagcctacagtcgttctggcctcgggtcatggaagaaatccggaatttaacagtgaaagacttccgagtgcaggaactcccactggctcgtattaagaagattatgaaactggatgaagatgtgaagatgatcagtgcagaagcgcctgtactctttgccaaggcagcccagatttttatcacagagttgactcttcgagcctggattcacacagaagataacaagcgccggactctacagagaaatgatatcgccatggcaattacaaaatttgatcagtttgattttctcatcgatattgttccaagagatgaactgaaacctccaaagcgtcaggaggaggtgcgccagtctgtaactcctgccgagccagtccagtactatttcacgctggctcagcaacccaccgctgtccaagtccagggccagcagcaaggccagcagaccaccagctccacgaccaccatccagcctgggcagatcatcatcgcacagcctcagcagggccagaccacacctgtgacaatgcaggttggagaaggtcagcaggtgcagattgtccaggctcagccacagggtcaagcccaacaggcccagagtggcactggacagaccatgcaggtgatgcagcagatcatcactaacacaggagagatccagcagatcccggtgcagctgaatgccggccagctgcagtatatccgcttagcccagcctgtatcaggcactcaagttgtgcagggacagatccagacacttgccaccaatgctcaacagattacacagacagaggtccagcaaggacagcagcagttcagccagttcacagatggacagcagctctaccagatccagcaagtcaccatgcctgcgggccaggacctcgcccagcccatgttcatccagtcagccaaccagccctccgacgggcaggccccccaggtgaccggcgac

SEQ ID NO: 6643 - DNA, 1110 bp, Homo sapiens
  source 1..1110: mol_type = genomic DNA
atgccaattcatgaacttctcagcctttatggttatggtagtactgttcgactacctgaagaagatgaggaagaggaagaagaggaagaagaaggtgaagatgatgaagatgctgataatgatgacaacagtggctgtagtggggaaaataaagaggagaatataaaggattcatcaggtcaggaggatgaaactcagtcttccaatgatgatccatcacaatctgttgcttctcaagatgcccaggaaataatccgcccacgtcgatgtaaatattttgatacaaatagtgaagtagaagaagaatctgaagaagatgaagattatattccatcagaagactggaaaaaggagattatggtgggctccatgtttcaagcagaaattccagttggcatttgtagatacaaagaaaatgaaaaagtatatgaaaatgatgatcagctcctgtgggaccctgagtacttaccagaagataaagtgattatatttcttaaagatgcatctagaagaacaggtgatgagaagggtgtagaagcaattcctgaaggatctcacataaaagacaatgaacaggctttatatgaattggttaaatgcaattttgatacagaagaagcattgagaagattaagatttaatgtaaaagcagctagagaggaattatctgtttggacagaggaagagtgtagaaattttgaacaagggctgaaggcctatggaaaggattttcatttgattcaggctaataaagtccgaacaaggtcagttggtgaatgtgtagcattctattacatgtggaaaaaatctgaacgttatgatttctttgctcagcaaacacgatttggaaagaagaaatataatcttcatcctggtgtaacggattacatggatcgtcttctagacgaaagtgaaagtgctgcatctagtcgagcaccatcccctcccccaactgcatcaaacagtagtaacagccagtctgagaaagaagatggcactgtaagcactgctaatcaaaatggagtgtcatctaatggaccaggcatactccaaatgcttcttccagttcatttttcagccatcagttcaagagccaatgcctttttaaaa

SEQ ID NO: 6644 - DNA, 1032 bp, Homo sapiens
  source 1..1032: mol_type = genomic DNA
atgcatcggactacacggatcaaaatcacagagctgaacccccacctcatgtgtgccctctgcggggggtacttcatcgacgccaccactatcgtggagtgcctgcattccttctgcaaaacctgcatcgtgcgctacctggagaccaacaaatactgccccatgtgtgacgtgcaggtccataaaacccggccgctgctgagcatcaggtctgacaaaacacttcaagacattgtctacaaattggtccctgggctttttaaagatgagatgaaacggcggcgggatttctatgcagcgtaccccctgacggaggtccccaacggctccaatgaggaccgcggcgaggtcttggagcaggagaagggggctctgagtgatgatgagattgtcagcctctccatcgaattctacgaaggtgccagggaccgggacgagaagaagggccccctggagaatggggatggggacaaagagaaaacaggggtgcgcttcctgcgatgcccagcagccatgaccgtcatgcatcttgccaagtttctccgcaacaagatggatgtgcccagcaagtacaaggtggaggttctgtacgaggacgagccactgaaggaatactacaccctcatggacatcgcctacatctacccctggcggcggaacgggcctctccccctcaagtaccgtgtccagccagcctgcaagcggctcaccctagccacggtgcccaccccctccgagggcaccaacaccagcggggcgtccgagtgtgagtcagtcagcgacaaggctcccagccctgccaccctgccagccacctcctcctccctgcccagcccagccaccccatcccatggctctcccagttcccatgggcctccagccacccaccctacctcccccactcccccttcgacagccagtggggccaccacagctgccaacgggggtagcttgaactgcctgcagacaccatcctccaccagcagggggcgcaagatgactgtcaacggcgctcccgtgccccccttaact

SEQ ID NO: 6645 - DNA, 1656 bp, Homo sapiens
  source 1..1656: mol_type = genomic DNA
atggacaatatgtctattacgaatacaccaacaagtaatgatgcctgtctgagcattgtgcatagtttgatgtgccatagacaaggtggagagagtgaaacatttgcaaaaagagcaattgaaagtttggtaaagaagctgaaggagaaaaaagatgaattggattctttaataacagctataactacaaatggagctcatcctagtaaatgtgttaccatacagagaacattggatgggaggcttcaggtggctggtcggaaaggatttcctcatgtgatctatgcccgtctctggaggtggcctgatcttcacaaaaatgaactaaaacatgttaaatattgtcagtatgcgtttgacttaaaatgtgatagtgtctgtgtgaatccatatcactacgaacgagttgtatcacctggaattgatctctcaggattaacactgcagagtaatgctccatcaagtatgatggtgaaggatgaatatgtgcatgactttgagggacagccatcgttgtccactgaaggacattcaattcaaaccatccagcatccaccaagtaatcgtgcatcgacagagacatacagcaccccagctctgttagccccatctgagtctaatgctaccagcactgccaactttcccaacattcctgtggcttccacaagtcagcctgccagtatactggggggcagccatagtgaaggactgttgcagatagcatcagggcctcagccaggacagcagcagaatggatttactggtcagccagctacttaccatcataacagcactaccacctggactggaagtaggactgcaccatacacacctaatttgcctcaccaccaaaacggccatcttcagcaccacccgcctatgccgccccatcccggacattactggcctgttcacaatgagcttgcattccagcctcccatttccaatcatcctgctcctgagtattggtgttccattgcttactttgaaatggatgttcaggtaggagagacatttaaggttccttcaagctgccctattgttactgttgatggatacgtggacccttctggaggagatcgcttttgtttgggtcaactctccaatgtccacaggacagaagccattgagagagcaaggttgcacataggcaaaggtgtgcagttggaatgtaaaggtgaaggtgatgtttgggtcaggtgccttagtgaccacgcggtctttgtacagagttactacttagacagagaagctgggcgtgcacctggagatgctgttcataagatctacccaagtgcatatataaaggtctttgatttgcgtcagtgtcatcgacagatgcagcagcaggcggctactgcacaagctgcagcagctgcccaggcagcagccgtggcaggaaacatccctggcccaggatcagtaggtggaatagctccagctatcagtctgtcagctgctgctggaattggtgttgatgaccttcgtcgcttatgcatactcaggatgagttttgtgaaaggctggggaccggattacccaagacagagcatcaaagaaacaccttgctggattgaaattcacttacaccgggccctccagctcctagacgaagtacttcataccatgccgattgcagacccacaacctttagac

SEQ ID NO: 6646 - DNA, 1377 bp, Homo sapiens
  source 1..1377: mol_type = genomic DNA
atggcctctggggtggaagtcctgcgcttccagctgcccggccacgaggccgcaacgctacggaacatgaaccagctccgggcagaggagcggttctgcgacgtgaccattgtggccgacagcctcaagtttcgaggccacaaggtcatcttggccgcctgctcacccttcctgcgggaccagttcctgctgaaccccagctcggagctgcaggtctccctgatgcacagtgcacgcatcgtggccgacttgctcctctcctgctacacgggcgccttggaattcgctgttagggacatcgtcaactaccttacagccgcctcctacctgcagatggagcacgtggtggagaaatgccggaatgccctcagccagttcattgagcccaaaataggcctcaaagaggatggggtcagtgaggctagccttgtgagcagcatcagcgccaccaagtccctcctccctccagccaggaccccaaagccagccccgaagcccccacccccacctcctctaccccctccactcctgcggccagtgaagctggagttcccactggatgaagacttggagctgaaagccgaggaagaggatgaggatgaggatgaggacgtgtctgacatctgcatcgtcaaggtggagtcggccctggaggtggcacaccggctcaaaccccctggaggcctgggagggggtctgggcattggaggctccgtgggtggccaccttggggagctggcccagagcagcgttccccccagcactgtagccccaccgcagggtgtggtgaaggcctgctatagcctgtcggaagatgcagaaggggagggcctgctgttgattcccggaggccgggccagcgtgggggccacctcgggcctggtggaagcagcagcggtggccatggctgcccggggggcggggggcagcctgggggcggggggcagccggggacccctgcctgggggcttctcaggtggaaaccccttaaagaacatcaagtgcaccaagtgcccggaagtgttccagggcgtggagaagctggtcttccacatgcgggcgcagcacttcatcttcatgtgccctcgctgtggcaagcagttcaaccacagcagcaacctcaaccgccacatgaacgtgcatcgtggtgtcaagtcacactcgtgcggcatctgcggcaagtgcttcacacagaagtccacccttcacgaccacctcaacctgcactcgggagcgcggccctaccgctgctcctactgcgacgtgcgcttcgcccacaagcctgccattaggcggcacctcaaggagcaacacggcaagaccacggccgagaacgtgctggaggccagtgtggccgagattaacgtcctcatccgc

SEQ ID NO: 6647 - DNA, 1395 bp, Homo sapiens
  source 1..1395: mol_type = genomic DNA
atgaatgtgacaagtttattttcctttacaagtccagctgtgaagagacttcttgggtggaaacagggcgatgaagaagaaaaatgggcagagaaagctgttgatgctttggtgaaaaaactgaagaaaaagaaaggtgccatggaggaactggaaaaggccttgagctgcccagggcaaccgagtaactgtgtcaccattccccgctctctggatggcaggctgcaagtctcccaccggaagggactgcctcatgtcatttactgccgtgtgtggcgctggcccgatcttcagagccaccatgaactaaaaccactggaatgctgtgagtttccttttggttccaagcagaaggaggtctgcatcaatccctaccactataagagagtagaaagccctgtacttcctcctgtgctggttccaagacacagcgaatataatcctcagcacagcctcttagctcagttccgtaacttaggacaaaatgagcctcacatgccactcaacgccacttttccagattctttccagcaacccaacagccacccgtttcctcactctcccaatagcagttacccaaactctcctgggagcagcagcagcacctaccctcactctcccaccagctcagacccaggaagccctttccagatgccagctgatacgcccccacctgcttacctgcctcctgaagaccccatgacccaggatggctctcagccgatggacacaaacatgatggcgcctcccctgccctcagaaatcaacagaggagatgttcaggcggttgcttatgaggaaccaaaacactggtgctctattgtctactatgagctcaacaatcgtgtgggtgaagcgttccatgcctcctccacaagtgtgttggtggatggtttcactgatccttccaacaataagaaccgtttctgccttgggctgctctccaatgttaaccggaattccactattgaaaacaccaggcggcatattggaaaaggagttcatctttattatgttggaggggaggtgtatgccgaatgccttagtgacagtagcatctttgtgcaaagtcggaactgcaactaccatcatggatttcatcctactactgtttgcaagatccctagtgggtgtagtctgaaaatttttaacaaccaagaatttgctcagttattggcacagtctgtgaaccatggatttgagacagtctatgagcttacaaaaatgtgtactatacgtatgagctttgtgaagggctggggagcagaataccaccgccaggatgttactagcaccccctgctggattgagatacatctgcacggccccctccagtggctggataaagttcttactcaaatgggttcacctcataatcctatttcatctgtatct

SEQ ID NO: 6648 - DNA, 939 bp, Homo sapiens
  source 1..939: mol_type = genomic DNA
atgtacgtgagctacctcctggacaaggacgtgagcatgtaccctagctccgtgcgccactctggcggcctcaacctggcgccgcagaacttcgtcagccccccgcagtacccggactacggcggttaccacgtggcggccgcagctgcagcggcagcgaacttggacagcgcgcagtccccggggccatcctggccggcagcgtatggcgccccactccgggaggactggaatggctacgcgcccggaggcgccgcggccgccgccaacgccgtggctcacggcctcaacggtggctccccggccgcagccatgggctacagcagccccgcagactaccatccgcaccaccacccgcatcaccacccgcaccacccggccgccgcgccttcctgcgcttctgggctgctgcaaacgctcaaccccggccctcctgggcccgccgccaccgctgccgccgagcagctgtctcccggcggccagcggcggaacctgtgcgagtggatgcggaagccggcgcagcagtccctcggcagccaagtgaaaaccaggacgaaagacaaatatcgagtggtgtacacggaccaccagcggctggagctggagaaggagtttcactacagtcgctacatcaccatccggaggaaagccgagctagccgccacgctggggctctctgagaggcaggttaaaatctggtttcagaaccgcagagcaaaggagaggaaaatcaacaagaagaagttgcagcagcaacagcagcagcagccaccacagccgcctccgccgccaccacagcctccccagcctcagccaggtcctctgagaagtgtcccagagcccttgagtccggtgtcttccctgcaagcctcagtgcctggctctgtccctggggttctggggccaactgggggggtgctaaaccccaccgtcacccag

SEQ ID NO: 6649 - DNA, 1581 bp, Homo sapiens
  source 1..1581: mol_type = genomic DNA
atgactgcagaattgagagaagccatggccctagccccatggggcccagtgaaggtgaaaaaggaggaggaagaagaagaaaacttcccaggtcaggcatccagccaacaagtgcactccgagaacatcaaagtctgggccccagtgcagggtcttcagacaggccttgatggatcagaagaggaagaaaagggtcagaacatatcctgggatatggcggtagtcctgaaagcaactcaggaggcacctgctgcttcaacccttggcagctactcattaccagggactctggccaagagtgagatactggagactcatgggaccatgaactttctaggtgctgaaaccaagaacctacagttactggttccaaaaactgagatatgtgaggaagctgaaaaacccctcatcatatcagaaagaatccagaaagctgatcctcaaggacctgagttaggagaagcttgtgaaaagggaaacatgttaaagaggcagagaataaagagagaaaagaaagatttcagacaagtgatagtgaatgactgtcacttacctgaaagcttcaaagaagaggaaaaccagaaatgtaagaaatctggaggaaaatatagccttaattctggcgctgttaaaaatccaaaaacccagcttggacaaaagccttttacgtgtagcgtgtgtgggaaaggatttagtcagagtgcaaacctcgttgtgcatcagcgaatccacactggagagaaaccctttgaatgtcatgagtgtgggaaggccttcattcagagtgcaaacctcgttgtgcatcagagaatccacactggacagaaaccttatgtttgctcaaaatgtgggaaagccttcactcagagttcaaatctgactgtacatcaaaaaatccactccttagaaaaaacttttaagtgcaatgaatgtgagaaagcctttagttacagctcacaacttgctcggcaccagaaagtccacattacggaaaaatgctatgaatgtaatgaatgtgggaaaacatttactaggagctcaaacctcattgtccaccagaggatccacactggggagaagccctttgcctgtaacgactgtggcaaagcctttacccagagtgcaaatcttattgtacatcagcgaagccatactggtgagaagccatatgagtgtaaagagtgtgggaaagcctttagttgtttttcacaccttattgtgcaccagagaattcacactgcagagaaaccttacgactgcagcgaatgtgggaaagccttcagtcagctctcttgccttattgtccaccagagaattcacagtggagatcttccttacgtgtgtaatgaatgtgggaaggccttcacatgtagctcatacctacttattcatcagagaattcataatggagaaaaaccttacacatgtaatgagtgtgggaaggccttcagacagaggtcgagcctcaccgtgcaccagagaacccacactggggagaagccctatgaatgtgagaagtgtggtgcagctttcatttccaactcacacctcatgcgacaccatagaacccatcttgttgaa

SEQ ID NO: 6650 - DNA, 1056 bp, Homo sapiens
  source 1..1056: mol_type = genomic DNA
atggccagtagggaagatgagctgaggaactgtgtggtatgtggggaccaagccacaggctaccactttaatgcgctgacttgtgagggctgcaagggtttcttcaggagaacagtcagcaaaagcattggtcccacctgcccctttgctggaagctgtgaagtcagcaagactcagaggcgccactgcccagcctgcaggttgcagaagtgcttagatgctggcatgaggaaagacatgatactgtcggcagaagccctggcattgcggcgagcaaagcaggcccagcggcgggcacagcaaacacctgtgcaactgagtaaggagcaagaagagctgatccggacactcctgggggcccacacccgccacatgggcaccatgtttgaacagtttgtgcagtttaggcctccagctcatctgttcatccatcaccagcccttgcccaccctggcccctgtgctgcctctggtcacacacttcgcagacatcaacactttcatggtactgcaagtcatcaagtttactaaggacctgcctgtcttccgttccctgcccattgaagaccagatctcccttctcaagggagcagctgtggaaatctgtcacatcgtactcaataccactttctgtctccaaacacaaaacttcctctgcgggcctcttcgctacacaattgaagatggagcccgtgtatctcccacagtggggttccaggtagagtttttggagttgctctttcacttccatggaacactacgaaaactgcagctccaagagcctgagtatgtgctcttggctgccatggccctcttctctcctgaccgacctggagttacccagagagatgagattgatcagctgcaagaggagatggcactgactctgcaaagctacatcaagggccagcagcgaaggccccgggatcggtttctgtatgcgaagttgctaggcctgctggctgagctccggagcattaatgaggcctacgggtaccaaatccagcacatccagggcctgtctgccatgatgccgctgctccaggagatctgcagc

SEQ ID NO: 6651 - DNA, 1719 bp, Homo sapiens
  source 1..1719: mol_type = genomic DNA
atggatgctaagtcactaactgcctggtcccggacactggtgaccttcaaggatgtatttgtggacttcaccagggaggagtggaagctgctggacactgctcagcagatcgtgtacagaaatgtgatgctggagaactataagaacctggtttccttgggttatcagcttactaagccagatgtgatcctccggttggagaagggagaagagccctggctggtggagagagaaattcaccaagagacccatcctgattcagagactgcatttgaaatcaaatcatcagtttccagcaggagcatttttaaagataagcaatcctgtgacattaaaatggaaggaatggcaaggaatgatctctggtatttgtcattagaagaagtctggaaatgtagagaccagttagacaagtatcaggaaaacccagagagacatttgaggcaagtggcattcacccaaaagaaagtacttactcaggagagagtctctgaaagtggtaaatatgggggaaactgtcttcttcctgctcagctagtactgagagagtatttccataaacgtgactcacatactaaaagtttaaaacatgatttagttcttaatggtcatcaggacagttgtgcaagtaacagtaatgaatgtggtcaaactttctgtcaaaacattcaccttattcagtttgcaagaactcacacaggtgataaatcctacaaatgccctgataatgacaactctcttactcatggttcatctcttggtatatcaaagggcatacatagagagaaaccctatgaatgtaaggaatgtggaaaattcttcagctggcgctctaatcttactaggcatcagcttattcatactggagaaaaaccgtatgagtgtaaagaatgtggaaagtctttcagccggagttctcacctcattggacatcaaaagacccatactggtgaggaaccctatgaatgtaaagaatgtggaaaatccttcagctggttctctcaccttgttactcatcagagaactcatacaggagacaaactgtacacatgtaatcagtgtgggaaatcttttgttcatagctctaggcttattagacaccagaggacacatactggagagaaaccctatgaatgtcctgaatgtgggaaatctttcagacagagcacacatctcattctgcatcagagaacccatgtgagagtgaggccctatgaatgcaatgaatgtggaaagtcttacagccagagatctcaccttgttgtgcatcatagaattcacactggactaaaaccttttgagtgtaaggattgtggaaaatgttttagtcgaagctctcacctttattcacatcaaagaacccacactggagagaaaccatatgagtgtcatgattgtggaaaatctttcagccagagttctgcccttattgtgcatcagaggatacacactggagagaaaccatatgaatgctgtcagtgtgggaaagccttcatccggaagaatgacctcattaagcaccagagaattcatgttggagaagagacctataaatgtaatcaatgtggcattatcttcagccagaactctccatttatagttcatcaaatagctcacactggagagcagttcttaacatgcaatcaatgtgggacagcgcttgttaatacctctaaccttattggataccagacaaatcatattagagaaaatgcttac

SEQ ID NO: 6652 - DNA, 690 bp, Homo sapiens
  source 1..690: mol_type = genomic DNA
atgaagcagagttcgaacgtgccggctttcctcagcaagctgtggacgcttgtggaggaaacccacactaacgagttcatcacctggagccagaatggccaaagttttctggtcttggatgagcaacgatttgcaaaagaaattcttcccaaatatttcaagcacaataatatggcaagctttgtgaggcaactgaatatgtatggtttccgtaaagtagtacatatcgactctggaattgtaaagcaagaaagagatggtcctgtagaatttcagcatccttacttcaaacaaggacaggatgacttgttggagaacattaaaaggaaggtttcatcttcaaaaccagaagaaaataaaattcgtcaggaagatttaacaaaaattataagtagtgctcagaaggttcagataaaacaggaaactattgagtccaggctttctgaattaaaaagtgagaatgagtccctttggaaggaggtgtcagaattacgagcaaagcatgcacaacagcaacaagttattcgaaagattgtccagtttattgttacattggttcaaaataaccaacttgtgagtttaaaacgtaaaaggcctctacttctaaacactaatggagcccaaaagaagaacctgtttcagcacatagtcaaagaaccaactgataatcatcatcataaagtaattttt

SEQ ID NO: 6653 - DNA, 1497 bp, Homo sapiens
  source 1..1497: mol_type = genomic DNA
atggggcggaagaaaatacaaatcacacgcataatggatgaaaggaaccgacaggtcacttttacaaagagaaagtttggattaatgaagaaagcctatgaacttagtgtgctctgtgactgtgaaatagcactcatcattttcaacagctctaacaaactgtttcaatatgctagcactgatatggacaaagttcttctcaagtatacagaatataatgaacctcatgaaagcagaaccaactcggatattgttgaggctctgaacaagaaggaacacagagggtgcgacagcccagaccctgatacttcatatgtgctaactccacatacagaagaaaaatataaaaaaattaatgaggaatttgataatatgatgcggaatcataaaatcgcacctggtctgccacctcagaacttttcaatgtctgtcacagttccagtgaccagccccaatgctttgtcctacactaacccagggagttcactggtgtccccatctttggcagccagctcaacgttaacagattcaagcatgctctctccacctcaaaccacattacatagaaatgtgtctcctggagctcctcagagaccaccaagtactggcaatgcaggtgggatgttgagcactacagacctcacagtgccaaatggagctggaagcagtccagtggggaatggatttgtaaactcaagagcttctccaaatttgattggagctactggtgcaaatagcttaggcaaagtcatgcctacaaagtctccccctccaccaggtggtggtaatcttggaatgaacagtaggaaaccagatcttcgagttgtcatccccccttcaagcaagggcatgatgcctccactaaatacccagaggatcagtagttctcaagccactcaacctcttgctaccccagtcgtgtctgtgacaaccccaagcttgcctccgcaaggacttgtgtactcagcaatgccgactgcctacaacactgattattcactgaccagcgctgacctgtcagcccttcaaggcttcaactcgccaggaatgctgtcgctgggacaggtgtcggcctggcagcagcaccacctaggacaagcagccctcagctctcttgttgctggagggcagttatctcagggttccaatttatccattaataccaaccaaaacatcagcatcaagtccgaaccgatttcacctcctcgggatcgtatgaccccatcgggcttccagcagcagcagcagcagcagcagcagcagcagccgccgccaccaccgcagccccagccacaacccccgcagccccagccccgacaggaaatggggcgctcccctgtggacagtctgagcagctctagtagctcctatgatggcagtgatcgggaggatccacggggcgacttccattctccaattgtgcttggccgacccccaaacactgaggacagagaaagcccttctgtaaagcgaatgaggatggacgcgtgggtgacc

SEQ ID NO: 6654 - DNA, 450 bp, Homo sapiens
  source 1..450: mol_type = genomic DNA
atgagcaagatatcgcagcaaaacagcactccaggggtgaacggaattagtgttatccatacccaggcacatgccagcggcttacagcaggttcctcagctggtgcctgctggccctgggggaggaggcaaagctgtggctcccagcaagcagagcaaaaagagttcgcccatggatcgaaacagtgacgagtatcggcaacgccgagagaggaacaacatggctgtgaaaaagagccggttgaaaagcaagcagaaagcacaagacacactgcagagagtcaatcagctcaaagaagagaatgaacggttggaagcaaaaatcaaattgctgaccaaggaattaagtgtactcaaagatttgtttcttgagcatgcacacaaccttgcagacaacgtacagtccattagcactgaaaatacgacagcagatggcgacaatgcaggacag

SEQ ID NO: 6655 - DNA, 1404 bp, Homo sapiens
  source 1..1404: mol_type = genomic DNA
atggtggacacggaaagcccactctgccccctctccccactcgaggccggcgatctagagagcccgttatctgaagagttcctgcaagaaatgggaaacatccaagagatttcgcaatccatcggcgaggatagttctggaagctttggctttacggaataccagtatttaggaagctgtcctggctcagatggctcggtcatcacggacacgctttcaccagcttcgagcccctcctcggtgacttatcctgtggtccccggcagcgtggacgagtctcccagtggagcattgaacatcgaatgtagaatctgcggggacaaggcctcaggctatcattacggagtccacgcgtgtgaaggctgcaagggcttctttcggcgaacgattcgactcaagctggtgtatgacaagtgcgaccgcagctgcaagatccagaaaaagaacagaaacaaatgccagtattgtcgatttcacaagtgcctttctgtcgggatgtcacacaacgcgattcgttttggacgaatgccaagatctgagaaagcaaaactgaaagcagaaattcttacctgtgaacatgacatagaagattctgaaactgcagatctcaaatctctggccaagagaatctacgaggcctacttgaagaacttcaacatgaacaaggtcaaagcccgggtcatcctctcaggaaaggccagtaacaatccaccttttgtcatacatgatatggagacactgtgtatggctgagaagacgctggtggccaagctggtggccaatggcatccagaacaaggaggcggaggtccgcatctttcactgctgccagtgcacgtcagtggagaccgtcacggagctcacggaattcgccaaggccatcccaggcttcgcaaacttggacctgaacgatcaagtgacattgctaaaatacggagtttatgaggccatattcgccatgctgtcttctgtgatgaacaaagacgggatgctggtagcgtatggaaatgggtttataactcgtgaattcctaaaaagcctaaggaaaccgttctgtgatatcatggaacccaagtttgattttgccatgaagttcaatgcactggaactggatgacagtgatatctccctttttgtggctgctatcatttgctgtggagatcgtcctggccttctaaacgtaggacacattgaaaaaatgcaggagggtattgtacatgtgctcagactccacctgcagagcaaccacccggacgatatctttctcttcccaaaacttcttcaaaaaatggcagacctccggcagctggtgacggagcatgcgcagctggtgcagatcatcaagaagacggagtcggatgctgcgctgcacccgctactgcaggagatctacagggacatgtac

SEQ ID NO: 6656 - DNA, 732 bp, Homo sapiens
  source 1..732: mol_type = genomic DNA
atgacggagccgggcgcctctcccgaggacccttgggtcaaggtggagtatgcctacagcgacaacagcctggaccccgggctttttgtagaaagcacccgcaaggggagtgtagtgtccagagctaatagcatcggttccaccagtgcctcttctgtccccaacacagatgatgaggacagtgattaccaccaggaggcctacaaggagtcctacaaagaccggcggcggcgcgcacacactcaggctgagcagaagaggagggacgccatcaagagaggctatgatgaccttcagaccatcgtccccacttgccagcagcaggacttctccattggctcccaaaagctcagcaaagccatcgttctacaaaagaccattgactacattcagtttttgcacaaggagaagaaaaagcaggaggaggaggtgtccacgttacgcaaggatgtcaccgccctaaagatcatgaaagtgaactatgagcagattgtgaaggcacaccaggacaacccccatgaaggggaggaccaggtctctgaccaggtcaagttcaacgtgtttcaaggcatcatggattccctgttccagtccttcaatgcctccatctcagtggccagcttccaggagctgtcagcatgtgtcttcagctggatcgaggagcactgtaagcctcagaccctgcgggagattgtgattggcgtcctgcaccaattgaaaaaccagctttac

SEQ ID NO: 6657 - DNA, 621 bp, Homo sapiens
  source 1..621: mol_type = genomic DNA
atgtacctccacacagagggcttctctgggccctctccaggtgacggggccatgggctatggctatgagaaacctctgcgaccattcccagatgatgtctgcgttgtccctgagaaatttgaaggagacatcaagcaggaaggggtcggtgcatttcgagaggggccgccctaccagcgccggggtgccctgcagctgtggcaatttctggtggccttgctggatgacccaacaaatgcccatttcattgcctggacgggccggggaatggagttcaagctcattgagcctgaggaggtcgccaggctctggggcatccagaagaaccggccagccatgaattacgacaagctgagccgctcgctccgatactattatgagaaaggcatcatgcagaaggtggctggtgagcgttacgtgtacaagtttgtgtgtgagcccgaggccctcttctctttggccttcccggacaatcagcgtccagctctcaaggctgagtttgaccggcctgtcagtgaggaggacacagtccctttgtcccacttggatgagagccccgcctacctcccagagctggctggccccgcccagccatttggccccaagggtggctactcttac

SEQ ID NO: 6658 - DNA, 642 bp, Homo sapiens
  source 1..642: mol_type = genomic DNA
atgacgcctcaaccctcgggtgcgcccactgtccaagtgacccgtgagacggagcggtccttccccagagcctcggaagacgaagtgacctgccccacgtccgccccgcccagccccactcgcacacgggggaactgcgcagaggcggaagagggaggctgccgaggggccccgaggaagctccgggcacggcgcgggggacgcagccggcctaagagcgagttggcactgagcaagcagcgacggagtcggcgaaagaaggccaacgaccgcgagcgcaatcgaatgcacaacctcaactcggcactggacgccctgcgcggtgtcctgcccaccttcccagacgacgcgaagctcaccaagatcgagacgctgcgcttcgcccacaactacatctgggcgctgactcaaacgctgcgcatagcggaccacagcttgtacgcgctggagccgccggcgccgcactgcggggagctgggcagcccaggcggttcccccggggactgggggtccctctactccccagtctcccaggctggcagcctgagtcccgccgcgtcgctggaggagcgacccgggctgctgggggccaccttttccgcctgcttgagcccaggcagtctggctttctcagattttctg

SEQ ID NO: 6659 - DNA, 2229 bp, Homo sapiens
  source 1..2229: mol_type = genomic DNA
atgaacaatccgtcagaaaccagtaaaccatctatggagagtggagatggcaacacaggcacacaaaccaatggtctggactttcagaagcagcctgtgcctgtaggaggagcaatctcaacagcccaggcgcaggctttccttggacatctccatcaggtccaactcgctggaacaagtttacaggctgctgctcagtctttaaatgtacagtctaaatctaatgaagaatcgggggattcgcagcagccaagccagccttcccagcagccttcagtgcaggcagccattccccagacccagcttatgctagctggaggacagataactgggcttactttgacgcctgcccagcaacagttactactccagcaggcacaggcacaggcacagctgctggctgctgcagtgcagcagcactccgccagccagcagcacagtgctgctggagccaccatctccgcctctgctgccacgcccatgacgcagatccccctgtctcagcccatacagatcgcacaggatcttcaacaactgcaacagcttcaacagcagaatctcaacctgcaacagtttgtgttggtgcatccaaccaccaatttgcagccagcgcagtttatcatctcacagacgccccagggccagcagggtctcctgcaagcgcaaaatcttctaacgcaactacctcagcaaagccaagccaacctcctacagtcgcagccaagcatcaccctcacctcccagccagcaaccccaacacgcacaatagcagcaaccccaattcagacacttccacagagccagtcaacaccaaagcgaattgatactcccagcttggaggagcccagtgaccttgaggagcttgagcagtttgccaagaccttcaaacaaagacgaatcaaacttggattcactcagggtgatgttgggctcgctatggggaaactatatggaaatgacttcagccaaactaccatctctcgatttgaagccttgaacctcagctttaagaacatgtgcaagttgaagccacttttagagaagtggctaaatgatgcagagaacctctcatctgattcgtccctctccagcccaagtgccctgaattctccaggaattgagggcttgagccgtaggaggaagaaacgcaccagcatagagaccaacatccgtgtggccttagagaagagtttcttggagaatcaaaagcctacctcggaagagatcactatgattgctgatcagctcaatatggaaaaagaggtgattcgtgtttggttctgtaaccgccgccagaaagaaaaaagaatcaacccaccaagcagtggtgggaccagcagctcacctattaaagcaattttccccagcccaacttcactggtggcgaccacaccaagccttgtgactagcagtgcagcaactaccctcacagtcagccctgtcctccctctgaccagtgctgctgtgacgaatctttcagttacaggcacttcagacaccacctccaacaacacagcaaccgtgatttccacagcgcctccagcttcctcagcagtcacgtccccctctctgagtccctccccttctgcctcagcctccacctccgaggcatccagtgccagtgagaccagcacaacacagaccacctccactcctttgtcctcccctcttgggaccagccaggtgatggtgacagcatcaggtttgcaaacagcagcagctgctgcccttcaaggagctgcacagttgccagcaaatgccagtcttgctgccatggcagctgctgcaggactaaacccaagcctgatggcaccctcacagtttgcggctggaggtgccttactcagtctgaatccagggaccctgagcggtgctctcagcccagctctaatgagcaacagtacactggcaactattcaagctcttgcttctggtggctctcttccaataacatcacttgatgcaactgggaacctggtatttgccaatgcgggaggagcccccaacatcgtgactgcccctctgttcctgaaccctcagaacctctctctgctcaccagcaaccctgttagcttggtctctgccgccgcagcatctgcagggaactctgcacctgtagccagccttcacgccacctccacctctgctgagtccatccagaactctctcttcacagtggcctctgccagcggggctgcgtccaccaccaccaccgcctccaaggcacag

SEQ ID NO: 6660 - DNA, 1554 bp, Homo sapiens
  source 1..1554: mol_type = genomic DNA
atggcggcccttcccggcacggtaccgagaatgatgcggccggctccggggcagaactacccccgcacgggattccctttggaagtgtccaccccgcttggccaaggccgggtcaatcagctgggaggggtcttcatcaatgggcgacccctgcctaaccacatccgccacaagatagtggagatggcccaccatggcatccggccctgtgtcatctcccgacagctgcgtgtctcccacggctgcgtctccaagattctttgccgctaccaggagaccgggtccatccggcctggggccatcggcggcagcaagcccagacaggtggcgactccggatgtagagaaaaagattgaggagtacaagagggaaaacccaggcatgttcagctgggagatccgggacaggctgctgaaggatgggcactgtgaccgaagcactgtgccctcagtgagttcgattagccgcgtgctcagaatcaagttcgggaagaaagaggaggaggatgaagcggacaagaaggaggacgacggcgaaaagaaggccaaacacagcatcgacggcatcctgggcgacaaagggaaccggctggacgagggctcggatgtggagtcggaacctgacctcccactgaagcgcaagcagcgacgcagtcggaccacattcacggccgagcagctggaggagctggagaaggcctttgagaggacccactacccagacatatacacccgcgaggagctggcgcagaggaccaagctgacagaggcgcgtgtgcaggtctggttcagtaaccgccgcgcccgttggcgtaagcaggcaggagccaaccagctggcggcgttcaaccaccttctgccaggaggcttcccgcccaccggcatgcccacgctgcccccctaccagctgccggactccacctaccccaccaccaccatctcccaagatgggggcagcactgtgcaccggcctcagcccctgccaccgtccaccatgcaccagggcgggctggctgcagcggctgcagccgccgacaccagctctgcctacggagcccgccacagcttctccagctactctgacagcttcatgaatccggcggcgccctccaaccacatgaacccggtcagcaacggcctgtctcctcaggtgatgagcatcttgggcaaccccagtgcggtgcccccgcagccacaggctgacttctccatctccccgctgcatggcggcctggactcggccacctccatctcagccagctgcagccagcgggccgactccatcaagccaggagacagcctgcccacctcccaggcctactgcccacccacctacagcaccaccggctacagcgtggaccccgtggccggctatcagtacggccagtacggccagagtgagtgcctggtgccctgggcgtcccccgtccccattccttctcccacccccagggcctcctgcttgtttatggagagctacaaggtggtgtcagggtggggaatgtccatttcacagatggaaaaattgaagtccagccagatggaacagttcacc

SEQ ID NO: 6661 - DNA, 720 bp, Homo sapiens
  source 1..720: mol_type = genomic DNA
atgacctctttgccctgccccctccccggccgggacgcctccaaagctgtcttcccagacctcgcccctgtcccgtcggtagcggctgcctacccgcttggcttgtcccctacaaccgcagcctcccccaatttgtcctactccaggccgtatggccacctcctgtcttacccctacaccgagccagcgaaccccggagactcctacctgtcctgccagcaacccgcggcgctctctcagcccctctgcggacctgcagagcaccctcaggaactcgaggcagactcggagaagccgcggctgtccccggaaccctccgagcggcgccctcaggcccccgccaaaaagctccgcaagccgaggaccatctactccagcctgcagctgcagcacctaaaccagcgtttccagcacacgcagtacctggcgctgcccgagagggcccagctggcagcgcagctcggcctcacccagacccaggtaaagatctggtttcagaacaaacgctccaagtataagaagctcctgaagcagaattctggggggcaggaaggggacttccctgggaggaccttctctgtgtctccctgctccccacccctcccctccctctgggatctacccaaggcagggaccctgcccaccagtggctatggcaacagctttggagcctggtatcagcatcactcctcagatgtcctggcttcgcctcagatgatg

SEQ ID NO: 6662 - DNA, 1389 bp, Homo sapiens
  source 1..1389: mol_type = genomic DNA
atgtatggaaattattctcacttcatgaagtttcccgcaggctatggaggctcccctggccacactggctctacatccatgagcccatcagcagccttgtccacagggaagccaatggacagccaccccagctacacagataccccagtgagtgccccacggactctgagtgcagtggggacccccctcaatgccctgggctctccatatcgagtcatcacctctgccatgggcccaccctcaggagcacttgcagcgcctccaggaatcaacttggttgccccacccagctctcagctaaatgtggtcaacagtgtcagcagttcagaggacatcaagcccttaccagggcttcccgggattggaaacatgaactacccatccaccagccccggatctctggttaaacacatctgtgccatctgtggagacagatcctcaggaaagcactacggggtatacagttgtgaaggctgcaaagggttcttcaagaggacgataaggaaggacctcatctacacgtgtcgggataataaagactgcctcattgacaagcgtcagcgcaaccgctgccagtactgtcgctatcagaagtgccttgtcatgggcatgaagagggaagctgtgcaagaagaaagacagaggagccgagagcgagctgagagtgaggcagaatgtgctaccagtggtcatgaagacatgcctgtggagaggattctagaagctgaacttgctgttgaaccaaagacagaatcctatggtgacatgaatatggagaactcgacaaatgaccctgttaccaacatatgtcatgctgctgacaagcagcttttcaccctcgttgaatgggccaagcgtattccccacttctctgacctcaccttggaggaccaggtcattttgcttcgggcagggtggaatgaattgctgattgcctctttctcccaccgctcagtttccgtgcaggatggcatccttctggccacgggtttacatgtccaccggagcagtgcccacagtgctggggtcggctccatctttgacagagtcctaactgagctggtttccaaaatgaaagacatgcagatggacaagtcggaactgggatgcctgcgagccattgtactctttaacccagatgccaagggcctgtccaacccctctgaggtggagactctgcgagagaaggtttatgccacccttgaggcctacaccaagcagaagtatccggaacagccaggcaggtttgccaagctgctgctgcgcctcccagctctgcgttccattggcttgaaatgcctggagcacctcttcttcttcaagctcatcggggacacccccattgacaccttcctcatggagatgttggagaccccgctgcagatcacc

SEQ ID NO: 6663 - DNA, 1011 bp, Homo sapiens
  source 1..1011: mol_type = genomic DNA
atgttaacactaccgtttgatgagtctgttgtaatgccagaatcccagatgtgcagaaagttttctagagaatgcgaggaccagaagcaaattaagaagccagaaagcttttccaaacagattgtccttcgaggaaagagcatcaaaagggcccctggagaagaaaccgagaaagaagaagaggaggaagacagggaagaggaagatgaaaatgggttgcctagaaggaggggtcttaggaaaaaaaagacaacaaagctgcgattggaaagggtcaagttcaggagacaggaagcgaacgcgcgcgagaggaacaggatgcacggcctcaacgacgctctggacaacttaagaaaagtggtcccctgttattctaaaacccagaaactgtccaaaatagagactttacgactggccaaaaactacatctgggcactttctgaaattctgagaatcggcaagagaccagatctgctcacattcgtccaaaacttatgcaaaggtctttcccagccaactacaaacttggtggcaggctgcttgcagctcaacgccaggagtttcctgatgggtcagggtggggaggctgcacaccacacaaggtcaccctactctaccttctacccaccctaccacagccctgagctcaccactcccccagggcatgggactcttgataattccaagtccatgaaaccctacaattattgcagtgcgtatgaatccttctatgaaagtacttcccctgagtgtgccagccctcagtttgaaggtcccttaagtcctcccccaattaactataatgggatattttccctgaagcaagaagaaaccttggactatggtaaaaattacaattacggcatgcattactgtgcagtgccacccaggggtccccttgggcagggtgccatgttcaggttgcccaccgacagccacttcccttacgacttacatctgcgcagccaatctctcacaatgcaagatgaattaaatgcagtttttcataat

SEQ ID NO: 6664 - DNA, 1011 bp, Homo sapiens
  source 1..1011: mol_type = genomic DNA
atgaagcgcccctgcgaggagacgacctccgagagcgacatggacgagaccatcgacgtggggagcgagaacaattactcggggcaaagtactagctctgtgattagattgaattctccaacaacaacatctcagattatggcaagaaagaaaaggagagggattatagagaaaaggcgtcgggatcggataaataacagtttatctgagttgagaagacttgtgccaactgcttttgaaaaacaaggatctgcaaagttagaaaaagctgaaatattgcaaatgacagtggatcatttgaagatgcttcaggcaacagggggtaaaggctactttgacgcacacgctcttgccatggacttcatgagcataggattccgagagtgcctaacagaagttgcgcggtacctgagctccgtggaaggcctggactcctcggatccgctgcgggtgcggcttgtgtctcatctcagcacttgcgccacccagcgggaggcggcggccatgacatcctccatggcccaccaccatcatccgctccacccgcatcactgggccgccgccttccaccacctgcccgcagccctgctccagcccaacggcctccatgcctcagagtcaaccccttgtcgcctctccacaacttcagaagtgcctcctgcccacggctctgctctcctcacggccacgtttgcccatgcggattcagccctccgaatgccatccacgggcagcgtcgccccctgcgtgccacctctctccacctctctcttgtccctctctgccaccgtccacgccgcagccgcagcagccaccgcggctgcacacagcttccctctgtccttcgcgggggcattccccatgcttcccccaaacgcagcagcagcagtggccgcggccacagccatcagcccgcccttgtcagtatcagccacgtccagtcctcagcagaccagcagtggaacaaacaataaaccttaccgaccctgggggacagaagttggagctttt

SEQ ID NO: 6665 - DNA, 726 bp, Homo sapiens
  source 1..726: mol_type = genomic DNA
atgatgatggacctttttgaaactggctcctatttcttctacttggatggggaaaatgttactctgcagccattagaagtggcagaaggctctcctttgtatccagggagtgatggtaccttgtccccctgccaggaccaaatgcccccggaagcggggagcgacagcagcggagaggaacatgtcctggcgcccccgggcctgcagcctccacactgccccggccagtgtctgatctgggcttgcaagacctgcaagagaaaatctgcccccactgaccggcgaaaagccgccaccctgcgcgaaaggaggaggctaaagaaaatcaacgaggccttcgaggcactgaagcggcgaactgtggccaaccccaaccagaggctgcccaaggtggagattctgcggagcgccatcagctatattgagcggctgcaggacctgctgcaccggctggatcagcaggagaagatgcaggagctgggggtggaccccttcagctacagacccaaacaagaaaatcttgagggtgcggatttcctgcgcacctgcagctcccagtggccaagtgtttccgatcattccagggggctcgtgataacggctaaggaaggaggagcaagtattgattcgtcagcctcgagtagccttcgatgcctttcttccatcgtggacagtatttcctcggaggaacgcaaactcccctgcgtggaggaagtggtggagaag

SEQ ID NO: 6666 - DNA, 1023 bp, Homo sapiens
  source 1..1023: mol_type = genomic DNA
atgaccatggaatctggagccgagaaccagcagagtggagatgcagctgtaacagaagctgaaaaccaacaaatgacagttcaagcccagccacagattgccacattagcccaggtatctatgccagcagctcatgcaacatcatctgctcccaccgtaactctagtacagctgcccaatgggcagacagttcaagtccatggagtcattcaggcggcccagccatcagttattcagtctccacaagtccaaacagttcagtcttcctgtaaggacttaaaaagacttttctccggaacacagatttcaactattgcagaaagtgaagattcacaggagtcagtggatagtgtaactgattcccaaaagcgaagggaaattctttcaaggaggccttcctacaggaaaattttgaatgacttatcttctgatgcaccaggagtgccaaggattgaagaagagaagtctgaagaggagacttcagcacctgccatcaccactgtaacggtgccaactccaatttaccaaactagcagtggacagtatattgccattacccagggaggagcaatacagctggctaacaatggtaccgatggggtacagggcctgcaaacattaaccatgaccaatgcagcagccactcagccgggtactaccattctacagtatgcacagaccactgatggacagcagatcttagtgcccagcaaccaagttgttgttcaagctgcctctggagacgtacaaacataccagattcgcacagcacccactagcactattgcccctggagttgttatggcatcctccccagcacttcctacacagcctgctgaagaagcagcacgaaagagagaggtccgtctaatgaagaacagggaagcagctcgagagtgtcgtagaaagaagaaagaatatgtgaaatgtttagaaaacagagtggcagtgcttgaaaatcaaaacaagacattgattgaggagctaaaagcacttaaggacctttactgccacaaatcagat

SEQ ID NO: 6667 - DNA, 1128 bp, Homo sapiens
  source 1..1128: mol_type = genomic DNA
atgctaaccgctgtctgcggctctctgggcagccagcacacggaagcgccgcacgcctccccgccgcgcctcgacctgcagcctctccaaacttaccagggccacacgagccctgaggccggggactacccctccccgctgcagcctggagagctgcagagcctcccgctgggcccggaggtggacttctcgcagggctatgagctgccaggggcctcctcgcgggtaacctgcgaggacctggaaagcgacagtcccttggccccgggccccttttccaagctcctgcagccggacatgtcacaccattatgaatcgtggttcaggccgactcacccaggcgcggaggatggctcgtggtgggaccttcatccgggcaccagctggatggacctcccccacactcagggcgcgctgacctcacctggccacccgggggcgcttcaggcgggcttggggggctacgtcggagaccaccagctttgtgccccgccaccccacccgcatgcgcaccacctccttccagctgccggagggcagcatctcctagggccgcccgacggggctaaggccttggaagtagccgccccggagtctcaagggctggattccagcctggacggggcggcgcgtcccaaaggctcccggcggtcggtgccccgcagctcaggccagaccgtctgtcgctgccccaactgtctggaggcggagcgactgggggctccatgtgggcccgatgggggcaagaagaagcatttgcacaactgccacatcccgggctgcgggaaagcctacgccaagacgtcgcacctgaaggcgcacctgcgctggcacagcggcgaccgtcccttcgtgtgcaactggctcttctgcggcaagcgcttcacgcgctcggacgagctgcagcgccacctccagacccacaccggcaccaagaagttcccctgtgcagtctgcagccgcgtcttcatgcgcagcgaccacctggccaagcacatgaaaacccacgagggcgccaaggaggaggcggctggggcggcctcgggagagggcaaggccggcggcgcagtggagccccccgggggcaaaggcaaacgcgaggccgagggcagcgtggctccctccaac

SEQ ID NO: 6668 - DNA, 1185 bp, Homo sapiens
  source 1..1185: mol_type = genomic DNA
atgatggctgcaaaagtggttcctatgcccccaaagccaaagcagtcctttatactgagagttccgccagactccaagctgggccaagacctacttcgagatgccactaacgggcccaagaccatccaccagctagtgctggagcacttcctcaccttcttgcccaagccaagcctggtccagcccagtcagaaagtcaaggagaccttggttattatgaaagatgtgagctcaagccttcagaacagagtgcatcctcgtcccttggtgaagcttctgcccaaaggagtccaaaaggaacaagagacagtgtctctgtatttgaaagctaaccctgaggagctggtggtctttgaggatttgaatgtatttcactgccaggaagaatgtgtgagcttggatcctactcaacaactcacgtcagagaaggaagatgacagcagtgtcggggaaatgatgttactggcagtcaatggcagtaatcctgaaggtgaagatcctgagagggaacctgtagaaaatgaagattatagagaaaagtcttcagatgatgatgaaatggattcttccttggtctctcagcagcctcccgataaccaggaaaaggaacgactaaatacatccattccacaaaaaaggaaaatgagaaatctgttagttaccattgagaatgatactcctctagaggaactctcaaaatatgtagacatcagtattattgcccttactcgaaatcggaggacaaggagatggtacacttgtccactgtgtgggaaacagtttaatgaaagttcttacctcatttcccaccagaggacccacactggagaaaaaccctatgactgtaatcactgtgggaaaagcttcaatcataaaacaaacctcaataaacatgagcgaattcatacaggagagaaaccttattcctgttctcagtgtggaaaaaacttccgtcagaattctcatcggagtcgtcatgaaggaatccatataagggagaagatatttaagtgtccagaatgtgggaaaaccttcccaaagaatgaggagtttgtgcttcatctgcagagtcatgaggctgagagaccatatggttgcaaaaaatgtgggagaagatttggtcggctgtcaaactgtacccggcatgagaaaacccactcagcctgtaagacccgaaagcagaag

SEQ ID NO: 6669 - DNA, 1062 bp, Homo sapiens
  source 1..1062: mol_type = genomic DNA
atgtcccgcctgctgcatgcagaagagtgggctgaagtgaaggagttgggagaccaccatcgccagccccagccgcatcatctcccgcaaccgccgccgccgccgcagccacctgcaactttgcaggcgagagagcatcccgtctacccgcctgagctgtccctcctggacagcaccgacccacgcgcctggctggctcccactttgcagggcatctgcacggcacgcgccgcccagtatttgctacattccccggagctgggtgcctcagaggccgctgcgccccgggacgaggtggacggccggggggagctggtaaggaggagcagcggcggtgccagcagcagcaagagccccgggccggtgaaagtgcgggaacagctgtgcaagctgaaaggcggggtggtggtagacgagctgggctgcagccgccaacgggccccttccagcaaacaggtgaatggggtgcagaagcagagacggctagcagccaacgccagggagcggcgcaggatgcatgggctgaaccacgccttcgaccagctgcgcaatgttatcccgtcgttcaacaacgacaagaagctgtccaaatatgagaccctgcagatggcccaaatctacatcaacgccttgtccgagctgctacaaacgcccagcggaggggaacagccaccgccgcctccagcctcctgcaaaagcgaccaccaccaccttcgcaccgcggcctcctatgaagggggcgcgggcaacgcgaccgcagctggggctcagcaggcttccggagggagccagcggccgaccccgcccgggagttgccggactcgcttctcagccccagcttctgcgggagggtactcggtgcagctggacgctctgcacttctcgactttcgaggacagcgccctgacagcgatgatggcgcaaaagaatttgtctccttctctccccgggagcatcttgcagccagtgcaggaggaaaacagcaaaacttcgcctcggtcccacagaagcgacggggaattttccccccattcccattacagtgactcggatgaggcaagt

SEQ ID NO: 6670 - DNA, 1626 bp, Homo sapiens
  source 1..1626: mol_type = genomic DNA
atgtgggagcacaggaaagagccctggaccatagaaagccaagtacgagtagcaagaaaaccaaaagggtgggaatggatcaaaggtgtgaaaacagatctgtctcgtaactgtgtaatcaaggaactagcaccacaacaggaaggtaacccaggagaagtattccacacagtgacattggaacaacatgaaaaacatgacattgaagagttttgcttcagggaaatcaagaaaaaaatacacgactttgactgtcagtggagagatgatgaaagaaattgcaacaaagtgactacggccccaaaagaaaatcttacttgtaggagagaccaacgcgatagaagaggtataggaaacaagtctattaaacatcagcttggattaagctttctaccacatccccatgaactgcagcagtttcaagctgaagggaaaatttatgaatgtaaccatgttgagaagtctgtcaaccatggttcctcagtttcaccaccccaaataatttcttctaccatcaaaacccatgtttctaataaatatgggactgatttcatctgttcttcattactcacacaagaacagaaatcatgcattagggaaaaaccttacagatatattgagtgcgacaaagccttgaatcatggctcacacatgactgtacgtcaggtaagtcattctggagagaaaggatataaatgtgatctgtgtggcaaggtctttagtcaaaaatcaaaccttgcgcgtcattggagagttcatactggagagaaaccatacaaatgtaatgaatgtgacagaagtttcagtcgcaactcatgccttgcactacatcggagagttcacactggagagaaaccttacaaatgttatgagtgtgacaaggtcttcagtcgaaattcatgccttgcactacatcagaaaactcatattggagagaaaccttacacatgtaaagagtgtggcaaagcctttagtgtgaggtcaacacttaccaaccatcaggtaattcatagtggcaagaaaccttacaaatgcaatgaatgtggcaaggtgttcagtcagacttcaagccttgcaactcatcagagaattcacactggggagaaaccatacaagtgtaatgaatgtggtaaagtcttcagtcagacttcaagccttgcaaggcattggagaattcatactggagagaaaccttacaaatgcaatgaatgtggtaaggttttcagttacaattcacaccttgcgagtcatcggagagttcatactggagagaaaccttacaagtgtaatgagtgtgggaaagcctttagtgtgcattcgaacttaactacccatcaggtcatccatactggagagaagccttacaaatgtaatcaatgtggcaaaggcttcagtgtgcattcaagcctaactacccatcaggtcatccatactggagaaaaaccttacaaatgtaatgagtgtggcaaatcctttagtgtgcgcccaaacctcactagacatcagataatccatactggaaagaaaccttacaaatgtagtgattgtgggaagtcctttagtgtgcgcccaaacctcttcagacatcaaattatccatactaaggagaaaccttataaaagaaat

SEQ ID NO: 6671 - DNA, 1050 bp, Homo sapiens
  source 1..1050: mol_type = genomic DNA
atggcaatgagacagacgccgctcacctgctctggccacacgcgacccgtggttgatttggccttcagtggcatcacgccttatgggtatttcttaatcagcgcttgcaaagatggtaaacctatgctacgccagggagatacaggagactggattggaacatttttgggtcataaaggtgctgtttggggtgcaacactgaataaggatgccaccaaagcagctacagcagctgcagatttcacagccaaagtgtgggatgctgtctcaggagatgaattgatgaccctggctcataaacacattgtcaagactgtggatttcacgcaggatagtaattatttgttaaccgggggacaggataaactgttacgcatatatgacttgaacaaacctgaagcagaacctaaggaaattagtggtcatacttctggtataaaaaaagctctgtggtgcagtgaggataaacagattctttctgctgatgacaaaactgttcgactttgggatcatgctactatgacagaagtgaaatctctaaattttaatatgtctgttagtagtatggaatatattcctgagggagagattttggttataacttatggacgatctattgcttttcatagtgcagtaagtttggacccaattaaatcctttgaagctcctgcaaccatcaattctgcatctcttcatcctgagaaagaatttcttgttgcaggcggtgaagattttaaactttataagtatgattataatagtggagaagaattagaatcctacaagggacactttggtcctattcactgtgtgagatttagtcctgatggagaactctatgccagtggttcagaagatggaacattgagactatggcaaactgtggtaggaaaaacgtatggcctttggaaatgtgtgcttcctgaagaagatagtggtgagctggcaaagccaaagattggttttccagagacaacagaagaggagctagaagaaattgcttcagagaattcagattgcatctttccttcagctcctgatgttaaggcc

SEQ ID NO: 6672 - DNA, 1065 bp, Homo sapiens
  source 1..1065: mol_type = genomic DNA
atgtcggtgaattacgcggcggggctgtcgccgtacgcggacaagggcaagtgcggcctcccggagatcttcgaccccccggaggagctggagcggaaggtgtgggaactggcgaggctggtctggcagtcttccagtgtggtgttccacacgggtgccggcatcagcactgcctctggcatccccgacttcaggggtccccacggagtctggaccatggaggagcgaggtctggcccccaagttcgacaccacctttgagagcgcgcggcccacgcagacccacatggcgctggtgcagctggagcgcgtgggcctcctccgcttcctggtcagccagaacgtggacgggctccatgtgcgctcaggcttccccagggacaaactggcagagctccacgggaacatgtttgtggaagaatgtgccaagtgtaagacgcagtacgtccgagacacagtcgtgggcaccatgggcctgaaggccacgggccggctctgcaccgtggctaaggcaagggggctgcgagcctgcaggggagagctgagggacaccatcctagactgggaggactccctgcccgaccgggacctggcactcgccgatgaggccagcaggaacgccgacctgtccatcacgctgggtacatcgctgcagatccggcccagcgggaacctgccgctggctaccaagcgccggggaggccgcctggtcatcgtcaacctgcagcccaccaagcacgaccgccatgctgacctccgcatccatggctacgttgacgaggtcatgacccggctcatgaagcacctggggctggagatccccgcctgggacggcccccgtgtgctggagagggcgctgccacccctgccccgcccgcccacccccaagctggagcccaaggaggaatctcccacccggatcaacggctctatccccgccggccccaagcaggagccctgcgcccagcacaacggctcagagcccgccagccccaaacgggagcggcccaccagccctgccccccacagaccccccaaaagggtgaaggccaaggcggtccccagc

SEQ ID NO: 6673 - DNA, 951 bp, Homo sapiens
  source 1..951: mol_type = genomic DNA
atgttccaggcggccgagcgcccccaggagtgggccatggagggcccccgcgacgggctgaagaaggagcggctactggacgaccgccacgacagcggcctggactccatgaaagacgaggagtacgagcagatggtcaaggagctgcaggagatccgcctcgagccgcaggaggtgccgcgcggctcggagccctggaagcagcagctcaccgaggacggggactcgttcctgcacttggccatcatccatgaagaaaaggcactgaccatggaagtgatccgccaggtgaagggagacctggccttcctcaacttccagaacaacctgcagcagactccactccacttggctgtgatcaccaaccagccagaaattgctgaggcacttctgggagctggctgtgatcctgagctccgagactttcgaggaaatacccccctacaccttgcctgtgagcagggctgcctggccagcgtgggagtcctgactcagtcctgcaccaccccgcacctccactccatcctgaaggctaccaactacaatggccacacgtgtctacacttagcctctatccatggctacctgggcatcgtggagcttttggtgtccttgggtgctgatgtcaatgctcaggagccctgtaatggccggactgcccttcacctcgcagtggacctgcaaaatcctgacctggtgtcactcctgttgaagtgtggggctgatgtcaacagagttacctaccagggctattctccctaccagctcacctggggccgcccaagcacccggatacagcagcagctgggccagctgacactagaaaaccttcagatgctgccagagagtgaggatgaggagagctatgacacagagtcagagttcacggagttcacagaggacgagctgccctatgatgactgtgtgtttggaggccagcgtctgacgtta

SEQ ID NO: 6674 - DNA, 1062 bp, Homo sapiens
  source 1..1062: mol_type = genomic DNA
atgatgtcttacctcaaacaacccccatacggcatgaacgggctgggcctggccgggcccgccatggacctcctgcacccatccgtgggctatccggccactccgcggaagcagcggcgggagcgcaccaccttcacgcgttcacagctggacgtgctcgaggcgctcttcgccaagactcgctaccctgacatcttcatgcgggaggaggtggcgctcaagatcaacctgccggagtctagagtccaggtctggttcaagaaccgccgcgccaaatgccgccagcagcagcagagcgggagcggaaccaagagccgcccagccaagaagaagtcctctccagtgcgggagagctcgggctccgaaagcagtggccaattcacgccgccagctgtgtccagctctgcctcgtcctctagctcggcgtccagctcttccgccaacccagcggctgcagcggctgcgggactaggtgggaacccggtggcggccgcgtcgtcgctgagtacaccagctgcctcatctatctggagcccggcctccatctcgccaggctcagcgcccgcgtccgtgtcggtgccggagccattggccgcgcctagcaacacctcgtgtatgcagcgctccgtagctgcaggcgccgccaccgcagcagcctcttatcccatgtcctacggccagggcggcagctacggccaaggctaccctacgccctcctcttcctactttggcggcgtggactgcagctcatacctagcgcccatgcactcacatcaccacccgcaccagctgagccccatggcaccctcctccatggcgggccaccatcatcaccacccacatgcgcaccacccgttgagccagtcctcaggccaccaccaccaccatcaccaccaccaccaccaaggctacggtggctctgggcttgccttcaactctgccgactgcttggattacaaggagcctggcgccgctgctgcttcctccgcctggaaactcaacttcaactcccccgactgtctggactataaggaccaagcctcatggcggttccaggtcttg

SEQ ID NO: 6675 - DNA, 1068 bp, Homo sapiens
  source 1..1068: mol_type = genomic DNA
atggctggggtcgcgtgcttgggaaaagctgccgacgcagatgaatggtgcgacagcggcctgggctccctgggtccggacgcagcggcccccggaggacctgggttgggcgcggagttgggcccggggctgtcgtgggctcccctcgtcttcggctacgtcactgaggatggggacacggcactgcacttggctgtgattcatcagcatgaacccttcctggattttcttctaggcttctcggccggcactgagtacatggacctgcagaatgacctaggccagacagccctgcacctggcagccatcctgggggagacatccacggtggagaagctgtacgcagcaggcgccgggctgtgtgtggcggagcgtaggggccacacggcgctgcacctggcctgccgtgtgggggcacacgcctgtgcccgtgccctgcttcagccccgcccccggcgccccagggaagcccccgacacctacctcgctcagggccctgaccgtactcccgacaccaaccatacccctgtcgccttgtaccccgattccgacttggagaaggaagaagaggagagtgaggaggactggaagctgcagctggaggctgaaaactacgagggccacaccccactccacgtggccgttatccacaaagatgtggagatggtccggctgctccgagatgctggagctgaccttgacaaaccggagcccacgtgcggccggagcccccttcatttggcagtggaggcccaggcagccgatgtgctggagcttctcctgagggcaggcgcgaaccctgctgcccgcatgtacggtggccgcaccccactcggcagtgccatgctccggcccaaccccatcctcgcccgcctcctccgtgcacacggagcccctgagcccgagggcgaggacgagaaatccggcccctgcagcagcagtagcgacagcgacagcggagacgagggcgatgaatacgacgacattgtggttcacagcagccgcagccaaacccggctgcctcccaccccagcctcaaaacctcttcctgacgacccccgccccgtg

SEQ ID NO: 6676 - DNA, 1053 bp, Homo sapiens
  source 1..1053: mol_type = genomic DNA
atgaccgaaatgagcttcctgagcagcgaggtgttggtgggggacttgatgtcccccttcgaccagtcgggtttgggggctgaagaaagcctaggtctcttagatgattacctggaggtggccaagcacttcaaacctcatgggttctccagcgacaaggctaaggcgggctcctccgaatggctggctgtggatgggttggtcagtccctccaacaacagcaaggaggatgccttctccgggacagattggatgttggagaaaatggatttgaaggagttcgacttggatgccctgttgggtatagatgacctggaaaccatgccagatgaccttctgaccacgttggatgacacttgtgatctctttgcccccctagtccaggagactaataagcagcccccccagacggtgaacccaattggccatctcccagaaagtttaacaaaacccgaccaggttgcccccttcaccttcttacaacctcttcccctttccccaggggtcctgtcctccactccagatcattcctttagtttagagctgggcagtgaagtggatatcactgaaggagataggaagccagactacactgcttacgttgccatgatccctcagtgcataaaggaggaagacaccccttcagataatgatagtggcatctgtatgagcccagagtcctatctggggtctcctcagcacagcccctctaccaggggctctccaaataggagcctcccatctccaggtgttctctgtgggtctgcccgtcccaaaccttacgatcctcctggagagaagatggtagcagcaaaagtaaagggtgagaaactggataagaagctgaaaaaaatggagcaaaacaagacagcagccactaggtaccgccagaagaagagggcggagcaggaggctcttactggtgagtgcaaagagctggaaaagaagaacgaggctctaaaagagagggcggattccctggccaaggagatccagtacctgaaagatttgatagaagaggtccgcaaggcaagggggaagaaaagggtcccc

SEQ ID NO: 6677 - DNA, 1047 bp, Homo sapiens
  source 1..1047: mol_type = genomic DNA
atgccggtggaaaggatgcgcatgcgcccgtggctggaggagcagataaactccaacacgatcccggggctcaagtggcttaacaaggaaaagaagatttttcagatcccctggatgcatgcggctagacatgggtgggatgtggaaaaagatgcaccactctttagaaactgggcaatccatacaggaaagcatcaaccaggagtagataaacctgatcccaaaacatggaaggcgaatttcagatgcgccatgaattccttgcctgatattgaagaagtcaaggataaaagcataaagaaaggaaataatgccttcagggtctaccgaatgctgcccctatcagaacggccttctaagaaaggaaagaaaccaaagacagaaaaagaagacaaagttaagcacatcaagcaagaaccagttgagtcatctctggggcttagtaatggagtaagtgatctttctcctgagtatgcggtcctgacttcaactataaaaaatgaagtggatagtacggtgaacatcatagttgtaggacagtcccatctggacagcaacattgagaatcaagagattgtcaccaatccgccagacatttgccaagttgtagaggtgaccactgagagcgacgagcagccggtcagcatgagcgagctctaccctctgcagatctcccccgtgtcttcctatgcagaaagcgaaacgactgatagtgtgcccagcgatgaagagagtgccgaggggcggccacactggcggaagaggaatattgaaggcaaacagtacctcagcaacatggggactcgaggctcctacctgctgcccggcatggcgtccttcgtcacttccaacaaaccggacctccaggtcaccatcaaagaggagagcaatccggtgccttacaacagctcctggcccccttttcaagacctccccctttcttcctccatgaccccagcatccagcagcagtcggccagaccgggagacccgggccagcgtcatcaagaaaacatcggatatcacccaggcccgcgtcaagagctgt

SEQ ID NO: 6678 - DNA, 1047 bp, Homo sapiens; identical to SEQ ID NO: 6677
  source 1..1047: mol_type = genomic DNA

SEQ ID NO: 6679 - DNA, 1206 bp, Homo sapiens
  source 1..1206: mol_type = genomic DNA
atgccccactctgctgggggtactgcaggggtggggctggaggctgcagagcccacagccctgctcaccagggcagagcccccttcagaacccacagagatccgtccacaaaagcggaaaaaggggccagcccccaaaatgctggggaacgagctatgcagcgtgtgtggggacaaggcctcgggcttccactacaatgttctgagctgcgagggctgcaagggattcttccgccgcagcgtcatcaagggagcgcactacatctgccacagtggcggccactgccccatggacacctacatgcgtcgcaagtgccaggagtgtcggcttcgcaaatgccgtcaggctggcatgcgggaggagtgtgtcctgtcagaagaacagatccgcctgaagaaactgaagcggcaagaggaggaacaggctcatgccacatccttgccccccagggcttcctcacccccccaaatcctgccccagctcagcccggaacaactgggcatgatcgagaagctcgtcgctgcccagcaacagtgtaaccggcgctccttttctgaccggcttcgagtcacgccttggcccatggcaccagatccccatagccgggaggcccgtcagcagcgctttgcccacttcactgagctggccatcgtctctgtgcaggagatagttgactttgctaaacagctacccggcttcctgcagctcagccgggaggaccagattgccctgctgaagacctctgcgatcgaggtgatgcttctggagacatctcggaggtacaaccctgggagtgagagtatcaccttcctcaaggatttcagttataaccgggaagactttgccaaagcagggctgcaagtggaattcatcaaccccatcttcgagttctccagggccatgaatgagctgcaactcaatgatgccgagtttgccttgctcattgctatcagcatcttctctgcagaccggcccaacgtgcaggaccagctccaggtagagaggctgcagcacacatatgtggaagccctgcatgcctacgtctccatccaccatccccatgaccgactgatgttcccacggatgctaatgaaactggtgagcctccggaccctgagcagcgtccactcagagcaagtgtttgcactgcgtctgcaggacaaaaagctcccaccgctgctctctgagatctgggatgtgcacgaa

SEQ ID NO: 6680 - DNA, 1416 bp, Homo sapiens
  source 1..1416: mol_type = genomic DNA
atgaacaattcccagggaagagtgaccttcgaggatgtcactgtgaacttcacccagggggagtggcagcggctgaatcccgaacagagaaacttgtacagggatgtgatgctggagaattacagcaaccttgtctctgtgggacaaggggaaaccaccaaacccgatgtgatcttgaggttggaacaaggaaaggagccatggttggaggaagaggaagtgctgggaagtggccgtgcagaaaaaaatggggacattggagggcagatttggaagccaaaggatgtgaaagagagtctcgcaagagaagtcccatcaatcaataaggaaacgctgactacgcagaaaggtgtagaatgtgacggatctaagaaaatacttccactgggcatagatgatgtatcttccttgcaacactatgtacaaaataattctcacgatgataatggatacagaaaattagttggcaataatccatccaaatttgtaggacaacaactgaaatgtaatgcctgtagaaagttattcagttcaaagtcacgccttcaaagtcacctgaggaggcatgcctgtcaaaaaccctttgaatgtcatagctgtggaagagcattcggggagaagtggaagcttgataaacatcagaaaactcacgcagaggaaaggccctataaatgtgagaactgtggaaatgcctacaagcagaagtcaaatctctttcaacatcagaaaatgcatactaaagagaaaccctatcagtgtaagacatgtggaaaagccttttcctggaaatcatcctgcattaatcatgagaaaattcataatgccaagaaatcctatcagtgtaatgaatgtgagaaatccttcaggcagaactcaaccctcattcaacataaaaaagttcacactggacaaaaaccctttcaatgtacggactgtggaaaggctttcatttacaagtcagatcttgtgaaacaccagagaatacacacgggagagaaaccctataaatgtagcatatgtgagaaggccttttcccagaaatccaatgtcatcgatcatgagaaaattcacactgggaagagagcttatgagtgtgatctatgtggaaatacctttatccagaagaaaaacctcattcaacataaaaaaatccatactggggaaaagccctatgaatgtaacagatgtggaaaagccttctttcagaagtcaaaccttcatagccatcagaaaactcatagcggagagaggacctatagatgtagtgaatgtggaaaaaccttcatccggaaattaaaccttagtttgcataaaaaaacccatactggacaaaaaccttatggatgttctgaatgcggtaaagccttcgctgacaggtcataccttgttaggcaccagaaaagaattcactccaga

SEQ ID NO: 6681 - DNA, 699 bp, Homo sapiens
  source 1..699: mol_type = genomic DNA
atggcgctaccaggctcctcacaggaccaggcctggagcctggagcctccggctgccacggctgctgcctcctcatcttcgggaccccaggagcgggagggcgctgggagccccgcggcccccgggacgctgcccctggagaaggtgaagcggccgatgaacgcgttcatggtgtggagctccgctcagcgccgccagatggcgcagcagaaccccaagatgcacaactccgagatctccaagcgcctgggcgcgcagtggaagctgctggacgaggacgagaagcggcccttcgtggaggaggccaagcggctccgcgcccgacacctgcgcgactaccccgactacaagtaccggcctcggcgcaaggccaagagctcgggcgccggaccttcccgctgcggacagggaagaggcaacctggccagcggcggcccgctctgggggccggggtacgcgaccacccaaccgagcagaggctttgggtacagaccccccagctactcgacagcctacctgcctggcagctatggctcttcccactgcaaactggaagccccctcaccgtgctccctccctcagagtgaccctaggctccagggggaactgctgcccacctatacccactacctgccccctggctctcccactccatacaaccctccccttgctggtgcccccatgcccctaacccacctc

SEQ ID NO: 6682 - DNA, 792 bp, Homo sapiens
  source 1..792: mol_type = genomic DNA
atggagtctggcaagacggcttctcccaagagcatgccgaaagatgcacagatgatggcacaaatcctgaaggatatggggattacagaatatgagccaagagttataaatcagatgttggagtttgccttccgatatgtgaccacaattctagatgatgcaaaaatttattcaagccatgctaagaaagctactgttgatgcagatgatgtgcgattggcaatccagtgccgcgctgatcagtcttttacctctcctcccccaagagattttttattagatattgcaaggcaaagaaatcaaacccctttgccattgatcaagccatattcaggtcctaggttgccacctgatagatactgcttaacagctccaaactataggctgaaatctttacagaaaaaggcatcaacttctgcgggaagaataacagtcccgcggttaagtgttggttcagttactagcagaccaagtactcccacactaggcacaccaaccccacagaccatgtctgtttcaactaaagtagggactcccatgtccctcacaggtcaaaggtttacagtacagatgcctacttctcagtctccagctgtaaaagcttcaattcctgcaacctcagcagttcagaatgttctgattaatccatcattaatcgggtccaaaaacattcttattaccactaatatgatgtcatcacaaaatactgccaatgaatcatcaaatgcattgaaaagaaaacgtgaagatgatgatgatgacgatgatgatgatgatgactatgataatctg

SEQ ID NO: 6683 - DNA, 1530 bp, Homo sapiens
  source 1..1530: mol_type = genomic DNA
atggcgatgagagagctgaacgcggattcatgctcaagcccccagatgggggctatgtgggagactagtgggtctgtgaaagagaactccagtcagagtaagaaatacagcacaaaaatagagaatcttggtcctgagagcgcttgcaggcacttctggagcttccgttatcatgaagcaaccggaccgcttgagactatcagccaacttcagaaattgtgccatcagtggctgaggccagagatccactcaaaagagcagatcttggaaatgctggtgttagagcagttcctgagcattctgcccaaggagacccagaactgggtgcagaagcatcatccacagaatgtcaaacaggctctggtcctggtggaattcttgcagagggagcctgatggaacaaagaatgaggtcacagcccatgagctgggaaaggaggcagtgctcttgggaggaacagcagtggccccaggcttcaagtggaagccagcagagccccaaccaatgggtgtgttccagaaagaatattggaatacataccgggtactacaagaacagctgggctggaacactcacaaagaaacccagcctgtatatgaaagagctgtgcatgatcaacagatgttagccctttctgagcagaaaagaatcaaacactggaagatggcatctaaactcatcctgcctgagtccctgagtttgttgacatttgaagatgtggctgtgtatttttctgaggaagagtggcaattattgaatcctcttgagaagactctctacaatgatgtaatgcaggatatctatgagactgtcatctctctagggttaaagctaaaaaatgacactggaaatgatcatcctatatctgtttctacatcagaaatacaaacatcaggatgcgaagtatcaaaaaagaccagaatgaaaattgcccagaaaacaatgggcagggaaaatcctggtgatacacacagtgtacagaaatggcatcgagcttttccaaggaagaaaagaaagaaacctgcaacttgtaaacaagagcttccaaaacttatggatcttcatgggaaaggccccacaggggagaaaccttttaagtgtcaggaatgtgggaaaagcttcagagttagctctgatcttattaaacaccacagaattcacactggagagaaaccctataaatgtcaacaatgtgacaggaggtttagatggagttcagatcttaataagcacttcatgacccatcaaggaataaaaccatatagatgctcatggtgtgggaaaagctttagtcataacacaaatctacacacacaccaaagaattcacacaggagagaagccctttaaatgtgatgaatgtggaaaaagattcattcagaactcccaccttattaaacaccagagaactcacacaggtgagcagccttatacatgtagcttatgcaagagaaactttagtaggcgatcgagccttcttagacaccagaaactccacagaagaagggaagcatgtctagtgtctccaaac

SEQ ID NO: 6684 - DNA, 1551 bp, Homo sapiens
  source 1..1551: mol_type = genomic DNA
atgtcccttgggtcagaattgttcagggatgtggccatagtcttctcccaagaagaatggcagtggttggcacctgctcagagggatttgtacagagacgtgatgttggagacctacagcaacctggtctcactgggtcttgccgtttccaaacctgatgtgatctccttcctagagcaaggcaaagagccctggatggtggagagagtggtgtctggaggcctgtgtccagtattggagtccagatatgataccaaggaattatttccaaagcagcatgtttatgaagtcgaatcaccccaatgggagataatggaaagccttacaagttatggtcttgagtgttcaagtttccaagatgattgggaatgcagaaaccagtttgacagacaacagggaaatccagacagacatttccatcagatgatcatcagacatgaagaaatgcccacttttgaccagcatgcatcccttactttttatcagaaaattcatactagagaaaaaccttttgggtataataaatgtagaaaagacttctggcaaaaggaactccttattaatcatcaaggaatttatactaatgagaaaccctataaatgtaaggaatgtgggaaggcctttaaatatggctcacgactaattcaacatgagaatattcattctggtaagaaaccatatgaatgtaaggaatgtggaaaggccttcaattctggttcaaattttatacaacatcagagagttcatactggtgagaaaccgtatgaatgtaaagattgtgagaaggcctttagtcgaagctcacagttgattgaacatcagcgaactcacacaggcgagaaaccctatcagtgtaaggaatgtggcaaggccttcaatcggatctcacatcttaaagtacattatagaattcatactggtgaaaaaccctatgcatgcaaggaatgtgggaaaacctttagtcatcgttctcagttgattcaacatcagactgttcatactggcaggaaactctatgaatgtaaggaatgtgggaaggcttttaatcaaggctcaactcttatacgacatcagagaattcataccggtgagaaaccctatgagtgcaaagtatgtggaaaggcctttagagtgagctcacaactcaagcaacatcagagaattcacactggagagaaaccctaccaatgtaaggtatgtggtagggccttcaaacgggtctcacatcttactgtacattacagaattcatacaggtgaaaagccatatgaatgtaaggaatgtgggaaggcttttagtcattgctcacaattgattcatcatcaggttattcacactgagaaaaagccctatgaatataaggaatgtgagaagaccttgagtcatgattcaactaccgttcaacctcagagaatgcataatagagaaacacatgtgaatataataaatgtagaaaagccttccatcagcagttaccccttactaatcatcagagaatttatgttggcaagcaaccatatgaatggaagtaatggggaaagcccattagcc

SEQ ID NO: 6685 - DNA, 1608 bp, Homo sapiens
  source 1..1608: mol_type = genomic DNA
atggcgctcaccagctttttacctgcacctactcagctatctcaggaccagcttgaggctgaagaaaaggcaagatcccagagatcacggcagacctcactggtctcctcccgaagagaacctcccccgtacggataccggaaaggctggatacctcggttattagaggattttggagatggaggtgcttttccagagatccatgtggcccagtatccactggatatgggacgaaagaaaaaaatgtcgaatgcgctggccattcaggtggattctgaaggaaaaattaaatatgatgcaattgctcgacaaggacagtcaaaagacaaggtcatttatagcaaatacactgacctggttccaaaggaggttatgaatgcagatgatccagacctgcaaaggcccgatgaagaagctattaaagagataacagaaaagacaagagtagccttagaaaaatctgtatcacagaaggtcgccgcagccatgccagttcgagcagctgacaaattggctcctgctcagtatatccgatacacaccatctcagcaaggagtggcattcaactctggagctaaacagagggttattcggatggtagaaatgcagaaagatccaatggagcctccaaggttcaagattaataagaaaattccccggggaccaccttctcctcctgcgcctgtcatgcattctcctagccgaaagatgactgtaaaggaacaacaagagtggaagattcctccttgtatttctaactggaaaaatgcaaagggttatacaattccattagacaaacgtctggctgctgatggaagaggactacagacagtacacataaatgaaaatttcgccaaattggcagaagccctctacattgctgatcggaaggctcgtgaagctgtggaaatgcgtgcccaagtagagagaaaaatggctcagaaagaaaaggaaaaacatgaagagaaacttagagaaatggcccagaaagccagggaaagaagagctgggatcaaaactcatgtggaaaaagaggatggggaggcacgtgagagggatgaaatccggcatgacaggcgaaaagagagacagcatgaccggaatctttccagggcagctcctgataagaggtcgaaacttcagagaaatgaaaatcgggatatcagtgaagttattgctctcggtgttcctaatcctcggacttccaatgaagttcagtatgaccaaaggctcttcaaccaatccaagggtatggacagtggatttgcaggtggagaagatgaaatttataatgtttatgatcaagcctggagaggtggtaaagatatggcccagagtatttataggcccagtaaaaatctggacaaggacatgtatggtgatgacctagaagccagaataaagaccaacagatttgttcccgacaaggagttttctggttcagaccgtagacagagaggccgagaaggaccagttcagtttgaggaagatccttttggtttggacaagtttttggaagaagccaaacagcatggtggctctaaaagaccctcagatagcagccgccccaaggaacacgagcatgaaggcaagaagaggaggaaggaa

SEQ ID NO: 6686 - DNA, 2028 bp, Homo sapiens
  source 1..2028: mol_type = genomic DNA
atgcagggcactgtggcatttgaagatgtggctgtgaacttttcccaggaggagtggagtctccttagtgaggttcagagatgcctttaccatgacgtgatgctggagaactgggtacttatatcctccctgggttgttggtgtggatcagaagatgaggaggcaccttctaagaagagcatttctatacaaagagtgtctcaggtcagcactcctggggcaggtgtgtctcccaagaaggcccactcttgtgaaatgtgtggcgcgatcttgggagacattttgcacttggcagatcatcaggggacacatcacaagcagaaactgcacaggtgtgaggcatgggggaataaattgtatgatagttcaaaccgtccgcaccagaatcagtaccttggagagaaaccctatagaagcagtgttgaggaagcattgtttgtgaagaggtgtaagttccatgtgtcagaggagtcatctatcttcattcagagtggaaaggactttttgcccagctcaggattactgctgcaggaggccactcacactggggagaagtcaaacagcaaacctgagtgtgagtctccctttcagtggggagatactcattacagctgtggagaatgcatgaaacattctagcaccaaacacgtatttgttcaacagcagagacttccctctagagaggaatgttattgctgggaatgtgggaaatcctttagcaaatatgatagcgtcagtaatcatcagagagttcacactgggaaaagaccttatgaatgtggagaatgtgggaaatcttttagtcataagggcagccttgttcagcatcagcgagttcacactgggaaaagaccttatgaatgtggagaatgtgggaaatcttttagtcataagggcagccttgttcagcatcagcgagttcatactggagaaagaccttatgagtgtggagaatgtgggaaatcttttagtcaaaatggtactctcattaaacatcaacgagttcacactggagaaagaccttatgagtgtgaagaatgtgggaaatgttttactcagaagggcaatctcattcaacatcaacgaggtcacactagtgaaagaccttatgagtgtgaagaatgtggaaaatgttttagtcaaaagggcaccctaactgaacatcatcgagttcacactagagaacgaccttatgagtgtggagaatgtgggaaatcttttagtcgaaagggacaccttaggaaccatcagcgaggtcacactggagaaagaccttacgagtgtggagaatgtgggaaatcttttagtcgaaagggcaacctcattcagcatcagcgaagccacactggagaaaggccttatgagtgtagagagtgtaggaaattatttaggggcaagtcccacctcattgaacaccagagagttcacactggagaaaggccatatgaatgtaatgaatgtgggaaatcatttcaagacagctctgggtttcgtgttcatcagagagttcacactggagaaaaaccgtttgagtgtagtgaatgtgggaagtcatttcctcaaagctgttccctccttcgacatcggagagttcatactggagaaaggccttatgaatgtggagaatgtggaaagtcatttcatcagagctcttccctccttcgacatcagaaaactcacactgcagaaagaccttatgagtgcagagaatgtgggaaattcttctccagtctccttgaacacaggagagttcacactggagaaaggccttatgaatgcagggaatgtggaaaaacatttactcgaaggtctgcgcattttaaacatcagagacttcatactcgaggaaagccttacgagtgcagcgaatgtgggaaatcctttgctgaaaccttcagtcttactgaacacaggagagtacacactggagaaaggccttatgagtgcagtgaatgtggaaaatcatttcatcgaagctcttctctccttcgacatcagagagttcacacagaaagaagtccttacaag

SEQ ID NO: 6687 - DNA, 1647 bp, Homo sapiens
  source 1..1647: mol_type = genomic DNA
atgctggagaactacaagaatttggccacagtaggatatcagctcttcaaacccagtctgatctcttggctggaacaagaagagtctaggacagtgcagagaggtgatttccaagcttcagaatggaaagtgcaacttaaaaccaaagagttagcccttcagcaggatgttttgggggagccaacctccagtgggattcaaatgataggaagccacaacggaggggaggtcagtgatgttaagcaatgtggagatgtctccagtgaacactcatgccttaagacacatgtgagaactcaaaatagtgagaacacatttgagtgttatctgtatggagtagacttccttactctgcacaagaaaacctctactggagagcaacgttctgtatttagtcagtgtggaaaagccttcagcctgaacccagatgttgtttgccagagaacgtgcacaggagagaaagcttttgattgcagtgactctgggaaatccttcattaatcattcacaccttcagggacatttaagaactcacaatggagaaagtctccatgaatggaaggaatgtgggagaggctttattcactccacagaccttgctgtgcgtatacaaactcacaggtcagaaaaaccctacaaatgtaaggaatgtggaaaaggatttagatattctgcataccttaatattcacatgggaacccacactggagacaatccctatgagtgtaaggagtgtgggaaagccttcaccaggtcttgtcaacttactcagcacagaaaaactcacactggagagaaaccttataaatgtaaggattgtgggagagccttcactgtttcctcttgcttaagtcaacatatgaaaatccatgtgggtgagaagccttatgaatgcaaggaatgtgggatagccttcactagatcttctcaacttactgaacatttaaaaactcacactgcaaaggatccctttgaatgtaagatatgtggaaaatcctttagaaattcctcatgcctcagtgatcactttcgaattcacactggaataaaaccctataaatgtaaggattgtgggaaagccttcactcagaactcagaccttactaagcatgcacgaactcacagtggagagaggccctatgaatgtaaggaatgtggaaaggcctttgccagatcctctcgccttagtgaacatacaagaactcacactggagagaagccttttgaatgtgtcaaatgtgggaaagcctttgctatttcttcaaatcttagtggacatttgagaattcacactggagagaagccctttgagtgcctggaatgtggtaaagcatttacgcattcctccagtcttaataatcacatgcggacccacagcgccaaaaaaccattcacgtgtatggaatgtggcaaagcctttaagtttcccacgtgtgttaaccttcacatgcggatccacactggagaaaaaccctacaaatgtaaacagtgtgggaaatccttcagttactccaattcgtttcagttacatgaacgaactcacactggagagaaaccctatgaatgtaaggagtgcgggaaagccttcagttcttccagttcctttcgaaatcatgaaagaaggcatgcggatgagagactgtcagca

SEQ ID NO: 6688 - DNA, 2001 bp, Homo sapiens
  source 1..2001: mol_type = genomic DNA
atgaaaatgcatgctgagaagaagcacaaatgtagtaagtgcagcaattcgtacggtacagaatgggacctgaaaagacatgcagaggactgtggcaagaccttccggtgcacatgcggctgtccctacgccagtagaacagcactgcagtctcacatctaccgaactgggcacgagatacctgcagaacacagggacccacctagtaagaaaaggaaaatggaaaactgtgcacaaaaccagaagttatccaacaagaccattgaatcattgaacaaccaaccaatccctagaccagacactcaagaactagaagcttcagaaataaagctagaaccatcttttgaagactcttgtggctctaacactgacaagcagactcttacaacaccaccgaggtatcctcagaagttgcttttaccaaagcccaaagtggctttggttaaactacccgtgatgcagttttctgtcatgcctgtctttgtgcctacagccgactcctcagcccagcctgtggtgttaggtgttgatcagggctctgccacaggggctgtgcacttaatgcccttgtcagtaggaaccctgatcctcggcctagattcagaggcttgctctcttaaggagagcctacctcttttcaaaattgctaatcctattgctggtgagccaataagtactggtgttcaagtgaactttggtaaaagtccatctaatcctttacaagaactagggaacacgtgtcaaaagaatagcatttcttcaatcaacgtgcagacagatctgtcttatgcctcacaaaactttataccttctgcacagtgggccactgctgattcctctgtgtcgtcttgttctcaaactgatttgtcgtttgattctcaagtgtctcttcccattagtgttcacactcagacatttttgcccagctctaaggtaacttcatctatagctgctcagactgatgcatttatggacacctgtttccagtcaggtggggtctccagagaaactcaaaccagtgggatagaaagtccaacggatgaccatgtacagatggaccaagctggaatgtgcggagacatttttgagagtgttcattcatcatataatgttgctacaggtaacattataagcaacagtttagtagcagagacagtaactcatagtttgttacctcagaatgagcctaagactttaaatcaagatattgagaaatctgcaccaattataaatttcagtgcacagaatagtatgcttccttcacagaacatgacagataatcagacccaaaccatagatttattaagtgatttggaaaacatcttgtcaagtaatctgcctgcccagacattggatcatcgtagtcttttgtctgacacaaatcctggacctgacacccagctcccatctggcccagcccagaaccccggaatcgattttgatatcgaagagttcttttcggcctcaaatatccagactcaaactgaagagagtgaacttagcaccatgaccaccgagccagtcttggagtcactggacatagagactcaaacggacttcttactcgcagatacctctgctcagtcctatgggtgtaggggaaattctaacttcttaggccttgagatgtttgacacacagacacagacagacttaaactttttcttagacagtagccctcatctgcctctgggaagtattctgaaacactccagcttttccgtgagtactgattcatctgacacagagacccaaactgaaggagtctccactgctaaaaatatacctgctctagaaagcaaagttcagttgaacagtacagaaacacagaccatgagttctgggtttgaaaccctggggagcttgttcttcaccagcaacgaaactcagacagcaatggatgactttcttctggctgatctggcctggaacacgatggagtctcagttcagctctgtagaaacccagacttctgcggaaccacacacagtctccaacttc

SEQ ID NO: 6689 - DNA, 891 bp, Homo sapiens
  source 1..891: mol_type = genomic DNA
atggaagattataccaaaatagagaaaattggagaaggtacctatggagttgtgtataagggtagacacaaaactacaggtcaagtggtagccatgaaaaaaatcagactagaaagtgaagaggaaggggttcctagtactgcaattcgggaaatttctctattaaaggaacttcgtcatccaaatatagtcagtcttcaggatgtgcttatgcaggattccaggttatatctcatctttgagtttctttccatggatctgaagaaatacttggattctatccctcctggtcagtacatggattcttcacttgttaagagttatttataccaaatcctacaggggattgtgttttgtcactctagaagagttcttcacagagacttaaaacctcaaaatctcttgattgatgacaaaggaacaattaaactggctgattttggccttgccagagcttttggaatacctatcagagtatatacacatgaggtagtaacactctggtacagatctccagaagtattgctggggtcagctcgttactcaactccagttgacatttggagtataggcaccatatttgctgaactagcaactaagaaaccacttttccatggggattcagaaattgatcaactcttcaggattttcagagctttgggcactcccaataatgaagtgtggccagaagtggaatctttacaggactataagaatacatttcccaaatggaaaccaggaagcctagcatcccatgtcaaaaacttggatgaaaatggcttggatttgctctcgaaaatgttaatctatgatccagccaaacgaatttctggcaaaatggcactgaatcatccatattttaatgatttggacaatcagattaagaagatg

SEQ ID NO: 6690 - DNA, 891 bp, Homo sapiens; identical to SEQ ID NO: 6689
  source 1..891: mol_type = genomic DNA

SEQ ID NO: 6691 - DNA, 891 bp, Homo sapiens; identical to SEQ ID NO: 6689
  source 1..891: mol_type = genomic DNA

SEQ ID NO: 6692 - DNA, 4260 bp, Homo sapiens
  source 1..4260: mol_type = genomic DNA
atgagtggattaggagaaaacttggatccactggccagtgattcacgaaaacgcaaattgccatgtgatactccaggacaaggtcttacctgcagtggtgaaaaacggagacgggagcaggaaagtaaatatattgaagaattggctgagctgatatctgccaatcttagtgatattgacaatttcaatgtcaaaccagataaatgtgcgattttaaaggaaacagtaagacagatacgtcaaataaaagagcaaggaaaaactatttccaatgatgatgatgttcaaaaagccgatgtatcttctacagggcagggagttattgataaagactccttaggaccgcttttacttcaggcattggatggtttcctatttgtggtgaatcgagacggaaacattgtatttgtatcagaaaatgtcacacaatacctgcaatataagcaagaggacctggttaacacaagtgtttacaatatcttacatgaagaagacagaaaggattttcttaagaatttaccaaaatctacagttaatggagtttcctggacaaatgagacccaaagacaaaaaagccatacatttaattgccgtatgttgatgaaaacaccacatgatattctggaagacataaacgccagtcctgaaatgcgccagagatatgaaacaatgcagtgctttgccctgtctcagccacgagctatgatggaggaaggggaagatttgcaatcttgtatgatctgtgtggcacgccgcattactacaggagaaagaacatttccatcaaaccctgagagctttattaccagacatgatctttcaggaaaggttgtcaatatagatacaaattcactgagatcctccatgaggcctggctttgaagatataatccgaaggtgtattcagagattttttagtctaaatgatgggcagtcatggtcccagaaacgtcactatcaagaagcttatcttaatggccatgcagaaaccccagtatatcgattctcgttggctgatggaactatagtgactgcacagacaaaaagcaaactcttccgaaatcctgtaacaaatgatcgacatggctttgtctcaacccacttccttcagagagaacagaatggatatagaccaaacccaaatcctgttggacaagggattagaccacctatggctggatgcaacagttcggtaggcggcatgagtatgtcgccaaaccaaggcttacagatgccgagcagcagggcctatggcttggcagaccctagcaccacagggcagatgagtggagctaggtatgggggttccagtaacatagcttcattgacccctgggccaggcatgcaatcaccatcttcctaccagaacaacaactatgggctcaacatgagtagccccccacatgggagtcctggtcttgccccaaaccagcagaatatcatgatttctcctcgtaatcgtgggagtccaaagatagcctcacatcagttttctcctgttgcaggtgtgcactctcccatggcatcttctggcaatactgggaaccacagcttttccagcagctctctcagtgccctgcaagccatcagtgaaggtgtggggacttcccttttatctactctgtcatcaccaggccccaaattggataactctcccaatatgaatattacccaaccaagtaaagtaagcaatcaggattccaagagtcctctgggcttttattgcgaccaaaatccagtggagagttcaatgtgtcagtcaaatagcagagatcacctcagtgacaaagaaagtaaggagagcagtgttgagggggcagagaatcaaaggggtcctttggaaagcaaaggtcataaaaaattactgcagttacttacctgttcttctgatgaccggggtcattcctccttgaccaactcccccctagattcaagttgtaaagaatcttctgttagtgtcaccagcccctctggagtctcctcctctacatctggaggagtatcctctacatccaatatgcatgggtcactgttacaagagaagcaccggattttgcacaagttgctgcagaatgggaattcaccagctgaggtagccaagattactgcagaagccactgggaaagacaccagcagtataacttcttgtggggacggaaatgttgtcaagcaggagcagctaagtcctaagaagaaggagaataatgcacttcttagatacctgctggacagggatgatcctagtgatgcactctctaaagaactacagccccaagtggaaggagtggataataaaatgagtcagtgcaccagctccaccattcctagctcaagtcaagagaaagaccctaaaattaagacagagacaagtgaagagggatctggagacttggataatctagatgctattcttggtgatctgactagttctgacttttacaataattccatatcctcaaatggtagtcatctggggactaagcaacaggtgtttcaaggaactaattctctgggtttgaaaagttcacagtctgtgcagtctattcgtcctccatataaccgagcagtgtctctggatagccctgtttctgttggctcaagtcctccagtaaaaaatatcagtgctttccccatgttaccaaagcaacccatgttgggtgggaatccaagaatgatggatagtcaggaaaattatggctcaagtatgggtgggccaaaccgaaatgtgactgtgactcagactccttcctcaggagactggggcttaccaaactcaaaggccggcagaatggaacctatgaattcaaactccatgggaagaccaggaggagattataatacttctttacccagacctgcactgggtggctctattcccacattgcctcttcggtctaatagcataccaggtgcgagaccagtattgcaacagcagcagcagatgcttcaaatgaggcctggtgaaatccccatgggaatgggggctaatccctatggccaagcagcagcatctaaccaactgggttcctggcccgatggcatgttgtccatggaacaagtttctcatggcactcaaaataggcctcttcttaggaattccctggatgatcttgttgggccaccttccaacctggaaggccagagtgacgaaagagcattattggaccagctgcacactcttctcagcaacacagatgccacaggcctggaagaaattgacagagctttgggcattcctgaacttgtcaatcagggacaggcattagagcccaaacaggatgctttccaaggccaagaagcagcagtaatgatggatcagaaggcaggattatatggacagacatacccagcacaggggcctccaatgcaaggaggctttcatcttcagggacaatcaccatcttttaactctatgatgaatcagatgaaccagcaaggcaattttcctctccaaggaatgcacccacgagccaacatcatgagaccccggacaaacacccccaagcaacttagaatgcagcttcagcagaggctgcagggccagcagtttttgaatcagagccgacaggcacttgaattgaaaatggaaaaccctactgctggtggtgctgcggtgatgaggcctatgatgcagccccagcagggttttcttaatgctcaaatggtcgcccaacgcagcagagagctgctaagtcatcacttccgacaacagagggtggctatgatgatgcagcagcagcagcagcagcaacagcagcagcagcagcagcagcagcagcaacagcaacagcaacagcaacagcagcaacagcagcaaacccaggccttcagcccacctcctaatgtgactgcttcccccagcatggatgggcttttggcaggacccacaatgccacaagctcctccgcaacagtttccatatcaaccaaattatggaatgggacaacaaccagatccagcctttggtcgagtgtctagtcctcccaatgcaatgatgtcgtcaagaatgggtccctcccagaatcccatgatgcaacacccgcaggctgcatccatctatcagtcctcagaaatgaagggctggccatcaggaaatttggccaggaacagctccttttcccagcagcagtttgcccaccaggggaatcctgcagtgtatagtatggtgcacatgaatggcagcagtggtcacatgggacagatgaacatgaaccccatgcccatgtctggcatgcctatgggtcctgatcagaaatactgc

SEQ ID NO: 6693 - DNA, 1359 bp, Homo sapiens
  source 1..1359: mol_type = genomic DNA
atgggtgtgaaaacatttactcatagctcctcttcccacagccaggaaatgcttggaaagctaaatatgctgcgaaatgatggacatttttgtgatatcactattcgtgtccaggacaaaatcttccgggcacataaggtggtactagcagcttgcagtgatttctttcgcaccaaacttgtaggccaagccgaggatgagaacaagaatgtgttggatctgcatcatgttacagtgactggctttatacctcttttagaatatgcttacacagccactctatcaattaacacagaaaatattattgatgttctagcagcagccagctatatgcaaatgttcagtgttgccagcacctgctcagagttcatgaaatcaagcattttatggaatacacccaacagccaacctgaaaagggtctagatgctggacaagaaaataattctaactgcaattttacttctcgagatgggagcatttctcccgtgtcctcagagtgcagtgtggtagaaagaaccattcctgtctgccgagaatcccggagaaagcgcaaaagctacattgttatgtctcctgaaagtcctgtaaagtgtggcacacaaacaagctcaccccaggtattgaattcttcagcttcctactcagaaaatagaaaccaaccagttgactcttccttagcttttccttggacttttccttttggaattgatcgaaggattcagcctgagaaagttaagcaagcagaaaatacccggactttagaattacctggcccatctgagaccggtagaagaatggctgattatgtgacttgtgagagcacaaaaactaccttgcctttaggtaccgaagaagatgtccgggtcaaagtagaaagattaagtgatgaggaggtccatgaggaagtgtcccagcctgtcagtgcatctcagagttcgctgagtgatcagcagacagttccaggaagtgaacaagtccaagaggaccttctgattagtccacagtcttcctctataggctcagtagatgaaggcgtttctgagggcttgcctacacttcaaagcacgtctagcactaatgctcctccggatgatgatgatcgattggaaaatgttcagtatccctaccaactctacattgctccttccaccagcagtacagagcgaccaagtccaaatggtcccgacagaccttttcagtgtccaacctgcggggtgcgattcacccgtattcagaacctaaagcagcacatgctcatccactcaggaattaaaccatttcagtgtgaccgctgtgggaaaaagttcaccagggcttactcgctaaagatgcatcgcctaaagcatgaagtgatttcc

SEQ ID NO: 6694 - DNA, 3159 bp, Homo sapiens
  source 1..3159: mol_type = genomic DNA
atgtcgaggcgcaagcaggcgaaaccccagcacatcaactcggaggaggaccagggcgagcagcagccgcagcagcagaccccggagtttgcagatgcggccccagcggcgcccgcggcgggggagctgggtgctccagtgaaccacccagggaatgacgaggtggcgagtgaggatgaagccacagtaaagcggcttcgtcgggaggagacgcacgtctgtgagaaatgctgtgcggagttcttcagcatctctgagttcctggaacataagaaaaattgcactaaaaatccacctgtcctcatcatgaatgacagcgaggggcctgtgccttcagaagacttctccggagctgtactgagccaccagcccaccagtcccggcagtaaggactgtcacagggagaatggcggcagctcagaggacatgaaggagaagccggatgcggagtctgtggtgtacctaaagacagagacagccctgccacccaccccccaggacataagctatttagccaaaggcaaagtggccaacactaacgtgaccttgcaggcactacggggcaccaaggtggcggtgaatcagcggagcgcggatgcactccctgcccccgtgcctggtgccaacagcatcccgtgggtcctcgagcagatcttgtgtctgcagcagcagcagctacagcagatccagctcaccgagcagatccgcatccaggtgaacatgtgggcctcccacgccctccactcaagcggggcaggggccgacactctgaagaccttgggcagccacatgtctcagcaggtttctgcagctgtggctttgctcagccagaaagctggaagccaaggtctgtctctggatgccttgaaacaagccaagctacctcacgccaacatcccttctgccaccagctccctgtccccagggctggcacccttcactctgaagccggatgggacccgggtgctcccgaacgtcatgtcccgcctcccgagcgctttgcttcctcaggccccgggctcggtgctcttccagagccctttctccactgtggcactagacacatccaagaaagggaaggggaagccaccgaacatctccgcggtggatgtcaaacccaaagacgaggcggccctctacaagcacaagtgtaagtactgtagcaaggtttttgggactgatagctccttgcagatccacctccgctcccacactggagagagacccttcgtgtgctctgtctgtggtcatcgcttcaccaccaagggcaacctcaaggtgcactttcaccgacatccccaggtgaaggcaaacccccagctgtttgccgagttccaggacaaagtggcggccggcaatggcatcccctatgcactctctgtacctgaccccatagatgaaccgagtctttctttagacagcaaacctgtccttgtaaccacctctgtagggctacctcagaatctttcttcggggactaatcccaaggacctcacgggtggctccttgcccggtgacctgcagcctgggccttctccagaaagtgagggtggacccacactccctggggtgggaccaaactataattccccaagggctggtggcttccaagggagtgggacccctgagccagggtcagagaccctgaaattgcagcagttggtggagaacattgacaaggccaccactgatcccaacgaatgtctcatttgccaccgagtcttaagctgtcagagctccctcaagatgcattatcgcacccacaccggggagagaccgttccagtgtaagatctgtggccgagccttttctaccaaaggtaacctgaagacacaccttggggttcaccgaaccaacacatccattaagacgcagcattcgtgccccatctgccagaagaagttcactaatgccgtgatgctgcagcaacatattcggatgcacatgggcggtcagattcccaacacgcccctgccagagaatccctgtgactttacgggttctgagccaatgaccgtgggtgagaacggcagcaccggcgctatctgccatgatgatgtcatcgaaagcatcgatgtagaggaagtcagctcccaggaggctcccagcagctcctccaaggtccccacgcctcttcccagcatccactcggcatcacccacgctagggtttgccatgatggcttccttagatgccccagggaaagtgggtcctgccccttttaacctgcagcgccagggcagcagagaaaacggttccgtggagagcgatggcttgaccaacgactcatcctcgctgatgggagaccaggagtatcagagccgaagcccagatatcctggaaaccacatccttccaggcactctccccggccaatagtcaagccgaaagcatcaagtcaaagtctcccgatgctgggagcaaagcagagagctccgagaacagccgcactgagatggaaggtcggagcagtctcccttccacgtttatccgagccccgccgacctatgtcaaggttgaagttcctggcacatttgtgggaccctcgacattgtccccagggatgacccctttgttagcagcccagccacgccgacaggccaagcaacatggctgcacacggtgtgggaagaacttctcctctgctagcgctcttcagatccacgagcggactcacactggagagaagccttttgtgtgcaacatttgtgggcgagcttttaccaccaaaggcaacttaaaggttcactacatgacacacggggcgaacaataactcagcccgccgtggaaggaagttggccatcgagaacaccatggctctgttaggtacggacggaaaaagagtctcagaaatctttcccaaggaaatcctggccccttcagtgaatgtggaccctgttgtgtggaaccagtacaccagcatgctcaatggcggtctggccgtgaagaccaatgagatctctgtgatccagagtgggggggttcctaccctcccggtttccttgggggccacctccgttgtgaataacgccactgtctccaagatggatggctcccagtcgggtatcagtgcagatgtggaaaaaccaagtgctactgacggcgttcccaaacaccagtttcctcacttcctggaagaaaacaagattgcggtcagc

SEQ ID NO: 6695 - DNA, 1383 bp, Homo sapiens
  source 1..1383: mol_type = genomic DNA
atgactcccaacagtatgacagaaaatggccttacagcctgggacaaaccgaagcactgtccagaccgagaacacgactggaagctagtaggaatgtctgaagcctgcctacataggaagagccattcagagaggcgcagcacgttgaaaaatgaacagtcgtcgccacatctcatccagaccacttggactagctcaatattccatctggaccatgatgatgtgaacgaccagagtgtctcaagtgcccagaccttccaaacggaggagaagaaatgtaaagggtacatccccagttacttagacaaggacgagctctgtgtagtgtgtggtgacaaagccaccgggtatcactaccgctgtatcacgtgtgaaggctgcaagggtttctttagaagaaccattcagaaaaatctccatccatcctattcctgtaaatatgaaggaaaatgtgtcatagacaaagtcacgcgaaatcagtgccaggaatgtcgctttaagaaatgcatctatgttggcatggcaacagatttggtgctggatgacagcaagaggctggccaagaggaagctgatagaggagaaccgggagaaaagacggcgggaagagctgcagaagtccatcgggcacaagccagagcccacagacgaggaatgggagctcatcaaaactgtcaccgaagcccatgtggcgaccaacgcccaaggcagccactggaagcaaaaacggaaattcctgccagaagacattggacaagcaccaatagtcaatgccccagaaggtggaaaggttgacttggaagccttcagccattttacaaaaatcatcacaccagcaattaccagagtggtggattttgccaaaaagttgcctatgttttgtgagctgccatgtgaagaccagatcatcctcctcaaaggctgctgcatggagatcatgtcccttcgcgctgctgtgcgctatgacccagaaagtgagactttaaccttgaatggggaaatggcagtgacacggggccagctgaaaaatgggggtcttggggtggtgtcagacgccatctttgacctgggcatgtctctgtcttctttcaacctggatgacactgaagtagccctccttcaggccgtcctgctgatgtcttcagatcgcccggggcttgcctgtgttgagagaatagaaaagtaccaagatagtttcctgctggcctttgaacactatatcaattaccgaaaacaccacgtgacacacttttggccaaaactcctgatgaaggtgacagatctgcggatgataggagcctgccatgccagccgcttcctgcacatgaaggtggaatgccccacagaactcttcccccctttgttcttggaagtgttcgaggat

SEQ ID NO: 6696 - DNA, 1383 bp, Homo sapiens; identical to SEQ ID NO: 6695
  source 1..1383: mol_type = genomic DNA

SEQ ID NO: 6697 - DNA, 612 bp, Homo sapiens
  source 1..612: mol_type = genomic DNA
atgggagacaagaagagccccaccaggccgaagcggcagccgaagccgtcctcggatgagggttactgggactgtagcgtctgcaccttccggaacagcgccgaggccttcaagtgcatgatgtgcgatgtgcggaagggcacctccacccgatccacattgtttgaagttattgtgagtgcctcgaggaccaaggaaccgttgaaatttccaatttcaggaaggaaacctcgacctgtctcccagttggttgcacagcaggttactcagcagtttgtgcctcctacacagtcaaagaaagagaaaaaagataaagtagaaaaagaaaaaagtgaaaaggaaacaactagcaaaaagaatagccataagaaaaccaggccaagattgaaaaatgtggatcggagtagtgctcagcatttggaagttactgttggagatctgacagtcattattacagactttaaggagaaaacaaagtcaccgcctgcatctagtgctgcttctgcagatcaacacagtcaaagcggctctagctctgataacacagagagaggaatgtccaggtcatcttcacccagaggagaagcctcatcattgaatggagaatctcat

SEQ ID NO: 6698 - DNA, 1773 bp, Homo sapiens
  source 1..1773: mol_type = genomic DNA
atgtttgggattcaggaaagcatccaacggagtggaagcagcatgaaggaagagccgctgggcagcggcatgaacgcggtgcggacgtggatgcagggcgccggggtgctggacgccaacacggcggcgcagagcggggtgggtctggcccgggctcactttgagaagcagccgccttccaatctgcggaaatccaacttcttccacttcgtcctggccctctacgacagacagggccagcccgtggagatcgagaggacagcgtttgtggggttcgtggagaaggaaaaagaagccaacagcgaaaagaccaataacggaattcactaccggcttcagcttctctacagcaatgggataaggacggagcaggatttctacgtgcgcctcattgactccatgacaaaacaagccatagtgtatgaaggccaagacaagaacccagaaatgtgccgagtcttgctcacacatgagatcatgtgcagccgctgttgtgacaagaaaagctgtggcaaccgaaatgagactccctcagatccagtgataattgacaggttcttcttgaaatttttcctcaaatgtaaccaaaattgcctaaagaatgcgggaaacccacgtgacatgcggagattccaggtcgtggtgtctacgacagtcaatgtggatggccatgtcctggcagtctctgataacatgtttgtccataataattccaagcatgggcggagggctcggaggcttgacccctcggaaggtacgccctcttatctggaacatgctactccctgtatcaaagccatcagcccgagtgaaggatggacgacgggaggtgcgactgtgatcatcataggggacaatttctttgatgggttacaggtcatattcggtaccatgctggtctggagtgagttgatcactcctcatgccatccgtgtgcagacccctcctcggcacatccctggtgttgtggaagtcacactgtcctacaaatctaagcagttctgcaaaggaacaccaggcagattcatttatacagcgctcaacgaacccaccatcgattatggtttccagaggttacagaaggtcattcctcggcaccctggtgaccctgagcgtttgccaaaggaagtaatactcaaaagggctgcggatctggtagaagcactgtatgggatgccacacaacaaccaggaaatcattctgaagagagcggccgacattgccgaggccctgtacagtgttccccgcaaccacaaccaactcccggcccttgctaacacctcggtccacgcagggatgatgggcgtgaattcgttcagtggacaactggccgtgaatgtctccgaggcatcacaagccaccaatcagggtttcacccgcaactcaagcagcgtatcaccacacgggtacgtgccgagcaccactccccagcagaccaactataactccgtcaccacgagcatgaacggatacggctctgccgcaatgtccaatttgggcggctcccccaccttcctcaacggctcagctgccaactccccctatgccatagtgccatccagccccaccatggcctcctccacaagcctcccctccaactgcagcagctcctcgggcatcttctccttctcaccagccaacatggtctcagccgtgaaacagaagagtgctttcgcaccagtcgtcagaccccagacctccccacctcccacctgcaccagcaccaacgggaacagcctgcaagcgatatctggcatgattgttcctcctatg

SEQ ID NO: 6699 - DNA, 813 bp, Homo sapiens
  source 1..813: mol_type = genomic DNA
atgttccgagacttcggggaacccggcccgagctccgggaacggcggcgggtacggcggccccgcgcagcccccggccgcagcgcaggcagcccagcagaagttccacctggtgccaagcatcaacaccatgagtggcagtcaggagctgcagtggatggtacagcctcatttcctggggcccagcagttaccccaggcctctgacctaccctcagtacagccccccacaaccccggccaggagtcatccgggccctggggccgcctccaggggtacgtcgaaggccttgtgaacagatcagcccggaggaagaggagcgccgccgagtaaggcgcgagcggaacaagctggctgcggccaagtgcaggaaccggaggaaggaactgaccgacttcctgcaggcggagactgacaaactggaagatgagaaatctgggctgcagcgagagattgaggagctgcagaagcagaaggagcgcctagagctggtgctggaagcccaccgacccatctgcaaaatcccggaaggagccaaggagggggacacaggcagtaccagtggcaccagcagcccaccagccccctgccgccctgtaccttgtatctccctttccccagggcctgtgcttgaacctgaggcactgcacacccccacactcatgaccacaccctccctaactcctttcacccccagcctggtcttcacctaccccagcactcctgagccttgtgcctcagctcatcgcaagagtagcagcagcagcggagacccatcctctgacccccttggctctccaaccctcctcgctttg

SEQ ID NO: 6700 - DNA, 2208 bp, Homo sapiens
  source 1..2208: mol_type = genomic DNA
atgtctctgagtgagaactcggtttttgcctatgaatcttctgtgcatagcaccaatgttttactcagccttaatgaccagcggaagaaagatgtgctgtgcgatgtcaccatctttgtggagggacagcggttccgcgctcaccggtccgtgctggcggcatgcagcagttacttccactcaagaatcgtaggccaggctgatggagagctgaacattactcttccagaagaggtgacagttaaaggatttgaacctttaattcagtttgcctacactgctaaactgattttaagtaaagagaatgtggatgaagtgtgcaaatgtgtggagtttttaagtgtacataatattgaggaatcctgctttcagtttctgaaatttaagtttttggactccactgcagaccagcaagaatgcccaagaaaaaaatgcttttcatcacactgtcagaaaacagaccttaaactttcacttttggaccagagggatctagaaactgatgaagtggaggaatttctggaaaataaaaatgttcagactcctcagtgtaaactccgcaggtatcaaggaaatgcaaaagcctcacctcctctacaagacagtgccagtcagacatatgagtccatgtgcttagagaaggatgctgctctggccttgccttctttatgccccaaatacagaaaattccaaaaagcatttggaactgacagagtccgtactggggaatctagtgtcaaagacattcatgcttctgttcagccaaatgaaaggtctgaaaatgaatgcctgggaggagtcccggagtgtagagatttgcaggtgatgttaaaatgtgacgaaagtaaattagcaatggaacctgaagaaacgaagaaagatcctgcttctcagtgcccaactgaaaaatcagaagtgactcctttcccccacaattcttccatagaccctcatggactttattctttgtctcttttacacacatatgaccaatatggtgacttgaattttgctggtatgcaaaacacaacagtgttaacagaaaagcctttgtcaggtacagacgtccaagaaaaaacatttggtgaaagtcaggatttacctttgaaatccgacttgggcaccagggaagatagtagtgttgcatctagtgataggagtagtgtggagcgagaagtggcagaacacctagcaaaaggcttctggagtgacatttgcagcacggacactccttgccaaatgcagttatcacctgctgtggccaaagatggctcagaacagatctcacagaaacggtctgagtgtccgtggttaggtatcaggattagtgagagcccagaaccaggtcaaaggactttcacaacattaagttctgtcaactgcccttttataagtactctgagtactgaaggctgttcaagcaatttggaaattggaaacgatgattatgtttcagaaccccagcaagaaccttgcccatatgcttgtgtcattagcttgggagacgactctgagacggacaccgaaggagacagtgaatcctgttcagccagagaacaagaatgtgaggtaaaactgccattcaatgcacaacggataatttcactgtctcgaaatgattttcagtccttgttgaaaatgcacaagcttactccagaacagctggattgtatccatgatattcgaagaagaagtaaaaacagaattgctgcacagcgctgtcgcaagagaaaacttgactgtatacagaatcttgaatcagaaattgagaagctgcaaagtgaaaaggagagcttgttgaaggaaagagatcacattttgtcaactctgggtgagacaaagcagaacctaactggactttgccagaaagtttgtaaagaagcagctctgagtcaagaacaaatacagatactcgccaagtactcagctgcagattgcccactttcatttttaatttctgaaaaagataaaagtactcctgatggtgaactggcgttaccatcaattttcagtttatctgaccggcctccagcagtgctgcctccctgtgccagaggaaacagtgagcctggctacgcgcgagggcaggagtcccagcagatgtccacagccacctctgagcaagctgggcctgcggaacagtgtcgtcagagtggtgggatctcagatttctgtcagcagatgactgataaatgtactactgatgag

SEQ ID NO: 6701 - DNA, 1233 bp, Homo sapiens
  source 1..1233: mol_type = genomic DNA
atggctgaaggaagccgaggtggccctacgtgtagcggggtgggtggcaggcaggacccagtctccggcagtggcggctgcaactttccagagtatgagcttcccgagctaaatacgcgcgctttccatgtgggcgcctttggggagctgtggcggggccgtctgcgcggggccggggacttgtcgctgagggagccgccggcatccgctctgcctgggagccaggcagctgactccgaccgggaggatgccgcggtggccagggatctggactgcagcctggaggcggcggctgagctgagggcggtgtgcggccttgataaactgaaatgccttgaggacggtgaggatccagaagtcattccggagaatactgacctggtgactttgggggttagaaaaaggttcttggaacatcgggaagaaaccattacaatagatcgagcctgcagacaagaaacattcgtttatgagatggagtcacatgccataggaaaaaagcctgaaaattcagcagacatgattgaagaaggggagcttatcctatctgtgaatatcttgtaccctgttatatttcataagcacaaagaacacaaaccataccaaacaatgctggtgttgggcagtcaaaaactcacacaactgagggattcaattcgatgtgtcagtgacctccagattggtggtgaattcagcaacactcctgaccaagcccctgagcacatcagcaaagacctatacaaatcagccttcttttattttgaaggaacattttataatgataaaagatacccagaatgcagagatttgagcagaactatcattgagtggtcagagtcccatgatagaggctatggaaagtttcagactgctagaatggaagatttcaccttcaatgacttgtgtattaaactgggttttccttacttatactgtcatcagggagactgtgaacatgtcattgtcattactgacataaggcttgtgcatcatgatgactgcttggataggacattgtatcccctccttatcaagaagcattggctatggaccagaaaatgttttgtttgtaaaatgtatacagccagatgggtgacgaacaatgacagttttgcaccagaggacccatgcttcttttgtgatgtttgcttccgaatgctgcactatgattcagaaggcaacaaactgggggaattccttgcttatccttatgttgatcctggaacctttaat

SEQ ID NO: 6702 - DNA, 1920 bp, Homo sapiens
  source 1..1920: mol_type = genomic DNA
atggccgaggcagcgctagtgattacgccgcagattcccatggtaacagaagagtttgtgaaaccatcacagggccatgtgacctttgaggatattgctgtgtacttctcccaggaggagtggggcctccttgatgaagctcaaaggtgcctgtatcatgatgtgatgctggagaacttttcgcttatggcctcagtaggttgtttgcatggaatagaggctgaggaggccccttctgagcagactctttctgcgcaaggagtgtcacaggccaggactccaaagctaggtccttccatcccaaatgctcattcttgtgagatgtgtatcctggtcatgaaagacattttgtacctcagtgagcatcaggggacacttccctggcagaaaccttatacgtctgtggccagtgggaaatggttttcatttggttctaacctgcaacagcaccagaaccaggacagtggagagaaacacatcagaaaggaggagagcagtgccttgcttctgaatagctgcaaaattcctctgtcagacaatcttttcccatgcaaagatgttgagaaggattttccaaccatcctgggccttctccaacaccagaccacccacagcagacaagagtatgcacatagaagcagggagacctttcaacaaagacgttacaaatgtgagcaagttttcaatgagaaagttcatgttactgagcatcagagagtccacactggagaaaaagcttataagcgtagggaatatgggaaatccttgaactctaaatacttatttgttgaacaccagagaacccataatgcagaaaagccttatgtgtgcaatatatgtgggaaatcattcctccataaacaaacactcgttgggcaccagcagagaattcacactagagaaaggtcttatgtgtgcatcgaatgtgggaaatccttgagctccaaatactcacttgtggaacaccagagaacccataatggagaaaagccttatgtgtgcaatgtatgtgggaaatcattccgccacaaacaaacatttgttggccatcagcagagaatccacactggagagaggccttatgtgtgtatggaatgtgggaaatcttttattcattcctatgaccgcattcgacaccagagagttcacactggagaaggggcttatcagtgcagtgaatgtgggaaatccttcatatacaaacagtcacttcttgatcaccatagaatccacacgggagaaaggccttatgagtgcaaagaatgtgggaaggccttcattcacaaaaaaagacttcttgagcaccagagaattcatactggagaaaagccttatgtgtgcatcatatgtgggaaatcatttatccgctcgtctgactacatgcgacaccagagaattcacactggagaaagggcttatgaatgcagtgactgtgggaaagccttcatctccaaacaaacacttcttaagcatcacaaaatccacactagagaaaggccttatgaatgcagtgaatgtggaaaaggcttctaccttgaggttaaacttcttcagcaccaaagaatccatactagagaacaactttgtgagtgcaatgaatgtggaaaagtcttcagccaccaaaaaagacttcttgagcaccagaaagttcacactggcgaaaagccctgtgagtgcagtgaatgtgggaaatgctttagacaccgcaccagcctcattcaacaccagaaagttcacagtggagagaggccttataactgcactgcatgtgagaaggcctttatctataaaaacaaacttgttgagcatcagcgaatccacaccggagaaaagccgtatgaatgtggtaaatgtgggaaagccttcaacaaaagatattcccttgtcaggcaccagaaggtacatataacagaagagccc

SEQ ID NO: 6703 - DNA, 342 bp, Homo sapiens
  source 1..342: mol_type = genomic DNA
atgatgcaagaatctgggactgagacaaaaagtaacggttcagccatccagaatgggtcgggcggcagcaaccacttactagagtgcggcggtcttcgggaggggcggtccaacggagagacgccggccgtggacatcggggcagctgacctcgcccacgcccagcagcagcagcaacagtggcatctcataaaccatcagccctctaggagtcccagcagttggcttaagagactaatttcaagcccttgggagttggaagtcctgcaggtccccttgtggggagcagttgctgagacgaagatgagtggacctgtgtgtcagcctaacccttccccattt

SEQ ID NO: 6704 - DNA, 1257 bp, Homo sapiens
  source 1..1257: mol_type = genomic DNA
atggcggaggatgtttcctcagcggccccgagcccgcggggctgtgcggatggtagggatgccgaccctactgaggagcagatggcagaaacagagagaaacgacgaggagcagttcgaatgccaggaactgctcgagtgccaggtgcaggtgggggcccccgaggaggaggaggaggaggaggaggacgcgggcctggtggccgaggccgaggccgtggctgccggctggatgctcgatttcctctgcctctctctttgccgagctttccgcgacggccgctccgaggacttccgcaggacccgcaacagcgcagaggctattattcatggactatccagtctaacagcttgccagttgagaacgatatacatatgtcagtttttgacaagaattgcagcaggaaaaacccttgatgcacagtttgaaaatgatgaacgaattacacccttggaatcagccctgatgatttggggttcaattgaaaaggaacatgacaaacttcatgaagaaatacagaatttaattaaaattcaggctatagctgtttgtatggaaaatggcaactttaaagaagcagaagaagtctttgaaagaatatttggtgatccaaattctcatatgcctttcaaaagcaaattgcttatgataatctctcagaaagatacatttcattccttttttcaacacttcagctacaaccacatgatggagaaaattaagagttatgtgaattatgtgctaagtgaaaaatcatcaacctttctaatgaaggcagcggcaaaagtagtagaaagcaaaaggacaagaacaataacttctcaagataaacctagtggtaatgatgttgaaatggaaactgaagctaatttggatacaagaaaaaggtctcacaagaatcttttcttatctaagttgcaacatggaacccagcaacaagaccttaataagaaagaaagaagagtaggaactcctcaaagtacaaaaaagaaaaaagaaagcagaagagccactgaaagcagaatacctgtttcaaagagtcagccggtaactcctgaaaaacatcgagctagaaaaagacaggcatggctttgggaagaagacaagaatttgagatctggcgtgaggaaatatggagagggaaactggtctaaaatactgttgcattataaattcaacaaccggacaagtgtcatgttaaaagacagatggaggaccatgaagaaactaaaactgatttcctcagacagcgaagac

SEQ ID NO: 6705 - DNA, 2139 bp, Homo sapiens
  source 1..2139: mol_type = genomic DNA
atggcaaagcccagccacagcagctatgtccttcagcagctaaacaaccaaagagaatggggttttctctgtgactgctgtattgcaattgatgacatttactttcaagcacacaaggcagttctagctgcctgtagctcctattttagaatgtttttcatgaaccatcagcatagtactgcacaactgaatctcagcaacatgaaaattagtgcagaatgttttgatctcattttgcagtttatgtatttaggaaaaattatgacagctccctccagttttgagcagtttaaagtggcaatgaactacctacagctatacaatgttcctgactgtttagaagacatccaggatgcagattgttctagttcaaaatgttcctcttctgcttccagcaaacagaacagcaaaatgatatttggggtaagaatgtatgaagatactgtggctcgaaatggcaatgaagccaacaggtggtgtgcagagccaagttcaacggtaaatacaccacataatagagaggctgatgaagagtctttacaattaggtaattttcctgagccactatttgatgtatgtaaaaaaagttccgtgtccaaattatctactccaaaagaacgtgtgtcaagacgctttgggcggagttttacctgtgatagctgtggatttggctttagctgtgaaaaattattagatgagcatgtgctaacctgtactaacagacatttataccaaaacacaagatcttaccatagaatagtagatattagagatggaaaagacagtaacatcaaagctgaatttggtgaaaaagattcttccaaaacattttctgcacagacggacaaatacagaggagacacaagccaggctgctgatgattcagcttcaaccactggaagcagaaaaagtagcacagtggagtctgaaatagcaagcgaagagaaaagcagagctgctgagaggaaaaggattattattaagatggagccagaagatattcctacagatgaactgaaagactttaacattattaaagttactgataaagactgtaatgaatccactgacaatgatgaattagaagatgaacctgaagagccattttatagatactatgttgaagaagatgtcagcataaaaaaaagtggtaggaaaactctaaaacctcgaatgtcagtaagtgctgatgaaagaggtggtttagagaatatgaggccccctaacaacagcagtccagtacaagaggatgctgaaaatgcatcttgtgagctgtgtggacttacaataaccgaggaggacctgtcatctcattacttagccaaacacattgaaaatatctgtgcatgtggtaaatgtggacaaatacttgtaaagggtaggcagcttcaggaacatgctcaacgatgtggcgagccccaagatctgaccatgaatgggttaggaaatactgaggagaaaatggacttggaagagaatcctgatgagcagtccgaaataagagatatgtttgttgaaatgctggatgattttagggacaatcattaccagataaacagtatccaaaaaaagcagttatttaaacattctgcctgcccttttcgatgtcctaattgtggccagcgttttgaaactgaaaatctagtggttgaacatatgtctagctgcttagatcaagatatgtttaagagtgccatcatggaagaaaatgaaagagatcacagacgaaagcatttttgtaatctgtgtggaaaaggattttatcagcggtgtcacttaagagaacactatactgttcatactaaggaaaaacagtttgtttgtcaaacatgtggaaagcagtttttaagagagcgtcagttgcgactgcacaatgatatgcacaaaggcatggccaggtatgtctgttccatttgtgatcaaggaaacttcagaaaacatgaccatgtacggcatatgatttctcatttatctgctggtgagactatatgccaggtctgctttcagatattcccaaataatgaacagttggagcagcacatggatgttcatctgtatacatgtggaatatgtggagcaaaatttaatttgaggaaagatatgagatcacattataatgccaagcatttgaaaagaacc

SEQ ID NO: 6706 - DNA, 1980 bp, Homo sapiens
  source 1..1980: mol_type = genomic DNA
atggagggagatggttcagacccagagcctccagatgccggggaggacagcaagtccgagaatggggagaatgcgcccatctactgcatctgccgcaaaccggacatcaactgcttcatgatcgggtgtgacaactgcaatgagtggttccatggggactgcatccggatcactgagaagatggccaaggccatccgggagtggtactgtcgggagtgcagagagaaagaccccaagctagagattcgctatcggcacaagaaatcacgggagcgggatggcaatgagcgggacagcagtgagccccgggatgagggtggagggcgcaagaggcctgtccctgatccagacctgcagcgccgggcagggtcagggacaggggttggggccatgcttgctcggggctctgcttcgccccacaaatcctctccgcagcccttggtggccacacccagccagcatcaccagcagcagcagcagcagatcaaacggtcagcccgcatgtgtggtgagtgtgaggcatgtcggcgcactgaggactgtggtcactgtgatttctgtcgggacatgaagaagttcgggggccccaacaagatccggcagaagtgccggctgcgccagtgccagctgcgggcccgggaatcgtacaagtacttcccttcctcgctctcaccagtgacgccctcagagtccctgccaaggccccgccggccactgcccacccaacagcagccacagccatcacagaagttagggcgcatccgtgaagatgagggggcagtggcgtcatcaacagtcaaggagcctcctgaggctacagccacacctgagccactctcagatgaggacctacctctggatcctgacctgtatcaggacttctgtgcaggggcctttgatgaccatggcctgccctggatgagcgacacagaagagtccccattcctggaccccgcgctgcggaagagggcagtgaaagtgaagcatgtgaagcgtcgggagaagaagtctgagaagaaggtgatggagaggaaggaggagcgatacaagcggcatcggcagaagcagaagcacaaggataaatggaaacacccagagagggctgatgccaaggaccctgcgtcactgccccagtgcctggggcccggctgtgtgcgccccgcccagcccagctccaagtattgctcagatgactgtggcatgaagctggcagccaaccgcatctacgagatcctcccccagcgcatccagcagtggcagcagagcccttgcattgctgaagagcacggcaagaagctgctcgaacgcattcgccgagagcagcagagtgcccgcacccgccttcaggaaatggaacgccgattccatgagcttgaggccatcattctacgtgccaagcagcaggctgtgcgcgaggatgaggagagcaacgagggtgacagtgatgacacagacctgcagatcttctgtgtttcctgtgggcaccccatcaacccacgtgttgccttgcgccacatggagcgctgctacgccaagtatgagagccagacgtcctttgggtccatgtaccccacacgcattgaaggggccacacgactcttctgtgatgtgtataatcctcagagcaaaacatactgtaagcggctccaggtgctgtgccccgagcactcacgggaccccaaagtgccagctgacgaggtatgcgggtgcccccttgtacgtgatgtctttgagctcacgggtgacttctgccgcctgcccaagcgccagtgcaatcgccattactgctgggagaagctgcggcgtgcggaagtggacttggagcgcgtgcgtgtgtggtacaagctggacgagctgtttgagcaggagcgcaatgtgcgcacagccatgacaaaccgcgcgggattgctggccctgatgctgcaccagacgatccagcacgatcccctcactaccgacctgcgctccagtgccgaccgc

SEQ ID NO: 6707 - DNA, 1725 bp, Homo sapiens
  source 1..1725: mol_type = genomic DNA
atggaccccgaggacgaaggggtagcgggagtgatgtctgtggggccgccggcggcccggcttcaggaaccagtgaccttccgggatgtggctgtggactttacccaggaggaatgggggcagctggaccctacccagaggatcctctaccgtgacgtgatgctggagacctttggtcacctgctctccataggtcctgagcttccgaagcctgaagtcatctcccagctggagcaagggaccgagctatgggtggctgagagaggaaccacccagggctgccatccagcctgggagcctcgatctgaaagccaagcatcacgcaaggaagagggcctgcctgaagaggagccatcccatgtcacgggaagggaaggattcccgacagatgctccttatcccaccacgttagggaaagacagggagtgtcagagccagagtctggcactcaaggagcagaataacttgaagcagttggaatttggcctcaaggaagcaccagttcaagatcaaggctacaaaactctcagactcagggaaaactgcgtcctgagttcaagcccaaatccattcccagagatctctagaggggagtatttgtatacttacgactcacagattacagactcagaacataactccagcttagtcagtcagcagacaggctccccaggaaaacagcccggtgaaaacagtgactgtcacagagattccagtcaggccattccaattacggaactcacaaaaagccaggtgcaggacaaaccctacaaatgtactgactgtgggaagtcgtttaaccataacgcacacctcaccgtgcacaagaggattcatacgggagaaagaccttatatgtgcaaggagtgtgggaaagccttcagccagaactcctccctcgtccagcatgagcgcatccacactggagacaagccctacaagtgtgccgaatgtgggaagtctttctgccatagtacacaccttaccgtccatcggaggattcacactggggagaagccctatgagtgtcaggactgtgggagggccttcaaccagaactcctccctggggcggcacaagaggacacacactggggagaagccatacacctgcagtgtgtgtgggaaatccttctctcggaccacttgccttttcctgcacctgagaactcacaccgaggagaggccctacgagtgtaaccactgcgggaagggcttcaggcacagctcatccctggcccagcaccagcggaagcacgcgggggagaagccctttgagtgccgccagaggctgatctttgagcagacgccagctctcacaaagcatgaatggacagaagccctgggctgtgacccacctttgagtcaagatgagaggactcaccgaagcgacagacccttcaaatgtaatcagtgtgggaagtgtttcattcagagctctcacctcatccggcaccagataactcacaccagagaggagcagccccatgggcgaagccggcggcgtgaacagtcctcgagcaggaactcacacctggttcagcatcaacacccgaactccagaaagagctctgcaggcggagcaaaggcagggcagccggaaagcagagccctggctttgtttgacatccaaaaaatcatgcaagagaaaaaccctgtgcacgttattggggtggaagagccttctgtgggtgcttccatgttatttgacatcagagaatccaca

SEQ ID NO: 6708 - DNA, 1722 bp, Homo sapiens
  source 1..1722: mol_type = genomic DNA
atggcttctgacctagagagtagcctcacctccatagactggctcccccagctgaccctccgagctaccattgagaagcttggaagtgcctcccaggctgggcctcccgggagcagccgcaagtgttcaccagggtcacccacagatcctaatgccaccctgagcaaagacgaggcagcagtgcaccaggacggcaagccacgatacagctatgccactctcatcacctatgccatcaactcctctccagccaagaagatgaccctcagcgagatttaccgctggatctgtgataacttcccctattacaagaatgctggcattggttggaagaattcaatacggcacaacctttctctcaacaagtgtttccggaaggtgcccagacctcgggatgaccctgggaagggttcctattggacaattgacacctgccctgacatttcccgaaagagaagacaccctccagatgatgatctgtcccaagactcaccagaacaggaggcaagcaagagcccacggggaggcgttgcagggagtggagaagcctcactgcctcctgaggggaatccgcagatgtcacttcagagccccacatctatagccagctacagccagggcacaggatctgtggatggtggagcagtggcagcaggggcttcaggccgagaaagtgctgagggtccccctcccctctataacaccaaccatgactttaaattctcctactcagagatcaactttcaggatctaagctggtccttccgcaacctctataagtccatgctggagaagtcctcttcctcctctcagcacggcttttcttctctcctgggggacatcccaccctcgaacaactactacatgtatcagcagcagcagccaccgccacctcaacagcagcagcagcagcagcagccgccacagccacctccccagcagtcccagccacagcagcagcaggcacctgcccagggcccctcagctgtagggggtgctcctccactgcacaccccaagcacagatggttgtaccccaccagggggaaagcaagctggggcggaaggctatgggcctccccctgtaatggccatgcatccacccccgctgcagcatggaggctaccaccctcatcagcaccatccccactcccaccctgcccagcagccaccacctccacagccacaggcacaaggccaggctcccatcaacaacactggctttgcctttccttctgactggtgctctaatattgactctttaaaggaaagcttcaagatggtgaatcggctcaattggtccagcattgagcagtcacaattctcagaactgatggagagtctacgacaggcagagcagaagaactggaccctcgaccagcatcacattgccaatctgtgtgactccctcaaccacttccttactcagactggtcacgtgccccctcaagggggtacccaccgcccaccagcccctgcccgtattgctgactcctgtgccctcaccagtggcaaacaggagtcagccatgagccaagtgaactcttatgggcacccacaagctccccacctctaccctggcccatcaccaatgtacccaatccccacccaggactcagcaggatacaatcgcccagcacaccatatggtccctcggccatcagtgccacctcctggtgccaatgaggagatccctgatgacttcgactgggacttgatcact

SEQ ID NO: 6709 - DNA, 1173 bp, Homo sapiens
  source 1..1173: mol_type = genomic DNA
atggcggctgtggtggagaatgtagtgaagctccttggggagcagtactacaaagatgccatggagcagtgccacaattacaatgctcgcctctgtgctgagcgcagcgtgcgcctgcctttcttggactcacagaccggagtagcccagagcaattgttacatctggatggaaaagcgacaccggggtccaggattggcctccggacagctgtactcctaccctgcccggcgctggcggaaaaagcggcgagcccatccccctgaggatccacgactttccttcccatctattaagccagacacagaccagaccctgaagaaggaggggctgatctctcaggatggcagtagtttagaggctctgttgcgcactgaccccctggagaagcgaggtgccccggatccccgagttgatgatgacagcctgggcgagtttcctgtgaccaacagtcgagcgcgaaagcggatcctagaaccagatgacttcctggatgacctcgatgatgaagactatgaagaagatactcccaagcgtcggggaaaggggaaatccaagggtaagggtgtgggcagtgcccgtaagaagctggatgcttccatcctggaggaccgggataagccctatgcctgtgacatttgtggaaaacgttacaagaaccgaccaggcctcagttaccactatgcccactcccacttggctgaggaggagggcgaggacaaggaagactctcaaccacccactcctgtttcccagaggtctgaggagcagaaatccaaaaagggtcctgatggattggccttgcccaacaactactgtgacttctgcctgggggactcaaagattaacaagaagacgggacaacccgaggagctggtgtcctgttctgactgtggccgctcagggcatccatcttgcctccaatttacccccgtgatgatggcggcagtgaagacataccgctggcagtgcatcgagtgcaaatgttgcaatatctgcggcacctccgagaatgacgaccagttgctcttctgtgatgactgcgatcgtggctaccacatgtactgtctcaccccgtccatgtctgagccccctgaaggaagttggagctgccacctgtgtctggacctgttgaaagagaaagcttccatctaccagaaccagaactcctct

SEQ ID NO: 6710 - DNA, 1206 bp, Homo sapiens
  source 1..1206: mol_type = genomic DNA
atgtacacttcagaagagaaatgtaatcagagaactcaaaaaaggaaaatatataatgtatgccctcggaagggtaaaaagatttttattcatatgcatgagattattcagatagatggtcatatataccagtgccttgaatgcaagcaaaacttctgtgaaaacttagctcttattatgtgtgagagaacccatactggggagaaaccttataaatgtgatatgtgtgagaaaacctttgtccaaagctcagatcttacttcacaccagaggatccacaattacgagaaaccttataaatgtagcaaatgtgagaagagcttttggcatcacttagcgctttcaggacatcagagaacacatgcaggtaaaaaattctatacatgtgacatttgtggcaagaattttggtcagagttctgatctgcttgtccaccagcgaagccatactggcgagaaaccatatctatgtagtgagtgtgacaaatgcttcagtagaagtacaaacctcataaggcatcgaagaactcacacaggtgagaaaccatttaagtgtctcgagtgtgaaaaagcttttagtgggaaatcagatcttattagccaccagagaactcacactggggaaaggccctacaaatgtaataagtgtgagaaaagttaccgacaccgttcagccttcattgtacataaaagagttcatactggggagaagccctataagtgtggtgcctgtgaaaaatgctttggccagaaatcagaccttatcgtgcaccagagagtccacacaggtgagaagccgtataaatgcctggaatgtatgagaagttttactcggagtgccaacctaattaggcaccaggcaactcacactcacacttttaaatgccttgaatatgaaaaaagctttaactgtagctcagatcttattgtacatcagagaattcacatggaagagaaaccacatcagtggtctgcgtgtgagagtggcttcctcctaggaatggactttgttgcccaacagaaaatgagaactcaaacagaggagctacactataaatacactgtatgtgataaaagcttccaccagagttcagcccttcttcaacatcagacagtacacattggtgaaaaaccgtttgtctgtaatgtgagtgaaaaaggtcttgagcttagccctccccatgcgtcagaagcctcacagatgtct

SEQ ID NO: 6711 - DNA, 1797 bp, Homo sapiens
  source 1..1797: mol_type = genomic DNA
atgctgggcatgtacgtgccggacaggttctccctgaagtcctcccgggttcaggacggcatggggctctacacggcccgcagagtgcgaaagggtgaaaagttcggaccctttgctggagagaagagaatgcctgaagacttggatgaaaatatggattacaggttgatgtgggaggttcgtgggagtaagggagaagttttgtacattttggatgctaccaacccacggcactccaactggcttcgcttcgttcatgaggcaccatctcaggagcagaagaacttggctgccattcaagaaggagaaaacattttctatttggcagttgaagatatagaaacagacacggagcttctgattggctacctggatagtgacatggaggctgaggaggaagaacagcaaattatgacagtcatcaaagaaggggaagttgaaaattctagaagacaatcaacagcgggcagaaaagatcgccttggctgtaaagaggactatgcttgtcctcaatgtgaatcgagttttaccagtgaggatattcttgctgagcatctccagacattgcaccagaaacccacagaggagaaagaatttaagtgcaagaactgtgggaagaaattcccagttaagcaggctttgcaaagacattttgagcagcaccaggagacttgccggggggatgccaggtttgtgtgcaaggctgacagctgtggaaagaggctgaagagcaaggatgccctgaaaagacaccaggaaaatgtccacactggagatcctaagaaaaagcttatatgttcagtgtgcaataaaaagtgttcttcagcatcaagcctacaggaacatagaaagattcatgagatatttgattgtcaagaatgtatgaagaaatttatttcagctaatcagctaaaacgtcatatgatcacccactcagaaaaacgaccctataattgcgagatttgtaataagtctttcaagaggcttgatcaagtgggtgctcacaaagtaatacacagcgaagacaaaccttacaaatgcaaactttgtggaaagggatttgcccacagaaatgtttacaagaatcataagaagacccactctgaggagagaccgttccaatgtgaagaatgtaaagctctgttccggaccccattttctttacagagacacctgctaatacataacagtgagaggactttcaagtgccatcactgcgatgctacctttaagaggaaggatacattaaatgttcatgtccaggtggttcatgaaagacacaagaagtataggtgtgagctatgtaataaggcctttgttacaccttcagtgcttagaagtcataagaaaacacatacaggagaaaaggagaaaatctgtccatattgtggccagaaatttgccagcagtggtacactcagagttcatatccggagccacacaggtgagcgtccctatcaatgtccttactgtgaaaaaggattcagtaaaaatgatggactgaagatgcacattcgtactcacaccagggagaagccgtacaagtgctcagagtgcagcaaggccttcagccagaagcgaggcctggatgagcacaagaggacgcacactggagaaaagccttttcagtgtgatgtttgtgatttggcttttagcctgaagaaaatgctgattcgacacaagatgactcataatcccaatcgtcccctggcagaatgccagttttgccataagaagtttacaaggaatgactacctcaaagtgcacatggacaatatccatggtgtagctgacagc

SEQ ID NO: 6712 - DNA, 1140 bp, Homo sapiens
  source 1..1140: mol_type = genomic DNA
atgttggtgataccccccggactgagcgaggaagaggaggctctgcagaagaaattcaacaagctcaagaaaaagaaaaaggcattgctggctctgaagaagcaaagtagcagcagcacaaccagccaaggtggtgtcaaacgctcactatcagagcagcctgtcatggacacagccacagcaacagagcaggcaaagcagctggtgaagtcaggagccatcagtgccatcaaggctgagaccaagaactcaggcttcaagcgttctcgaacccttgaggggaagttaaaggaccccgagaagggaccagtccccactttccagccgttccagaggagcatatctgctgatgatgacctgcaagagtcatccagacgtccccagaggaaatctctgtatgagagctttgtgtcttctagtgatcgacttcgagaactaggaccagatggagaagaggcagagggcccaggggctggtgatggtccccctcgaagctttgactggggctatgaagaacgcagtggtgcccactcctcagcctcccctccccgaagccgcagccgggaccgcagccatgagaggaaccgggacagagaccgagatcgggagcgggatcgagaccgggatcgagacagagacagagagcgggacagggatcgggatcgggatcgagatcgagaccgggaacgggacagggatcgggagcgggatcgagaccgagaccgagagggtcctttccgcaggtcggattcattccctgaacggcgagcccctaggaaagggaatactctctatgtatatggagaagacatgacacccacccttctccgtggggccttctctccttttggaaacatcattgacctctccatggacccacccagaaactgtgccttcgtcacctatgaaaagatggagtcagcagatcaggccgttgctgagctcaacgggacccaggtggagtctgtacagctcaaagtcaacatagcccgaaaacagcccatgctggatgccgctactggcaagtctgtctggggctccctcgctgtccagaacagccctaagggttgccaccgggacaagaggacccagattgtctacagtgatgacgtctacaaggaaaaccttgtggatggcttc

SEQ ID NO: 6713 - DNA, 474 bp, Homo sapiens
  source 1..474: mol_type = genomic DNA
atgtcctcggccatcgaaaggaagagcctggacccttcagaggaaccagtggatgaggtgctgcagatccccccatccctgctgacatgcggcggctgccagcagaacatcggggaccgctacttcctgaaggccatcgaccagtactggcacgaggactgcctgagctgcgacctctgtggctgccggctgggtgaggtggggcggcgcctctactacaaactgggccggaagctctgccggagagactatctcaggctttttgggcaagacggtctctgcgcatcctgtgacaagcggattcgtgcctatgagatgacaatgcgggtgaaagacaaagtgtatcacctggaatgtttcaaatgcgccgcctgtcagaagcatttctgtgtaggtgacagatacctcctcatcaactctgacatagtgtgcgaacaggacatctacgagtggactaagatcaatgggatgata

SEQ ID NO: 6714 - DNA, 474 bp, Homo sapiens
  source 1..474: mol_type = genomic DNA
atgtcctcggccatcgaaaggaagagcctggacccttcagaggaaccagtggatgaggtgctgcagatccccccatccctgctgacatgcggcggctgccagcagaacattggggaccgctacttcctgaaggccatcgaccagtactggcacgaggactgcctgagctgcgacctctgtggctgccggctgggtgaggtggggcggcgcctctactacaaactgggccggaagctctgccggagagactatctcaggctttttgggcaagacggtctctgcgcatcctgtgacaagcggattcgtgcctatgagatgacaatgcgggtgaaagacaaagtgtatcacctggaatgtttcaagtgcgccgcctgtcagaagcatttctgtgtaggtgacagatacctcctcatcaactctgacatagtgtgcgaacaggacatctacgagtggactaagatcaatgggatgata

SEQ ID NO: 6715 - DNA, 1407 bp, Homo sapiens
  source 1..1407: mol_type = genomic DNA
atgaatgatttcggaatcaagaatatggaccaggtagcccctgtggctaacagttacagagggacactcaagcgccagccagcctttgacacctttgatgggtccctgtttgctgtttttccttctctaaatgaagagcaaacactgcaagaagtgccaacaggcttggattccatttctcatgactccgccaactgtgaattgcctttgttaaccccgtgcagcaaggctgtgatgagtcaagccttaaaagctaccttcagtggcttcaaaaaggaacagcggcgcctgggcattccaaagaacccctggctgtggagtgagcaacaggtatgccagtggcttctctgggccaccaatgagttcagtctggtgaacgtgaatctgcagaggttcggcatgaatggccagatgctgtgtaaccttggcaaggaacgctttctggagctggcacctgactttgtgggtgacattctctgggaacatctggagcaaatgatcaaagaaaaccaagaaaagacagaagatcaatatgaagaaaattcacacctcacctccgttcctcattggattaacagcaatacattaggttttggcacagagcaggcgccctatggaatgcagacacagaattaccccaaaggcggcctcctggacagcatgtgtccggcctccacacccagcgtactcagctctgagcaggagtttcagatgttccccaagtctcggctcagctccgtcagcgtcacctactgctctgtcagtcaggacttcccaggcagcaacttgaatttgctcaccaacaattctgggacgcccaaagaccacgactcccctgagaacggtgcggacagcttcgagagctcagactccctcctccagtcctggaacagccagtcgtccttgctggatgtgcaacgggttccttccttcgagagcttcgaagatgactgcagccagtctctctgcctcaataagccaaccatgtctttcaaggattacatccaagagaggagtgacccggtggagcaaggcaaaccagttatacctgcagctgtgctggccggcttcacaggaagtggacctattcagctgtggcagtttctcctggagctgctatcagacaaatcctgccagtcattcatcagctggactggagacggatgggagtttaagctcgccgaccccgatgaggtggcccgccggtggggaaagaggaaaaataagcccaagatgaactacgagaagctgagccggggcttacgctactattacgacaagaacatcatccacaagacgtcggggaagcgctacgtgtaccgcttcgtgtgcgacctccagaacttgctggggttcacgcccgaggaactgcacgccatcctgggcgtccagcccgacacggaggac

SEQ ID NO: 6716 - DNA, 327 bp, Homo sapiens
  source 1..327: mol_type = genomic DNA
atggcatatcagttatacagaaatactactttgggaaacagtcttcaggagagcctagatgagctcatacagtctcaacagatcaccccccaacttgcccttcaagttctacttcagtttgataaggctataaatgcagcactggctcagagggtcaggaacagagtcaatttcaggggctctctaaatacgtacagattctgcgataatgtgtggacttttgtactgaatgatgttgaattcagagaggtgacagaacttattaaagtggataaagtgaaaattgtagcctgtgatggtaaaaatactggctctaatactacagaa

SEQ ID NO: 6717 - DNA, 2853 bp, Homo sapiens
  source 1..2853: mol_type = genomic DNA
atgactgactccaagtatttcacaaccaataaaaaaggagaaatatttgaactaaaagctgaactcaacaatgaaaagaaagaaaagagaaaggaggctgtgaagaaagtgattgctgctatgaccgtggggaaggatgttagttctctctttccagacgtagtgaactgtatgcagactgacaatctggaactaaagaagcttgtgtatctctacttgatgaactacgccaagagtcagccagacatggccatcatggctgtaaacagctttgtgaaggactgtgaagatcctaatcctttgattcgagccttggcagtcagaaccatggggtgcatccgggtagacaaaattacagaatatctctgtgagccgctccgcaagtgcttgaaggatgaggatccctatgttcggaaaacagcagcagtctgcgtggcaaaactccatgatatcaatgcccaaatggtggaagatcagggatttctggattctctacgggatctcatagcagattcaaatccaatggtggtggctaatgccgtagcggcattatctgaaatcagtgagtctcacccaaacagcaacttacttgatctgaacccacagaacattaataagctgctgacagccctgaatgaatgcactgaatggggccagattttcatcctggactgcctgtctaattacaaccctaaagatgatcgggaggctcagagcatctgtgagcgggtaactccccggctatcccatgccaactcagcagtggtgctttcagcggtaaaagtcctaatgaagtttctagaattgttacctaaggattctgactactacaatatgctgctgaagaagttagcccctccacttgtcactttgctgtctggggagccagaagtgcagtatgtcgccctgaggaacatcaacttaattgtccagaaaaggcctgaaatcttgaagcaggaaatcaaagtcttctttgtgaagtacaatgatcccatctatgttaaactagagaagttggacatcatgattcgtttggcatctcaagccaacattgctcaggttctggcagaactgaaagaatatgctacagaggtggatgttgactttgttcgaaaagctgtgcgggccattggacggtgtgccatcaaggtggagcaatctgcagagcgctgtgtaagcacattgcttgatctaatccagaccaaagtgaattatgtggtccaagaagcaattgttgtcatcagggacatcttccgcaaataccccaacaagtatgaaagtatcatcgccactctgtgtgagaacttagactcgctggatgagccagatgctcgagcagctatgatttggattgtgggagaatatgctgaaagaattgacaatgcagatgagttactagaaagcttcctggagggttttcacgatgaaagcacccaggtgcagctcactctgcttactgccatagtgaagctgtttctcaagaaaccatcagaaacacaggagctagtccagcaggtcttgagtttggcaacacaggattctgataatcctgaccttcgagaccggggctatatttattggcgccttctctcaactgaccctgttacagctaaagaagtagtcttgtctgagaagccactgatctctgaggagacggaccttattgagccaactctgctggatgagctaatctgccacattggttctttggcctctgtgtatcataagcctcccaatgcttttgtggaaggaagtcatggaattcatcgtaaacacttgccaattcatcatgggagcactgatgcaggtgacagccctgttggcactaccactgcaacgaacctggaacagcctcaggttatcccctctcaaggtgatcttctaggggatcttttaaaccttgacctcggtcccccagtcaatgtgccacaggtgtcctccatgcagatgggagcagtggatctcctaggaggaggactagatagtctgcttggcagtgaccttggcgggggcattggaggaagtccggcagtgggacaatccttcatcccatcatcggtccctgcaacctttgctccttcacctacacctgctgtggtcagcagtggactgaatgacctgtttgaactctccacagggataggcatggcacctggtggatatgtggctcctaaggctgtctggctacctgcagtaaaggctaaaggcttggagatttccggaacatttactcaccgccaagggcacatctatatggaaatgaacttcaccaataaagctctgcagcacatgacagattttgcaatccagtttaacaaaaatagctttggtgtcatccccagcactcctctggccatccatacaccactgatgccaaaccagagcattgatgtctccctgcctctcaataccttgggcccagtcatgaagatggaacctctgaataacctccaggtggctgtgaaaaacaatatcgatgtcttctacttcagctgcctcatcccactcaatgtgctttttgtagaagatggcaaaatggagcgccaggtcttccttgcaacatggaaggatattcccaatgaaaatgaacttcagtttcagattaaggaatgtcatttaaatgctgacactgtttccagcaagttgcaaaacaacaatgtttatactattgccaagaggaatgtggaagggcaggacatgctgtaccaatccctgaagctcactaatggcatttggattttggccgaactacgtatccagccaggaaaccccaattacacgctgtcactgaagtgtagagctcctgaagtctctcaatacatctatcaggtctacgacagcattttgaaaaac

SEQ ID NO: 6718 - DNA, 1008 bp, Homo sapiens
  source 1..1008: mol_type = genomic DNA
atggagagaaaaataagcagaatccaccttgtttctgaacccagtataactcattttctacaagtatcttgggagaaaacactggaatctggttttgttattacacttactgatggtcattcagcatggactgggacagtttctgaatcagagatttcccaagaagctgatgacatggcaatggaaaaagggaaatatgttggtgaactgagaaaagcattgttgtcaggagcaggaccagctgatgtatacacgtttaatttttctaaagagtcttgttatttcttctttgagaaaaacctgaaagatgtctcattcagacttggttccttcaacctagagaaagttgaaaacccagctgaagtcattagagaacttatttgttattgcttggacaccattgcagaaaatcaagccaaaaatgagcacctgcagaaagaaaatgaaaggcttctgagagattggaatgatgttcaaggacgatttgaaaaatgtgtgagtgctaaggaagctttggagactgatctttataagcggtttattctggtgttgaatgagaagaaaacaaaaatcagaagtttgcataataaattattaaatgcagctcaagaacgagaaaaggacatcaaacaagaaggggaaactgcaatctgttctgaaatgactgctgaccgagatccagtctatgatgagagtactgatgaggaaagtgaaaaccaaactgatctctctgggttggcttcagctgctgtaagtaaagatgattccattatttcaagtcttgatgtcactgatattgcaccaagtagaaaaaggagacagcgaatgcaaagaaatcttgggacagaacctaaaatggctcctcaggagaatcagcttcaagaaaaggaaaattctaggcctgattcttcactacctgagacgtctaaaaaggagcacatctcagctgaaaacatgtctttagaaactctgagaaacagcagcccagaagacctctttgatgagatt

SEQ ID NO: 6719 - DNA, 1212 bp, Homo sapiens
  source 1..1212: mol_type = genomic DNA
atgactcacatgataactcacattggagagaaaacttctgaggataatcagagtggaaaagccttaagaaagaactttcctcatagtttttacaagaaaagtcatgctgaggggaaaatgcctaagtgtgttaaacatgaaaaagccttcaaccagtttccaaatcttactaggcagaataaaactcacacacaagagaaattgtgtgaatgcaaagactgttggagaacttttcttaatcagtcatcccttaagttacatataagatctcacaatggagacaaacactatgtatgtaaggaatgtgggaaagccttcagtaattcctcacaccttataggacatggaagaattcacagtggagagaagccctatgtctgtaaagaatgtggtaaagctttcactcaatccacaggacttaaattacacatcagaactcacagtggagaaaaaccatataaatgtaaagagtgtgggaaagccttcacccattcttcataccttactgatcatacaagaatccacagtggaaagaagccctatgtatgtatggaatgtggaaaagccttcactagatccacaggacttattttacacatgcgaattcacactggagaaaagccatatgaatgtaaggagtgtggaaaagcttttattcattcctcataccttacaaaacatgtaaggattcacagtggagagaagctgtatttatgtaaggcatgtgggaaagcttttactcgttcctcaggacttgttttacacatgagaacacatactggagaaaagccctatgaatgtaaagaatgtgggaaagcctttaataattcctcaatgcttagtcaacatgtaaggattcacactggagagaagccatatgaatgcaaagaatgtgggaaagctttcactcaatcctcgggccttagtacccatttaagaactcacactggagaaaaggcctgtgaatgtaaggaatgcggtaaagcatttgctcgttccacaaatcttaatatgcacatgcgaacgcacacaggagaaaagccttatgcatgtaaagaatgtgggaaagccttcaggtattccacataccttaacgttcacacacgaactcacactggagcaaaaccatatgaatgtaagaaatgtgggaaaaacttcactcaatcttcagcacttgctaaacatctaagaactaaggcatgtgaaaaaacc

SEQ ID NO: 6720 - DNA, 1425 bp, Homo sapiens
  source 1..1425: mol_type = genomic DNA
atgtcccgccgcaaggccggcagcgcgccccgccgagtagagcccgcgcccgccgccaacccagacgacgagatggaaatgcaggacctcgtcatcgaactcaagcccgagccagacgcgcagccccaacaggccccaaggctggggcccttctccccgaaggaggtgtcctcggcggggcggttcggcggcgaaccccaccactcccctggccccatgcccgccggggccgccctcctcgccctcggcccgcggaacccgtggaccctgtggacgccgttgaccccgaactatcccgaccgccagccctggaccgacaaacacccagatctgttgacctgcggccgctgcctgcagaccttcccgttggaggccatcactgccttcatggaccacaagaagctgggctgtcagctcttcagaggccccagccgcggccagggctcagaacgagaggagctgaaggccttgagctgcctgcgctgtggcaaacagttcacagtggcctggaagctgctgcgtcacgcccagtgggaccacggactgtccatctaccagacagaatcagaggccccggaggccccgctcctgggcctggccgaggtggctgcagccgtgtcggcagtggtggggccagcagctgaggccaagagcccccgtgcaagtggcagcggcctcacccggcggagccccacctgtcctgtgtgcaagaagaccctcagctccttcagcaacctcaaagtgcacatgcgctcacacacaggcgagcggccctatgcttgcgaccagtgtccctacgcctgcgcccagagcagcaagctcaaccgccacaagaagacccaccggcaggtgccgccccagagccccctcatggccgacaccagccaggagcaggcctctgcagcccctccggagccggctgtccatgctgctgcccccaccagcacccttccatgcagcggtggtgagggggctggagccgccgccacagcaggtgtccaggaacccggggctcctggcagtggggctcaagccggccctggtggagacacttggggagccatcaccacggaacaaagaactgaccctgcaaacagccagaaggcatcacccaaaaagatgcccaagtcagggggcaagagccgcgggcccgggggcagctgtgagttctgcgggaagcattttaccaacagcagcaacctgacggtgcaccggcgctcacacaccggggagcgcccctacacctgtgagttctgcaactacgcctgcgcccagagcagtaagctcaaccgccaccgccgcatgcacggcatgacgcctggcagcacccgcttcgagtgcccccactgccatgtgcccttcggcctgcgagccaccctggacaaacacctgcggcagaagcaccctgaggcggccggcgaggcc

SEQ ID NO: 6721 - DNA, 1221 bp, Homo sapiens
  source 1..1221: mol_type = genomic DNA
atggagagtgcaatcacgctgtggcagttcctgttgcagttgctgctggatcagaaacatgagcatttgatctgctggacctcgaacgatggtgaattcaagctcctcaaagcagaagaagtggccaagctgtggggactccgaaaaaacaaaacaaatatgaactatgataagctgagcagagccctgcgatactattatgacaagaacatcatcaagaaggtgatcgggcagaagtttgtgtacaagtttgtctctttcccggagatcctgaagatggatcctcacgcggtggagatcagccgggagagccttctgctgcaggacagcgactgcaaggcgtctccggagggccgcgaggcccacaaacacggcctggccgccctcagaagcacgagccgcaacgaatacatccactcaggcctgtactcgtccttcaccattaattccctgcagaacccaccagacgccttcaaggccatcaagacggagaagctggaggagccgcccgaagacagcccccccgtggaagaagtcaggactgtgatcaggtttgtgaccaataaaaccgacaagcacgtcaccaggccggtggtgtccctgccttccacgtcagaggctgcggcggcgtccgccttcctggcctcgtccgtctcggccaagatctcctctttaatgttgccaaacgctgccagtatttcatccgcctcacccttctcatctcggtccccgtccctgtcccccaactcacccctcccttctgaacacagaagcctcttcctggaggccgcctgccatgactccgattccctggagcccttgaacctgtcatcgggctccaagaccaagtctccatctcttcccccaaaggccaaaaaacccaaaggcttggaaatctcagcgcccccgctggtgctctccggcaccgacatcggctccatcgccctcaacagcccagccctcccctcgggatccctcaccccagccttcttcaccgcacagacaccaaatggattgcttctgactccgagtccactgctctccagcatacatttctggagcagccttagtccagttgctccgctgagtcctgccaggctgcaagggccaagcacgctgttccagttccccacactgcttaatggccacatgccagtgccaatccccagtctggacagagctgcttctccagtactgctttcttcaaactctcagaaatcc

SEQ ID NO: 6722 - DNA, 1044 bp, Homo sapiens
  source 1..1044: mol_type = genomic DNA
atgagcgcagcgttcccgccgtcgctgatgatgatgcagcgcccgctggggagtagcaccgccttcagcatagactcgctgatcggcagcccgccgcagcccagccccggccatttcgtctacaccggctaccccatgttcatgccctaccggccggtagtgctgccgccgccgccgccgccgccgcccgcgctgccccaggccgcgctgcagccagcgctgccgcccgcacaccctcaccaccagatccccagcctgcccacaggcttctgctccagcctggcgcagggcatggcgctcacctctacgctcatggccacgctccccggcggcttctccgcgtcgccccagcaccaggaggcggcagcggcccgcaagttcgcgccgcagccgctgcccggcggcggtaacttcgacaaggcggaggcgctgcaggctgacgcggaggacggcaaaggcttcctggccaaagagggctcgctgctcgccttctccgcggccgagacggtgcaggcttcgctcgtcggggctgtccgagggcaagggaaagacgagtcaaaggtggaagacgacccgaagggcaaggaggagagcttctcgctggagagcgatgtggactacagctcggatgacaatctgactggccaggcagctcacaaggaggaagacccgggccacgcgctggaggagaccccgccgagcagcggcgccgcgggcagcaccacgtctacgggcaagaaccggcggcggcggactgccttcaccagcgagcagctgctggagctagagaaggagttccactgcaaaaagtacctctccttgaccgagcgctcgcagatcgcccacgccctcaaactcagcgaggtgcaggtgaaaatctggttccagaaccgacgggccaagtggaaacgggtgaaggcaggcaatgccaattccaagacaggggagccctcccggaaccctaagatcgtcgtccccatccctgtccacgtcagcaggttcgctatcagaagtcagcatcagcagctagaacaggcccggccc

SEQ ID NO: 6723 - DNA, 978 bp, Homo sapiens
  source 1..978: mol_type = genomic DNA
atgtaccaggattatcccgggaactttgacacctcgtcccggggcagcagcggctctcctgcgcacgccgagtcctactccagcggcggcggcggccagcagaaattccgggtagatatgcctggctcaggcagtgcattcatccccaccatcaacgccatcacgaccagccaggacctgcagtggatggtgcagcccacagtgatcacctccatgtccaacccataccctcgctcgcacccctacagccccctgccgggcctggcctctgtccctggacacatggccctcccaagacctggcgtgatcaagaccattggcaccaccgtgggccgcaggaggagagatgagcagctgtctcctgaagaggaggagaagcgtcgcatccggcgggagaggaacaagctggctgcagccaagtgccggaaccgacgccgggagctgacagagaagctgcaggcggagacagaggagctggaggaggagaagtcaggcctgcagaaggagattgctgagctgcagaaggagaaggagaagctggagttcatgttggtggctcacggcccagtgtgcaagattagccccgaggagcgccgatcgcccccagcccctgggctgcagcccatgcgcagtgggggtggctcggtgggcgctgtagtggtgaaacaggagcccctggaagaggacagcccctcgtcctcgtcggcggggctggacaaggcccagcgctctgtcatcaagcccatcagcattgctgggggcttctacggtgaggagcccctgcacacccccatcgtggtgacctccacacctgctgtcactccgggcacctcgaacctcgtcttcacctatcctagcgtcctggagcaggagtcacccgcatctccctccgaatcctgctccaaggctcaccgcagaagcagtagcagcggggaccaatcatcagactccttgaactcccccactctgctggctctg

SEQ ID NO: 6724 - DNA, 1014 bp, Homo sapiens
  source 1..1014: mol_type = genomic DNA
atgaccaccaccctcgtgtctgccaccatcttcgacttgagcgaagttttatgcaagggtaacaagatgctcaactatagtgctcccagtgcagggggttgcctgctggacagaaaggcagtgggcacccctgctggtgggggcttccctcggaggcactcagtcaccctgcccagctccaagttccaccagaaccagctcctcagcagcctcaagggtgagccagcccccgctctgagctcgcgagacagccgcttccgagaccgctccttctcggaagggggcgagcggctgctgcccacccagaagcagcccgggggcggccaggtcaactccagccgctacaagacggagctgtgccgcccctttgaggaaaacggtgcctgtaagtacggggacaagtgccagttcgcacacggcatccacgagctccgcagcctgacccgccaccccaagtacaagacggagctgtgccgcaccttccacaccatcggcttttgcccctacgggccccgctgccacttcatccacaacgctgaagagcgccgtgccctggccggggcccgggacctctccgctgaccgtccccgcctccagcatagctttagctttgctgggtttcccagtgccgctgccaccgccgctgccaccgggctgctggacagccccacgtccatcaccccaccccctattctgagcgccgatgacctcctgggctcacctaccctgcccgatggcaccaataacccttttgccttctccagccaggagctggcaagcctctttgcccctagcatggggctgcccgggggtggctccccgaccaccttcctcttccggcccatgtccgagtcccctcacatgtttgactctccccccagccctcaggattctctctcggaccaggagggctacctgagcagctccagcagcagccacagtggctcagactccccgaccttggacaactcaagacgcctgcccatcttcagcagactttccatctcagatgac

SEQ ID NO: 6725 - DNA, 1185 bp, Homo sapiens
  source 1..1185: mol_type = genomic DNA
atgtccctggtagatttgggaaagaagcttttagaagcggcacgagcaggtcaagatgatgaagttcgtattttgatggcaaatggagctccctttactacagactggctgggaacttctccacttcatctagcagcacagtatggtcattattccaccacagaggtactgctgcgagctggtgtgagcagagatgccagaaccaaagtggaccgaacaccattacatatggcagcttctgagggccatgccagcatagtagaggttttacttaagcatggtgctgatgtcaatgcaaaggacatgttaaagatgacagctctccattgggccacagaacacaatcatcaagaggtggtggaacttttaatcaaatatggtgctgatgtacacacgcaaagtaaattttgtaaaactgcatttgatatttcaatagacaatggaaatgaagatttagcagagatattacagattgctatgcagaaccaaatcaacacaaacccagagagtcctgacactgtgacaatacatgctgcaacaccacagtttatcattggacctggaggggtggtgaacctaacaggtctggtatcttcagaaaattcatccaaggcaacagatgaaacgggtgtatctgctgttcagtttggaaactcttctacatcagtattagctacattagctgccttagctgaagcatctgctccattgtccaattcttcagaaactccagtagtggccacagaagaagtagttactgcagaatctgtggatggtgccattcagcaagtagttagttcagggggtcagcaagtcatcacaatagttacagatggaattcagcttggaaatttgcactctattccaaccagtggaattggtcagcccatcattgtgaccatgccagatggacaacaagtattaacagtaccagcaacagacattgctgaagaaactgttataagtgaagaaccaccagctaagagacaatgtatcgaaataattgaaaaccgggtggaatctgcagaaatagaagagagagaagctcttcagaaacagctggatgaagcaaatcgagaagcacaaaaatatcgacagcagctcctaaagaaagaacaggaagcagaggcctacagacagaagttggaagctatgactcgtcttcagactaataaagaagctgtt

SEQ ID NO: 6726 - DNA, 2136 bp, Homo sapiens
  source 1..2136: mol_type = genomic DNA
atgtctcagtggtacgaacttcagcagcttgactcaaaattcctggagcaggttcaccagctttatgatgacagttttcccatggaaatcagacagtacctggcacagtggttagaaaagcaagactgggagcacgctgccaatgatgtttcatttgccaccatccgttttcatgacctcctgtcacagctggatgatcaatatagtcgcttttctttggagaataacttcttgctacagcataacataaggaaaagcaagcgtaatcttcaggataattttcaggaagacccaatccagatgtctatgatcatttacagctgtctgaaggaagaaaggaaaattctggaaaacgcccagagatttaatcaggctcagtcggggaatattcagagcacagtgatgttagacaaacagaaagagcttgacagtaaagtcagaaatgtgaaggacaaggttatgtgtatagagcatgaaatcaagagcctggaagatttacaagatgaatatgacttcaaatgcaaaaccttgcagaacagagaacacgagaccaatggtgtggcaaagagtgatcagaaacaagaacagctgttactcaagaagatgtatttaatgcttgacaataagagaaaggaagtagttcacaaaataatagagttgctgaatgtcactgaacttacccagaatgccctgattaatgatgaactagtggagtggaagcggagacagcagagcgcctgtattggggggccgcccaatgcttgcttggatcagctgcagaactggttcactatagttgcggagagtctgcagcaagttcggcagcagcttaaaaagttggaggaattggaacagaaatacacctacgaacatgaccctatcacaaaaaacaaacaagtgttatgggaccgcaccttcagtcttttccagcagctcattcagagctcgtttgtggtggaaagacagccctgcatgccaacgcaccctcagaggccgctggtcttgaagacaggggtccagttcactgtgaagttgagactgttggtgaaattgcaagagctgaattataatttgaaagtcaaagtcttatttgataaagatgtgaatgagagaaatacagtaaaaggatttaggaagttcaacattttgggcacgcacacaaaagtgatgaacatggaggagtccaccaatggcagtctggcggctgaatttcggcacctgcaattgaaagaacagaaaaatgctggcaccagaacgaatgagggtcctctcatcgttactgaagagcttcactcccttagttttgaaacccaattgtgccagcctggtttggtaattgacctcgagacgacctctctgcccgttgtggtgatctccaacgtcagccagctcccgagcggttgggcctccatcctttggtacaacatgctggtggcggaacccaggaatctgtccttcttcctgactccaccatgtgcacgatgggctcagctttcagaagtgctgagttggcagttttcttctgtcaccaaaagaggtctcaatgtggaccagctgaacatgttgggagagaagcttcttggtcctaacgccagccccgatggtctcattccgtggacgaggttttgtaaggaaaatataaatgataaaaattttcccttctggctttggattgaaagcatcctagaactcattaaaaaacacctgctccctctctggaatgatgggtgcatcatgggcttcatcagcaaggagcgagagcgtgccctgttgaaggaccagcagccggggaccttcctgctgcggttcagtgagagctcccgggaaggggccatcacattcacatgggtggagcggtcccagaacggaggcgaacctgacttccatgcggttgaaccctacacgaagaaagaactttctgctgttactttccctgacatcattcgcaattacaaagtcatggctgctgagaatattcctgagaatcccctgaagtatctgtatccaaatattgacaaagaccatgcctttggaaagtattactccaggccaaaggaagcaccagagccaatggaacttgatggccctaaaggaactggatatatcaagactgagttgatttctgtgtctgaagtg

SEQ ID NO: 6727 - DNA, 492 bp, Homo sapiens
  source 1..492: mol_type = genomic DNA
atgtctgtggatcccctatccagcaaagctctaaagatcaagcgagagctgagcgagaacacgccgcacctgtcggacgaggcgctgatggggctgtcggtgcgcgagctgaaccggcatctgcgcgggctctccgccgaggaggtgacacggctcaagcagcggcgccgcacactcaaaaaccgtggctacgccgccagctgccgcgtgaagcgcgtgtgccagaaggaggagctgcagaagcagaagtcggagctggagcgcgaggtggacaagctggcgcgcgagaacgccgccatgcgcctggagctcgacgcgctgcgcggcaagtgcgaggcgctgcagggcttcgcgcgctccgtggccgccgcccgcgggcccgccacgctcgtggcgccggccagcgtcatcaccatcgtcaagtccaccccgggctcggggtctggccccgcccacggcccggaccccgcccacggcccggcctcctgctcc

SEQ ID NO: 6728 - DNA, 1962 bp, Homo sapiens
  source 1..1962: mol_type = genomic DNA
atggagggcgcgatggcagtgcgggtgacggccgctcatacggcagaagcccaggccgaagccgggcgggaagcgggcgagggtgcagttgcggcggtggcggcggccttggcccccagcggcttcctcggcctcccggcgcccttcagcgaggaagatgaggacgatgtgcacagatgcggccgctgccaggcagagttcaccgccttggaggattttgttcagcacaagattcagaaggcctgccagcgggcccctccggaggccctgcctgccacccctgccaccacagcgttgctgggccaggaggtggtgccggcagcaccaggcccagaggagcccatcactgtggcccacatcgtggtggaggcggcctctctggcagcagacatcagccacgcatctgaccttgttggtggtgggcacatcaaagaggtcatcgtggctgctgaggcggagctgggagacggtgagatggccgaggccccgggcagcccccgccagcaggggctggggctcgcaggggagggtgagcaggcccaggtgaagctactggtgaacaaggatggccgctatgtgtgtgcgctgtgccacaagaccttcaagacgggcagcatcctcaaggcccacatggtcactcacagcagccgcaaggaccacgagtgcaagctctgtggggcctccttccgcaccaagggctcactcatccggcaccaccggcggcacacggatgagcgcccctacaagtgctccaagtgtggaaagagcttccgggagtcgggtgcactgacccggcacctcaagtctctcaccccctgcacagagaaaatccgcttcagtgtgagcaaggacgtggttgtcagcaaagaggacgcacgtgcaggttctggagctggagctgccggcttggggacagccacatcatcggtgacaggcgagcctatagagacttcacccgtgattcacctggtgacagatgccaagggcaccgtcatccacgaagtccacgtccagatgcaggagctgtccctgggcatgaaagccctggccccagagccccccgtctcccaggagctcccctgctccagcgagggcagccgtgagaacctgctgcaccaggccatgcagaactccggcatcgtccttgagcgcgctgctggggaggagggtgccctggagccagctcctgctgccgggtccagtccccagcccctggcagtggcagccccgcagctgccggtactggaagtgcagccgctggagacacaggtggccagcgaggcctcagcggtgcccaggacccacccatgtcctcagtgcagtgagaccttcccgacagcagccaccctggaggcccacaagaggggccacaccgggccgaggccgttcgcctgcgcgcagtgtggcaaggccttccccaaggcctacctgctcaagaagcaccaggaggtgcacgtgcgtgagcgccgcttccgctgtggcgactgcgggaagctctacaagaccattgcccatgtgcgtggccaccggcgcgtccactcagacgagcggccctacccttgtcccaagtgtggcaagcgctacaagactaagaacgcacagcaggtgcacttcaggacacacctggaggagaagccgcacgtgtgccagttctgcagccgtggcttccgagagaagggctcactggtgcggcacgtgcgacaccacacaggcgagaagccgttcaagtgctacaagtgcggccgtggcttcgccgagcacggcacgctgaaccggcacctgcgcaccaaagggggctgcctgctggaggtggaggagttgctggtgtctgaggacagccccgcggcagccaccaccgtcctcacggaagacccgcacacagtgccactgcggacgatgcggagaccagtgaggccacggagatcatcgagggcacccagacagaggtggacagccacatca

SEQ ID NO: 6729 - DNA, 1182 bp, Homo sapiens
  source 1..1182: mol_type = genomic DNA
atgaatacaaactcaaaggaggttttatccctgggtgttcaagttcccgaggcatgggaagaacttctgacaatgaaagtggaagcaaaaagtcaccttcaatggcaggaatccagactgaaacgcagtaatccactggcaagggaaatcttccgaaggcactttcgacagctgtgctaccaagagacccctggaccaagggaggctcttactcgactccaggaactttgctaccagtggttgaggccacatgtgagcacaaaggagcagattttggatctgctggtgctggagcagtttctatccattctgcccaaggagctccagggctgggtgagggaacactgtccagagagtggagaagaggctgtgattttgctggaggatctggagagagagctcgatgaaccacaacatgagatggtggcccacagacacagacaagaagtcctctgtaaagagatggtgcctctagcagagcagacaccactgacccttcagtcccagcctaaggagccacagctcacatgtgactctgctcagaagtgccattctattggagagacagatgaagtaaccaagactgaggacagagagttggtgctaaggaaagactgtcctaagatagtggaaccacatgggaaaatgtttaatgagcagacctgggaggtatcacagcaggatccctcacatggagaagttggtgaacataaggataggatagagaggcagtggggaaacctcttaggagaggggcaacacaaatgtgatgaatgtgggaagagctttactcagagctcaggtctcattcgacatcaaagaattcatactggagaaagaccttatgaatgtaatgaatgtgggaaagccttcagtcgaagttctggtctttttaatcaccgaggaatccacaatatacagaaacggtaccactgcaaggagtgtgggaaggtcttcagtcagagtgcgggtcttatccagcatcagagaatccacaaaggagaaaagccgtatcagtgcagccagtgcagtaagagctacagtcggcgttcatttctcattgaacatcagagaagccacacaggggagcgacctcaccagtgcattgaatgtgggaaaagctttaatcgacactgcaacctcattcgccatcagaagatccacacagtggctgagctggtc

SEQ ID NO: 6730 - DNA, 1236 bp, Homo sapiens
  source 1..1236: mol_type = genomic DNA
atgataggcatgttggaaagtcttcagcatgaatcagatctccttcagcatgatcaaattcatactggagagaaaccttatgaatgtaatgaatgtagaaaaacttttagcctgaagcaaaaccttgtagagcataagaaaatgcatactggagagaaatctcatgaatgcactgaatgtggtaaagtgtgctctcgagtctcatctcttactctacaccttagaagtcacacaggaaagaaggcatataaatgtaataaatgtggaaaagccttcagccagaaggaaaacttcctttctcatcagaaacatcacactggagagaaaccttatgaatgtgaaaaagtttctattcagatgccaaccatcatcagacaccagaaaaatcatacaggaaccaaaccctatgcatgtaaggaatgtggcaaagcctttaacggcaaagcatatctcactgagcatgagaaaattcatactggagaaaaaccatttgaatgtaatcagtgtggaagagccttcagccagaagcaatacctcattaaacatcagaacatccatactggaaagaagccctttaaatgtagtgagtgtggaaaagcttttagccagaaggaaaacctcattatacatcagagaatccatactggagagaaaccttatgaatgtaaagggtgtgggaaagctttcattcagaagtcaagcctcattagacaccagagaagtcacacaggagagaaaccttatacgtgtaaggaatgtgggaaagccttcagtggcaagtcaaatctcacagagcatgagaaaattcatattggagagaaaccctacaaatgtaatgaatgtggaacaatcttcaggcagaagcaatacctcattaaacatcacaatattcatacaggagagaaaccctatgaatgtaataaatgtggaaaagccttctctcgaatcacatcacttattgtacatgtgagaattcatacaggtgataagccttatgagtgtaaggtctgtgggaaagccttctgtcaaagctcatctcttactgtgcacatgagaagccatacaggtgagaaaccctatggttgtaatgaatgtgggaaagccttttctcagttctcaacccttgctctgcacatgagaatccatactggtgaaaaaccttatcagtgtagtgaatgtgggaaagctttcagccaaaagtcacatcacattagacaccagagaattcatactcat

SEQ ID NO: 6731 - DNA, 1236 bp, Homo sapiens
  source 1..1236: mol_type = genomic DNA
atgataggcatgttggaaagtcttcagcatgaatcagatctccttcagcatgatcaaattcatactggagagaaaccttatgaatgtaatgaatgtagaaaaacttttagcctgaagcaaaaccttgtagagcataagaaaatgcatactggagagaaatctcatgaatgcactgaatgtggtaaagtgtgctctcgagtctcatctcttactctacaccttagaagtcacacaggaaagaaggcatataaatgtaataaatgtggaaaagccttcagccagaaggaaaacttcctttctcatcagaaacatcacactggagagaaaccttatgaatgtgaaaaagtttctattcagatgccaaccatcatcagacaccagaaaaatcatacaggaaccaaaccctatgcatgtaaggaatgtggcaaagcctttaacggcaaagcatatctcactgagcatgagaaaattcatactggagaaaaaccatttgaatgtaatcagtgtggaagagccttcagccagaagcaatacctcattaaacatcagaacatccatactggaaagaagccctttaaatgtagtgagtgtggaaaagcttttagccagaaggaaaacctcattatacatcagagaatccatactggagagaaaccttatgaatgtaaagggtgtgggaaagctttcattcagaagtcaagcctcattagacaccagagaagtcacacaggagagaaaccttatacgtgtaaggaatgtgggaaagccttcagtggcaagtcaaatctcacagagcatgagaaaattcatattggagagaaaccctacaaatgtaatgaatgtggaacaatcttcaggcagaagcaatacctcattaaacatcacaatattcatacaggagagaaaccctatgaatgtaataaatgtggaaaagccttctctcgaatcacatcacttattgtacatgtgagaattcatacaggtgataagccttatgagtgtaaggtctgtgggaaagccttctgtcaaagctcatctcttactgtgcatatgagaagccatacaggtgagaaaccctatggttgtaatgaatgtgggaaagccttttctcagttctcaacccttgctctgcacatgagaatccatactggtgaaaaaccttatcagtgtagtgaatgtgggaaagctttcagccaaaagtcgcatcacattagacaccagagaattcatacccat

SEQ ID NO: 6732 - DNA, 1770 bp, Homo sapiens
  source 1..1770: mol_type = genomic DNA
atggcggccccctatcccggcagtggcggcggaagcgaggtcaaatgcgtgggaggccgcggcgccagcgtcccctgggactttctacccgggctgatggtcaaggcgccgtccggaccgtgcctgcaggcgcagcgcaaggagaagtcccggaacgcggcgcgctcgcggcgcgggaaggagaacctggagttcttcgagctggccaagcttctcccgctgcccggcgccatctccagccagctggacaaggcttccatcgtgcgcctcagcgtcacctacctccgcctgcgccggttcgccgctctgggggcgccgccctgggggctgagagccgcggggccgccagctggcctcgccccaggccgccgcggccccgcagcgctggtctccgaagtcttcgagcagcacctgggaggtcacatcttgcagtccctggatggctttgtgttcgccttgaaccaggaaggaaaattcctctacatctcagagacagtctccatctatctgggtctctcacaggtggagatgacgggcagcagcgtcttcgactacattcaccctggggaccactcagaggtgctggagcaactggggctgcggacgccgacgcccggccccccaaccccgccctccgtctcctcttcctcctcctcttcctcttcgcttgcagatacccccgagatcgaggccagcctcaccaaggtgcccccctcctccctggtccaggagcgctccttctttgtccgcatgaaatccacgctcaccaagagggggctgcacgtcaaggcctcagggtacaaggtcatccacgtgactgggcgccttcgggcccacgccctgggccttgtggccctcgggcacacgttgcccccggcccccctggctgagctgccactccatggacacatgatcgtcttccgtctcagcctgggtctcaccatccttgcttgtgagagcagagtcagcgaccacatggacctggggccctcagagctggtgggccgcagctgctaccagtttgtccacggacaggacgccacgaggatccgccagagccacgtggacttgctggacaagggtcaggtgatgactggttactaccgttggctgcagcgtgccgggggcttcgtgtggctgcagtctgtggccacagtggctgggagcgggaagagccccggggagcaccatgtgctttgggtcagccacgtgctcagccaagccgagggtggccaaactcctttggatgccttccagcttccagccagcgtggcctgtgaggaggcatccagcccggggccagagcccacagagccggagcctccgacggaagggaagcaggctgccccagcggagaacgaggccccccagacccagggcaaacgcatcaaagtggagcccggcccgagggaaaccaaaggctccgaggacagtggcgacgaggatccctccagccacccggccacaccgaggcccgagttcacctctgtcatccgggcaggggtcctgaagcaggatccggtgcggccatggggcctggcgcctcccggggaccccccgcccaccctcctgcacgcgggcttcctgccgccggtggtgcggggcctgtgcacacccggcaccatccgctacggccccgcggagctgggcctggtgtacccgcacctgcagaggctgggtccgggccccgcgctcccggaggccttttacccgcccctgggcctgccctacccggggcccgcgggcaccaggctgccgcggaagggggac

SEQ ID NO: 6733 - DNA, 2688 bp, Homo sapiens
  source 1..2688: mol_type = genomic DNA
atgactgaggaatcagaggagacagtcctgtacattgagcaccgctatgtctgctctgagtgcaaccagctgtatggatcactggaagaggtgcttatgcaccaaaactcccacgtgccccagcagcactttgagctggtgggcgtggctgatcccggagtcactgtggccacagacacagcttcaggcacgggcctctatcagacccttgtgcaggagagccagtaccagtgcctggagtgtggtcaactgctgatgtcacccagccagctcctggagcaccaggagctgcacctgaagatgatggcaccccaggaggcagtgccagctgagccatcacctaaggcaccacccctgagctccagcaccatccactacgagtgtgtggattgcaaggctctctttgccagccaggagctctggctgaaccaccggcagacgcacctccgggccacacccaccaaggctcctgcccctgttgtcctggggtccccagttgttctagggcctcctgtgggccaggcccgagtggctgtggagcactcataccgaaaggcagaagagggtggggaaggggcgactgtcccatctgccgctgccaccaccactgaggtagtgactgaggtggagctgctcctctacaagtgctctgagtgctcccagctcttccagctgccggcggatttcctggagcaccaggccactcacttccctgctcctgtacccgagtctcaggagcctgccttacagcaggaggtgcaggcctcgtcacctgcagaggtgcctgtgtctcagcctgaccccttgccagcttctgaccacagttacgagctgcgcaatggtgaagccattgggcgggatcgccgggggcgcagggcccggaggaacaacagtggagaagcaggcggggcagccacacaggagctcttctgctcagcctgtgaccagctctttctctcaccccaccagctacagcagcacctgcggagtcaccgggagggcgtctttaagtgccccctgtgcagtcgtgtcttccctagcccttccagtctggaccagcaccttggagaccatagcagcgagtcacacttcctgtgtgtagactgtggcctggccttcggcacagaggccctcctcctggcccaccggcgagcccacaccccgaatcctctgcattcatgtccatgtgggaagacctttgtcaaccttaccaagttcctttatcaccggcgtactcatggggtagggggtgtccctctgcccacaacaccagtcccaccagaggaacctgtcattggtttccctgagccagccccagcagagactggagagccagaggcccctgagccccctgtgtctgaggagacctcagcagggcccgctgccccaggcacctaccgctgcctcctgtgcagccgtgaatttggaaaggccttgcagctgacccggcaccaacgttttgtgcatcggctggagcggcgccataaatgcagcatttgtggcaagatgttcaagaagaagtctcacgtgcgtaaccacctgcgcacacacacaggggagcggcccttcccctgccctgactgctccaagcccttcaactcacctgccaacctggcccgccaccggctcacacacacaggagagcggccctaccggtgtggggactgtggcaaggctttcacgcaaagctccacactgaggcagcaccgcttggtgcatgcccagcacttcccctaccgctgccaggaatgtggggtgcgttttcaccgtccttaccgcctgctcatgcaccgctaccatcacacaggtgaatacccctacaagtgtcgcgagtgcccccgctccttcttgctgcgtcggctgctggaggtgcaccagctcgtggtccatgccgggcgccagccccaccgctgcccatcctgtggggctgccttcccctcctcactgcggctccgggagcaccgctgtgcagccgctgctgcccaggccccacggcgctttgagtgtggcacctgtggcaagaaagtgggctcagctgctcgactgcaggcacacgaggcggcccatgcagctgctgggcctggagaggtcctggctaaggagccccctgcccctcgagccccacgggccactcgtgcaccagttgcctctccagcagcccttggaagcactgctacagcatcccctgcggcccctgcccgccgccggggtctagagtgcagcgagtgcaagaagctgttcagcacagagacgtcactgcaggtgcaccggcgcatccacacaggtgagcggccatacccatgtccagactgtggcaaagcgttccgtcagagtacccacctgaaagaccaccggcgcctgcacacaggtgagcggccctttgcctgtgaagtgtgtggcaaggcctttgccatctccatgcgcctggcagaacatcgccgcatccacacaggcgaacgaccctactcctgccctgactgtggcaagagctaccgctccttctccaacctctggaagcaccgcaagacccatcagcagcagcatcaggcagctgtgcggcagcagctggcagaggcggaggctgccgttggcctggccgtcatggagactgctgtggaggcgctacccctggtggaagccattgagatctaccctctggccgaggctgagggggtccagatcagtggc

SEQ ID NO: 6734 - DNA, 1581 bp, Homo sapiens
  source 1..1581: mol_type = genomic DNA
atgtaccaaccagaagacgacaacaacagtgacgtgaccagtgacgacgacatgacccggaacagaagagagtcctcaccacctcactcagtccattctttcagtggtgaccgggactgggaccggaggggcagaagcagagacatggagccacgagaccgctggtcccacaccaggaacccaagaagcaggatgcctccgcgggatctttcccttcctgtggtggcgaaaacaagctttgaaatggacagagaggacgacagggactccagggcttatgagtcccgatctcaggatgctgaatcataccaaaatgtggtggacctcgctgaggacaggaaacctcacaacacaatccaggacaacatggaaaactacaggaagctgctctccctcggtttccttgctcaggactctgtccctgcagaaaagaggaacacagagatgttagacaatctgccatctgctgggtcccagttcccggacttcaaacacttaggaacatttctggtgtttgaggagttggtgaccttcgaggatgtgcttgtggacttcagcccagaggaacttagctcccttagtgctgctcagagaaacctctacagggaggtgatgctggagaattaccggaacctggtctccctggggcaccagttctctaaacctgacattatctcacgcctggaagaggaggaatcatatgcaatggagacagacagcagacatacagtgatttgtcaaggagagtctcatgatgatccattggaaccacaccagggcaaccaagagaaacttttgactcctataacaatgaatgaccccaagaccctcactccggaaagaagctatggcagtgatgaatttgagagaagctctaatcttagtaaacaatcaaaggatcctctaggaaaggatccccaggaaggcactgctcctggaatatgtacgagtccccagtcagcatcccaagagaacaaacacaacagatgtgaattttgcaaacgaacctttagtacgcaagtagcccttaggagacacgaacggatccatactgggaagaaaccctatgaatgtaaacagtgtgctgaagccttctatctcatgccacacctcaacagacatcagaagacccattctggtaggaagacttctggctgcaatgaaggtagaaagccttccgtccagtgtgcgaatctctgtgaacgtgtaagaattcacagtcaggaggactactttgaatgttttcagtgcggcaaagcttttctccagaatgtgcatcttcttcaacatctcaaagcccatgaggcagcaagagtccttcctcctgggttgtcccacagcaagacatacttaattcgttatcagcggaaacatgactacgttggagagagagcctgccagtgttgtgactgtggcagagtcttcagtcggaattcatatctcattcagcattatagaactcacactcaagagaggccttaccagtgtcagctatgtgggaaatgtttcggccgaccctcatacctcactcaacattatcaactccattctcaagagaaaactgttgagtgcgatcactgt

SEQ ID NO: 6735 - DNA, 1674 bp, Homo sapiens
  source 1..1674: mol_type = genomic DNA
atgcaccgcggcgggcagcctttgaaaaagcggcgcggctcgttcaagatggcggagctcgaccagttgcctgacgagagctcttcagcaaaagcccttgtcagtttaaaagaaggaagcttatctaacacgtggaatgaaaagtacagttctttacagaaaacacctgtttggaaaggcaggaatacaagctctgctgtggaaatgcctttcagaaattcaaaacgaagtcgacttttttctgatgaagatgataggcaaataaatacaaggtcacctaaaagaaaccagagggttgcaatggttccacagaaatttacagcaacaatgtcaacaccagataagaaagcttcacagaagattggttttcgattacgtaatctgctcaagcttcctaaagcacataaatggtgtatatacgagtggttctattcaaatatagataaaccactttttgaaggtgataatgacttctgtgtatgtctaaaggaatcttttcctaatttgaaaacaagaaagttaacaagagtagaatggggaaaaattcggcggcttatgggaaaaccacggagatgttcttctgcattttttgaggaagagagatcagcattaaaacagaaacggcagaaaataaggctcttacaacaaaggaaagttgcagatgtttcacaattcaaagatctcccagatgaaattcctttgcctctggttattggaacgaaagttacagcacgattacgtggtgttcatgatggtttgttcactggacaaatagatgctgtggatactcttaatgctacttatagagtaacttttgataggacagggcttggaacccataccatccctgactatgaagttctcagtaatgaacctcatgagacaatgccaattgctgcctttggacaaaaacagcggccttctcgattttttatgaccccaccacggttacattatactcctcctctccagtcaccaattatagataatgatcctttattaggacagtcgccgtggagaagtaaaatttctggctctgacactgaaacattaggtggttttccagtagaatttcttatccaagtgaccagattatcaaaaattctcatgattaaaaaggaacatatcaagaaattaagggaaatgaacacagaagcagaaaaattgaaatcatattccatgcccatcagcattgaatttcagcggagatatgcaacaattgttctggagcttgaacagctgaacaaggacctaaacaaagttttgcataaagttcaacagtattgctatgagcttgctccagaccaggggctccagcctgcagatcagccaacagatatgagacgcaggtgtgaggaagaagcacaggaaattgttcggcatgcaaattcctcaacaggacagccctgcgttgaaaatgaaaatctgacagacttaatttccaggcttacagctattttgttacaaattaagtgtctagcagaaggaggagacctgaattcctttgaattcaaatcacttacagactcattaaatgatatcaagagtacaatagacgcttctaatatcagttgctttcagaataatgtagaaatccatgttgcacatattcagagtggcctgagccagatgggaaacttacatgcctttgcagcaaataacaccaacagagac

SEQ ID NO: 6736 - DNA, 1593 bp, Homo sapiens
  source 1..1593: mol_type = genomic DNA
atggaggctccagcccagaaggctgggcagggaggactccccaaggccgatgcccagggtgcctccggggcccgggagaagaggcccgaggagccgaggcccctcgaagaggaccgagctgggagccgccccactcaaaagggggacctgcgtggagcggcgggcggtaggacgactcccccaggcgggggctcccggggctgcagcctcggggtgagccccggcccggggacccggcacagcgccgggaccagacccctcgtgcgggagccgtgcggccccacctcttctcagaaccctgagctggttatccccgaggggctgcaagcccgggagggcccctgtaggagcccagcgcgtggcggggactgcagcaggaactcctgcctggcgtggcatcgcggggcgcccgctggggagacgccacccgtgtgtgacccctgtccggagcggatccagaaccacccccggactcaactgtgtgaggtccacacggactgttggccgtgccaaccagggactggcgctccgacctgcccgaggaccccaaagccgacctcccgcgggaggaaccccttggtggagcagccccgggcttgcgcgtgcggcgaggcctttgcgtggagggccctgcggatcccccaggagaggctgcaggcgacggaggagccccgtccgtgtgcccggtgcgggaagcgcttccgccccaaccagcagcagcaggcgggcaagagtcccccagtgtgtcctgagtgcggccaaacctcgcgacctcgccctattgtccccgaccccccggcccagcgactgtacgcttgcgacgagtgcggcaaggccttcacgcgcacctccagcctgctgcagcaccagcgcatccacacgggcgagcggccctacgagtgcgccgagtgcggcaaggccttcgtgcgctgctccggcctgtaccgccaccagaagacgcactcggccgagcgccaccggcgtggccccgtcctggcgcggcgcgccttccggctggggtgcccgccctgcggggactacagcgagcggagtccccgacgggggtcgggagccggggagaagccgtacgagtgcgccgactgcgccaaggccttcgggctgttctcgcacctcgtggagcaccggcgcgtgcacaccggcgagaagccctacgcgtgccccgagtgcggcaaggccttcaaccagcgctcgaacctgagccggcaccagcgcactcacagcagcgccaagccctacgcgtgcccactgtgcgaaaaggccttcaagggccgctcgggcctggtgcaacaccagcgcgcgcacaccggcgagcggccctatggctgctccgagtgcggaaagaccttccgcggctgctccgagctgcgccagcacgagcgcctgcactcgggcgagaagccctacatctgccgcgactgcggcaaggccttcgtgcgcaactgcagcctggtgcgccacctgcgcacgcacacgggcgagcggccctacgcgtgcggagattgcggccgcgccttcagccaacgctccaacctcaacgagcaccggaagcggcacgggggccgcgccgcgcct

SEQ ID NO: 6737 - DNA, 1710 bp, Homo sapiens
  source 1..1710: mol_type = genomic DNA
atggagagcttggggctgcacacggtgacccttagtgatgggacaacagcctacgtccagcaagctgtcaaaggagagaagcttcttgaagggcaggtgatccagctcgaggatgggaccaccgcatacattcaccaggtgacggtacagaaagaagctctctcctttgaggatggtcagcctgtgcagctggaagatggcagcatggcttacatacaccgcacacccagagaaggctatgaccccagcaccctggaagccgtccaactggaagatggctccactgcctacattcaccaccctgtggctgtgccatcggagagcaccatcctggccgtacagacagaggtgggcttggaggacctggcagcagaggatgatgagggcttcagtgcagacgcagtggtggccctggagcagtatgccagcaaggttcttcatgacagccagattccccgtaatggaaaagggcagcaagttggagacagagcattccgctgtggctacaagggctgtgggcgtctctacaccaccgctcatcacttaaaggtgcatgaacgagctcatacaggtgaccgtccatacagatgtgacttccccagctgtggaaaggcctttgccacaggctatggactgaagagccacgttcgtacccacactggtgagaaaccatacaagtgcccagaggagctgtgcagcaaggccttcaagacctcaggagacctgcagaagcatgtccgtacccacactggtgaacgcccgttccagtgcccttttgagggctgtggccgctccttcaccacatctaacatccgcaaggtacatgtgcgcacccacacaggcgagaggccctacacctgcccggagccccactgtggccgcggcttcaccagcgccaccaactataagaatcacgtgcgcatccacacaggggagaagccatacgtttgcacggtgccaggctgcgggaaacgcttcaccgagtactcgagcttgtataagcaccacgtggtgcacacacactgcaagccctacacctgcagcacctgcggcaagacctaccggcagacctccaccttggccatgcacaagcgcagtgcccatggcgagctggaggccacggaggagagtgagcaggccctctatgagcagcagcaacttgaggccgcctctgcagccgaggagagtccgccacccaaacgaccccggatagcttacctttcggaggtgaaggaagagagagatgacatcccagcccaggtggcgatggtgactgaagaagatggggccccccaggtggctctgatcactcaggatggtgcccagcaggtcagcctgtccccggaagacctgcaggccctggggagtgccatcagtatggtcacccagcacggcagcaccaccctcaccatccccagtcctgatgccgacctggccacatctggcacacatacagtcaccatggtcagcgccgatggcacccagacgcagcccgtcacaatcattacctctggggctgtggtggctgaggactcaagtgtagcatctcttcgtcatcaacaggtggcactgttggccacagccaacggaacgcacattgcagtgcagctggaggaacagcagaccttagaggaggccatcaatgtggccactgcggccatgcagcaaggggctgtgaccctggagacaacagtgtcggagagtggctgc

SEQ ID NO: 6738 - DNA, 1785 bp, Homo sapiens
  source 1..1785: mol_type = genomic DNA
atgagagagaccttggaggccctcagctccctgggattctctgtgggacagccagagatggccccccaaagtgagcccagggaaggatcccataatgcccaggagcagatgtcctcttctagggaagagagagcactgggggtgtgctcagggcacgaggcccctacaccggaggaaggtgcccacacagaacaagccgaggctccctgcagaggccaggcgtgctcagcacagaaggctcagcctgtgggtacctgcccaggagaggagtggatgattcggaaggtgaaggtggaggacgaagatcaggaggcagaagaggaggtcgaatggccccagcatctatcgttacttcccagcccctttcccgcgcctgacctggggcatctggctgccgcgtacaaactggagccaggggccccgggggcactgagtgggctcgcgctgtctgggtggggtccgatgccggagaagccctacggctgcggggagtgtgagcggcgcttccgggaccagctgacgttgcgactgcaccagcggctgcaccggggcgagggcccctgcgcctgcccggactgcggccgcagcttcacgcagcgcgcccacatgctactgcatcagcgcagccaccgcggcgagcggcctttcccgtgctccgagtgcgacaagcgcttcagcaagaaggcccatctgacccgccacctgcgcacgcacacgggcgagcggccctacccgtgcgcggagtgcggcaagcgcttcagccagaagatccacctgggctcgcaccaaaagacccacaccggcgagcggcccttcccctgcacggaatgcgagaagcgctttcgcaagaagacgcacttgattcggcaccagcgcatccatacgggcgagaggccctaccagtgcgcacagtgcgcacgcagcttcacgcacaagcagcacttggtgcggcaccaaagggtgcaccagacggccggcccggccaggccctctcccgactcgtccgcttctcctcattccactgccccgtccccgaccccatcctttcccgggccaaagcctttcgcgtgctccgactgcggcttgagcttcggctggaaaaagaacctcgccacgcaccagtgtctgcaccgcagcgagggtcgcccctttgggtgcgatgagtgcgcactgggcgccaccgtggatgcccccgccgccaagcccctggccagcgcgcctggcggaccgggctgcggcccaggatccgatcccgtggtgccccagcgcgccccctcgggcgagcggtccttcttctgcccggactgcgggcgcggcttctcccatgggcagcacctggcgcggcacccgcgcgtgcacacgggcgaacggcccttcgcctgcacgcagtgtgaccgccgcttcggctcgcggcctaatctggtcgcccactccagggcccacagcggcgccaggcctttcgcctgcgctcagtgcggccgccgcttcagccgcaagtcgcacctgggccgccaccaggcggtgcacactggcagccgcccccacgcctgcgccgtctgcgcccgcagcttcagctccaaaaccaacctagtccgccaccaggcgatccacacaggctcccgccccttctcctgcccgcagtgcggaaagagcttcagccgcaagacccacctggtgcggcaccagctcattcacggcgaagccgcccacgcggccccggacgccgcccttgcggccccagcctggtccgctccccccgaggtggcgccgcccccgctcttcttc

SEQ ID NO: 6739 - DNA, 1833 bp, Homo sapiens
  source 1..1833: mol_type = genomic DNA
atgccgcgaaggaagaggaatgcaggcagtagttcagatggaaccgaagattccgatttttctacagatctcgagcacacagacagttcagaaagtgatggcacatcccgacgatctgctcgagtcacccgctcctcagccaggctaagccagagttctcaagattccagtcctgttcgaaatctgcagtcttttggcactgaggagcctgcttactctaccagaagagtgacccgtagtcagcagcagcctaccccagtgacaccgaaaaaataccctcttcggcagactcgttcatctggttcagaaactgagcaagtggttgatttttcagatagagaaactaaaaatacagctgatcatgatgagtcaccgcctcgaactccaactggaaatgcgccttcttctgagtctgacatagacatctccagccccaatgtatctcacgatgagagcattgccaaggacatgtccctgaaggactcaggcagtgatctctctcatcgccccaagcgccgtcgcttccatgaaagctacaacttcaatatgaagtgtcctacaccaggctgtaactctctaggacaccttacaggaaaacatgagagacatttctccatctcaggatgcccactgtatcataacctctcagctgacgaatgcaaggtgagagcacagagccgggataagcagatagaagaaaggatgctgtctcacaggcaagatgacaacaacaggcatgcaaccaggcaccaggcaccaacggagaggcagcttcgatataaggaaaaagtggctgaactcaggaagaaaagaaattctggactgagcaaagaacagaaagagaaatatatggaacacagacagacctatgggaacacacgggaacctcttttagaaaacctgacaagcgagtatgacttggatcttttccgaagagcacaagcccgggcttcagaggatttggagaagttaaggctgcaaggccaaatcacagagggaagcaacatgattaaaacaattgcttttggccgctatgagcttgatacctggtaccattctccatatcctgaagaatatgcacggctgggacgtctctatatgtgtgaattctgtttaaaatatatgaagagccaaacgatactccgccggcacatggccaaatgtgtgtggaaacacccacctggtgatgagatatatcgcaaaggttcaatctctgtgtttgaagtggatggcaagaaaaacaagatctactgccaaaacctgtgcctgttggccaaactttttctggaccacaagacattatattatgatgtggagcccttcctgttctatgttatgacagaggcggacaacactggctgtcacctgattggatatttttctaaggaaaagaattcattcctcaactacaacgtctcctgtatccttactatgcctcagtacatgagacagggctatggcaagatgcttattgatttcagttatttgctttccaaagtcgaagaaaaagttggctccccagaacgtccactctcagatctggggcttataagctatcgcagttactggaaagaagtacttctccgctacctgcataattttcaaggcaaagagatttctatcaaagaaatcagtcaggagacggctgtgaatcctgtggacattgtcagcactctgcaagcccttcagatgctcaaatactggaagggaaaacacctagttttaaagagacaggacctgattgatgagtggatagccaaagaggccaaaaggtccaactccaataaaaccatggatcccagctgcttaaaatggacccctcccaagggcact

SEQ ID NO: 6740 - DNA, 1485 bp, Homo sapiens
  source 1..1485: mol_type = genomic DNA
atggcggagtcggcgcctgctcggcacaggagaaaacgacgctccacacctttaacttcttccacacttccttcacaagcaacagagaaaagctcctattttcagaccaccgagatttcactctggacggtggtggccgctattcaggctgtggagaagaagatggagtcccaggctgcccggctacagagcctggaggggcgcacggggacagccgagaagaagctggctgactgcgagaagatggccgtggagttcgggaaccagctggagggcaagtgggccgtgctggggaccctgctgcaggagtatgggctactgcagaggcggctggagaacgtggagaacctgctgcgcaacaggaacttctggatcctgcggctgcccccgggcagcaagggggaggcccccaaggtgtccaggtcactggagaatgatggcgtctgtttcaccgagcaggaatgggagaatctggaggattggcagaaggagctctacagaaacgtgatggagagtaactatgagacactggtctctctgaaggtccttggccagacagagggagaagcggagttgggtacagagatgctgggtgacttggaagaggaaggtcctggtggtgcccacccagcaggtggggtcatgatcaaacaggagctacagtatacacaggaaggccctgcggatcttcctggagagttctcatgcattgctgaagagcaggctttcctgagcccagagcagaccgaactctggggtggtcagggcagttctgtcctcttggaaacaggtcctggggactctactctagaggagcctgttggtagtagagttcctagcagcagcagaactgtgggctgcccgaagcagaaatctcataggcaggtacagctggaccaggaatgtgggcagggcctgaagctgaaaaaggacacttcccgcccctacgaatgttctgagtgtgagatcaccttccgctataagcagcagctggccacacatctgcgcagccactctgggtgggggtcttgtacacctgaggagccagaggagagccttaggcccaggccacggctgaaaccacagaccaaaaaggccaagctgcatcagtgtgatgtgtgcctgaggagcttcagctgcaaggtgagcctggtgacccatcagcgttgccacctgcaggaggggcccagtgccggccagcatgtccaagagaggttctcacccaacagcctggttgccctgcctggccacatcccttggaggaaaagccggagttccctcatctgtggttactgtggcaagagcttcagtcacccatctgacttggtgcggcaccagcgcatccacacgggtgagcggccctacagctgcactgagtgtgagaagagctttgtccagaagcagcacctcctgcagcaccagaagatccaccagcgggagcggggtgggctggccctggagcccggaaggcccaatggcctgctt

SEQ ID NO: 6741 - DNA, 1764 bp, Homo sapiens
  source 1..1764: mol_type = genomic DNA
atgggaggccttgagaagaagaagtatgaacgaggctcggccaccaactacatcacccggaacaaagcccggaagaagctccagctgagcttggctgactttaggcggctgtgcattctgaagggcatttatccccatgaacccaaacacaagaagaaggttaacaagggttctacagcagcccgaacgttttaccttatcaaagacatcaggtttctcctccacgaacccattgtcaacaagttccgtgaatacaaggtgttcgtccggaagctccggaaggcttatgggaagagcgagtggaacactgtagagcgtttaaaggacaataagcccaactacaaactcgaccacatcatcaaggaacggtatcccacgttcatcgatgccctgcgggacctggacgatgccctctccatgtgcttcctgttttccaccttcccgcggactggcaagtgccacgtgcagaccattcagctgtgccgccggctcactgtggagttcatgcactacattatcgctgcccgtgccctgcgcaaggtcttcctgtccatcaaaggcatttactaccaggccgaggtactggggcagcccatcgtgtggatcactccctatgccttctcccatgaccacccgacagacgtggactacagggtcatggccaccttcaccgagttctacaccacgctgctgggctttgtcaacttccgcctttaccagttgctcaacctccactatcccccgaagctcgagggtcaggcccaagcagaggcaaaggccggtgagggcacctacgcgttggactccgagagttgtatggagaaactggcagccctcagtgccagcctggcccgcgtggtggtgcctgccacagaggaggaggccgaggtggatgagtttcccaccgatggggagatgtcagcgcaggaggaagaccgcaggaaggagctggaggcgcaggagaagcacaagaagctttttgagggcctgaagttcttcctgaaccgagaggtgccccgtgaggccctggccttcatcatcaggagttttggtggggaagtgtcctgggacaaatctttgtgcattggggccacctatgacgtcacagactcccgcatcacccatcagattgtcgaccggcctgggcagcagacctcagtcattggcaggtgctacgtgcagccccagtgggtgtttgactcagtgaacgccaggctccttctccccgtggcagagtacttctctggggtgcagctgcccccacacctttcaccctttgtgaccgagaaggaaggagattacgttccacctgagaagctgaagctgctggctctgcagcggggagaggacccaggaaacctgaatgagtcagaagaggaggaggaagaggacgacaacaacgaaggtgatggtgatgaagagggagaaaatgaggaggaggaggaagatgcagaggctggttcagaaaaggaggaagaggcccggctggcagccctggaagagcagaggatggaggggaagaagcccagggtgatggcaggcaccttgaagctggaggataagcagcggctggcccaggaggaggagagtgaggccaagcgcctggccattatgatgatgaagaagcgggagaagtacctgtaccagaagatcatgtttggcaagaggcgaaaaatccgagaggccaacaagctggcggagaagcggaaagcccacgatgaggcggtgaggtctgagaagaaggccaagaaggcaaggccggag

SEQ ID NO: 6742 - DNA, 1500 bp, Homo sapiens
  source 1..1500: mol_type = genomic DNA
atggcgccaccttcggctccgctccctgcgcagggaccaggaaaggccagacccagtcggaaaaggggcaggaggccgagggctctgaagttcgtggacgtggccgtgtacttctccccggaggagtggggctgcctgcggcccgcgcagagggccctgtaccgggacgtgatgcgggagacctacggtcacctgggcgcgctcgggtgcgcaggtcccaaaccagccctcatctcctggttggaacgaaacaccgatgactgggaaccggctgctctagatccgcaggagtacccgagagggctaacagtccagagaaaaagcagaaccagaaagaagaatggggagaaggaagtattcccgcctaaggaggcaccccgaaaggggaagcgaggccggaggcccagcaaaccccgactgattcctaggcagacgtccgggggccccatctgccctgactgcggctgtaccttccctgatcatcaggccctggagagccacaagtgcgcccagaatctaaaaaagccttacccttgcccagactgtgggcgccgcttttcctatccatccctgctggtcagtcaccggcgggcacactccggcgagtgcccctatgtttgtgaccagtgtggcaaacgtttctcccagcgcaagaacctctcccagcaccaggtcatccatacaggggagaagccctatcactgccctgactgtggtcgctgcttccggaggagccggtccttggccaatcaccggaccacacacacaggtgaaaaaccccaccagtgccctagctgtggacgtcgcttcgcctacccctccctgctagccatccaccagcgtacacacacgggagagaagccctacacttgcctcgagtgcaaccgccgcttccgccagcgcacggccctcgtcatccaccagcgcatccacacgggcgagaagccctacccgtgcccggactgcgagcggcgcttctcctcctcctctcgcctggtcagtcaccggcgtgtgcactctggggagcgtccctatgcctgcgagcactgtgaggcccgcttctcccagcgcagcacgctgctccagcaccagctcttgcacaccggagagaagccctacccctgcccagactgtgggcgtgccttccggcggagcggctccctggccatccatcgcagcacgcacacagaggagaagctgcacgcctgcgacgactgtggtcgccgctttgcctacccctcactgctggccagccaccggcgcgtgcactcgggcgagcggccctatgcctgcgacctttgctccaagcgttttgctcagtggagccacctggcccagcaccagctgctgcacacgggggagaagcctttcccctgcctcgagtgtggccggtgcttccgccagaggtggtctctggctgtccacaagtgtagccccaaggccccaaactgtagccctagatctgctatcgggggctccagtcagaggggcaacgcccat

SEQ ID NO: 6743 - DNA, 1005 bp, Homo sapiens
  source 1..1005: mol_type = genomic DNA
atggacaatgcaagaatgaactccttcctggaataccccatacttagcagtggcgactcggggacctgctcagcccgagcctacccctcggaccataggattacaactttccagtcgtgcgcggtcagcgccaacagttgcggcggcgacgaccgcttcctagtgggcaggggggtgcagatcggttcgccccaccaccaccaccaccaccaccatcgccacccccagccggctacctaccagacttccgggaacctgggggtgtcctactcccactcaagttgtggtccaagctatggctcacagaacttcagtgcgccttacagcccctacgcgttaaatcaggaagcagacgtaagtggtgggtacccccagtgcgctcccgctgtttactctggaaatctctcatctcccatggtccagcatcaccaccaccaccagggttatgctgggggcgcggtgggctcgcctcaatacattcaccactcatatggacaggagcaccagagcctggccctggctacgtataataactccttgtcccctctccacgccagccaccaagaagcctgtcgctcccccgcatcggagacatcttctccagcgcagacttttgactggatgaaagtcaaaagaaaccctcccaaaacagggaaagttggagagtacggctacctgggtcaacccaacgcggtgcgcaccaacttcactaccaagcagctcacggaactggagaaggagttccacttcaacaagtacctgacgcgcgcccgcagggtggagatcgctgcatccctgcagctcaacgagacccaagtgaagatctggttccagaaccgccgaatgaagcaaaagaaacgtgagaaggagggtctcttgcccatctctccggccaccccgccaggaaacgacgagaaggccgaggaatcctcagagaagtccagctcttcgccctgcgttccttccccggggtcttctacctcagacactctgactacctcccac

SEQ ID NO: 6744 - DNA, 972 bp, Homo sapiens
  source 1..972: mol_type = genomic DNA
atgttccccagccctgctctcacgcccacgcccttctcagtcaaagacatcctaaacctggaacagcagcagcgcagcctggctgccgccggagagctctctgcccgcctggaggcgaccctggcgccctcctcctgcatgctggccgccttcaagccagaggcctacgctgggcccgaggcggctgcgccgggcctcccagagctgcgcgcagagctgggccgcgcgccttcaccggccaagtgtgcgtctgcctttcccgccgcccccgccttctatccacgtgcctacagcgaccccgacccagccaaggaccctagagccgaaaagaaagagctgtgcgcgctgcagaaggcggtggagctggagaagacagaggcggacaacgcggagcggccccgggcgcgacggcggaggaagccgcgcgtgctcttctcgcaggcgcaggtctatgagctggagcggcgcttcaagcagcagcggtacctgtcggcccccgaacgcgaccagctggccagcgtgctgaaactcacgtccacgcaggtcaagatctggttccagaaccggcgctacaagtgcaagcggcagcggcaggaccagactctggagctggtggggctgcccccgccgccgccgccgcctgcccgcaggatcgcggtgccagtgctggtgcgcgatggcaagccatgcctaggggactcggcgccctacgcgcctgcctacggcgtgggcctcaatccctacggttataacgcctaccccgcctatccgggttacggcggcgcggcctgcagccctggctacagctgcactgccgcttaccccgccgggccttccccagcgcagccggccactgccgccgccaacaacaacttcgtgaacttcggcgtcggggacttgaatgcggttcagagccccgggattccgcagagcaactcgggagtgtccacgctgcatggtatccgagcctgg

SEQ ID NO: 6745 - DNA, 969 bp, Homo sapiens
  source 1..969: mol_type = genomic DNA
atgtaccacaacagtagtcagaagcggcactggaccttctccagcgaggagcagctggcaagactgcgggctgacgccaaccgcaaattcagatgcaaagccgtggccaacgggaaggttcttccgaatgatccagtctttcttgagcctcatgaagaaatgacactctgcaaatactatgagaaaaggttattggaattctgttcggtgtttaagccagcaatgccaagatctgttgtgggtacggcttgtatgtatttcaaacgtttttatcttaataactcagtaatggaatatcaccccaggataataatgctcacttgtgcatttttggcctgcaaagtagatgaattcaatgtatctagtcctcagtttgttggaaacctccgggagagtcctcttggacaggagaaggcacttgaacagatactggaatatgaactacttcttatacagcaacttaatttccaccttattgtccacaatccttacagaccatttgagggcttcctcatcgacttaaagacccgctatcccatattggagaatccagagattttgaggaaaacagctgatgactttcttaatagaattgcattgacggatgcttaccttttatacacgccttcccaaattgccctgactgccattttatctagtgcctccagggctggaattactatggaaagttatttatcagagagtctgatgctgaaagagaacagaacttgcctgtcacagttactagatataatgaaaagcatgagaaacttagtaaagaagtatgaaccacccagatctgaagaagttgctgttctgaaacagaagttggagcgatgtcattctgctgagcttgcacttaacgtaatcacgaagaagaggaaaggctatgaagatgatgattacgtctcaaagaaatccaaacatgaggaggaagagtggactgatgacgacctggtagaatctctc

SEQ ID NO: 6746 - DNA, 969 bp, Homo sapiens
  source 1..969: mol_type = genomic DNA
atgtaccacaacagtagtcagaagcggcactggaccttctccagcgaggagcagctggcaagactgcgggctgacgccaaccgcaaattcagatgcaaagccgtggccaacgggaaggttcttccgaatgatccagtctttcttgagcctcatgaagaaatgacactctgcaaatactatgagaaaaggttattggaattctgttcggtgtttaagccagcaatgccaagatctgttgtgggtacggcttgtatgtatttcaaacgtttttatcttaataactcagtaatggaatatcaccccaggataataatgctcacttgtgcatttttggcctgcaaagtagatgaattcaatgtatctagtcctcagtttgttggaaacctccgggagagtcctcttggacaggagaaggcacttgaacagatactggaatatgaactacttcttatacagcaacttaatttccaccttattgtccacaatccttacagaccatttgagggcttcctcatcgacttaaagacccgctatcccatattggagaatccagagattttgaggaaaacagctgatgactttcttaatagaattgcattgacggatgcttaccttttatacacaccttcccaaattgccctgactgccattttatctagtgcctccagggctggaattactatggaaagttatttatcagagagtctgatgctgaaagagaacagaacttgcctgtcacagttactagatataatgaaaagcatgagaaacttagtaaagaagtatgaaccacccagatctgaagaagttgctgttctgaaacagaagttggagcgatgtcattctgctgagcttgcacttaacgtaatcacgaagaagaggaaaggctatgaagatgatgattacgtctcaaagaaatccaaacatgaggaggaagaatggactgatgacgacctggtagaatctctc

SEQ ID NO: 6747 - DNA, 1386 bp, Homo sapiens
  source 1..1386: mol_type = genomic DNA
atggccagcaacagcagctcctgcccgacacctgggggcgggcacctcaatgggtacccggtgcctccctacgccttcttcttcccccctatgctgggtggactctccccgccaggcgctctgaccactctccagcaccagcttccagttagtggatatagcacaccatccccagccaccattgagacccagagcagcagttctgaagagatagtgcccagccctccctcgccaccccctctaccccgcatctacaagccttgctttgtctgtcaggacaagtcctcaggctaccactatggggtcagcgcctgtgagggctgcaagggcttcttccgccgcagcatccagaagaacatggtgtacacgtgtcaccgggacaagaactgcatcatcaacaaggtgacccggaaccgctgccagtactgccgactgcagaagtgctttgaagtgggcatgtccaaggagtctgtgagaaacgaccgaaacaagaagaagaaggaggtgcccaagcccgagtgctctgagagctacacgctgacgccggaggtgggggagctcattgagaaggtgcgcaaagcgcaccaggaaaccttccctgccctctgccagctgggcaaatacactacgaacaacagctcagaacaacgtgtctctctggacattgacctctgggacaagttcagtgaactctccaccaagtgcatcattaagactgtggagttcgccaagcagctgcccggcttcaccaccctcaccatcgccgaccagatcaccctcctcaaggctgcctgcctggacatcctgatcctgcggatctgcacgcggtacacgcccgagcaggacaccatgaccttctcggacgggctgaccctgaaccggacccagatgcacaacgctggcttcggccccctcaccgacctggtctttgccttcgccaaccagctgctgcccctggagatggatgatgcggagacggggctgctcagcgccatctgcctcatctgcggagaccgccaggacctggagcagccggaccgggtggacatgctgcaggagccgctgctggaggcgctaaaggtctacgtgcggaagcggaggcccagccgcccccacatgttccccaagatgctaatgaagattactgacctgcgaagcatcagcgccaagggggctgagcgggtgatcacgctgaagatggagatcccgggctccatgccgcctctcatccaggaaatgttggagaactcagagggcctggacactctgagcggacagccggggggtggggggcgggacgggggtggcctggcccccccgccaggcagctgtagccccagcctcagccccagctccaacagaagcagcccggccacccactccccg

SEQ ID NO: 6748 - DNA, 579 bp, Homo sapiens
  source 1..579: mol_type = genomic DNA
atggacggcggcacactgcccaggtccgcgccccctgcgccccccgtccctgtcggctgcgctgcccggcggagacccgcgtccccggaactgttgcgctgcagccggcggcggcgaccggccaccgcagagaccggaggcggcgcagcggccgtagcgcggcgcaatgagcgcgagcgcaaccgcgtgaagctggtgaacttgggcttccaggcgctgcggcagcacgtgccgcacggcggcgccagcaagaagctgagcaaggtggagacgctgcgctcagccgtggagtacatccgcgcgctgcagcgcctgctggccgagcacgacgccgtgcgcaacgcgctggcgggagggctgaggccgcaggccgtgcggccgtctgcgccccgcgggccgccagggaccaccccggtcgccgcctcgccctcccgcgcttcttcgtccccgggccgcgggggcagctcggagcccggctccccgcgttccgcctactcgtcggacgacagcggctgcgaaggcgcgctgagtcctgcggagcgcgagctactcgacttctccagctggttagggggctac

SEQ ID NO: 6749 - DNA, 765 bp, Homo sapiens
  source 1..765: mol_type = genomic DNA
atgttggactcggtgacacacagcaccttcctgcctaatgcatccttctgcgatcccctgatgtcgtggactgatctgttcagcaatgaagagtactaccctgcctttgagcatcagacagcctgtgactcatactggacatcagtccaccctgaatactggactaagcgccatgtgtgggagtggctccagttctgctgcgaccagtacaagttggacaccaattgcatctccttctgcaacttcaacatcagtggcctgcagctgtgcagcatgacacaggaggagttcgtcgaggcagctggcctctgcggcgagtacctgtacttcatcctccagaacatccgcacacaaggttactccttttttaatgacgctgaagaaagcaaggccaccatcaaagactatgctgattccaactgcttgaaaacaagtggcatcaaaagtcaagactgtcacagtcatagtagaacaagcctccaaagttctcatctatgggaatttgtacgagacctgcttctatctcctgaagaaaactgtggcattctggaatgggaagatagggaacaaggaatttttcgggtggttaaatcggaagccctggcaaagatgtggggacaaaggaagaaaaatgacagaatgacatatgaaaagttgagcagagccctgagatactactataaaacaggaattttggagcgggttgaccgaaggttagtgtacaaatttggaaaaaatgcacacgggtggcaggaagacaagcta

SEQ ID NO: 6750 - DNA, 555 bp, Homo sapiens
  source 1..555: mol_type = genomic DNA
atggaggccgctgcagacggcccggctgagacccaaagcccggtggaaaaagacagcccggcgaagacccaaagcccagcccaagacacctcaatcatgtcgagaaataacgcagatacaggcagagttcttgccttaccagagcacaagaagaagcgcaagggaaacttgccagccgagtccgttaagatcctccgcgactggatgtataagcatcggtttaaggcctacccttcagaagaagagaagcaaatgctgtcagagaagaccaatttgtctttgttgcggatttctaactggtttatcaatgctcgcagacgcattctcccggatatgcttcaacagcgtagaaacgaccccatcattggccacaaaacgggcaaagatgcccatgccacccacctgcagagcaccgaggcgtctgtgccggccaagtcagggccagtggtccagacaatgtacaaagcctgcccctgtggcccttgccaaagggccagatgtcaagagagaagcaaccagatccggagtcggcccctagccagaagctcaccggaa

SEQ ID NO: 6751 - DNA, 1782 bp, Homo sapiens
  source 1..1782: mol_type = genomic DNA
atggcggcggccgtgcttagggattcgacttcggttcccgtgactgcagaagctaaacttatgggctttacacagggctgtgtgacctttgaggacgtggccatttacttctcccaggaagaatgggggctccttgatgaggctcagaggctcctgtaccgcgatgtgatgctggagaactttgcacttataactgcgctggtttgttggcatgggatggaggatgaagagacacctgagcaaagtgtttctgtagaaggagtacctcaggtcaggactccagaggccagtccatccacccagaagattcaatcctgtgacatgtgtgtcccattcctgaccgacattttgcacctgaccgatttgcctgggcaggaactatacttgactggggcatgtgcggtctttcaccaggaccagaagcatcatagtgcagagaaacccttggaaagtgacatggacaaggcctcatttgtgcagtgctgcctgttccatgagtcaggaatgcctttcaccagcagtgaggttgggaaggacttcctagccccattgggcattcttcagccgcaagctattgctaactatgagaagccaaacaaaatcagcaaatgtgaggaggcctttcatgttggaataagtcattacaagtggagtcaatgcaggagagagtccagccacaaacacactttttttcaccctagagtctgcactggaaaaaggctttatgaatctagcaaatgtgggaaagcctgctgctgtgagtgctcccttgttcagctgcaaagagtccaccctggagaaaggccttatgagtgcagtgaatgtgggaaatcttttagccaaacctctcatctgaatgatcatcggagaatccacactggagaaaggccttatgtgtgtggtcagtgtgggaaatcatttagccaaagagccaccctcattaaacatcacagagttcacactggagaaaggccttacgagtgtggtgaatgtgggaaatcttttagccaaagttccaaccttattgaacattgcagaattcacactggagaaaggccttatgagtgtgatgaatgtggaaaagcctttgggtccaaatccactcttgttcgacaccagagaactcacacaggagaaaagccatatgagtgtggtgaatgtgggaaattattcagacaaagcttcagccttgttgtacaccagagaattcacactacagcaaggccttatgagtgtggccagtgtgggaaatcatttagcctaaagtgtggcctcattcagcaccagttaattcacagtggagctaggccctttgagtgtgatgagtgcggaaaatcctttagccaaagaaccaccctcaataaacaccacaaagttcacactgcagaaaggccttatgtatgtggggaatgtgggaaagcttttatgttcaaatctaaacttgttaggcaccagagaactcacactggagaaaggccttttgagtgcagtgaatgtgggaaattttttagacaaagctataccctcgttgaacaccagaaaattcacactggattaaggccttacgactgtggacagtgcgggaaatcctttatccaaaagtctagcctcattcaacaccaagtggttcacacaggagaaaggccatatgagtgtggcaaatgtgggaagtcctttacacaacactctggcctcattctccaccgaaaatctcacactgtggagaggcctcgtgacagcagcaaatgtggaaaaccctacagcccaagatctaacattgtt

SEQ ID NO: 6752 - DNA, 780 bp, Homo sapiens
  source 1..780: mol_type = genomic DNA
atggagcttacccagcctgcagaagacctcatccagacccagcagacccctgcctcagaacttggggaccctgaagaccccggagaggaggctgcagatggctcagacactgtggtcctcagtctctttccctgcacccctgagcctgtgaatcctgaaccggatgccagtgtttcctctccacaggcaggcagctccctgaagcactccaccactctcaccaaccggcagcgagggaacgaggtgtcagctctgccggccaccctagactccctgtccatccaccagctcgcagcacagggggagctggaccagctgaaggagcatttgcggaaaggtgacaacctcgtcaacaagccagacgagcgcggcttcacccccctcatctgggcctccgcctttggagagattgagaccgttcgcttcctgctggagtggggtgccgacccccacatcctggcaaaagagcgagagagcgccctgtcgctggccagcacaggcggctacacagacattgtggggctgctgctggagcgtgacgtggacatcaacatctatgattggaatggagggacgccactgctgtacgctgtgcgcgggaaccacgtgaaatgcgttgaggccttgctggcccgaggcgctgacctcaccaccgaagccgactctggctacaccccgatggaccttgccgtggccctgggataccggaaagtgcaacaggtgatcgagaaccacatcctcaagctcttccagagcaacctggtgcccgctgaccctgag

SEQ ID NO: 6753 - DNA, 714 bp, Homo sapiens
  source 1..714: mol_type = genomic DNA
atggagcttacccagcctgcagaagacctcatccagacccagcagacccctgcctcagaacttggggaccctgaagaccccggagaggaggctgcagatggctcagacactgtggtcctcagtctctttccctgcacccctgagcctgtgaatcctgaaccggatgccagtgtttcctctccacaggcaggcagctccctgaagcactccaccactctcaccaaccggcagcgagggaacgaggtgtcagctctgccggccaccctagactgtgacaacctcgtcaacaagccagacgagcgcggcttcacccccctcatctgggcctccgcctttggagagattgagaccgttcgcttcctgctggagtggggtgccgacccccacatcctggcaaaagagcgagagagcgccctgtcgctggccagcacaggcggctacacagacattgtggggctgctgctggagcgtgacgtggacatcaacatctatgattggaatggagggacgccactgctgtacgctgtgcgcgggaaccacgtgaaatgcgttgaggccttgctggcccgaggcgctgacctcaccaccgaagccgactctggctacaccccgatggaccttgccgtggccctgggataccggaaagtgcaacaggtgatcgagaaccacatcctcaagctcttccagagcaacctggtgcccgctgaccctgag

SEQ ID NO: 6754 - DNA, 567 bp, Homo sapiens
  source 1..567: mol_type = genomic DNA
atgaagaccaagaaccggcccccacggcgccgggccccggtgcaggacacagaggccacccccggggaggggacgcccgacgggtccctgccgaacccggggccagagccggccaagggtctgcggagccggccggcccgggccgcagcaagggctccgggcgagggcaggcgcaggcggccaggaccctccgggcccggtggccgtcgtgacagcagcatccagcggcggctggagagcaacgagagggagcggcagcggatgcacaagctaaataacgccttccaggccctgcgtgaagtcatcccccacgtgcgcgcggacaagaagctctccaagatcgagacgctcacgctggccaagaactacatcaaatcgctgacggccaccatcctgaccatgtccagcagccgcctcccaggcctggaggggccgggccccaagctctaccagcactaccagcagcagcagcaggtggctgggggtgcgttgggggccacggaggcccagccccagggccacctgcagaggtactccacgcagatccacagcttccgagagggcacc

SEQ ID NO: 6755 - DNA, 771 bp, Homo sapiens
  source 1..771: mol_type = genomic DNA
atgcccgccagcatgttcagcatcgacaacatcctagccgcccggccgcgctgcaaggactcggtgttgccggtggcgcacagcgcggcggctcccgtcgtcttcccggccctgcacggggactcgctctacggcgccagcggcggcgcctcctcggactatggcgccttctacccgcgccccgtggcccccggcggcgcgggcctcccggccgcggtcagcggctcccgcctcggctacaacaactacttctacgggcagctgcacgtgcaggcggcgcccgtgggcccggcctgctgcggggccgtgccgccgctgggcgcccagcagtgctcctgcgtcccgacgcccccaggctacgagggccccggttcggtgctggtgtccccggtaccgcaccagatgctgccctacatgaacgtgggcacgctgtcgcgcaccgagctgcagcttctcaaccagctgcactgtcggcggaagcggcggcaccgcaccatcttcactgacgagcagctcgaagctctcgagaacctcttccaggagaccaagtacccggacgtgggcacgcgcgagcagctggcccggaaagtgcacctccgcgaggagaaagtggaggtctggtttaagaaccgccgcgccaaatggaggcggcagaagcggtcctcatcagaggagtcggagaacgcggagaagtggaacaagacgtcgtcgtcgaaggcgtcaccggagaagagggaagaggaaggtaaaagcgatttggactcggacagc

SEQ ID NO: 6756 - DNA, 984 bp, Homo sapiens
  source 1..984: mol_type = genomic DNA
atgaagcgacccaaggagccgagcggctccgacggggagtccgacggacccatcgacgtgggccaagagggccagctgagccagatggccaggccgctgtccacccccagctcttcgcagatgcaagccaggaagaaacacagagggatcatagagaaacggcgtcgagaccgcatcaacagtagcctttctgaattgcgacgcttggtccccactgcctttgagaaacagggctcttccaagctggagaaagccgaggtcttgcagatgacggtggatcacttgaaaatgctccatgccactggtgggacaggattctttgatgcccgagccctggcagttgacttccggagcattggttttcgggagtgcctcactgaggtcatcaggtacctgggggtccttgaagggcccagcagccgtgcagaccccgtccggattcgccttctctcccacctcaacagctacgcagccgagatggagccttcgcccacgcccactggccctttggccttccctgcctggccctggtctttcttccatagctgtccagggctgccagccctgagcaaccagctcgccatcctgggaagagtgcccagccctgtcctccccggtgtctcctctcctgcttaccccatcccagccctccgaaccgctccccttcgcagagccacaggcatcatcctgccagcccggaggaatgtgctgcccagtcgaggggcatcttccacccggagggcccgccccctagagaggccagcgacccctgtgcctgtcgcccccagcagcagggctgccaggagcagccacatcgctcccctcctgcagtcttcctccccaacaccccctggtcctacagggtcggctgcttacgtggctgttcccacccccaactcatcctccccagggccagctgggaggccagcgggagccatgctctaccactcctgggtctctgaaatcactgaaatcggggctttc

SEQ ID NO: 6757 - DNA, 2202 bp, Homo sapiens
  source 1..2202: mol_type = genomic DNA
atgaggcctgcggtgctgggctccccagaccgagcacccccagaagatgaggggcctgtcatggtgaagctagaggactctgaggaggagggtgaggctgccttatgggacccaggccctgaagctgcacgcctgcgtttccggtgcttccgctatgaggaggccacagggccccaagaggccctggcccagctccgagagctgtgtcgccagtggctgcgtccagaggtacgctccaaggagcagatgctggagctgttggtgctggagcagttcctgggcgcactgccccctgagatccaggcccgtgtgcaggggcagcggccaggcagccccgaggaggctgctgccctagtagatgggctgcgccgggagccgggcggaccccggagatgggtcacagtccaggtgcagggccaggaggtcctatcagagaagatggagccctccagtttccagcccctacctgaaactgagcctccaactccagagcctgggcccaagacacctcctaggactatgcaggaatcaccactgggcctgcaggtgaaagaggagtcagaggttacagaggactcagatttcctggagtctgggcctctagctgccacccaggagtctgtacccaccctcctgcctgaggaggcccagagatgtgggaccgtgctggaccagatctttccccacagcaagactgggcctgagggtccctcatggagggagcaccccagggccctgtggcatgaggaagctgggggcatcttctccccagggttcgcgctgcagctaggcagcatctccgcaggtccaggtagtgtaagccctcacctccacgtcccctgggacctcggcatggctggcctttctggccagatccaatcaccctcccgcgaaggtggctttgcgcatgcgcttctgctccccagcgatctgaggagtgaacaggaccccacggacgaggatccctgccggggtgtgggccctgctctgatcaccacccgctggcgctcccccaggggccggagccggggccgccccagcactgggggcggggtggttaggggcggccgttgcgatgtatgtggcaaggtgttcagccaacgcagcaacctgctgaggcaccagaagatccacacgggtgagcgaccattcgtgtgcagcgagtgcggccgcagcttcagccgcagctcgcacctgctgcgccaccagcttacgcacaccgaggagcggccgttcgtgtgcggcgactgtggccagggcttcgtgcgcagcgcgcgcctggaagagcatcggagagtgcacacgggcgaacagcctttccgttgcgctgagtgcggccagagcttccggcagcgctccaatctgctgcagcaccagcgcatccacggcgatcccccgggccctggcgctaagcccccggcccctcctggtgcgcccgagcctcccggcccctttccgtgcagcgagtgccgcgagagcttcgcgcggcgcgccgtgctgctggagcaccaggcggtacacacgggcgacaagtcctttggctgcgtcgagtgcggcgagcgcttcggccgccgctcagtgctgctgcagcaccggcgcgtgcacagtggcgagcggcccttcgcctgtgccgagtgcggccagagcttccggcagcgctccaacctgacgcagcaccggcgcatccacaccggggagcggcccttcgcctgcgccgagtgtggcaaggccttccgccagcggcctacgctcacgcagcatctccgcgtacacacgggcgagaaaccctttgcctgccccgagtgtggccagcgcttcagccagcgcctcaagctcacgcgtcatcagaggacacacaccggcgaaaagccctaccactgcggtgagtgcggcctgggcttcacgcaggtctcgcggctcaccgagcaccagcgcatccacacgggcgaacggcccttcgcctgccccgagtgcggccagagctttcggcagcacgccaacctcacccagcaccggcgcatccacacgggtgaacggccctacgcatgccctgagtgtggcaaggccttccgccagcggcccacgctcacgcagcatctgcgcacccaccgacgagagaagcccttcgcctgccaggactgtggccgccgcttccaccagagcaccaagctcattcagcaccagcgcgtccacagcgccgag

SEQ ID NO: 6758 - DNA, 591 bp, Homo sapiens
  source 1..591: mol_type = genomic DNA
atgctggtgctgccatccccctgccctcagcctctggcattttcctccgttgagaccatggagggccctccccgtcggacttgccgctccccagaacctggaccttcctcctccatcggatctccccaggcttcatctcctccaaggcccaaccactacctgcttattgacactcagggtgtcccctacacagtgctggtggacgaggagtcacagagggagccaggggccagtggggctccaggccagaaaaagtgctacagctgccccgtgtgctcaagggtcttcgagtacatgtcctaccttcagcgacacagcatcacccactcggaggtaaagcccttcgagtgtgacatctgtgggaaggcattcaagcgcgccagccacttggcacggcaccattccattcacctggcgggtggtgggcggccccacggctgcccgctctgccctcgccgcttccgggatgcgggtgagctggcccagcacagccgggtgcactctggggagcgcccgtttcagtgtccacactgccctcgccgctttatggagcagaacacactgcagaaacacacgcggtggaagcatcca

SEQ ID NO: 6759 - DNA, 507 bp, Homo sapiens
  source 1..507: mol_type = genomic DNA
atggcagctgagtcattgcctttctcctttgggacactgtccagctgggagctggaagcctggtatgaggacctgcaagaggtcctgtcttcagatgaaaatgggggtacctatgtttcacctcctggaaatgaagaggaagaatcaaaaatcttcaccactcttgaccctgcttctctggcttggctgactgaggaggagccagaaccagcagaggtcacaagcacctcccagagccctcactctccagattccagtcagagctccctggctcaggaggaagaggaggaagaccaagggagaaccaggaaacggaaacagagtggtcattccccagcccgggctggaaagcagcgcatgaaggagaaagaacaggagaatgaaaggaaagtggcacagctagctgaagagaatgaacggctcaagcaggaaatcgagcgcctgaccagggaagtagaggcgactcgccgagctctgattgaccgaatggtgaatctgcaccaagca

SEQ ID NO: 6760 - DNA, 2562 bp, Homo sapiens
  source 1..2562: mol_type = genomic DNA
atggcgcaggcgatctttgaggccctggagggaatggacaatcagaccgttctggctgtccagtcattattggatggccaaggagcagtccctgatccgacaggccagagtgtcaatgcgccccctgctatccagccattggatgacgaggatgtatttctctgcgggaagtgtaagaagcaattcaactcgctgccagcgtttatgacccacaagcgggaacagtgccaggggaatgcccccgccctggccacagtctcactggccaccaacagcatctacccaccttcggcagcacccacagcggtccagcaggccccaactcctgccaatcgccagatctccacatacatcacagtgcccccgtccccactgatccagaccctggtgcaggggaacatcttggtgagcgatgatgtgctcatgtctgccatgtcagccttcacatccctggaccagcccatgccccagggccccccacctgtgcagagcagcctgaacatgcattccgtgcccagctacctcacccagcctccacctcctcctccacctcctccaccactgcccccaccgccaccacctcagcctccaccacctccaccccagagcctgggcccccctgggcgtcccaaccctggtgggaacggtgtggtggaggtgtacagtgctgctgcgcccctggctgggagtggaacggtggagatccaggcactggggatgcagccctacccacccctagaggtgccaaaccagtgtgtggagcctccagtatatcccacccccacagtgtacagccctggcaaacagggattcaaacccaaaggaccaaaccccgccgcccccatgaccagcgccaccgggggcacggtggccacctttgactctccagcaacgctgaagacccgacgagctaaaggtgccaggggactcccggaagctgcagggaagccaaaggctcagaaactcaagtgctcatactgtgacaagtcattcaccaaaaactttgacctgcagcagcacatccgaagccacaccggtgagaagcccttccagtgcattgcatgtggccgtgcctttgcccagaagtctaatgttaagaaacacatgcagacccacaaggtgtggcctccaggacacagtggtggcaccgtgtctcgaaactctgtgaccgtacaggtcatggccctgaaccccagcaggcaggaggacgaggaaagcacagggttgggccagcccctgccgggtgcgccacagccccaggccttgtccacagctggtgaggaagagggggacaagccggagtccaagcaggtggtcctcatcgacagctcctacctgtgccaattctgccccagcaaattcagcacctacttccagctcaagtctcacatgacccagcataagaatgagcaggtgtacaagtgtgtggtcaaaagctgtgcccagacgttcccaaagctcgacacatttctggagcacatcaagagccaccaggaggagctgagctaccgctgccacctctgcggcaaggacttcccctcgctgtacgacctgggcgtgcaccagtactcccacagcctcctgccacagcacagccccaagaaggacaatgccgtctacaagtgtgtcaaatgtgtcaacaaatactccacccctgaggccctggagcaccacctgcagaccgccactcacaacttcccctgcccacactgccagaaggtgtttccttgtgaacgctacctgcggcgtcatctgcccacccacggcagcgggggcaggttcaagtgccaagtgtgcaagaagttcttccggcgggagcattatctcaaactgcatgctcacatccactcgggtgagaagccctacaaatgctcagtgtgcgagtctgcgttcaaccgcaaggacaaactgaagagacacatgttgatccacgagcccttcaagaaatacaaatgccctttctcgacgcacacaggctgcagtaaggagttcaaccggccggacaagctgaaggcccacatcctctcccactctggcatgaagctccacaaatgcgccctgtgcagcaagtccttcagccgccgtgcccacctcgccgagcatcagcgcgcccacacgggcaactacaagttccgctgtgctggctgcgccaagggcttttcccgccacaaatacctcaaagatcaccgctgtcgtctcggcccccaaaaggacaaggacctgcaaacccggcggcccccccagaggagggcagccccccgcagttgcggcagtggtgggcgcaaggtgctgacccccttgcctgacccgctggggctggaggagctgaaggacacaggggctgggctggtgcccgaggctgtccccggcaagccgcccttcgcagagccggacgcggtgctgtccatcgttgtgggtggtgcggtgggcgcggaaactgagctggtggtacctggacacgctgaggggctgggctccaacctggctctggcggagctgcaggccggggccgagggcccatgtgccatgctcgctgtgcccgtctacatccaggcctccgag

SEQ ID NO: 6761 - DNA, 2541 bp, Homo sapiens
  source 1..2541: mol_type = genomic DNA
atggcgcaggcgatctttgaggccctggagggaatggacaatcagaccgttctggctgtccagtcattattggatggccaaggagcagtccctgatccgacaggccagagtgtcaatgcgccccctgctatccagccattggatgacgaggatgtatttctctgcgggaagtgtaagaagcaattcaactcgctgccagcgtttatgacccacaagcgggaacagtgccaggggaatgcccccgccctggccacagtctcactggccaccaacagcatctacccaccttcggcagcacccacagcggtccagcaggccccaactcctgccaatcgccagatctccacatacatcacagtgcccccgtccccactgatccagaccctggtgcaggggaacatcttggtgagcgatgatgtgctcatgtctgccatgtcagccttcacatccctggaccagcccatgccccagggccccccacctgtgcagagcagcctgaacatgcattccgtgcccagctacctcacccagcctccacctcctcctccacctcctccaccactgcccccaccgccaccacctcagcctccaccacctccaccccagagcctgggcccccctgggcgtcccaaccctggtgggaacggtgtggtggaggtgtacagtgctgctgcgcccctggctgggagtggaacggtggagatccaggcactggggatgcagccctacccacccctagaggtgccaaaccagtgtgtggagcctccagtatatcccacccccacagtgtacagccctggcaaacagggattcaaacccaaaggaccaaaccccgccgcccccatgaccagcgccaccgggggcacggtggccacctttgactctccagcaacgctgaagacccgacgagctaaagctgcagggaagccaaaggctcagaaactcaagtgctcatactgtgacaagtcattcaccaaaaactttgacctgcagcagcacatccgaagccacaccggtgagaagcccttccagtgcattgcatgtggccgtgcctttgcccagaagtctaatgttaagaaacacatgcagacccacaaggtgtggcctccaggacacagtggtggcaccgtgtctcgaaactctgtgaccgtacaggtcatggccctgaaccccagcaggcaggaggacgaggaaagcacagggttgggccagcccctgccgggtgcgccacagccccaggccttgtccacagctggtgaggaagagggggacaagccggagtccaagcaggtggtcctcatcgacagctcctacctgtgccaattctgccccagcaaattcagcacctacttccagctcaagtctcacatgacccagcataagaatgagcaggtgtacaagtgtgtggtcaaaagctgtgcccagacgttcccaaagctcgacacatttctggagcacatcaagagccaccaggaggagctgagctaccgctgccacctctgcggcaaggacttcccctcgctgtacgacctgggcgtgcaccagtactcccacagcctcctgccacagcacagccccaagaaggacaatgccgtctacaagtgtgtcaaatgtgtcaacaaatactccacccctgaggccctggagcaccacctgcagaccgccactcacaacttcccctgcccacactgccagaaggtgtttccttgtgaacgctacctgcggcgtcatctgcccacccacggcagcgggggcaggttcaagtgccaagtgtgcaagaagttcttccggcgggagcattatctcaaactgcatgctcacatccactcgggtgagaagccctacaaatgctcagtgtgcgagtctgcgttcaaccgcaaggacaaactgaagagacacatgttgatccacgagcccttcaagaaatacaaatgccctttctcgacgcacacaggctgcagtaaggagttcaaccggccggacaagctgaaggcccacatcctctcccactctggcatgaagctccacaaatgcgccctgtgcagcaagtccttcagccgccgtgcccacctcgccgagcatcagcgcgcccacacgggcaactacaagttccgctgtgctggctgcgccaagggcttttcccgccacaaatacctcaaagatcaccgctgtcgtctcggcccccaaaaggacaaggacctgcaaacccggcggcccccccagaggagggcagccccccgcagttgcggcagtggtgggcgcaaggtgctgacccccttgcctgacccgctggggctggaggagctgaaggacacaggggctgggctggtgcccgaggctgtccccggcaagccgcccttcgcagagccggacgcggtgctgtccatcgttgtgggtggtgcggtgggcgcggaaactgagctggtggtacctggacacgctgaggggctgggctccaacctggctctggcggagctgcaggctggggccgagggcccatgtgccatgctcgctgtgcccgtctacatccaggcctccgag

SEQ ID NO: 6762 - DNA, 2289 bp, Homo sapiens
  source 1..2289: mol_type = genomic DNA
atggatcatttgaacgaggcaactcaggggaaagaacattcagaaatgtctaacaatgtgagtgatccgaagggtccaccagccaagattgcccgcctggagcagaacgggagcccgctaggaagaggaaggcttgggagtacaggtgcaaaaatgcagggagtgcctttaaaacactcgggccatctgatgaaaaccaaccttaggaaaggaaccatgctgccagttttctgtgtggtggaacattatgaaaacgccattgaatatgattgcaaggaggagcatgcagaatttgtgctggtgagaaaggatatgcttttcaaccagctgatcgaaatggcattgctgtctctaggttattcacatagctctgctgcccaggccaaagggctaatccaggttggaaagtggaatccagttccactgtcttacgtgacagatgcccctgatgctacagtagcagatatgcttcaagatgtgtatcatgtggtcacattgaaaattcagttacacagttgccccaaactagaagacttgcctcccgaacaatggtcgcacaccacagtgaggaatgctctgaaggacttactgaaagatatgaatcagagttcattggccaaggagtgccccctttcacagagtatgatttcttccattgtgaacagtacttactatgcaaatgtctcagcagcaaaatgtcaagaatttggaaggtggtacaaacatttcaagaagacaaaagatatgatggttgaaatggatagtctttctgagctatcccagcaaggcgccaatcatgtcaattttggccagcaaccagttccagggaacacagccgagcagcctccatcccctgcgcagctctcccatggcagccagccctctgtccggacacctcttccaaacctgcaccctgggctcgtatcaacacctatcagtcctcaattggtcaaccagcagctggtgatggctcagctgctgaaccagcagtatgcagtgaatagacttttagcccagcagtccttaaaccaacaatacttgaaccaccctccccctgtcagtagatctatgaataagcctttggagcaacaggtttcgaccaacacagaggtgtcttccgaaatctaccagtgggtacgcgatgaactgaaacgagcaggaatctcccaggcggtatttgcacgtgtggcttttaacagaactcagggcttgctttcagaaatcctccgaaaggaagaggaccccaagactgcatcccagtctttgctggtaaaccttcgggctatgcagaatttcttgcagttaccggaagctgaaagagaccgaatataccaggacgaaagggaaaggagcttgaatgctgcctcggccatgggtcctgcccccctcatcagcacaccacccagccgtcctccccaggtgaaaacagctactattgccactgaaaggaatgggaaaccagagaacaataccatgaacattaatgcttccatttatgatgagattcagcaggaaatgaagcgtgctaaagtgtctcaagcactgtttgcaaaggttgcagcaaccaaaagccagggatggttgtgcgagctgttacgctggaaagaagatccttctccagaaaacagaaccctgtgggagaacctctccatgatccgaaggttcctcagtcttcctcagccagaacgtgatgccatttatgaacaggagagcaacgcggtgcatcaccatggcgacaggccgccccacattatccatgttccagcagagcagattcagcaacagcagcagcaacagcaacagcagcagcagcagcagcaggcaccgccgcctccacagccacagcagcagccacagacaggccctcggctccccccacggcaacccacggtggcctctccagcagagtcagatgaggaaaaccgacagaagacccggccacgaacaaaaatttcagtggaagccttgggaatcctccagagtttcatacaagacgtgggcctgtaccctgacgaagaggccatccagactctgtctgcccagctcgaccttcccaagtacaccatcatcaagttctttcagaaccagcggtactatctcaagcaccacggcaaactgaaggacaattccggtttagaggtcgatgtggcagaatataaagaagaggagctgctgaaggatttggaagagagtgtccaagataaaaatactaacacccttttttcagtgaaactagaagaagagctgtcagtggaaggaaacacagacattaatactgatttgaaagac

SEQ ID NO: 6763 - DNA, 2244 bp, Homo sapiens
  source 1..2244: mol_type = genomic DNA
atgtctcagtggaatcaagtccaacagttagaaatcaagtttttggagcaggtggatcaattctatgatgacaactttcccatggaaattcggcatctgttggcccaatggattgaaaatcaagactgggaggcagcttctaacaatgaaaccatggcaacgattcttcttcaaaacttgttaatacaactggatgaacagttaggtcgtgtttccaaagagaaaaacctactcttgatacacaatctaaaaagaattaggaaggtccttcagggaaaatttcatggaaatccaatgcatgtagctgtggttatttcaaactgtttaagggaagagaggagaatattggctgcagccaacatgcctgtccaggggcctctagagaaatccttacaaagttcttcagtttcagaaagacagaggaatgtggagcacaaagtggctgccattaaaaacagtgtgcagatgacagaacaagataccaaatacttagaagatctgcaagacgaatttgactacaggtataaaacaattcagacaatggatcagagtgacaagaatagtgccatggtgaatcaggaagttttgacactgcaggaaatgcttaacagcctcgatttcaagagaaaggaggctctcagtaaaatgacccaaatcatccatgagacagacctgttaatgaacaccatgctcatagaagagctgcaagactggaagcggcggcagcaaatcgcctgcatcgggggtccactccacaatgggctcgaccagcttcagaactgctttacactattggcagaaagtcttttccaactgagaaggcaattggagaaactagaggagcaatctaccaaaatgacatatgaaggtgatcccattccaatgcaaagaactcacatgctagaaagagtcaccttcttgatctacaaccttttcaagaactcatttgtggttgagcgacagccatgtatgccaacccaccctcagaggccgttggtacttaaaaccctaattcagttcactgtaaaactaaggctactaataaaattgccagaactaaactatcaggtaaaggttaaggcatcaattgacaagaatgtttcaactctaagcaaccgaagatttgtactttgtggaactaatgtcaaagccatgtctattgaagaatcttccaatgggagtctctcagtagaatttcgacatttgcaaccaaaggaaatgaagtccagtgctggaggtaaaggaaatgagggctgtcacatggtgactgaagaacttcattccataacgtttgaaacacagatctgcctctatggcctgaccatagatttggagaccagctcattgcctgtggtgatgatttccaatgtcagtcagttacctaatgcttgggcatccatcatttggtacaacgtgtcaaccaacgattcccagaacttggttttctttaataatcctccacctgccacattgagtcaactactggaggtgatgagctggcagttttcatcgtacgttggtcgtggtcttaactcagatcaactccatatgctggcagagaagcttacagtccaatctagctacagtgatggtcacctcacctgggccaagttctgcaaggaacatttacctggtaaatcatttaccttttggacatggcttgaagcaatattggatctaattaagaaacacattcttcccctttggattgatgggtatgtcatgggctttgttagcaaagagaaggaacggctgttgctaaaggataaaatgcctggcacctttttattaagattcagtgaaagccatctcggaggaataactttcacctgggtggaccattctgaaagtggggaagtgagattccactctgtagaaccctacaataaaggccggttgtctgctctgccattcgctgacatcctgcgagactacaaagttattatggctgaaaacattcctgaaaaccctctgaagtacctatatcctgacattcccaaagacaaagccttcggtaaacactacagctctcagccttgcgaagtttcaagaccaacagaaaggggtgacaaaggttatgttccttctgtttttatccccatctcaacaatccgaagtgattcaacagagccacattctccatcagaccttcttcccatgtctccaagtgtgtatgcggtgttgagagaaaacctgagtcccacaacaattgaaactgcaatgaagtctccttattctgctgaa

SEQ ID NO: 6764 - DNA, 1275 bp, Homo sapiens
  source 1..1275: mol_type = genomic DNA
atgtcgtccatcctgcctttcactcccccgatcgtgaagcgcctgctgggctggaagaagggcgagcagaacgggcaggaggagaaatggtgcgagaaggcggtcaagagcctggtcaagaaactcaagaagacggggcagctggacgagctggagaaggccatcaccacgcagaacgtcaacaccaagtgcatcaccatccccaggtccctggatggccggttgcaggtgtcccatcggaaggggctccctcatgtcatctactgccgcctgtggcgatggccagacctgcacagccaccacgagctgcgggccatggagctgtgtgagttcgccttcaatatgaagaaggacgaggtctgcgtgaatccctaccactaccagagagtagagacaccagttctacctcctgtgttggtgccacgccacacagagatcccggccgagttccccccactggacgactacagccattccatccccgaaaacactaacttccccgcaggcatcgagccccagagcaatattccagagaccccaccccctggctacctgagtgaagatggagaaaccagtgaccaccagatgaaccacagcatggacgcaggttctccaaacctatccccgaatccgatgtccccagcacataataacttggacctgcagccagttacctactgcgagccggccttctggtgctccatctcctactacgagctgaaccagcgcgtcggggagacattccacgcctcgcagccatccatgactgtggatggcttcaccgacccctccaattcggagcgcttctgcctagggctgctctccaatgtcaacaggaatgcagcagtggagctgacacggagacacatcggaagaggcgtgcggctctactacatcggaggggaggtcttcgcagagtgcctcagtgacagcgctatttttgtccagtctcccaactgtaaccagcgctatggctggcacccggccaccgtctgcaagatcccaccaggatgcaacctgaagatcttcaacaaccaggagttcgctgccctcctggcccagtcggtcaaccagggctttgaggctgtctaccagttgacccgaatgtgcaccatccgcatgagcttcgtcaaaggctggggagcggagtacaggagacagactgtgaccagtaccccctgctggattgagctgcacctgaatgggcctttgcagtggcttgacaaggtcctcacccagatgggctccccaagcatccgctgttccagtgtgtct

SEQ ID NO: 6765 - DNA, 1812 bp, Homo sapiens
  source 1..1812: mol_type = genomic DNA
atgatgaagtcccaggggttagtatcattcaaggatgtggctgtggatttcacccaggaggagtggcagcaacttgacccttctcagaggaccctgtacagggatgtgatgctggagaactacagccacctggtctcaatggggtatccagtttccaaaccagatgtcatctccaagttggaacaaggagaagagccatggatcataaagggagacatatcaaattggatctatccagatgaatatcaggcagatgggagacaagacaggaagagtaaccttcacaactcccagtcatgtattttggggacagtttccttccatcataagatactgaaaggagtcacaagggatggttcattgtgctccattttaaaagtctgtcaaggtgatggtcagctgcagagatttctagagaatcaagacaaactcttcaggcaggtcacatttgttaacagcaaaacagtgactgaggcatcagggcataaatataatccactggggaaaatatttcaagagtgcatagaaacagatatatcaatacagagattccataaatatgatgcttttaaaaagaacttaaaaccaaatattgacctaccgagttgttataagagcaattcaagaaaaaaacctgatcagagttttggaggtggaaaatcatctagccagagtgagcccaattctaatcttgagaagattcacaatggagtaataccttttgatgataatcagtgtggaaacgtttttagaaatacacaatcccttattcaatatcagaatgtggaaactaaagagaaaagctgtgtatgtgttacatgtggaaaagcctttgctaagaagtcacaactcattgtacatcaaagaattcatactggaaagaaaccatatgattgtggtgcatgcggaaaagccttcagtgagaagtttcatcttgttgtacatcagagaactcatactggggagaaaccttatgattgttctgaatgtggaaaagccttctctcagaaatcgtcccttattatacatcagagagttcacactggggaaaaaccctatgaatgtagtgaatgcgggaaagccttctcccagaaatcacccctcattatacatcagagaatacatactggggaaaaaccctatgaatgtagagagtgtgggaaggccttttcccagaagtcacagctgattatacaccacagagctcatactggagagaagccgtatgagtgtaccgaatgtgggaaagccttctgtgagaagtcccacctcattatacataaaagaattcacactggtgagaaaccctacaaatgtgctcaatgtgaggaagccttcagcaggaagacagaactcattacacatcagttagttcatactggggaaaaaccttatgaatgtactgaatgtggaaagacattctcccgcaagtcacagctcatcatacatcagagaacacatactggagaaaaaccctataaatgtagtgaatgtggcaaagccttctgccagaagtcacatctcattggacatcagagaattcacacaggagaaaaaccttatatatgtactgaatgtgggaaagccttctctcagaagtcccaccttccgggacaccagcgaattcatacaggagagaaaccttacatatgtgctgaatgtggaaaggccttttctcagaagtcagaccttgttttacatcagaggattcatactggggaaagaccctatcaatgtgctatatgtgggaaggccttcatccagaagtcacaactaactgtacaccagagaattcacacagtggtaaaatca

SEQ ID NO: 6766 - DNA, 1527 bp, Homo sapiens
  source 1..1527: mol_type = genomic DNA
atggaagatatacaaacaaatgcggaactgaaaagcactcaggagcagtctgtgcccgcagaaagtgcagcggttttgaatgactacagtttaaccaaatctcatgaaatggaaaatgtggacagtggagaaggcccagccaatgaagatgaagacataggagatgattcaatgaaagtgaaagatgaatacagtgaaagagatgagaatgttttaaagtcagaacccatgggaaatgcagaagagcctgaaatcccttacagctattcaagagaatataatgaatatgaaaacattaagttggagagacatgttgtctcattcgatagtagcaggccaaccagtggaaagatgaactgcgatgtgtgtggattatcctgcatcagcttcaatgtcttaatggttcataagcgaagccatactggtgaacgcccattccagtgtaatcagtgtggggcatcttttactcagaaaggtaacctcctccgccacattaaactgcacacaggggaaaaaccttttaagtgtcacctctgcaactatgcatgccaaagaagagatgcgctcacggggcatcttaggacacattctgtggagaaaccctacaaatgtgagttttgtggaaggagttacaagcagagaagttcccttgaggagcacaaggagcgctgccgtacatttcttcagagcactgacccaggggacactgcaagtgcggaggcaagacacatcaaagcagagatgggaagtgaaagagctctcgtactggacagattagcaagcaatgtggcaaaacgaaaaagctcaatgcctcagaaattcattggtgagaagcgccactgctttgatgtcaactataattcaagttacatgtatgagaaagagagtgagctcatacagacccgcatgatggaccaagccatcaataacgccatcagctatcttggcgccgaagccctgcgccccttggtccagacaccgcctgctcccacctcggagatggttccagttatcagcagcatgtatcccatagccctcacccgggctgagatgtcaaacggtgcccctcaagagctggaaaagaaaagcatccaccttccagagaagagcgtgccttctgagagaggcctctctcccaacaatagtggccacgactccacggacactgacagcaaccatgaagaacgccagaatcacatctatcagcaaaatcacatggtcctgtctcgggcccgcaatgggatgccacttctgaaggaggttccccgctcttacgaactcctcaagcccccgcccatctgcccaagagactccgtcaaagtgatcaacaaggaaggggaggtgatggatgtgtatcggtgtgaccactgccgcgtcctcttcctggactatgtgatgttcacgattcacatgggctgccacggcttccgtgaccctttcgagtgtaacatgtgtggatatcgaagccatgatcggtatgagttctcgtctcacatagccagaggagaacacagagccctgctgaag

SEQ ID NO: 6767 - DNA, 1386 bp, Homo sapiens
  source 1..1386: mol_type = genomic DNA
atgcagctgagaaaaatgcagaccgtcaaaaaggagcaggcgtctcttgatgccagtagcaatgtggacaagatgatggtccttaattctgctttaacggaagtgtcagaagactccacaacaggtgaggagctgcttctcagtgaaggaagtgtggggaagaacaaatcttctgcatgtcggaggaaacgggaattcattcctgatgaaaagaaagatgctatgtattgggaaaaaaggcggaaaaataatgaagctgccaaaagatctcgtgagaagcgtcgactgaatgacctggttttagagaacaaactaattgcactgggagaagaaaacgccactttaaaagctgagctgctttcactaaaattaaagtttggtttaattagctccacagcatatgctcaagagattcagaaactcagtaattctacagctgtgtactttcaagattaccagacttccaaatccaatgtgagttcatttgtggacgagcacgaaccctcgatggtgtcaagtagttgtatttctgtcattaaacactctccacaaagctcgctgtccgatgtttcagaagtgtcctcagtagaacacacgcaggagagctctgtgcagggaagctgcagaagtcctgaaaacaagttccagattatcaagcaagagccgatggaattagagagctacacaagggagccaagagatgaccgaggctcttacacagcgtccatctatcaaaactatatggggaattctttctctgggtactcacactctcccccactactgcaagtcaaccgatcctccagcaactccccgagaacgtcggaaactgatgatggtgtggtaggaaagtcatctgatggagaagacgagcaacaggtccccaagggccccatccattctccagttgaactcaagcatgtgcatgcaactgtggttaaagttccagaagtgaattcctctgccttgccacacaagctccggatcaaagccaaagccatgcagatcaaagtagaagcctttgataatgaatttgaggccacgcaaaaactttcctcacctattgacatgacatctaaaagacatttcgaactcgaaaagcatagtgccccaagtatggtacattcttctcttactcctttctcagtgcaagtgactaacattcaagattggtctctcaaatcggagcactggcatcaaaaagaactgagtggcaaaactcagaatagtttcaaaactggagttgttgaaatgaaagacagtggctacaaagtttctgacccagagaacttgtatttgaagcaggggatagcaaacttatctgcagaggttgtctcactcaagagacttatagccacacaaccaatctctgcttcagactctggg

SEQ ID NO: 6768 - DNA, 1494 bp, Homo sapiens
  source 1..1494: mol_type = genomic DNA
atgaaccagtccatcccagtggctcccaccccaccccgccgcgtgcggctgaagccctggctggtggcccaggtgaacagctgccagtacccagggcttcaatgggtcaacggggaaaagaaattattctgcatcccctggaggcatgccacaaggcatggtcccagccaggacggagataacaccatcttcaaggcctgggccaaggagacagggaaatacaccgaaggcgtggatgaagccgatccggccaagtggaaggccaacctgcgctgtgcccttaacaagagccgggacttccgcctcatctacgacgggccccgggacatgccacctcagccctacaagatctacgaggtctgctccaatggccctgctcccacagactcccagccccctgaggattactcttttggtgcaggagaggaggaggaagaagaggaagagctgcagaggatgttgccaagcctgagcctcacagaggatgtcaagtggccgcccactctgcagccgcccactctgcggccgcctactctgcagccgcccactctgcagccgcccgtggtgctgggtccccctgctccagaccccagccccctggctcctccccctggcaaccctgctggcttcagggagcttctctctgaggtcctggagcctgggcccctgcctgccagcctgccccctgcaggcgaacagctcctgccagacctgctgatcagcccccacatgctgcctctgaccgacctggagatcaagtttcagtaccgggggcggccaccccgggccctcaccatcagcaacccccatggctgccggctcttctacagccagctggaggccacccaggagcaggtggaactcttcggccccataagcctggagcaagtgcgcttccccagccctgaggacatccccagtgacaagcagcgcttctacacgaaccagctgctggatgtcctggaccgcgggctcatcctccagctacagggccaggacctttatgccatccgcctgtgtcagtgcaaggtgttctggagcgggccttgtgcctcagcccatgactcatgccccaaccccatccagcgggaggtcaagaccaagcttttcagcctggagcattttctcaatgagctcatcctgttccaaaagggccagaccaacaccccaccacccttcgagatcttcttctgctttggggaagaatggcctgaccgcaaaccccgagagaagaagctcattactgtacaggtggtgcctgtagcagctcgactgctgctggagatgttctcaggggagctatcttggtcagctgatagtatccggctacagatctcaaacccagacctcaaagaccgcatggtggagcaattcaaggagctccatcacatctggcagtcccagcagcggttgcagcctgtggcccaggcccctcctggagcaggccttggtgttggccaggggccctggcctatgcacccagctggcatgcaa

SEQ ID NO: 6769 - DNA, 1278 bp, Homo sapiens
  source 1..1278: mol_type = genomic DNA
atgttcaggaccaaacgatctgcgctcgtccggcgtctctggaggagccgtgcgcccggcggcgaggacgaggaggagggcgcagggggaggtggaggaggaggcgagctgcggggagaaggggcgacggacagccgagcgcatggggccggtggcggcggcccgggcagggctggatgctgcctgggcaaggcggtgcgaggtgccaaaggtcaccaccatccccacccgccagccgcgggcgccggcgcggccgggggcgccgaggcggatctgaaggcgctcacgcactcggtgctcaagaaactgaaggagcggcagctggagctgctgctccaggccgtggagtcccgcggcgggacgcgcaccgcgtgcctcctgctgcccggccgcctggactgcaggctgggcccgggggcgcccgccggcgcgcagcctgcgcagccgccctcgtcctactcgctccccctcctgctgtgcaaagtgttcaggtggccggatctcaggcattcctcggaagtcaagaggctgtgttgctgtgaatcttacgggaagatcaaccccgagctggtgtgctgcaacccccatcaccttagccgactctgcgaactagagtctcccccccctccttactccagatacccgatggattttctcaaaccaactgcagactgtccagatgctgtgccttcctccgctgaaacagggggaacgaattatctggcccctggggggctttcagattcccaacttcttctggagcctggggatcggtcacactggtgcgtggtggcatactgggaggagaagacgagagtggggaggctctactgtgtccaggagccctctctggatatcttctatgatctacctcaggggaatggcttttgcctcggacagctcaattcggacaacaagagtcagctggtgcagaaggtgcggagcaaaatcggctgcggcatccagctgacgcgggaggtggatggtgtgtgggtgtacaaccgcagcagttaccccatcttcatcaagtccgccacactggacaacccggactccaggacgctgttggtacacaaggtgttccccggtttctccatcaaggctttcgactacgagaaggcgtacagcctgcagcggcccaatgaccacgagtttatgcagcagccgtggacgggctttaccgtgcagatcagctttgtgaagggctggggccagtgctacacccgccagttcatcagcagctgcccgtgctggctagaggtcatcttcaacagccgg

SEQ ID NO: 6770 - DNA, 1278 bp, Homo sapiens
  source 1..1278: mol_type = genomic DNA
atgtgtgaccggaatggtggtcggcggcttcgacagtggctgatcgagcagattgacagtagcatgtatccaggactgatttgggagaatgaggagaagagcatgttccggatcccttggaaacacgctggcaagcaagattataatcaggaagtggatgcctccatttttaaggcctgggcagtttttaaagggaagtttaaagaaggggacaaagctgaaccagccacttggaagacgaggttacgctgtgctttgaataagagcccagattttgaggaagtgacggaccggtcccaactggacatttccgagccatacaaagtttaccgaattgttcctgaggaagagcaaaaatgcaaactaggcgtggcaactgctggctgcgtgaatgaagttacagagatggagtgcggtcgctctgaaatcgacgagctgatcaaggagccttctgtggacgattacatggggatgatcaaaaggagcccttccccgccggaggcctgtcggagtcagctccttccagactggtgggcgcagcagcccagcacaggcgtgccgctggtgacggggtacaccacctacgacgcgcaccattcagcattctcccagatggtgatcagcttctactatgggggcaagctggtgggccaggccaccaccacctgccccgagggctgccgcctgtccctgagccagcctgggctgcccggcaccaagctgtatgggcccgagggcctggagctggtgcgcttcccgccggccgacgccatccccagcgagcgacagaggcaggtgacgcggaagctgttcgggcacctggagcgcggggtgctgctgcacagcagccggcagggcgtgttcgtcaagcggctgtgccagggccgcgtgttctgcagcggcaacgccgtggtgtgcaaaggcaggcccaacaagctggagcgtgatgaggtggtccaggtcttcgacaccagccagttcttccgagagctgcagcagttctataacagccagggccggcttcctgacggcagggtggtgctgtgctttggggaagagtttccggatatggcccccttgcgctccaaactcattctcgtgcagattgagcagctgtatgtccggcaactggcagaagaggctgggaagagctgtggagccggctctgtgatgcaggcccccgaggagccgccgccagaccaggtcttccggatgtttccagatatttgtgcctcacaccagagatcatttttcagagaaaaccaacagatcaccgtc

SEQ ID NO: 6771 - DNA, 1485 bp, Homo sapiens
  source 1..1485: mol_type = genomic DNA
atgtcttctaattcagatactggggatttacaagagtctttaaagcacggacttacacctattgtgtctcaatttaaaatggtgaattactcctatgatgaagatctggaagagctttgtcccgtgtgtggagataaagtgtctgggtaccattatgggctcctcacctgtgaaagctgcaagggattttttaagcgaacagtccaaaataataaaaggtacacatgtatagaaaaccagaactgccaaattgacaaaacacagagaaagcgttgtccttactgtcgttttcaaaaatgtctaagtgttggaatgaagctagaagctgtaagggccgaccgaatgcgtggaggaaggaataagtttgggccaatgtacaagagagacagggccctgaagcaacagaaaaaagccctcatccgagccaatggacttaagctagaagccatgtctcaggtgatccaagctatgccctctgacctgaccatttcctctgcaattcaaaacatccactctgcctccaaaggcctacctctgaaccatgctgccttgcctcctacagactatgacagaagtccctttgtaacatcccccattagcatgacaatgccccctcacggcagcctgcaaggttaccaaacatatggccactttcctagccgggccatcaagtctgagtacccagacccctataccagctcacccgagtccataatgggctattcatatatggatagttaccagacgagctctccagcaagcatcccacatctgatactggaacttttgaagtgtgagccagatgagcctcaagtccaggctaaaatcatggcctatttgcagcaagagcaggctaaccgaagcaagcacgaaaagctgagcacctttgggcttatgtgcaaaatggcagatcaaactctcttctccattgtcgagtgggccaggagtagtatcttcttcagagaacttaaggttgatgaccaaatgaagctgcttcagaactgctggagtgagctcttaatcctcgaccacatttaccgacaagtggtacatggaaaggaaggatccatcttcctggttactgggcaacaagtggactattccataatagcatcacaagccggagccaccctcaacaacctcatgagtcatgcacaggagttagtggcaaaacttcgttctctccagtttgatcaacgagagttcgtatgtctgaaattcttggtgctctttagtttagatgtcaaaaaccttgaaaacttccagctggtagaaggtgtccaggaacaagtcaatgccgccctgctggactacacaatgtgtaactacccgcagcagacagagaaatttggacagctacttcttcgactacccgaaatccgggccatcagtatgcaggctgaagaatacctctactacaagcacctgaacggggatgtgccctataataaccttctcattgaaatgttgcatgccaaaagagca

SEQ ID NO: 6772 - DNA, 1590 bp, Homo sapiens
  source 1..1590: mol_type = genomic DNA
atggatataaaaaactcaccatctagccttaattctccttcctcctacaactgcagtcaatccatcttacccctggagcacggctccatatacataccttcctcctatgtagacagccaccatgaatatccagccatgacattctatagccctgctgtgatgaattacagcattcccagcaatgtcactaacttggaaggtgggcctggtcggcagaccacaagcccaaatgtgttgtggccaacacctgggcacctttctcctttagtggtccatcgccagttatcacatctgtatgcggaacctcaaaagagtccctggtgtgaagcaagatcgctagaacacaccttacctgtaaacagagagacactgaaaaggaaggttagtgggaaccgttgcgccagccctgttactggtccaggttcaaagagggatgctcacttctgcgctgtctgcagcgattacgcatcgggatatcactatggagtctggtcgtgtgaaggatgtaaggccttttttaaaagaagcattcaaggacataatgattatatttgtccagctacaaatcagtgtacaatcgataaaaaccggcgcaagagctgccaggcctgccgacttcggaagtgttacgaagtgggaatggtgaagtgtggctcccggagagagagatgtgggtaccgccttgtgcggagacagagaagtgccgacgagcagctgcactgtgccggcaaggccaagagaagtggcggccacgcgccccgagtgcgggagctgctgctggacgccctgagccccgagcagctagtgctcaccctcctggaggctgagccgccccatgtgctgatcagccgccccagtgcgcccttcaccgaggcctccatgatgatgtccctgaccaagttggccgacaaggagttggtacacatgatcagctgggccaagaagattcccggctttgtggagctcagcctgttcgaccaagtgcggctcttggagagctgttggatggaggtgttaatgatggggctgatgtggcgctcaattgaccaccccggcaagctcatctttgctccagatcttgttctggacagggatgaggggaaatgcgtagaaggaattctggaaatctttgacatgctcctggcaactacttcaaggtttcgagagttaaaactccaacacaaagaatatctctgtgtcaaggccatgatcctgctcaattccagtatgtaccctctggtcacagcgacccaggatgctgacagcagccggaagctggctcacttgctgaacgccgtgaccgatgctttggtttgggtgattgccaagagcggcatctcctcccagcagcaatccatgcgcctggctaacctcctgatgctcctgtcccacgtcaggcatgcgagtaacaagggcatggaacatctgctcaacatgaagtgcaaaaatgtggtcccagtgtatgacctgctgctggagatgctgaatgcccacgtgcttcgcgggtgcaagtcctccatcacggggtccgagtgcagcccggcagaggacagtaaaagcaaagagggctcccagaacccacagtctcag

SEQ ID NO: 6773 - DNA, 1152 bp, Homo sapiens
  source 1..1152: mol_type = genomic DNA
atgccgcagctggactccggcgggggcggcgcgggcggcggcgacgacctcggcgcgccggacgagctgctggccttccaggatgaaggcgaggagcaggacgacaagagccgcgacagcgccgccggtcccgagcgcgacctggccgagctcaagtcgtcgctcgtgaacgagtccgagggcgcggccggcggcgcagggatcccgggggtcccgggggccggcgccggggcccgcggcgaggccgaggctctcgggcgggaacacgctgcgcagagactcttcccggacaaacttccagagcccctggaggacggcctgaaggccccggagtgcaccagcggcatgtacaaagagaccgtctactccgccttcaatctgctcatgcattacccacccccctcgggagcagggcagcacccccagccgcagcccccgctgcacaaggccaatcagcccccccacggtgtcccccaactctctctctacgaacatttcaacagcccacatcccacccctgcacctgcggacatcagccagaagcaagttcacaggcctctgcagacccctgacctctctggcttctactccctgacctcaggcagcatggggcagctcccccacactgtgagctggttcacccacccatccttgatgctaggttctggtgtacctggtcacccagcagccatcccccacccggccattgtgcccccctcagggaagcaggagctgcagcccttcgaccgcaacctgaagacacaagcagagtccaaggcagagaaggaggccaagaagccaaccatcaagaagcccctcaatgccttcatgctgtacatgaaggagatgagagccaaggtcattgcagagtgcacacttaaggagagcgctgccatcaaccagatcctgggccgcaggtggcacgcgctgtcgcgagaagagcaggccaagtactatgagctggcccgcaaggagaggcagctgcacatgcagctatacccaggctggtcagcgcgggacaactacgggaagaagaagaggcggtcgagggaaaagcaccaagaatccaccacaggaggaaaaagaaatgcattcggtacttacccggagaaggccgctgccccagccccgttccttccgatgacagtgctc

SEQ ID NO: 6774 - DNA, 1725 bp, Homo sapiens
  source 1..1725: mol_type = genomic DNA
atgtctcatgcggccgaaccagctcgggatggcgtagaggccagcgcggagggccctcgagccgtgttcgtgctgttggaggagcgcaggccggccgactcggctcagctgctcagcctgaactctttgcttccggaatccgggattgttgctgacatagaattagaaaacgtccttgatcctgacagcttctacgagctcaaaagccaacccttaccccttcgctcaagcctcccaatatcactgcaggccacaccagccaccccagctacactctctgcatcgtcttctgcagggggctccaggacccctgccatgtcgtcatcttcttcatcgagggtcttgctgcggcagcagctaatgcgggcccaggcgcaggagcaggagaggcgtgagcgtcgggaacaggccgccgcggctcccttccccagtcctgcacctgcctctcctgccatctctgtggttggcgtctctgctgggggccacacattgagccgtccaccccctgctcaggtgcccagggaggtgctcaaggtgcagacccatctggagaacccaacgcgctaccacctgcagcaggcgcgccggcagcaggtgaaacagtacctgtccaccacactcgggcccaagctggcttcccaggccctcaccccaccgccggggcccgcaagtgcccagccactgcctgcccctgaggctgcccacactaccggccccacaggcagtgcgcccaacagccccatggcgctgctcaccatcgggtccagctcagagaaggagattgatgatgtcattgatgagatcatcagcctggagtccagttacaatgatgaaatgctcagctatctgcccggaggcaccacaggactgcagctccccagcacgctgcctgtgtcagggaatctgcttgatgtgtacagtagtcaaggcgtggccacaccagccatcactgtcagcaactcctgcccagctgagctgcccaacatcaaacgggagatctctgagaccgaggcaaaggcccttttgaaggaacggcagaagaaagacaatcacaacctaattgagcgtcgcaggcgattcaacattaacgacaggatcaaggaactgggcactctcatccctaagtccagtgacccggagatgcgctggaacaagggcaccatcctgaaggcctctgtggattatatccgcaagctgcagaaggagcagcagcgctccaaagacctggagagccggcagcgatccctggagcaggccaaccgcagcctgcagctccgaattcaggaactagaactgcaggcccagatccatggcctgccagtgcctcccactccagggctgctttccttggccacgacttcggcttctgacagcctcaagccagagcagctggacattgaggaggagggcaggccaggcgcagcaacgttccatgtaggggggggacctgcccagaatgctccccatcagcagccccctgcaccgccctcagatgcccttctggacctgcactttcccagcgaccacctgggggacctgggagaccccttccacctggggctggaggacattctgatggaggaggaggagggggtggtgggaggactgtcggggggtgccctgtccccactgcgggctgcctccgatcccctgctctcttcagtgtcccctgctgtctccaaggccagcagccgccgcagcagcttcagcatggaagaggagtcc

SEQ ID NO: 6775 - DNA, 7413 bp, Homo sapiens
  source 1..7413: mol_type = genomic DNA
atgcccgccctgcgccccgctctgctgtgggcgctgctggcgctctggctgtgctgcgcggcccccgcgcatgcattgcagtgtcgagatggctatgaaccctgtgtaaatgaaggaatgtgtgttacctaccacaatggcacaggatactgcaaatgtccagaaggcttcttgggggaatattgtcaacatcgagacccctgtgagaagaaccgctgccagaatggtgggacttgtgtggcccaggccatgctggggaaagccacgtgccgatgtgcctcagggtttacaggagaggactgccagtactcaacatctcatccatgctttgtgtctcgaccctgcctgaatggcggcacatgccatatgctcagccgggatacctatgagtgcacctgtcaagtcgggtttacaggtaaggagtgccaatggacggatgcctgcctgtctcatccctgtgcaaatggaagtacctgtaccactgtggccaaccagttctcctgcaaatgcctcacaggcttcacagggcagaaatgtgagactgatgtcaatgagtgtgacattccaggacactgccagcatggtggcacctgcctcaacctgcctggttcctaccagtgccagtgccctcagggcttcacaggccagtactgtgacagcctgtatgtgccctgtgcaccctcaccttgtgtcaatggaggcacctgtcggcagactggtgacttcacttttgagtgcaactgccttccaggttttgaagggagcacctgtgagaggaatattgatgactgccctaaccacaggtgtcagaatggaggggtttgtgtggatggggtcaacacttacaactgccgctgtcccccacaatggacaggacagttctgcacagaggatgtggatgaatgcctgctgcagcccaatgcctgtcaaaatgggggcacctgtgccaaccgcaatggaggctatggctgtgtatgtgtcaacggctggagtggagatgactgcagtgagaacattgatgattgtgccttcgcctcctgtactccaggctccacctgcatcgaccgtgtggcctccttctcttgcatgtgcccagaggggaaggcaggtctcctgtgtcatctggatgatgcatgcatcagcaatccttgccacaagggggcactgtgtgacaccaaccccctaaatgggcaatatatttgcacctgcccacaaggctacaaaggggctgactgcacagaagatgtggatgaatgtgccatggccaatagcaatccttgtgagcatgcaggaaaatgtgtgaacacggatggcgccttccactgtgagtgtctgaagggttatgcaggacctcgttgtgagatggacatcaatgagtgccattcagacccctgccagaatgatgctacctgtctggataagattggaggcttcacatgtctgtgcatgccaggtttcaaaggtgtgcattgtgaattagaaataaatgaatgtcagagcaacccttgtgtgaacaatgggcagtgtgtggataaagtcaatcgtttccagtgcctgtgtcctcctggtttcactgggccagtttgccagattgatattgatgactgttccagtactccgtgtctgaatggggcaaagtgtatcgatcacccgaatggctatgaatgccagtgtgccacaggtttcactggtgtgttgtgtgaggagaacattgacaactgtgaccccgatccttgccaccatggtcagtgtcaggatggtattgattcctacacctgcatctgcaatcccgggtacatgggcgccatctgcagtgaccagattgatgaatgttacagcagcccttgcctgaacgatggtcgctgcattgacctggtcaatggctaccagtgcaactgccagccaggcacgtcaggggttaattgtgaaattaattttgatgactgtgcaagtaacccttgtatccatggaatctgtatggatggcattaatcgctacagttgtgtctgctcaccaggattcacagggcagagatgtaacattgacattgatgagtgtgcctccaatccctgtcgcaagggtgcaacatgtatcaacggtgtgaatggtttccgctgtatatgccccgagggaccccatcaccccagctgctactcacaggtgaacgaatgcctgagcaatccctgcatccatggaaactgtactggaggtctcagtggatataagtgtctctgtgatgcaggctgggttggcatcaactgtgaagtggacaaaaatgaatgcctttcgaatccatgccagaatggaggaacttgtgacaatctggtgaatggatacaggtgtacttgcaagaagggctttaaaggctataactgccaggtgaatattgatgaatgtgcctcaaatccatgcctgaaccaaggaacctgctttgatgacataagtggctacacttgccactgtgtgctgccatacacaggcaagaattgtcagacagtattggctccctgttccccaaacccttgtgagaatgctgctgtttgcaaagagtcaccaaattttgagagttatacttgcttgtgtgctcctggctggcaaggtcagcggtgtaccattgacattgacgagtgtatctccaagccctgcatgaaccatggtctctgccataacacccagggcagctacatgtgtgaatgtccaccaggcttcagtggtatggactgtgaggaggacattgatgactgccttgccaatccttgccagaatggaggttcctgtatggatggagtgaatactttctcctgcctctgccttccgggtttcactggggataagtgccagacagacatgaatgagtgtctgagtgaaccctgtaagaatggagggacctgctctgactacgtcaacagttacacttgcaagtgccaggcaggatttgatggagtccattgtgagaacaacatcaatgagtgcactgagagctcctgtttcaatggtggcacatgtgttgatgggattaactccttctcttgcttgtgccctgtgggtttcactggatccttctgcctccatgagatcaatgaatgcagctctcatccatgcctgaatgagggaacgtgtgttgatggcctgggtacctaccgctgcagctgccccctgggctacactgggaaaaactgtcagaccctggtgaatctctgcagtcggtctccatgtaaaaacaaaggtacttgcgttcagaaaaaagcagagtcccagtgcctatgtccatctggatgggctggtgcctattgtgacgtgcccaatgtctcttgtgacatagcagcctccaggagaggtgtgcttgttgaacacttgtgccagcactcaggtgtctgcatcaatgctggcaacacgcattactgtcagtgccccctgggctatactgggagctactgtgaggagcaactcgatgagtgtgcgtccaacccctgccagcacggggcaacatgcagtgacttcattggtggatacagatgcgagtgtgtcccaggctatcagggtgtcaactgtgagtatgaagtggatgagtgccagaatcagccctgccagaatggaggcacctgtattgaccttgtgaaccatttcaagtgctcttgcccaccaggcactcggggcctactctgtgaagagaacattgatgactgtgcccggggtccccattgccttaatggtggtcagtgcatggataggattggaggctacagttgtcgctgcttgcctggctttgctggggagcgttgtgagggagacatcaacgagtgcctctccaacccctgcagctctgagggcagcctggactgtatacagctcaccaatgactacctgtgtgtttgccgtagtgcctttactggccggcactgtgaaaccttcgtcgatgtgtgtccccagatgccctgcctgaatggagggacttgtgctgtggccagtaacatgcctgatggtttcatttgccgttgtcccccgggattttccggggcaaggtgccagagcagctgtggacaagtgaaatgtaggaagggggagcagtgtgtgcacaccgcctctggaccccgctgcttctgccccagtccccgggactgcgagtcaggctgtgccagtagcccctgccagcacgggggcagctgccaccctcagcgccagcctccttattactcctgccagtgtgccccaccattctcgggtagccgctgtgaactctacacggcaccccccagcacccctcctgccacctgtctgagccagtattgtgccgacaaagctcgggatggcgtctgtgatgaggcctgcaacagccatgcctgccagtgggatgggggtgactgttctctcaccatggagaacccctgggccaactgctcctccccacttccctgctgggattatatcaacaaccagtgtgatgagctgtgcaacacggtcgagtgcctgtttgacaactttgaatgccaggggaacagcaagacatgcaagtatgacaaatactgtgcagaccacttcaaagacaaccactgtgaccaggggtgcaacagtgaggagtgtggttgggatgggctggactgtgctgctgaccaacctgagaacctggcagaaggtaccctggttattgtggtattgatgccacctgaacaactgctccaggatgctcgcagcttcttgcgggcactgggtaccctgctccacaccaacctgcgcattaagcgggactcccagggggaactcatggtgtacccctattatggtgagaagtcagctgctatgaagaaacagaggatgacacgcagatcccttcctggtgaacaagaacaggaggtggctggctctaaagtctttctggaaattgacaaccgccagtgtgttcaagactcagaccactgcttcaagaacacggatgcagcagcagctctcctggcctctcacgccatacaggggaccctgtcataccctcttgtgtctgtcgtcagtgaatccctgactccagaacgcactcagctcctctatctccttgctgttgctgttgtcatcattctgtttattattctgctgggggtaatcatggcaaaacgaaagcgtaagcatggctctctctggctgcctgaaggtttcactcttcgccgagatgcaagcaatcacaagcgtcgtgagccagtgggacaggatgctgtggggctgaaaaatctctcagtgcaagtctcagaagctaacctaattggtactggaacaagtgaacactgggtcgatgatgaagggccccagccaaagaaagtaaaggctgaagatgaggccttactctcagaagaagatgaccccattgatcgacggccatggacacagcagcaccttgaagctgcagacatccgtaggacaccatcgctggctctcacccctcctcaggcagagcaggaggtggatgtgttagatgtgaatgtccgtggcccagatggctgcaccccattgatgttggcttctctccgaggaggcagctcagatttgagtgatgaagatgaagatgcagaggactcttctgctaacatcatcacagacttggtctaccagggtgccagcctccaggcccagacagaccggactggtgagatggccctgcaccttgcagcccgctactcacgggctgatgctgccaagcgtctcctggatgcaggtgcagatgccaatgcccaggacaacatgggccgctgtccactccatgctgcagtggcagctgatgcccaaggtgtcttccagattctgattcgcaaccgagtaactgatctagatgccaggatgaatgatggtactacacccctgatcctggctgcccgcctggctgtggagggaatggtggcagaactgatcaactgccaagcggatgtgaatgcagtggatgaccatggaaaatctgctcttcactgggcagctgctgtcaataatgtggaggcaactcttttgttgttgaaaaatggggccaaccgagacatgcaggacaacaaggaagagacacctctgtttcttgctgcccgggaggggagctatgaagcagccaagatcctgttagaccattttgccaatcgagacatcacagaccatatggatcgtcttccccgggatgtggctcgggatcgcatgcaccatgacattgtgcgccttctggatgaatacaatgtgaccccaagccctccaggcaccgtgttgacttctgctctctcacctgtcatctgtgggcccaacagatctttcctcagcctgaagcacaccccaatgggcaagaagtctagacggcccagtgccaagagtaccatgcctactagcctccctaaccttgccaaggaggcaaaggatgccaagggtagtaggaggaagaagtctctgagtgagaaggtccaactgtctgagagttcagtaactttatcccctgttgattccctagaatctcctcacacgtatgtttccgacaccacatcctctccaatgattacatcccctgggatcttacaggcctcacccaaccctatgttggccactgccgcccctcctgccccagtccatgcccagcatgcactatctttttctaaccttcatgaaatgcagcctttggcacatggggccagcactgtgcttccctcagtgagccagttgctatcccaccaccacattgtgtctccaggcagtggcagtgctggaagcttgagtaggctccatccagtcccagtcccagcagattggatgaaccgcatggaggtgaatgagacccagtacaatgagatgtttggtatggtcctggctccagctgagggcacccatcctggcatagctccccagagcaggccacctgaagggaagcacataaccacccctcgggagcccttgccccccattgtgactttccagctcatccctaaaggcagtattgcccaaccagcgggggctccccagcctcagtccacctgccctccagctgttgcgggccccctgcccaccatgtaccagattccagaaatggcccgtttgcccagtgtggctttccccactgccatgatgccccagcaggacgggcaggtagctcagaccattctcccagcctatcatcctttcccagcctctgtgggcaagtaccccacacccccttcacagcacagttatgcttcctcaaatgctgctgagcgaacacccagtcacagtggtcacctccagggtgagcatccctacctgacaccatccccagagtctcctgaccagtggtcaagttcatcaccccactctgcttctgactggtcagatgtgaccaccagccctacccctgggggtgctggaggaggtcagcggggacctgggacacacatgtctgagccaccacacaacaacatgcaggtttatgcg

SEQ ID NO: 6776 - DNA, 912 bp, Homo sapiens
  source 1..912: mol_type = genomic DNA
atgaagcgagctcaccccgagtacagctcctcggacagcgagctggacgagaccatcgaggtggagaaggagagtgcggacgagaatggaaacttgagttcggctctaggttccatgtccccaactacatcttcccagattttggccagaaaaagacggagaggaataattgagaagcgccgacgagaccggatcaataacagtttgtctgagctgagaaggctggtacccagtgcttttgagaagcagggatctgctaagctagaaaaagccgagatcctgcagatgaccgtggatcacctgaaaatgctgcatacggcaggagggaaaggttactttgacgcgcacgcccttgctatggactatcggagtttgggatttcgggaatgcctggcagaagttgcgcgttatctgagcatcattgaaggactagatgcctctgacccgcttcgagttcgactggtttcgcatctcaacaactacgcttcccagcgggaagccgcgagcggcgcccacgcgggcctcggacacattccctgggggaccgtcttcggacatcacccgcacatcgcgcacccgctgttgctgccccagaacggccacgggaacgcgggcaccacggcctcacccacggaaccgcaccaccagggcaggctgggctcggcacatccggaggcgcctgctttgcgagcgccccctagcggcagcctcggaccggtgctccctgtggtcacctccgcctccaaactgtcgccgcctctgctctcctcagtggcctccctgtcggccttccccttctctttcggctccttccacttactgtctcccaatgcactgagcccttcagcacccacgcaggctgcaaaccttggcaagccctatagaccttgggggacggagatcggagctttt

SEQ ID NO: 6777 - DNA, 924 bp, Homo sapiens
  source 1..924: mol_type = genomic DNA
atgaagcgagctcaccccgagtacagctcctcggacagcgagctggacgagaccatcgaggtggagaaggagagtgcggacgagaatggaaacttgagttcggctctaggttccatgtccccaactacatcttcccagattttggccagaaaaagacggagaggaataattgagaagcgccgacgagaccggatcaataacagtttgtctgagctgagaaggctggtacccagtgcttttgagaagcaggtaatggagcaaggatctgctaagctagaaaaagccgagatcctgcagatgaccgtggatcacctgaaaatgctgcatacggcaggagggaaaggttactttgacgcgcacgcccttgctatggactatcggagtttgggatttcgggaatgcctggcagaagttgcgcgttatctgagcatcattgaaggactagatgcctctgacccgcttcgagttcgactggtttcgcatctcaacaactacgcttcccagcgggaagccgcgagcggcgcccacgcgggcctcggacacattccctgggggaccgtcttcggacatcacccgcacatcgcgcacccgctgttgctgccccagaacggccacgggaacgcgggcaccacggcctcacccacggaaccgcaccaccagggcaggctgggctcggcacatccggaggcgcctgctttgcgagcgccccctagcggcagcctcggaccggtgctccctgtggtcacctccgcctccaaactgtcgccgcctctgctctcctcagtggcctccctgtcggccttccccttctctttcggctccttccacttactgtctcccaatgcactgagcccttcagcacccacgcaggctgcaaaccttggcaagccctatagaccttgggggacggagatcggagctttt

SEQ ID NO: 6778 - DNA, 1431 bp, Homo sapiens
  source 1..1431: mol_type = genomic DNA
atgaccatggttgacacagagatgccattctggcccaccaactttgggatcagctccgtggatctctccgtaatggaagaccactcccactcctttgatatcaagcccttcactactgttgacttctccagcatttctactccacattacgaagacattccattcacaagaacagatccagtggttgcagattacaagtatgacctgaaacttcaagagtaccaaagtgcaatcaaagtggagcctgcatctccaccttattattctgagaagactcagctctacaataagcctcatgaagagccttccaactccctcatggcaattgaatgtcgtgtctgtggagataaagcttctggatttcactatggagttcatgcttgtgaaggatgcaagggtttcttccggagaacaatcagattgaagcttatctatgacagatgtgatcttaactgtcggatccacaaaaaaagtagaaataaatgtcagtactgtcggtttcagaaatgccttgcagtggggatgtctcataatgccatcaggtttgggcggatgccacaggccgagaaggagaagctgttggcggagatctccagtgatatcgaccagctgaatccagagtccgctgacctccgggccctggcaaaacatttgtatgactcatacataaagtccttcccgctgaccaaagcaaaggcgagggcgatcttgacaggaaagacaacagacaaatcaccattcgttatctatgacatgaattccttaatgatgggagaagataaaatcaagttcaaacacatcacccccctgcaggagcagagcaaagaggtggccatccgcatctttcagggctgccagtttcgctccgtggaggctgtgcaggagatcacagagtatgccaaaagcattcctggttttgtaaatcttgacttgaacgaccaagtaactctcctcaaatatggagtccacgagatcatttacacaatgctggcctccttgatgaataaagatggggttctcatatccgagggccaaggcttcatgacaagggagtttctaaagagcctgcgaaagccttttggtgactttatggagcccaagtttgagtttgctgtgaagttcaatgcactggaattagatgacagcgacttggcaatatttattgctgtcattattctcagtggagaccgcccaggtttgctgaatgtgaagcccattgaagacattcaagacaacctgctacaagccctggagctccagctgaagctgaaccaccctgagtcctcacagctgtttgccaagctgctccagaaaatgacagacctcagacagattgtcacggaacacgtgcagctactgcaggtgatcaagaagacggagacagacatgagtcttcacccgctcctgcaggagatctacaaggacttgtac

SEQ ID NO: 6779 - DNA, 1515 bp, Homo sapiens
  source 1..1515: mol_type = genomic DNA
atgggtgaaactctgggagattctcctattgacccagaaagcgattccttcactgatacactgtctgcaaacatatcacaagaaatgaccatggttgacacagagatgccattctggcccaccaactttgggatcagctccgtggatctctccgtaatggaagaccactcccactcctttgatatcaagcccttcactactgttgacttctccagcatttctactccacattacgaagacattccattcacaagaacagatccagtggttgcagattacaagtatgacctgaaacttcaagagtaccaaagtgcaatcaaagtggagcctgcatctccaccttattattctgagaagactcagctctacaataagcctcatgaagagccttccaactccctcatggcaattgaatgtcgtgtctgtggagataaagcttctggatttcactatggagttcatgcttgtgaaggatgcaagggtttcttccggagaacaatcagattgaagcttatctatgacagatgtgatcttaactgtcggatccacaaaaaaagtagaaataaatgtcagtactgtcggtttcagaaatgccttgcagtggggatgtctcataatgccatcaggtttgggcggatgccacaggccgagaaggagaagctgttggcggagatctccagtgatatcgaccagctgaatccagagtccgctgacctccgggccctggcaaaacatttgtatgactcatacataaagtccttcccgctgaccaaagcaaaggcgagggcgatcttgacaggaaagacaacagacaaatcaccattcgttatctatgacatgaattccttaatgatgggagaagataaaatcaagttcaaacacatcacccccctgcaggagcagagcaaagaggtggccatccgcatctttcagggctgccagtttcgctccgtggaggctgtgcaggagatcacagagtatgccaaaagcattcctggttttgtaaatcttgacttgaacgaccaagtaactctcctcaaatatggagtccacgagatcatttacacaatgctggcctccttgatgaataaagatggggttctcatatccgagggccaaggcttcatgacaagggagtttctaaagagcctgcgaaagccttttggtgactttatggagcccaagtttgagtttgctgtgaagttcaatgcactggaattagatgacagcgacttggcaatatttattgctgtcattattctcagtggagaccgcccaggtttgctgaatgtgaagcccattgaagacattcaagacaacctgctacaagccctggagctccagctgaagctgaaccaccctgagtcctcacagctgtttgccaagctgctccagaaaatgacagacctcagacagattgtcacggaacatgtgcagctactgcaggtgatcaagaagacggagacagacatgagtcttcacccgctcctgcaggagatctacaaggacttgtac

SEQ ID NO: 6780 - DNA, 1434 bp, Homo sapiens
  source 1..1434: mol_type = genomic DNA
atggaactcttaacattcaaggatgtggccatagaattctctccagaagagtggaaatgtctggacacttcccagcagaatttatatagagatgtgatgttggagaactacagaaacctggtctccctgggtgttagtatctctaacccagacctggtcaccagtctggagcaaagaaaagagccctacaatttgaagatacatgaaacagcagccagacccccagctgtgtgttctcatttcacccaaaacctttggacagtgcagggcatagaagattcattccacaaacttataccaaaaggacatgagaaacgtggacatgagaatttaagaaaaacttgtaaaagtataaatgagtgtaaggtgcagaaaggtggttataatagaattaaccaatgcttattaactacccagaaaaaaacaattcaatctaatatatgtgtcaaagtttttcataaattttcaaattcaaacaaagataagataagatatactggagataaaacctttaaatgtaaagaatgtggcaaatcatttcacgtgctctcacgcctaactcaacacaaaagaattcatactggagagaacccctacacatgtgaagaatgtggcaaagcctttaattggtcctcaattcttactaaacataagagaattcatgccagagagaaattctacaagtgtgaagaatgtggtaaaggctttactcggtcctcacaccttactaaacataagagaattcatactggagagaaaccctacatatgtgaaaaatgtggtaaagcttttaaccaatcctcaacccttaatttacataagagaattcattctgcacaaaaatactacaaatgtgaagaatgtggtaaagcctttaagtggtcctcatcccttaatgaacataagagaattcatgctggagagaaacccttctcatgcgaagaatgtggcaatgtctttaccacatcctcagactttgctaaacataagagaattcatacaggagagaaaccctacaaatgtgaagaatgtggaaaatcctttaataggtccacaactcttacgacacataagagaatccatactggagagaaaccctacacatgtgaagaatgtggaaaagcctttaattggtcctcaacccttaatgtacacaagagaattcactctggaaaaaatccctacaaatgtgaagattgtggcaaagcctttaaagtgtttgcaaacctgcataatcataagaaaattcatactggagagaaaccctacatatgtaaacaatgtggcaaagcctttaaacagtcctcacacttgaataaacataagaaaattcacactgtagataaaccctacaaatgtaaagaatgcgggaaagcttttaagcagtactccaaccttcctcaacataagagaactcatactggaggaaaattt

SEQ ID NO: 6781 - DNA, 1029 bp, Homo sapiens
  source 1..1029: mol_type = genomic DNA
atggaccccgagcactgcgcgcctttccgcgtggggcctgcacccggcccctatgtggcctcgggggacgagcctccgggcccgcagggaacccccgccgctgcgcctcacctgcaccccgcgccgccccgcggcccgcggctgacccgctttccggcctgcgggcccctggagccctacctcccagagccggccaagccgcccgccaagtacctgcaggacctcgggcccggcccggccctcaacggcggccacttctacgagggccccgcggaagctgaggagaagacctccaaagctgccagcttcccccagctgcccttggactgccgagggggccccagagacgggccctctaacttgcaaggctccccaggcccctgcctggccagcctgcatcttcctctttccccgggactccctgactccatggagttggccaagaacaagagcaagaagcgtcgtaaccgcacgaccttcagcacattccagctggaggagctggagaaggtcttccagaaaacccactatcctgatgtgtatgcccgggagcagctggccctgcgcacagacctgactgaggcccgggtacaggtctggttccagaaccgcagagccaagtggcggaagcgcgagcgttatgggaagatccaggaggggcggaaccccttcacggctgcctatgacatctctgtgctgccccgtactgacagccaccctcagctgcagaactccctgtgggccagtccaggatctgggagccctggaggcccctgccttgtgtctccagagggcatcccctccccatgcatgtctccatattcccacccccatgggagtgtggctggcttcatgggggtgccagccccttctgcggctcaccctggcatctactccatccatggctttccccccaccctggggggccacagctttgagccttcctcagatggtgactataagtctccaagcctcgtctcgctcagggtaaagcccaaggagccacccggccttctgaactggaccacg

SEQ ID NO: 6782 - DNA, 852 bp, Homo sapiens
  source 1..852: mol_type = genomic DNA
atgtacggaagctgtcttttggagaaagaagcaggcatgtacccgggcactctcatgagccctgggggcgacggcacagctgggacaggcggcacagggggcggtgggagtccgatgccagcctccaatttcgctgcggcaccggctttctcgcactatatggggtatcctcatatgcccagcatggatcctcactggccgtctctgggagtctggggctcaccctacagtcccccgcgagaagactggagcgtgtatcctgggccgtctagtacaatgggcacagtgccggtgaacgacgtgacctctagccccgccgctttctgctcgaccgactacagcaacttgggccctgtgggcggtggaactagcggcagcagcctaccaggccaggctggcgggtcgcttgtcccgacggacgcaggcgccgccaaggccagttcccccagcaggagccgccacagcccctatgcatggatgcgcaagacggtgcaggtgacggggaaaaccaggacaaaagaaaagtatcgtgtagtttacactgatcatcaaagattggagctggaaaaggaattccattgcaatagatatatcaccatccagagaaaatcagagctggcagttaacctgggcctttccgagagacaggtgaaaatctggtttcagaatcgcagagccaaggagagaaagatgatcaaaaagaaaatctcccagtttgagaatagtggaggctcggtgcaaagtgactctgactccatcagccctggggaactacctaacacttttttcaccacaccatctgctgttcgtggatttcaacctattgagatacagcaggttatagtctccgaa

SEQ ID NO: 6783 - DNA, 1287 bp, Homo sapiens
  source 1..1287: mol_type = genomic DNA
atgtcaggcgtccgacctccgatcatgaacgggcccctgcacccgcggcccctggtggcattgctggatggccgggactgcacagtggagatgcccatcctgaaggacgtggccactgtggccttctgcgacgcgcagtccacgcaggagatccatgagaaggtcctgaacgaggctgtgggggccctgatgtaccacaccatcactctcaccagggaggacctggagaagttcaaagccctccgcatcatcgtccggattggcagtggttttgacaacatcgacatcaagtcggccggggatttaggcattgccgtctgcaacgtgcccgcggcgtctgtggaggagacggccgactcgacgctgtgccacatcctgaacctgtaccggcgggccacctggctgcaccaggcgctgcgggagggcacacgagtccagagcgtcgagcagatccgcgaggtggcgtccggcgctgccaggatccgcggggagaccttgggcatcatcggacttggtcgcgtggggcaggcagtggcgctgcgggccaaggccttcggcttcaacgtgctcttctacgacccttacttgtcggatggcgtggagcgggcgctggggctgcagcgtgtcagcaccctgcaggacctgctcttccacagcgactgcgtgaccctgcactgcggcctcaacgagcacaaccaccacctcatcaacgacttcaccgtcaagcagatgagacaaggggccttcctggtgaacacagcccggggtggcctggtggatgagaaggcgctggcccaggccctgaaggagggccggatccgcggcgcggccctggatgtgcacgagtcggaacccttcagctttagccagggccctctgaaggatgcacccaacctcatctgcaccccccatgctgcatggtacagcgagcaggcatccatcgagatgcgagaggaggcggcacgggagatccgcagagccatcacaggccggatcccagacagcctgaagaactgtgtcaacaaggaccatctgacagccgccacccactgggccagcatggaccccgccgtcgtgcaccctgagctcaatggggctgcctataggtaccctccgggcgtggtgggcgtggcccccactggcatcccagctgctgtggaaggtatcgtccccagcgccatgtccctgtcccacggcctgccccctgtggcccacccgccccacgccccttctcctggccaaaccgtcaagcccgaggcggatagagaccacgccagtgaccagttg

SEQ ID NO: 6784 - DNA, 1527 bp, Homo sapiens
  source 1..1527: mol_type = genomic DNA
atgggctctggagaccatcagttcaacctcgcagagatcctgtcacagaactacagtgttaggggggagtgcgaggaggcctcgaggtgcccagacaagcccaaggaggagctggagaaggacttcatctcccagagcaacgacatgccctttgatgagctgcttgcgctctatggctacgaggcgtcagaccccatttcagaccgggagagtgagggtggtgacgtggccccgaacctcccagacatgaccctggacaaagaacaaatagcgaaggatttgctttcaggggaagaagaggaagagacgcaatcatctgctgacgacctcaccccgtccgtgacctcccacgaggcctccgacctcttccctaaccggagtggatctcgtttcctggctgatgaagacagagagcctggctcttctgcctcctccgacaccgaggaggactctcttcctgccaacaaatgtaagaaggagatcatggtgggacctcagttccaagctgacctcagcaacctgcacttgaaccggcactgtgagaagatctacgagaacgaagaccagctgctctgggaccccagcgtcctccctgagagggaggtggaggagttcctgtacagggcggtgaagcggcgttggcacgagatggccgggcctcagctcccagagggagaagccgtgaaagacagtgagcaggcgctgtacgagttggtgaaatgcaacttcaatgtggaggaggccctgcgaaggctgcggttcaacgtgaaggtgatccgagatgggctctgtgcttggagtgaagaggagtgcaggaactttgagcacggcttccgtgtgcatggaaagaactttcacctgatccaggccaacaaggtgcgcacacggtcagtgggcgagtgtgtcgagtactactacctgtggaagaagtcggagcgctacgactacttcgcccagcagacgcggctgggccggaggaagtacgtcccgtccggaaccacggacgcagaccaggacctggatggcagcgaccccgatggccccggccgtccgcgcccggagcaagacaccctgactgggatgcgcacagatccactgagcgtggatggcacggccggtggtctcgatgagcccggagtggcctctgatggactcccgtcctcggagccagggccgtgttccttccagcagctggatgagtcccccgctgtacccctgtcccatcggcccccagccctggccgacccagcctcataccagccagctgtcactgctccggagccagacgccagcccaaggctggccgtggacttcgccctgcccaaggagctgcccctcatctccagccatgtggacctcagcggggatccggaggagactgtggccccagcacaggtggctttgtcggtcaccgagtttggactcatcggcattggggacgtgaaccccttcctggccgcccaccccacgtgcccggcccccgggctacactcggagcccctgtcacactgtaacgtgatgacctgc

SEQ ID NO: 6785 - DNA, 993 bp, Homo sapiens
  source 1..993: mol_type = genomic DNA
atgaggagaaagacaagaaatttcaaacataagacagttaaagacaataaagtactcacagaagggagtgaccaagaatctgaaaaagacaatagtcagtgctgtgaccctgcaacaaatgagagagttcaggctgaaaagagacagtatgtatgtactgagtgtgggaaagcctttagtcagagtgcaaacctcacagtacatgagcgaatccacacgggagagaaaccctataagtgtaaggagtgtggaaaagctttcagtcatagctctaaccttgttgttcatcggagaatccacactggactgaagccctatacatgcagtgaatgtgggaaatctttcagtggaaagtcacatcttattcggcaccagggaatccacagtggggagaaaacttatgaatgtaaagagtgtgggaaagcctttagtcggagttcgggccttatatcacatcacagagttcacaccggagagaagccctattcttgtattgagtgtgggaaagcctttagccgtagttcaaaccttactcaacatcagcgaatgcacagaggaaaaaaagtttacaaatgtaaggagtgtgggaaaacatgtggttctaatacaaagattatggaccatcagagaattcacactggagagaagccttatgaatgtgatgagtgtggaaaaactttcatcttaaggaaaactcttaatgaacaccagagacttcatcgtagagagaaaccttacaaatgtaatgagtgtgggaaggcttttacttctaatcgaaaccttgttgatcatcagagagttcacactggagagaaaccctataaatgtaatgaatgtgggaaaaccttcaggcagacttctcaagttattctacacttgagaacccacactaaggagaaaccctataaatgtagtgagtgtgggaaagcctatcggtatagttcacagcttattcaacaccagaggaaacataatgaggagaaagaaacctca

SEQ ID NO: 6786 - DNA, 1587 bp, Homo sapiens
  source 1..1587: mol_type = genomic DNA
atggatctgcccgtgggccccggcgcggcggggcccagcaacgtcccggccttcctgaccaagctgtggaccctcgtgagcgacccggacaccgacgcgctcatctgctggagcccgagcgggaacagcttccacgtgttcgaccagggccagtttgccaaggaggtgctgcccaagtacttcaagcacaacaacatggccagcttcgtgcggcagctcaacatgtatggcttccggaaagtggtccacatcgagcagggcggcctggtcaagccagagagagacgacacggagttccagcacccatgcttcctgcgtggccaggagcagctccttgagaacatcaagaggaaagtgaccagtgtgtccaccctgaagagtgaagacataaagatccgccaggacagcgtcaccaagctgctgacggacgtgcagctgatgaaggggaagcaggagtgcatggactccaagctcctggccatgaagcatgagaatgaggctctgtggcgggaggtggccagccttcggcagaagcatgcccagcaacagaaagtcgtcaacaagctcattcagttcctgatctcactggtgcagtcaaaccggatcctgggggtgaagagaaagatccccctgatgctgaacgacagtggctcagcacattccatgcccaagtatagccggcagttctccctggagcacgtccacggctcgggcccctactcggccccctccccagcctacagcagctccagcctctacgcccctgatgctgtggccagctctggacccatcatctccgacatcaccgagctggctcctgccagccccatggcctcccccggcgggagcatagacgagaggcccctatccagcagccccctggtgcgtgtcaaggaggagccccccagcccgcctcagagcccccgggtagaggaggcgagtcccgggcgcccatcttccgtggacaccctcttgtccccgaccgccctcattgactccatcctgcgggagagtgaacctgcccccgcctccgtcacagccctcacggacgccaggggccacacggacaccgagggccggcctccctcccccccgcccacctccacccctgaaaagtgcctcagcgtagcctgcctggacaagaatgagctcagtgaccacttggatgctatggactccaacctggataacctgcagaccatgctgagcagccacggcttcagcgtggacaccagtgccctgctggacctgttcagcccctcggtgaccgtgcccgacatgagcctgcctgaccttgacagcagcctggccagtatccaagagctcctgtctccccaggagccccccaggcctcccgaggcagagaacagcagcccggattcagggaagcagctggtgcactacacagcgcagccgctgttcctgctggaccccggctccgtggacaccgggagcaacgacctgccggtgctgtttgagctgggagagggctcctacttctccgaaggggacggcttcgccgaggaccccaccatctccctgctgacaggctcggagcctcccaaagccaaggaccccactgtctcc

SEQ ID NO: 6787 - DNA, 1401 bp, Homo sapiens
  source 1..1401: mol_type = genomic DNA
atggagcctggaacaaactcttttcgggtagaatttcctgatttttccagcaccattctacagaaactgaaccagcagcgccagcaaggacaattatgtgacgtctccattgttgtccaaggccacattttccgggcacacaaagccgttcttgctgccagttcaccctacttttgtgaccaggtactcctgaaaaacagcaggagaattgttttgcctgatgtgatgaacccaagagtgtttgagaacattctcctatctagttatacaggacgtctagtaatgcccgctccagaaattgttagttacttgacagcggcaagcttcctccagatgtggcatgtggtagacaaatgcactgaagttttagagggaaaccctacagtcctttgtcagaagctaaatcatggcagtgaccaccagtcaccaagcagcagtagttataatggcctggtagagagctttgagctgggctctgggggtcatactgattttcccaaagcccaagaactgagagatggtgaaaatgaagaggagagcaccaaagacgagctgtcatcccagctcaccgagcacgaatacctgcccagcaactcgtccacagagcatgaccgcctgagcacggaaatggcaagccaggatggggaggagggcgccagcgacagcgccgagttccactacacccggcccatgtacagcaagcccagcatcatggctcacaaacgctggatccacgtgaagcccgagcgcttagaacaggcttgcgagggcatggatgtgcacgcgacctacgacgagcaccaggtcacagagtccatcaacaccgtgcagacagagcacacggtgcagccttcgggagtggaggaggacttccacatcggggagaagaaagtggaagctgagtttgatgaacaggctgatgaaagcaattatgatgagcaggtggatttctatggctcttccatggaagagttttccggagagaggtcagatgggaatctaattgggcacagacaggaggctgccctcgcagcaggttacagtgagaatattgaaatggtaacagggattaaagaagaagcttcccacttaggattctcagccaccgacaagctgtatccttgtcagtgtgggaaaagtttcactcacaagagtcagagagatcggcacatgagcatgcacctcggtcttcggccttacggctgtggggtctgcggtaagaaattcaaaatgaagcaccatctcgtgggccacatgaaaattcacacaggcataaagccgtatgagtgtaatatctgtgcaaagaggtttatgtggagggacagtttccaccggcatgtgacttcttgtactaagtcctacgaagctgcaaaggctgagcagaatacaactgaggctaac

SEQ ID NO: 6788 - DNA, 1119 bp, Homo sapiens
  source 1..1119: mol_type = genomic DNA
atgtccccgtgtcctccccagcagagcaggaacagggtgatacagctgtccacttcagagctaggagagatggaactgacttggcaggagatcatgtccatcaccgagctgcagggtctgaatgctccaagtgagccatcatttgagccccaagccccagctccataccttggacctccaccacccacaacttactgcccctgctcaatccacccagattctggcttcccacttcctccaccaccttatgagctcccagcatccacatcccatgtcccagatcccccatactcctatggcaacatggccataccagtctccaagccactgagcctctcaggcctgctcagtgagccgctccaagaccccttagccctcctggacattgggctgccagcagggccacctaagccccaagaagacccagaatccgactcaggattatccctcaactatagcgatgctgaatctcttgagctggaggggacagaggctggtcggcggcgcagcgaatatgtagagatgtacccagtggagtacccctactcactcatgcccaactccttggcccactccaactataccttgccagctgctgagacccccttggccttagagccctcctcaggccctgtgcgggctaagcccactgcacggggggaggcagggagtcgggatgaacgtcgggccttggccatgaagattccttttcctacggacaagattgtcaacttgccggtagatgactttaatgagctattggcaaggtacccgctgacagagagccagctagcgctagtccgggacatccgacgacggggcaaaaacaaggtggcagcccagaactgccgcaagaggaagctggaaaccattgtgcagctggagcgggagctggagcggctgaccaatgaacgggagcggcttctcagggcccgcggggaggcagaccggaccctggaggtcatgcgccaacagctgacagagctgtaccgtgacattttccagcaccttcgggatgaatcaggcaacagctactctcctgaagagtacgcgctgcaacaggctgccgatgggaccatcttccttgtgccccgggggaccaagatggaggccacagac

SEQ ID NO: 6789 - DNA, 273 bp, Homo sapiens
  source 1..273: mol_type = genomic DNA
atgccaggaccccctagaagcctagaaatgggactgttgacatttagggatgtggccatagaattctctctggaggagtggcaacacctggacattgcacagcagaatttatatagaaatgtgatgttagagaactacagaaacctggccttcctgggtattgctgtctctaagccagacctgatcacctgtctggaacaagggaaagagccctggaatatgaagcgacatgagatggtggatgaacccccaggattggatttttcattactg

SEQ ID NO: 6790 - DNA, 1977 bp, Homo sapiens
  source 1..1977: mol_type = genomic DNA
atgccaggaccccctagaagcctagaaatgggactgttgacatttagggatgtggccatagaattctctctggaggagtggcaacacctggacattgcacagcagaatttatatagaaatgtgatgttagagaactacagaaacctggccttcctgggtattgctgtctctaagccagacctgatcacctgtctggaacaagggaaagagccctggaatatgaagcgacatgagatggtggatgaacccccaggtatgtgtcctcattttgctcaagacctttggccagagcagggcatggaagattcttttcaaaaagcaatactgagaagatatggaaaatatggacatgagaatttacagttaagaaaaggctgtaaaagtgtggatgagtataaggtgaacaaagaaggttataatggacttaaccagtgtttcacaactgcccagagcaaagtatttcaatgtgataaatatttgaaagtcttctataaatttttaaattcaaacagacctaagataagacatactgaaaagaaatctttcaaatgtaaaaaacgtgtcaaattattttgcatgctttcacataaaacccaacacaaaagcatttatcatagagagaagtcctacaaatgtaaagaatgtggaaaaacctttaattggtcctcaacccttactaatcataggaaaatttatactgaagagaaaccttacaaatgtgaagaatataacaaatctcctaagcaactctcaacccttactacacatgaaataattcatgctggagagaaactctacaaatgtgaagaatgtggtgaagcttttaatcgatcctcaaatcttactacacataagataattcatactggagagaaaccttacaagtgtgaagaatgtggcaaagcatttatctggtcctcaacccttactgagcataagaaaattcatactagaaagaaaccctacaagtgtgaagaatgtggcaaagcatttatatggtcctcaacactaactagacataagaggatgcacactggagagaaaccctacaaatgtgaagaatgtggcaaagcttttagccagtcctcaacccttactacacataagataattcatactggagagaaacgctacaaatgcttagaatgtggcaaagcttttaagcaactctcaactcttactacacataaaataattcatgttggagagaaactctacaaatgtgaagaatgcggcaaaggttttaatcgatcttcaaatcttactacacataagataattcatactggagagaaaccttacaagtgtgaagaatgtggcaaagcatttatctggtcctcaacccttactaaacataagagaattcatactagagagaaaccctacaaatgtgaagaatgtggcaaggcatttatatggtcctcaaccctaactagacataagaggatgcacactggagagaaaccctacaaatgtgaagaatgtggcaaatcttttagccaatcctcaacccttactacacataagataattcatactggagagaaaccctacaaatgtgaagaatgtggcaaagcctttaactggtcctcaactcttactaaacataagataattcatactgaagagaaaccctacaaatgtgaaaaatgtggcaaagcctttaagcagtcttcaatccttactaaccataagagaattcatactggagagaaaccctataaatgtgaagaatgtggcaaatcttttaaccggtcttcaacttttactaaacataaggtaattcatactggagtaaaaccctacaaatgtgaagaatgtggcaaagcatttttctggtcctcaaccctaactaaacataagagaattcatactggagagcaaccctacaaatgggaaaaatttggcaaagcctttaatcggtcctcgcacctcaccacagataagataactcattggagagaaatcttacaagta

SEQ ID NO: 6791 - DNA, 1422 bp, Homo sapiens
  source 1..1422: mol_type = genomic DNA
atgaccacattcaaggaggcagtgaccttcaaggatgtggctgtgttcttcactgaggaggaactggggctactggaccctgcccagaggaagctgtaccaagacgtgatgcttgagaacttcacgaacctgctgtcagtggggcatcaaccattccaccctttccacttcctaagggaagaaaagttttggatgatggagacagcaacccaaagagaaggaaattcaggcggcaagactattgcggaagcaggaccacatgaagactgcccttgccagcaaatctgggaacaaactgcaagtgacttaacccagtctcaagactccatcataaataattctcacttctttgaacaaggtgatgtcccctcccaggttgaggcaggactatctataattcatacaggacagaaaccttcacagaatgggaagtgtaaacagtccttcagtgatgttgccatctttgatcctcctcagcagttccactcaggagagaagtctcatacatgcaatgagtgtggaaaaagcttctgttacatctcagctcttcgtattcaccagagagttcacttgagagagaaactctctaagtgtgacatgcgtggtaaggaattcagtcagagctcatgtctgcaaactcgtgagagagtccacactggagagaaaccattcaaatgtgagcaatgtgggaaaggcttcagatgtagagcgatacttcaagttcactgcaaattacacacaggagagaaaccttatatttgtgagaaatgtgggagggccttcattcacgatttccagcttcagaaacatcagataattcatactggggagaagccgttcaaatgtgaaatatgtggtaagagcttctgccttaggtcaagtcttaataggcattgcatggtccacacagcagagaaactgtacaaatctgaggagtgtggaaaaggcttcactgatagcctagatttgcataagcatcagataattcacacaggacagaaaccgtacaattgtaaagaatgtgggaagagcttcagatggtcctcatatcttttgatccatcagcgaatccacagtggagaaaaaccatacagatgtgaggagtgtgggaagggctacattagtaagtcaggtcttaacttgcaccagagggtccatactggagagagaccttataattgtaaggaatgtgggaagagctttagccgggcttcaagtattttgaatcataagaaactccactgccggaaaaaacccttcaaatgtgaggattgtggaaagaggcttgtacaccggtctttctgtaaagaccaacaaggagaccacaatggagaaaactcatccaaatgtgaggactgtgggaagcgctacaagaggcgcttgaatctggatataattttatcattatttttaaatgatatg

SEQ ID NO: 6792 - DNA, 1506 bp, Homo sapiens
  source 1..1506: mol_type = genomic DNA
atggggactgagaacaaggaggtgattcccaaggaagaaatttctgaagaatctgagccacatgggtcattattagaaaaatttccaaaagtggtttaccaaggtcatgagtttggagcaggatgtgaagaagacatgttggagggacattcgagagagtccatggaagaggttatagagcagatgtctcctcaggagagagactttccatcagggttgatgatctttaagaaatcaccctcaagtgagaaagaccgggagaataatgagagtgagagaggctgcagtcccagcccaaatctggttacacatcagggagatacaacagagggagttagtgcatttgctacctctggccaaaacttcctagagattttagaatctaacaaaacacagagaagttctgtgggagaaaagcctcatacatgtaaagaatgtgggaaagcctttaatcagaactcacatctcatccagcatatgagagttcatagtggagaaaaaccctttgaatgtaaagaatgtggaaagacatttggaactaattcaagccttcgacggcacctgagaattcatgctggagaaaaaccctttgcttgtaatgaatgtggaaaggccttcattcagagttcacaccttattcaccatcatagaattcatactggagagagaccctataaatgtgaagaatgtggtaaagccttcagtcaaaattcagcccttattctacaccagagaatccatactggagagaaaccatatgaatgtaatgaatgtgggaagacctttagggttagttcacagcttattcagcatcagagaattcatactgaagaaagataccatgaatgcaatgagtgtggcaaagccttcaagcatagctcaggccttattagacaccagaaaattcatactggagaaaaaccatatctgtgtaatgaatgtgggaagggcttcgggcagagttctgagcttatccggcatcagagaattcatacaggggacaaaccctatgaatgtaatgaatgtgggaaaacttttggccagaactcagagattattagacatattagaattcatactggtgagaagccctatgtatgtaaggaatgtgggaaggccttcagggggaactcagaacttcttagacatgagagaattcacactggagagaaaccctatgaatgctttgagtgtggaaaggctttcaggcggacctctcaccttattgtccaccagagaattcatactggagagaaaccccatcaatgtaatgagtgtgcaagaaccttttgggataattctgagctgcttctccaccagaaaattcatattggagagaaaccttatgaatgtagcgagtgtgagaaaacatttagccagcattcccaacttatcatacatcagagaattcacactggagagaagccttatgagtgccaagaatgtcagaagacttttagtcggagctctcacctcctccgacatcaaagtgttcactgtatggag

SEQ ID NO: 6793 - DNA, 1383 bp, Homo sapiens
  source 1..1383: mol_type = genomic DNA
atggaaagggaaggtatctggcattctactctaggggaaacctgggaacctaataattggttagagggacaacaggatagtcatctgagccaagtgggagttacccataaggaaaccttcactgagatgagagtatgtggaggtaatgaatttgaaagatgttccagtcaggattcaatccttgatacacagcaaagcattcctatggtaaaaaggccccataactgtaattcacatggagaagatgccacacaaaattctgagttaattaaaactcaaagaatgtttgtaggaaagaagatctatgaatgtaatcagtgcagcaaaaccttcagtcagagctcatcccttcttaagcaccagaggattcatactggggagaaaccctataagtgtaatgtatgtgggaaacacttcattgaacgatcctcccttactgtacatcaaagaattcatactggagagaaaccctataaatgtaatgaatgtgggaaagcctttagtcagagcatgaatcttactgtccatcaacgaactcacaccggagagaaaccctatcagtgtaaagagtgtggcaaagccttccataagaattcatctcttattcagcatgaaaggattcatactggagagaagccctacaaatgtaatgaatgtggtaaagcttttacccaaagcatgaatttgacagttcatcagagaactcatacaggagaaaaaccctatgaatgtaatgaatgtggaaaagccttcagtcaaagcatgcatcttattgtacatcagagaagccatactggagaaaaaccctatgagtgtagtcagtgtggaaaagcctttagtaagagctcaactcttaccctacatcagcgaaatcacactggagaaaaaccttacaaatgtaacaaatgcgggaaatcctttagccaaagtacatatcttatagaacatcagagacttcattctggagtaaaaccttttgaatgtaacgagtgtggaaaagctttcagtaagaattcatctctaactcaacatcggagaattcacactggagagaaaccttatgagtgtatggtgtgtggaaaacatttcactggacgatcatcccttaccgtgcatcaggtcattcacactggagagaaaccttatgagtgcaatgaatgtggaaaggcattcagccagagtgcttaccttattgaacatcaaagaattcatactggtgagaaaccctatgaatgtgatcagtgtggaaaagccttcattaagaattcatcccttacagtgcatcagagaactcatacaggagagaaaccctatcagtgtaatgaatgcggaaaagccttcagccggagtacaaaccttacacgacatcaaagaactcatacg

SEQ ID NO: 6794 - DNA, 1383 bp, Homo sapiens
  source 1..1383: mol_type = genomic DNA
atggaaagggaaggtatctggcattctactctaggggaaacctgggaacctaataattggttagagggacaacaggatagtcatctgagccaagtgggagttacccataaggaaaccttcactgagatgagagtatgtggaggtaatgaatttgaaagatgttccagtcaggattcaatccttgatacacagcaaagcattcctatggtaaaaaggccccataactgtaattcacatggagaagatgccacacaaaattctgagttaattaaaactcaaagaatgtttgtaggaaagaagatctatgaatgtaatcagtgcagcaaaaccttcagtcagagctcatcccttcttaagcaccagaggattcatactggggagaaaccctataagtgtaatgtatgtgggaaacacttcattgaacgatcctcccttactgtacatcaaagaattcatactggagagaaaccctataaatgtaatgaatgtgggaaagcctttagtcagagcatgaatcttactgtccatcaacgaactcacaccggagagaaaccctatcagtgtaaagagtgtggcaaagccttccataagaattcatctcttattcagcatgaaaggattcatactggagagaaaccctacaaatgtaatgaatgtggtaaagcttttacccaaagcatgaatttgacagttcatcagagaactcatacaggagaaaaaccctatgaatgtaatgaatgtggaaaagccttcagtcaaagcatgcatcttattgtacatcagagaagccatactggagaaaaaccctatgagtgtagtcagtgtggaaaagcctttagtaagagctcaactcttaccctacatcagcgaaatcacactggagaaaaaccttacaaatgtaacaaatgcgggaaatcctttagccaaagtacatatcttatagaacatcagagacttcattctggagtaaaaccttttgaatgtaacgagtgtggaaaagctttcagtaagaattcatctctaactcaacatcggagaattcacactggagagaaaccttatgagtgtatggtgtgtggaaaacatttcactggacgatcatcccttaccgtgcatcaggtcattcacactggagagaaaccttatgagtgcaatgaatgtggaaaggcattcagccagagtgcttaccttattgaacatcaaagaattcatactggtgagaaaccctatgaatgtgatcagtgtggaaaagccttcattaagaattcatcccttacagtgcatcagagaactcatacaggagagaaaccctatcagtgtaatgaatgcggaaaagccttcagccggagtacaaaccttacacgacatcaaagaactcatacg

SEQ ID NO: 6795 - DNA, 1464 bp, Homo sapiens
  source 1..1464: mol_type = genomic DNA
atgttcgcagccgggctggctcccttctacgcctccaacttcagcctctggtcggccgcttactgctcctcggccggcccaggcggctgctccttccccttggaccccgccgccgtcaaaaagccctccttctgcatcgcagacattctgcacgccggcgtgggggatctgggggcggccccggagggcctggcaggggcctcggccgccgccctcaccgcgcacttgggctcggttcacccgcacgcctctttccaagcggcggccagatccccgcttcgacccaccccagtggtggcgccctccgaagtcccggctggcttcccgcagcggctgtctccgctctcagccgcctaccaccaccatcacccgcaacaacaacagcagcagcaacagccgcagcagcaacagcctccgcctccgccccgggctggcgccctgcagcccccggcctcggggacgcgagtggttccgaacccccaccacagtggctctgccccggccccctccagcaaagacctcaaatttggaattgaccgcattttatctgcagaatttgacccaaaagtcaaagaaggcaacacgctgagagatctcacttccctgctaaccggtgggcggcccgccggggtgcacctctcaggcctgcagccctcggccggccagttcttcgcatctctagatcccattaacgaggcttctgcaatcctgagtcccttaaactcgaacccaagaaattcagttcagcatcagttccaagacacgtttccaggtccctatgctgtgctcacgaaggacaccatgccgcagacgtacaaaaggaagcgttcatggtcgcgcgctgtgttctccaacctgcagaggaaaggcctggagaaaaggtttgagattcagaagtacgtgaccaagccggaccgaaagcagctggcggcgatgctgggcctcacggacgcacaggtgaaggtgtggttccagaaccggcggatgaagtggcggcactccaaggaggcccaggcccaaaaggacaaggacaaggaggctggcgagaagccatcaggtggagccccggctgcggatggcgagcaggacgagaggagccccagccgttctgaaggcgaggctgagagcgagagcagcgactccgagtccctggacatggcccccagcgacacggagcggactgaggggagtgagcgttctctgcaccaaacaacagttattaaggccccggtcactggcgccctcattaccgccagcagtgctgggagtggtgggagcagcggcggcggcggcaatagtttcagcttcagcagcgccagcagtcttagtagcagcagcaccagtgcgggttgcgccagcagccttggcggcggcggcgcctcggagcttctccctgcaacacagcccacagccagcagcgctcccaaaagccccgagccagcccaaggcgcgcttggctgctta

SEQ ID NO: 6796 - DNA, 1530 bp, Homo sapiens
  source 1..1530: mol_type = genomic DNA
atggacgggttttatgatcagcaagtcccttttatggtcccagggaaatctcgatctgaggaatgcagagggcggcctgtgattgacagaaagaggaagtttttggacacagatctggctcacgattctgaagagctatttcaggatctcagtcaacttcaagaggcttggttagctgaagcacaagttcctgatgatgaacagtttgtcccagattttcagtctgataacctggtgcttcatgccccacctccaaccaagatcaaacgggagctgcacagcccctcctctgagctgtcgtcttgtagccatgagcaggctcttggtgctaactatggagaaaagtgcctctacaactattgtgcctatgataggaagcctccctctgggttcaagccattaacccctcctacaacccccctctcacccacccatcagaatcccctatttcccccacctcaggcaactctgcccacctcagggcatgcccctgcagctggcccagttcaaggtgtgggccccgcccccgccccccattcgcttccagagcctggaccacagcagcaaacatttgcggtcccccgaccaccacatcagcccctgcagatgccaaagatgatgcctgaaaaccagtatccatcagaacagagatttcagagacaactgtctgaaccctgccaccccttccctcctcagccaggagttcctggagataatcgccccagttaccatcggcaaatgtcagaacctattgtccctgcagctcccccgccccctcagggattcaaacaagaataccatgacccactctatgaacatggggtcccgggcatgccagggcccccagcacacgggttccagtcaccaatgggaatcaagcaggagcctcgggattactgcgtcgattcagaagtgcctaactgccagtcatcctacatgagagggggttatttctccagcagccatgaaggtttttcatatgaaaaagatccccgattatactttgacgacacttgtgttgtgcctgagagactggaaggcaaagtcaaacaggagcctaccatgtatcgagaggggcccccttaccagaggcgaggttcccttcagctgtggcagttcctggtcacccttcttgatgacccagccaatgcccacttcattgcctggacaggtcgaggcatggagttcaagctgatagaaccggaagaggttgctcggcgctggggcatccagaagaaccggccagccatgaactatgacaagctgagccgctctctccgctattactatgaaaagggcatcatgcagaaggtggctggagagcgatacgtctacaaatttgtctgtgacccagatgccctcttctccatggctttcccggataaccagcgtccgttcctgaaggcagagtccgagtgccacctcagcgaggaggacaccctgccgctgacccactttgaagacagccccgcttacctcctggacatggaccgctgcagcagcctcccctatgccgaaggctttgcttac

SEQ ID NO: 6797 - DNA, 1545 bp, Homo sapiens
  source 1..1545: mol_type = genomic DNA
atggcggcccgggcgggtttccagtctgtggctccaagcggcggcgccggagcctcaggaggggcgggcgcggctgctgccttgggcccgggcggaactccggggcctcctgtgcgaatgggcccggctccgggtcaagggctgtaccgctccccgatgcccggagcggcctatccgagaccaggtatgttgccaggcagccgaatgacacctcagggaccttccatgggaccccctggctatggggggaacccttcagtccgacctggcctggcccagtcagggatggatcagtcccgcaagagacctgcccctcagcagatccagcaggtccagcagcaggcggtccaaaatcgaaaccacaatgcaaagaaaaagaagatggctgacaaaattctacctcaaaggattcgtgaactggtaccagaatcccaggcctatatggatctcttggcttttgaaaggaaactggaccagactatcatgaggaaacggctagatatccaagaggccttgaaacgtcccatcaagcaaaaacggaagctgcgaattttcatttctaacactttcaatccggctaagtcagatgccgaggatggggaagggacggtggcttcctgggagcttcgggtagaaggacggctcctggaggattcagccttgtccaaatatgatgccactaaacaaaagaggaagttctcttccttttttaagtccttggtgattgaactggacaaagacctgtatgggccagacaaccatctggtagaatggcacaggaccgccactacccaggagaccgatggctttcaggtgaagcggccgggagacgtgaatgtacggtgtactgtcctactgatgctggattaccagcctccccagtttaaattagacccccgcctagctcgactcctgggcatccatacccagactcgtccagtgatcatccaagcactgtggcaatatattaagacacataagctccaggaccctcacgagcgggagtttgtcatctgtgacaagtacctgcagcagatctttgagtctcaacgtatgaagttttcagagatccctcagcggctccatgccttgcttatgccaccagaacctatcatcattaatcatgtcatcagtgttgacccgaatgatcagaaaaagacagcttgttatgacattgatgttgaagtggatgacaccttgaagacccagatgaattcttttctgctgtccactgccagccaacaggagattgctactctagacaacaagatccatgagacaatagaaaccatcaaccagctgaagactcagcgggagttcatgctgagctttgccagagaccctcagggtttcatcaatgactggcttcagtcccagtgcagggacctcaagacaatgactgatgtggtgggtaacccagaggaggagcgccgagctgagttctacttccagccctgggctcaggaggctgtgtgccgatacttctactccaaggtgcagcagagacgacaagaattagagcaagccctgggaatccggaataca

SEQ ID NO: 6798 - DNA, 1128 bp, Homo sapiens
  source 1..1128: mol_type = genomic DNA
atgatgatgatggcgctgagcaagaccttcgggcagaagcccgtgaagttccagctggaggacgacggcgagttctacatgatcggctccgaggtgggaaactacctccgtatgttccgaggttctctgtacaagagatacccctcactctggaggcgactagccactgtggaagagaggaagaaaatagttgcatcgtcacatgatcacggatacacgactctagccaccagtgtgaccctgttaaaagcctcggaagtggaagagattctggatggcaacgatgagaagtacaaggctgtgtccatcagcacagagccccccacctacctcagggaacagaaggccaagaggaacagccagtgggtacccaccctgcccaacagctcccaccacttagatgccgtgccatgctccacaaccatcaacaggaaccgcatgggccgagacaagaagagaaccttccccctttgctttgatgaccatgacccagctgtgatccatgagaacgcatctcagcccgaggtgctggtccccatccggctggacatggagatcgatgggcagaagctgcgagacgccttcacctggaacatgaatgagaagttgatgacgcctgagatgttttcagaaatcctctgtgacgatctggatttgaacccgctgacgtttgtgccagccatcgcctctgccatcagacagcagatcgagtcctaccccacggacagcatcctggaggaccagtcagaccagcgcgtcatcatcaagctgaacatccatgtgggaaacatttccctggtggaccagtttgagtgggacatgtcagagaaggagaactcaccagagaagtttgccctgaagctgtgctcggagctggggttgggcggggagtttgtcaccaccatcgcatacagcatccggggacagctgagctggcatcagaagacctacgccttcagcgagaaccctctgcccacagtggagattgccatccggaacacgggcgatgcggaccagtggtgcccactgctggagactctgacagacgctgagatggagaagaagatccgcgaccaggacaggaacacgaggcggatgaggcgtcttgccaacacggccccggcctgg

SEQ ID NO: 6799 - DNA, 1401 bp, Homo sapiens
  source 1..1401: mol_type = genomic DNA
atgtcgtccatcttgccattcacgccgccagttgtgaagagactgctgggatggaagaagtcagctggtgggtctggaggagcaggcggaggagagcagaatgggcaggaagaaaagtggtgtgagaaagcagtgaaaagtctggtgaagaagctaaagaaaacaggacgattagatgagcttgagaaagccatcaccactcaaaactgtaatactaaatgtgttaccataccaagcacttgctctgaaatttggggactgagtacaccaaatacgatagatcagtgggatacaacaggcctttacagcttctctgaacaaaccaggtctcttgatggtcgtctccaggtatcccatcgaaaaggattgccacatgttatatattgccgattatggcgctggcctgatcttcacagtcatcatgaactcaaggcaattgaaaactgcgaatatgcttttaatcttaaaaaggatgaagtatgtgtaaacccttaccactatcagagagttgagacaccagttttgcctccagtattagtgccccgacacaccgagatcctaacagaacttccgcctctggatgactatactcactccattccagaaaacactaacttcccagcaggaattgagccacagagtaattatattccagaaacgccacctcctggatatatcagtgaagatggagaaacaagtgaccaacagttgaatcaaagtatggacacaggctctccagcagaactatctcctactactctttcccctgttaatcatagcttggatttacagccagttacttactcagaacctgcattttggtgttcgatagcatattatgaattaaatcagagggttggagaaaccttccatgcatcacagccctcactcactgtagatggctttacagacccatcaaattcagagaggttctgcttaggtttactctccaatgttaaccgaaatgccacggtagaaatgacaagaaggcatataggaagaggagtgcgcttatactacataggtggggaagtttttgctgagtgcctaagtgatagtgcaatctttgtgcagagccccaattgtaatcagagatatggctggcaccctgcaacagtgtgtaaaattccaccaggctgtaatctgaagatcttcaacaaccaggaatttgctgctcttctggctcagtctgttaatcagggttttgaagccgtctatcagctaactagaatgtgcaccataagaatgagttttgtgaaagggtggggagcagaataccgaaggcagacggtaacaagtactccttgctggattgaacttcatctgaatggacctctacagtggttggacaaagtattaactcagatgggatccccttcagtgcgttgctcaagcatgtca

SEQ ID NO: 6800 - DNA, 876 bp, Homo sapiens
  source 1..876: mol_type = genomic DNA
atgccgcgctccttcctggtgaaaacgcactccagccacagggtccccaactaccggcggctggagacgcagagagaaatcaatggtgcctgctctgcctgtggggggctggtggtgcccctcctcccccgagacaaggaggccccttctgtgcccggtgaccttccccagccctgggaccgctcctcggccgtcgcctgcatctccctgcccctcctgccacggatcgaggaagctctgggggcctctgggctggacgccttggaagtcagcgaggtcgaccctcgggccagccgggccgccattgtacccctcaaagacagcctgaaccacctcaacctgcccccactgctggtgctgcccacacggtggtccccgaccttgggcccagaccggcacggggctccggaaaaactgcttggggctgagcggatgccccgagccccgggcggctttgagtgcttccactgccacaaaccctaccacacgctggccgggctggccaggcaccggcagctgcactgccacctgcaggtggggcgtgtcttcacctgcaagtactgcgacaaggagtacaccagcctgggtgccctcaagatgcacatccgcactcacacgctgccctgcacctgcaagatctgtggcaaggccttctccaggccctggttactgcagggccatgtccgcacccacacaggggagaagccctatgcctgctcgcactgcagcagggcctttgccgaccgctccaaccttcgggcccatctgcaaacgcactcagacgccaagaagtaccggtgccggcgctgcaccaagaccttctcccgcatgtccctcctggcgcggcatgaggagtctggctgctgcccgggcccc

SEQ ID NO: 6801 - DNA, 1914 bp, Homo sapiens
  source 1..1914: mol_type = genomic DNA
atgcaagaaaccttcaggaacctggcctctatagggaaaaaatggaaaccccagaacatatatgtagagtacgaaaatctaaggagaaacctaagaattgtgggagagagactctttgaaagtaaagaaggtcatcagcatggagaaattttgacccaggttccagatgacatgctgaagaaaacaactactggagtaaaatcatgcgaaagcagtgtgtatggagaagtaggcagtgctcattcatctcttaataggcacatcagagatgacactggacacaaggcatatgagtatcaagaatatggacagaaaccatataaatgtaaatactgtaaaaaacctttcaactgtctctcctctgttcagacacatgaaagggctcatagtggaaggaaactctatgtttgtgaggaatgcggaaaaacatttatttcccattcaaaccttcaaagacacaggataatgcaccgtggagatggaccttataagtgtaaattttgtgggaaagccttgatgtttctcagtttgtatcttatccacaaacgaactcacactggagagaaaccatatcaatgtaaacagtgtggtaaagcctttagtcattctagtagccttcgaatacatgaaagaactcacactggggagaagccttataaatgtaatgaatgtgggaaagcattccatagttccacatgccttcatgctcataaaagaactcacactggggagaagccatatgaatgtaaacagtgtgggaaagccttcagctcttcccattcctttcaaatacatgaaagaactcacacgggggagaagccatatgaatgtaaggaatgtggaaaagcattcaagtgtcccagttctgttcgcagacatgaaagaacccactctaggaaaaaaccctatgaatgtaaacattgtgggaaagtattatcttatcttaccagctttcaaaaccacttgggaatgcacactggagagatatctcataaatgtaagatatgtgggaaagccttttattctcccagttcacttcaaacacatgaaaaaactcacactggagagaaaccctataaatgcaaccaatgtggtaaagcctttaattcttccagttccttccgatatcatgaaagaactcacactggagagaaaccttacgagtgtaagcaatgtgggaaagccttcagatctgcctcactccttcaaacacatggtaggactcacacgggagagaaaccctatgcatgtaaggaatgtggaaaaccatttagtaatttctctttctttcaaatacatgaaaggatgcacagagaagagaagccgtatgaatgtaagggttatgggaaaacattcagtttgcccagtttatttcatagacatgaaaggactcacactggaggaaaaacctatgaatgcaagcagtgtggcagatccttcaactgttcgagctcctttcgatatcatggaaggactcacactggagagaaaccctatgaatgcaagcaatgtggaaaagccttcagatctgcctcacagcttcaaattcatggaaggactcacactggagagaaaccttatgaatgtaagcagtgtgggaaagcctttggatctgcctcacaccttcaaatgcatggaaggactcacactggagagaaaccctatgaatgtaagcagtgtgggaagtcttttggatgtgcctcgcgacttcaaatgcatggaaggactcacactggagagaaaccgtataaatgtaagcaatgtgggaaagcttttggatgtccctcaaaccttcgaaggcatggaaggactcacactggagagaaaccctataaatgtaaccaatgtggtaaagtctttagatgttcttcacaacttcaagtgcatggaagggctcactgcatagacacccca

SEQ ID NO: 6802 - DNA, 1269 bp, Homo sapiens
  source 1..1269: mol_type = genomic DNA
atgagttctcattttgcccaagacctttggccagagaacatacaaaattctttccaaatagggatgctgagaagatatgaagaatgcagacatgacaatttacagttaaaaaaaggctgtaaaagcgtgggtgagcataaggtgcacaaaggaggttataatggacttaaccaatgtttgacaactacccagaaagaaatatttcaatgtgataaatatggaaaagtctttcataagttttcaaattcaaacacatataagacaagacatactggaataaatcttttcaaatgtataatatgtggcaaagcttttaaacggtcctcaacccttactacacataagaaaattcatactggagagaaaccttacagatgtgaagaatgtggcaaagcttttaaccaatctgcaaaccttactacacataagagaattcataccggagagaaaccctacagatgtgaagaatgtggcaaagcctttaagcagtcctcaaaccttactacacataagaaaattcatactggagagaaaccctacaaatgtgaagaatgtggcaaagccttcaaccgatccacagaccttactacacataagatagttcatactggagagaaaccctacaaatgtgaagaatgtggcaaagcctttaagcacccctcacacgttaccacacataagaaaattcatactagagggaaaccctacaactgtgaagaatgtggcaaatcctttaagcactgctctaaccttactatacataagagaattcatacaggagagaaaccctacaaatgtgaagaatgtggcaaagcctttcacctatcctcacaccttactacacataagatacttcatactggagagaaaccctacagatgtagagaatgtggcaaagcttttaaccattccacaacccttttttcacatgagaaaattcatactggagagaaaccctacaaatgtgatgaatgtggcaaaacctttacctggccctcaatcctctccaaacataaaagaactcatactggagagaaaccctacaaatgtgaagaatgtggcaaatcctttactgcatcctcaactctaactacacataagagaattcatactggagagaaaccttacaaatgtgaagaatgtggcaaagcttttaactggtcctcagaccttaataaacataagaaaattcatattgaacgaaaaccctacatagtgaagaatgtgacagatcttttaaatgttcctccacttttaattagcataaga

SEQ ID NO: 6803 - DNA, 3270 bp, Homo sapiens
  source 1..3270: mol_type = genomic DNA
atgatgccgatgatattaactgttttcttgagcaacaatgaacagattttaacagaagttcctataacaccggaaacaacctgtcgagatgttgtagaattttgcaaggaacctggagaaggcagctgccatttagctgaagtgtggaggggaaatgaacgtcccataccctttgatcatatgatgtacgaacatcttcagaaatggggtccacggagggaagaagtgaaatttttccttcgacacgaggactccccaactgagaacagtgaacaaggtggccgtcagacccaagagcaacgaactcagagaaatgtaataaatgtacctggagaaaaacgtactgaaaatggggttgggaatccacgtgttgaacttaccctctcagagctccaagatatggcagctaggcaacagcagcagattgaaaatcagcagcagatgttggttgccaaggaacagcgtttacattttctaaagcaacaggagcgccgtcagcagcagtctatttctgaaaatgaaaagcttcagaaattgaaagaacgagttgaagcccaggagaacaagctgaagaaaattcgtgcaatgagaggacaagtcgactacagcaaaatcatgaacggcaatctgtctgctgaaatagaaaggttcagtgccatgttccaggaaaagaagcaggaagtacagactgcaattttaagggttgatcagcttagtcagcaattggaagatttaaagaaaggaaaactgaatgggttccagtcttacaatggcaaattgacgggaccagcggcggtggagttaaaaagactgtaccaagaactacagattcgtaaccaacttaaccaggaacaaaattcaaaacttcagcagcagaaggaactcttaaataagcgcaacatggaggtggccatgatggacaagcgaatcagtgaactgcgtgaacgtctctatgggaaaaaaattcagctgaaccgtgtgaatggcacgtcatcaccacagtcccctctgagcacatcgggcagggtcgctgctgtggggccttatatccaggttcccagtgccggaagctttcctgtgctgggggaccctataaagccccagtctctcagtattgcctcaaatgctgctcatggaagatccaaatccgctaatgatggaaactggccaacattaaaacagaattctagctcttccgtgaaaccagtgcaggtggccggtgcagactggaaggatccgagcgtggaggggtctgtcaagcagggcactgtctccagccagcctgtgcccttctcagcactgggacccacggagaagccgggcatcgagattggtaaagtgccacctcccatcccgggtgtaggcaagcagctgcctccaagctatgggacatacccaagtcctacacctctgggtcctgggtcgacaagctccctggaaaggaggaaggaaggcagcttgcccaggcccagtgcaggcctgccaagtcgacagaggcccaccctgctgcccgccacaggcagcaccccccagccaggctcctcacaacagattcagcagaggatttccgtaccgccaagtcccacgtacccgccagcgggaccacctgcatttccagctggggacagcaagcctgaactcccactgacagtggccattaggcctttcctggctgataaagggtcaaggccacagtctcccaggaaaggaccccagacagtgaattcaagttccatatactccatgtacctccagcaagccacaccacctaagaattaccagccggcagcacacagcgccttaaataagtcagttaaagcagtgtatggtaagcccgttttaccttcgggttcaacctctccatcgccgctgccgtttcttcacgggtcactgtccacgggcacaccacagcctcagccaccttcagaaagtactgagaaagagcctgagcaggatggccccgccgcccccgcagatggcagcaccgtggagagcctgccacggccactcagccccaccaagctcacgcccatcgtgcattcgccactgcgctaccagagtgatgcagacctggaggccctccgcaggaagctggccaacgcgccccggcccctgaaaaagcgcagctccatcacagagcccgagggccccggcgggcccaacatccagaagctgctgtaccagcgcttcaacaccctggccggtggcatggagggcacccctttctaccagcccagcccctcccaggacttcatgggcaccttggccgatgtggacaatggaaacaccaatgccaatggaaacctggaagagctcccccctgcccagcccacagccccactccccgctgagcctgccccgtcatcagatgccaatgataatgagttaccttcccccgaaccagaggagctcatctgtccccaaaccacccaccaaactgccgagccggcagaggacaataacaacaacgtggccacggtccccaccacggagcagatcccgagtcctgtggctgaggccccatctccaggggaagagcaggtccctccagcacctcttccccctgccagccaccctcctgccacctccacgaacaagcggaccaacttgaagaagcccaactcggagcggacggggcacgggctgagagtccggtttaaccccctggcactgctcctagacgcgtctctggaaggagagttcgatctggtgcagaggatcatctatgaggtggaagatcccagcaagcccaacgacgaagggatcaccccactgcacaacgccgtctgcgccggccaccatcacatcgtgaagttcctgctggattttggtgtcaacgtgaatgctgctgatagtgatggatggacgccgctgcactgcgctgcctcttgtaacagcgttcacctctgcaaacagctggtggagagtggtgccgccatttttgcctcaaccataagcgacattgaaactgctgcagacaagtgtgaggagatggaggaaggctacatccagtgctcccagtttctatatggggtgcaggaaaagctgggtgtgatgaacaaaggtgtggcgtatgctctgtgggactacgaggcccagaacagtgacgagctgtccttccacgaaggggacgccctcaccatcctgaggcgcaaggacgaaagcgagactgagtggtggtgggctcgccttggagaccgggagggctatgtgcccaaaaacctgctggggctgtatccacggatcaaaccccgacagcgaacactcgcc

SEQ ID NO: 6804 - DNA, 1368 bp, Homo sapiens
  source 1..1368: mol_type = genomic DNA
atgaagattgaggaggtgaagagcactacgaagacgcagcgcatcgcctcccacagccacgtgaaagggctggggctggacgagagcggcttggccaagcaggcggcctcagggcttgtgggccaggagaacgcgcgagaggcatgtggcgtcatagtagaattaatcaaaagcaagaaaatggctggaagagctgtcttgttggcaggacctcctggaactggcaagacagctctggctctggctattgctcaggagctgggtagtaaggtccccttctgcccaatggtggggagtgaagtttactcaactgagatcaagaagacagaggtgctgatggagaacttccgcagggccattgggctgcgaataaaggagaccaaggaagtttatgaaggtgaagtcacagagctaactccgtgtgagacagagaatcccatgggaggatatggcaaaaccattagccatgtgatcataggactcaaaacagccaaaggaaccaaacagttgaaactggaccccagcatttttgaaagtttgcagaaagagcgagtagaagctggagatgtgatttacattgaagccaacagtggggccgtgaagaggcagggcaggtgtgatacctatgccacagaattcgaccttgaagctgaagagtatgtccccttgccaaaaggggatgtgcacaaaaagaaagaaatcatccaagatgtgaccttgcatgacttggatgtggctaatgcgcggccccaggggggacaagatatcctgtccatgatgggccagctaatgaagccaaagaagacagaaatcacagacaaacttcgaggggagattaataaggtggtgaacaagtacatcgaccagggcattgctgagctggtcccgggtgtgctgtttgttgatgaggtccacatgctggacattgagtgcttcacctacctgcaccgcgccctggagtcttctatcgctcccatcgtcatctttgcatccaaccgaggcaactgtgtcatcagaggcactgaggacatcacatcccctcacggcatccctcttgaccttctggaccgagtgatgataatccggaccatgctgtatactccacaggaaatgaaacagatcattaaaatccgtgcccagacggaaggaatcaacatcagtgaggaggcactgaaccacctgggggagattggcaccaagaccacactgaggtactcagtgcagctgctgaccccggccaacttgcttgctaaaatcaacgggaaggacagcattgagaaagagcatgtcgaagagatcagtgaacttttctatgatgccaagtcctccgccaaaatcctggctgaccagcaggataagtacatgaag

SEQ ID NO: 6805 - DNA, 2505 bp, Homo sapiens
  source 1..2505: mol_type = genomic DNA
atggcggcctccgcggcggcagcctcggcagcagcggcctcggccgcctctggcagcccgggcccgggcgagggctccgctggcggcgaaaagcgctccaccgccccttcggccgcagcctcggcctctgcctcagccgcggcgtcgtcgcccgcggggggcggcgccgaggcgctggagctgctggagcactgcggcgtgtgcagagagcgcctgcgacccgagagggagccccgcctgctgccctgtttgcactcggcctgtagtgcctgcttagggcccgcggcccccgccgccgccaacagctcgggggacggcggggcggcgggcgacggcaccgtggtggactgtcccgtgtgcaagcaacagtgcttctccaaagacatcgtggagaattatttcatgcgtgatagtggcagcaaggctgccaccgacgcccaggatgcgaaccagtgctgcactagctgtgaggataatgccccagccaccagctactgtgtggagtgctcggagcctctgtgtgagacctgtgtagaggcgcaccagcgggtgaagtacaccaaggaccatactgtgcgctctactgggccagccaagtctcgggatggtgaacgtactgtctattgcaacgtacacaagcatgaaccccttgtgctgttttgtgagagctgtgatactctcacctgccgagactgccagctcaatgcccacaaggaccaccagtaccagttcttagaggatgcagtgaggaaccagcgcaagctcctggcctcactggtgaagcgccttggggacaaacatgcaacattgcagaagagcaccaaggaggttcgcagctcaatccgccaggtgtctgacgtacagaagcgtgtgcaagtggatgtcaagatggccatcctgcagatcatgaaggagctgaataagcggggccgtgtgctggtcaatgatgcccagaaggtgactgaggggcagcaggagcgcctggagcggcagcactggaccatgaccaagatccagaagcaccaggagcacattctgcgctttgcctcttgggctctggagagtgacaacaacacagcccttttgctttctaagaagttgatctacttccagctgcaccgggccctcaagatgattgtggatcccgtggagccacatggcgagatgaagtttcagtgggacctcaatgcctggaccaagagtgccgaggcctttggcaagattgtggcagagcgtcctggcactaactcaacaggccctgcacccatggcccctccaagagccccagggcccctgagcaagcagggctctggcagcagccagcccatggaggtgcaggaaggctatggctttgggtcaggagatgatccctactcaagtgcagagccccatgtgtcaggtgtgaaacggtcccgctcaggtgagggcgaggtgagcggccttatgcgcaaggtgccacgagtgagccttgaacgcctggacctggacctcacagctgacagccagccacccgtcttcaaggtcttcccaggcagtaccactgaggactacaaccttattgttattgaacgtggcgctgccgctgcagctaccggccagccagggactgcgcctgcaggaacccctggtgccccacccctggctggcatggccattgtcaaggaggaggagacggaggctgccattggagcccctcctactgccactgagggccctgagaccaaacctgtgcttatggctcttgcggagggtcctggtgctgagggtccccgcctggcctcacctagtggcagcaccagctcagggctggaggtggtggctcctgagggtacctcagccccaggtggtggcccgggaaccctggatgacagtgccaccatttgccgtgtctgccagaagccaggcgatctggttatgtgcaaccagtgtgagttttgtttccacctggactgtcacctgccggccctgcaggatgtaccaggggaggagtggagctgctcactctgccatgtgctccctgacctgaaggaggaggatggcagcctcagcctggatggtgcagacagcactggcgtggtggccaagctctcaccagccaaccagcggaaatgtgagcgtgtactgctggccctattctgtcacgaaccctgccgccccctgcatcagctggctaccgactccaccttctccctggaccagcccggtggcaccctggatctgaccctgatccgtgcccgcctccaggagaagttgtcacctccctacagctccccacaggagtttgcccaggatgtgggccgcatgttcaagcaattcaacaagttaactgaggacaaggcagacgtgcagtccatcatcggcctgcagcgcttcttcgagacgcgcatgaacgaggccttcggtgacaccaagttctctgctgtgctggtggagcccccgccgatgagcctgcctggtgctggcctgagttcccaggagctgtctggtggccctggtgatggcccc

SEQ ID NO: 6806 - DNA, 2676 bp, Homo sapiens
  source 1..2676: mol_type = genomic DNA
atgacggatcctttctgcgttggaggccgtcggctcccggggtccagcaagagtggtcccgggaaggatggcagccgaaaggaggtccgacttccaatgctgcatgacccaccgaagatggggatgccggtggtccgtggtggacagacagtgcccggccaggcccctctctgctttgacccgggaagtccagccagtgacaagacagaagggaagaaaaaggggcggccaaaagccgagaaccaggccctccgagacattcctctctccctgatgaacgactggaaggatgagttcaaggcacactcgagggtgaagtgtccaaactcagggtgctggctggagttccccagcatctacgggctcaagtaccattaccagcggtgccaagggggtgccatctcagatcgcctggccttcccctgccccttctgcgaggccgcattcacctctaagacccagctggagaaacaccggatctggaaccacatggaccgacccctgcctgcctccaagcctgggcccatcagcaggccggtcaccatcagccggcctgttggggtcagcaagcccatcggagtgagcaaacctgtcactattggcaaacctgtgggtgtcagcaaacccattggcatcagcaagccagtctcggtcggcagacccatgccagtcaccaaggccatcccggtcactaggcccgtgccagtcaccaaacctgtcacagtcagcaggcccatgcccgtcaccaaggccatgccggtcaccaaacccatcacagtcaccaagtctgtgccggtcaccaaacccgtacctgtcaccaaacccattacggtaacaaagcttgtgacagttacgaaacccgtgccggtcaccaagccagtgacagtcagcaggcccattgtggtcagcaagccggtgacagtcagcaggcccattgctatcagcagacacacaccgccctgcaaaatggtgctgctgaccaggtcggagaacaaagcacctcgtgccacagggaggaacagtggtaagaaaagggctgcggacagcctggacacctgcccaattccacccaagcaggccaggccagagaatggggagtacggcccctcctccatgggccagagctcggccttccagctgagtgcagacaccagcagtggctccttgtcgccaggcagcaggccgtcagggggcatggaggcactgaaggctgcaggccctgcgtccccgcctgaggaggacccggagcgcacaaagcacagaaggaaacagaaaacacccaaaaagtttacaggggagcagccatccatctccgggacctttgggctcaaaggcctggtcaaagctgaggacaaggcccgagttcaccgctccaagaagcaggaggggccaggccctgaggacgcccggaagaaggtgccagctgcccccatcactgtcagcaaggaggcaccggcccctgtggcccacccagctccaggtggccctgaagagcagtggcagagggccatccatgagcgcggggaagccgtctgccccacctgcaacgtggtcacccggaagactctcgtggggcttaagaagcacatggaggtgtgtcagaagcttcaggatgcactcaagtgccagcactgccggaagcagttcaagtccaaagccggcctcaactaccacactatggccgagcacagtgccaagccctctgacgccgaggcctccgaagggggcgagcaggaggagcgcgagaggctgcgcaaggtgctgaagcagatgggacggctgcgctgcccccaggagggttgcggggctgccttctccagcctcatgggctaccagtaccaccagcggcgctgcgggaagccgccctgcgaggtggacagcccctccttcccctgcacccactgtggcaagacgtaccgatccaaggctggccacgactaccacgtgcgctcggagcacacggcccccccccctgaggagcccacagacaagtcccctgaggctgaggacccgctgggtgtggagcggaccccaagcgggcgtgtccgccgcacgtcggcccaggtggcggtgttccacctgcaggagatagcggaggacgagctggcccgcgactggaccaagcggcgcatgaaggatgaccttgtgcccgagaccgcacggctcaactacactcgaccagggctccccacgctgaacccccagctgctagaggcatggaagaatgaagtgaaggagaaaggccacgtcaactgtcccaacgactgctgtgaagccatctactccagcgtgtccggactcaaggctcatctcgccagctgcagtaagggggcccacctggcagggaagtaccgctgtctgctgtgtccgaaggagttcagttctgagagtggcgtcaaataccacatcctgaagacccacgcagagaactggttccgaacatcagcagacccacctcccaaacacaggagccaggactcattggtgcccaagaaggaaaagaagaaaaatctggcaggtggaaagaagcggggccgaaagcccaaggagcggaccccagaggagcctgtggccaagctgcccccgcgccgggacgactggcctccaggatgcagagacaagggggcccggggctccaccggccggaaggtgggagtcagcaaggcgcctgaaaag

SEQ ID NO: 6807 - DNA, 2676 bp, Homo sapiens
  source 1..2676: mol_type = genomic DNA
atgacggatcctttctgcgttggaggccgtcggctcccggggtccagcaagagtggtcccgggaaggatggcagccgaaaggaggtccgacttccaatgctgcatgacccaccgaagatggggatgccggtggtccgtggtggacagacagtgcccggccaggcccctctctgctttgacccgggaagtccagccagtgacaagacagaagggaagaaaaaggggcggccaaaagccgagaaccaggccctccgagacattcctctctccctgatgaacgactggaaggatgagttcaaggcacactcgagggtgaagtgtccaaactcagggtgctggctggagttccccagcatctacgggctcaagtaccattaccagcggtgccaagggggtgccatctcagatcgcctggccttcccctgccccttctgcgaggccgcattcacctctaagacccagctggagaaacaccggatctggaaccacatggaccgacccctgcctgcctccaagcctgggcccatcagcaggccggtcaccatcagccggcctgttggggtcagcaagcccatcggagtgagcaaacctgtcactattggcaaacctgtgggtgtcagcaaacccattggcatcagcaagccagtctcggtcggcagaccaatgccagtcaccaaggccatcccggtcactaggcccgtgccagtcaccaaacctgtcacagtcagcaggcccatgcccgtcaccaaggccatgccggtcaccaaacccatcacagtcaccaagtctgtgccggtcaccaaacccgtacctgtcaccaaacccattacggtcacaaagcttgtgacagttacgaaacccgtgccggtcaccaagccagtgacagtcagcaggcccattgtggtcagcaagccggtgacagtcagcaggcccattgctatcagcagacacacaccgccctgcaaaatggtgctgctgaccaggtcggagaacaaagcacctcgtgccacagggaggaacagtggtaagaaaagggctgcggacagcctggacacctgcccaattccacccaagcaggccaggccagagaatggggagtacggcccctcctccatgggccagagctcggccttccagctgagtgcagacaccagcagtggctccttgtcgccaggcagcaggccgtcagggggcatggaggcactgaaggctgcaggccctgcgtccccgcctgaggaggacccggagcgcacaaagcacagaaggaaacagaaaacacccaaaaagtttacaggggagcagccatccatctcagggacctttgggctcaaaggcctggtcaaagctgaggacaaggcccgagttcaccgctccaagaagcaggaggggccaggccctgaggacgcccggaagaaggtgccagctgccccaatcactgtcagcaaggaggcaccggcccctgtggcccacccagctccaggtggccctgaagagcagtggcagagggccatccatgagcgcggggaagccgtctgccccacctgcaacgtggtcacccggaagactctcgtggggctcaagaagcacatggaggtgtgtcagaagcttcaggatgcactcaagtgccagcactgccggaagcagttcaagtccaaagccggcctcaactaccacactatggccgagcacagtgccaagccctctgacgccgaggcctccgaagggggcgagcaggaggagcgcgagaggctgcgcaaggtgctgaagcagatgggacggctgcgctgcccccaggagggttgcggggctgccttctccagcctcatgggctaccagtaccaccagcggcgctgcgggaagccgccctgcgaggtggacagcccctccttcccctgcacccactgtggcaagacgtaccgatccaaggctggccacgactaccacgtgcgctcggagcacacggcccccccccctgaggagcccacagacaagtcccctgaggctgaggacccgctgggtgtggagcggaccccaagcgggcgtgtccgccgcacgtcggcccaggtggcggtgttccacctgcaggagatagcggaggacgagctggcccgcgactggaccaagcggcgcatgaaggatgaccttgtgcccgagaccgcacggctcaactacactcgaccagggctccccacgctgaacccccagctgctagaggcatggaagaatgaagtgaaggagaaaggccacgtcaactgtcccaacgactgctgtgaagccatctactccagcgtgtccggactcaaggctcatctcgccagctgcagtaagggggcccacctggcagggaagtaccgctgtctgctgtgtccgaaggagttcagttctgagagtggcgtcaaataccacatcctgaagacccacgcagagaactggttccgaacatcagcagacccacctcccaaacacaggagccaggactcattggtgcccaagaaggaaaagaagaaaaatctggcaggtggaaagaagcggggccgaaagcccaaggagcggaccccagaggagcctgtggccaagctgcccccgcgccgggacgactggcctccaggatgcagagacaagggggcccggggctccaccggccggaaggtgggagtcagcaaggcgcctgaaaag

SEQ ID NO: 6808 - DNA, 2289 bp, Homo sapiens
  source 1..2289: mol_type = genomic DNA
atgaaaactagcccccgtcggccactgattctcaaaagacggaggctgccccttcctgttcaaaatgccccaagtgaaacatcagaggaggaacctaagagatcccctgcccaacaggagtctaatcaagcagaggcctccaaggaagtggcagagtccaactcttgcaagtttccagctgggatcaagattattaaccaccccaccatgcccaacacgcaagtagtggccatccccaacaatgctaatattcacagcatcatcacagcactgactgccaagggaaaagagagtggcagtagtgggcccaacaaattcatcctcatcagctgtgggggagccccaactcagcctccaggactccggcctcaaacccaaaccagctatgatgccaaaaggacagaagtgaccctggagaccttgggaccaaaacctgcagctagggatgtgaatcttcctagaccacctggagccctttgcgagcagaaacgggagacctgtgcagatggtgaggcagcaggctgcactatcaacaatagcctatccaacatccagtggcttcgaaagatgagttctgatggactgggctcccgcagcatcaagcaagagatggaggaaaaggagaattgtcacctggagcagcgacaggttaaggttgaggagccttcgagaccatcagcgtcctggcagaactctgtgtctgagcggccaccctactcttacatggccatgatacaattcgccatcaacagcactgagaggaagcgcatgactttgaaagacatctatacgtggattgaggaccactttccctactttaagcacattgccaagccaggctggaagaactccatccgccacaacctttccctgcacgacatgtttgtccgggagacgtctgccaatggcaaggtctccttctggaccattcaccccagtgccaaccgctacttgacattggaccaggtgtttaagccactggacccagggtctccacaattgcccgagcacttggaatcacagcagaaacgaccgaatccagagctccgccggaacatgaccatcaaaaccgaactccccctgggcgcacggcggaagatgaagccactgctaccacgggtcagctcatacctggtacctatccagttcccggtgaaccagtcactggtgttgcagccctcggtgaaggtgccattgcccctggcggcttccctcatgagctcagagcttgcccgccatagcaagcgagtccgcattgcccccaaggtgctgctagctgaggaggggatagctcctctttcttctgcaggaccagggaaagaggagaaactcctgtttggagaagggttttctcctttgcttccagttcagactatcaaggaggaagaaatccagcctggggaggaaatgccacacttagcgagacccatcaaagtggagagccctcccttggaagagtggccctccccggccccatctttcaaagaggaatcatctcactcctgggaggattcgtcccaatctcccaccccaagacccaagaagtcctacagtgggcttaggtccccaacccggtgtgtctcggaaatgcttgtgattcaacacagggagaggagggagaggagccggtctcggaggaaacagcatctactgcctccctgtgtggatgagccggagctgctcttctcagaggggcccagtacttcccgctgggccgcagagctcccgttcccagcagactcctctgaccctgcctcccagctcagctactcccaggaagtgggaggaccttttaagacacccattaaggaaacgctgcccatctcctccaccccgagcaaatctgtcctccccagaacccctgaatcctggaggctcacgcccccagccaaagtagggggactggatttcagcccagtacaaacctcccagggtgcctctgaccccttgcctgaccccctggggctgatggatctcagcaccactcccttgcaaagtgctcccccccttgaatcaccgcaaaggctcctcagttcagaacccttagacctcatctccgtcccctttggcaactcttctccctcagatatagacgtccccaagccaggctccccggagccacaggtttctggccttgcagccaatcgttctctgacagaaggcctggtcctggacacaatgaatgacagcctcagcaagatcctgctggacatcagctttcctggcctggacgaggacccactgggccctgacaacatcaactggtcccagtttattcctgagctacag

SEQ ID NO: 6809 - DNA, 822 bp, Homo sapiens
  source 1..822: mol_type = genomic DNA
atggcccaagttgcaatgtccaccctccccgttgaagatgaggagtcctcggagagcaggatggtggtgacattcctcatgtcagctctcgagtccatgtgtaaagaactggccaagtccaaagccgaagtggcctgcattgcagtgtatgaaacagacgtgtttgtcgtcggaactgaaagaggacgtgcttttgtcaataccagaaaggattttcaaaaagattttgtaaaatattgtgttgaagaagaagaaaaagctgcagagatgcataaaatgaaatctacaacccaggcaaatcggatgagtgtagatgctgtagaaattgaaacactcagaaaaacagttgaggactatttctgcttttgctatgggaaagctttaggcaaatccacagtggtacctgtaccatatgagaagatgctgcgagaccagtcggctgtggtagtgcaggggcttccggaaggtgttgcctttaaacaccccgagaactatgatcttgcaaccctgaaatggattctggagaacaaagcagggatttcattcatcattaagagaccttttttagagccaaagaagcatgtaggtggtcgtgtgatggtaacagatgctgacaggtcaatactatctccaggtggaagttgtggccccatcaaagtgaaaactgaacccacagaagattctggcatttccctggaaatggcagctgtgacagtaaaggaagaatcagaagatcctgattattatcaatataacattcaaggaagccaccattcttcagagggcaatgaaggcacagaaatggaagtaccagcagaaggt

SEQ ID NO: 6810 - DNA, 2259 bp, Homo sapiens
  source 1..2259: mol_type = genomic DNA
atggcggacaagcgcaaactccaaggtgagattgatcgctgcctcaagaaggtgtccgagggcgtggagcagtttgaagatatttggcagaagctccacaatgcagccaacgcgaaccagaaagaaaagtatgaggctgacctaaagaaggagattaagaagctacaacggctgagggaccaaatcaagacatgggtagcgtccaacgagatcaaggacaagaggcagcttatagacaaccgcaagctcattgagacgcaaatggaacggttcaaagttgtggaacgagagaccaaaaccaaagcttacagcaaagagggcctgggcctggcccagaaggtagatcctgcccagaaggagaaggaagaggttggccagtggctcacgaataccatcgacacgctcaacatgcaggtggaccagtttgagagtgaagtggagtcactgtcagtgcagacacgcaagaagaagggcgacaaggataagcaggaccggattgagggcttgaagcggcacatcgagaagcaccgctaccacgtgcgcatgctagagaccatcctgcgcatgctggacaatgactccatcctcgttgacgccatccgcaagatcaaggacgacgttgagtactatgttgactcatcccaggaccccgacttcgaggagaacgagtttctctacgatgacctggacctcgaggacattccacaggcgctggtcgccacctccccccccagccacagccacatggaggatgagatcttcaaccagtccagcagcacgcccacctcaaccacctccagctctcccatcccgcccagcccagccaactgtaccacggaaaactctgaagatgataagaagaggggacgttccacagacagtgaagtcagccagtctccagccaaaaacggctccaagcctgtccacagcaaccagcaccctcagtccccagctgtgccgcccacctacccctccggccccccgcctgctgcctctgccttgagcaccactcctggcaacaatggggtccccgcccccgcagcacccccaagtgccctgggccccaaggccagtccagctcccagccacaactcgggcacccctgctccctatgcccaggcggtggccccaccagctcccagtgggcccagcacgacccagccccggccccccagcgtccagcctagcggaggcggaggcggcggcagcggaggcggagggagcagcagcagtagtaacagcagtgccggtggaggggctggcaagcagaatggcgccaccagttacagctcagttgtggcagacagcccggcagaggtggctttgagcagcagtgggggcaacaatgccagcagccaggccttgggccccccttccggcccccacaacccacctcccagcacctcgaaggaacccagtgcggcagccccaacgggggctgggggcgtggccccaggctcagggaacaactcagggggacccagcctcctggtgccactgcctgtgaatcctcccagctccccaacgcccagcttcagtgatgccaaggcagccggtgccctgctcaatgggcctccacagttcagcaccgccccagaaatcaaggcccctgagcctctgagctccttgaagtccatggcggaacgggcagccatcagctctggcattgaggaccctgtgccaacgctgcacctgaccgagcgagacatcatcctgagcagtacatcagcacctccggcctcagcccagccgcccctgcagctgtcagaggtgaacataccgctgtcgctgggtgtctgtccactgggccctgtgcccctcaccaaggagcagctctatcagcaggccatggaagaggccgcctggcaccacatgcctcacccctctgactctgagcgtattcggcagtacctcccccggaacccctgtccgacgcccccctaccaccaccagatgccacccccacactcggacactgtggaattctaccagcgcctgtcgaccgagacactcttcttcatcttctactatctggagggcactaaggcacagtatctggcagccaaggccctaaagaagcagtcatggcgattccacaccaagtacatgatgtggttccagaggcacgaggagcccaagaccatcactgacgagtttgagcagggcacctacatctactttgactacgagaagtggggccagcggaagaaggaaggcttcacctttgagtaccgctacctggaggaccgggacctccag

SEQ ID NO: 6811 - DNA, 792 bp, Homo sapiens
  source 1..792: mol_type = genomic DNA
atggaagcgtttttggggtcgcggtccggactttgggcggggggtccggccccaggacagttttaccgcattccgtccactcccgattccttcatggatccggcgtctgcactttacagaggtccaatcacgcggacccagaaccccatggtgaccgggacctcagtcctcggcgttaagttcgagggcggagtggtgattgccgcagacatgctgggatcctacggctccttggctcgtttccgcaacatctctcgcattatgcgagtcaacaacagtaccatgctgggtgcctctggcgactacgctgatttccagtatttgaagcaagttctcggccagatggtgattgatgaggagcttctgggagatggacacagctatagtcctagagctattcattcatggctgaccagggccatgtacagccggcgctcgaagatgaaccctttgtggaacaccatggtcatcggaggctatgctgatggagagagcttcctcggttatgtggacatgcttggtgtagcctatgaagccccttcgctggccactggttatggtgcatacttggctcagcctctgctgcgagaagttctggagaagcagccagtgctaagccagaccgaggcccgcgacttagtagaacgctgcatgcgagtgctgtactaccgagatgcccgttcttacaaccggtttcaaatcgccactgtcaccgaaaaaggtgttgaaatagagggaccattgtctacagagaccaactgggatattgcccacatgatcagtggctttgaa

SEQ ID NO: 6812 - DNA, 2541 bp, Homo sapiens
  source 1..2541: mol_type = genomic DNA
atgtctctgtggggtctggtctccaagatgcccccagaaaaagtgcagcggctctatgtcgactttccccaacacctgcggcatcttctgggtgactggctggagagccagccctgggagttcctggtcggctccgacgccttctgctgcaacttggctagtgccctactttcagacactgtccagcaccttcaggcctcggtgggagagcagggggaggggagcaccatcttgcaacacatcagcacccttgagagcatatatcagagggaccccctgaagctggtggccactttcagacaaatacttcaaggagagaaaaaagctgttatggaacagttccgccacttgccaatgcctttccactggaagcaggaagaactcaagtttaagacaggcttgcggaggctgcagcaccgagtaggggagatccaccttctccgagaagccctgcagaagggggctgaggctggccaagtgtctctgcacagcttgatagaaactcctgctaatgggactgggccaagtgaggccctggccatgctactgcaggagaccactggagagctagaggcagccaaagccctagtgctgaagaggatccagatttggaaacggcagcagcagctggcagggaatggcgcaccgtttgaggagagcctggccccactccaggagaggtgtgaaagcctggtggacatttattcccagctacagcaggaggtaggggcggctggtggggagcttgagcccaagacccgggcatcgctgactggccggctggatgaagtcctgagaaccctcgtcaccagttgcttcctggtggagaagcagcccccccaggtactgaagactcagaccaagttccaggctggagttcgattcctgttgggcttgaggttcctgggggccccagccaagcctccgctggtcagggccgacatggtgacagagaagcaggcgcgggagctgagtgtgcctcagggtcctggggctggagcagaaagcactggagaaatcatcaacaacactgtgcccttggagaacagcattcctgggaactgctgctctgccctgttcaagaacctgcttctcaagaagatcaagcggtgtgagcggaagggcactgagtctgtcacagaggagaagtgcgctgtgctcttctctgccagcttcacacttggccccggcaaactccccatccagctccaggccctgtctctgcccctggtggtcatcgtccatggcaaccaagacaacaatgccaaagccactatcctgtgggacaatgccttctctgagatggaccgcgtgccctttgtggtggctgagcgggtgccctgggagaagatgtgtgaaactctgaacctgaagttcatggctgaggtggggaccaaccgggggctgctcccagagcacttcctcttcctggcccagaagatcttcaatgacaacagcctcagtatggaggccttccagcaccgttctgtgtcctggtcgcagttcaacaaggagatcctgctgggccgtggcttcaccttttggcagtggtttgatggtgtcctggacctcaccaaacgctgtctccggagctactggtctgaccggctgatcattggcttcatcagcaaacagtacgttactagccttcttctcaatgagcccgacggaacctttctcctccgcttcagcgactcagagattgggggcatcaccattgcccatgtcatccggggccaggatggctctccacagatagagaacatccagccattctctgccaaagacctgtccattcgctcactgggggaccgaatccgggatcttgctcagctcaaaaatctctatcccaagaagcccaaggatgaggctttccggagccactacaagcctgaacagatgggtaaggatggcaggggttatgtcccagctaccatcaagatgaccgtggaaagggaccaaccacttcctaccccagagctccagatgcctaccatggtgccttcttatgaccttggaatggcccctgattcctccatgagcatgcagcttggcccagatatggtgccccaggtgtacccaccacactctcactccatccccccgtatcaaggcctctccccagaagaatcagtcaacgtgttgtcagccttccaggagcctcacctgcagatgccccccagcctgggccagatgagcctgccctttgaccagcctcacccccagggcctgctgccgtgccagcctcaggagcatgctgtgtccagccctgaccccctgctctgctcagatgtgaccatggtggaagacagctgcctgagccagccagtgacagcgtttcctcagggcacttggattggtgaagacatattccctcctctgctgcctcccactgaacaggacctcactaagcttctcctggaggggcaaggggagtcggggggagggtccttgggggcacagcccctcctgcagccctcccactatgggcaatctgggatctcaatgtcccacatggacctaagggccaaccccagttgg

SEQ ID NO: 6813 - DNA, 2541 bp, Homo sapiens; identical to SEQ ID NO: 6812
  source 1..2541: mol_type = genomic DNA

SEQ ID NO: 6814 - DNA, 1290 bp, Homo sapiens
  source 1..1290: mol_type = genomic DNA
atggctaaggagaacaggggggatgatggggccaccgagaggccgaagaaggccaaggaggagcggcgcatggaccagatgatgccaggaaagaccaaagcagatgctgctgacccagcaccacttcccagccaggagccccccaggaacagcacagaacagcagggcctggcctctgggtcttctgtgtcctttgtgggtgccagcggctgtcctgaggcctacaagcggctcctatccagcttctactgcaaggggacacacggcatcatgtcaccactggccaaaaagaagctcctggcccaggtgagcaaggtggaggccttgcagtgccaggaggagggctgccgccatggggcagagccccaggcgtccccagctgttcacctcccagagagtccccagagccccaaagggctgactgagaactccaggcaccggctgacccctcaggagggattgcaggccccaggtggcagcctcagagaggaggcgcaggcaggcccctgcccggcagcccccatcttcaagggctgcttctacacccaccccaccgaggtgctgaagcctgtcagccagcaccccagggacttcttctctagacttaaagatggggtgctattggggcctcctggcaaagaggggctgtcagtgaaagagccccagctggtgtggggcggagacgctaaccgcccttctgcgttccataaaggtggctccagaaagggcatcctctaccccaagcccaaagcctgctgggtgtcccccatggccaaggtcccagccgagagccccacgctcccgcccaccttccccagtagcccaggcctgggcagcaagcgcagcctggaggaagagggtgctgcccacagtgggaagagactgcgggccgtgtctccctttcttaaggaggcggatgccaagaagtgtggggccaaacctgcagggtccggcctggtctcctgccttctgggcccagccctggggcctgtgcccccagaggcctacaggggcaccatgctgcactgcccgctgaacttcactggcaccccgggccccttgaagggccaggctgcactccccttcagccccctggtcatcccggccttcccggcccacttcctggccaccgcaggcccctcgcccatggccgctggcctgatgcacttccccccaacgtccttcgacagtgccctccgccacagactttgcccggcctcatctgcctggcacgcaccaccagtcacaacctatgcagcgccccacttcttccacctcaacaccaagctg

SEQ ID NO: 6815 - DNA, 2118 bp, Homo sapiens
  source 1..2118: mol_type = genomic DNA
atgcgtccaatgcgaatttttgtgaatgatgaccgccatgtgatggcaaagcattcttccgtttatccaacacaagaggagctggaggcagtccagaacatggtgtcccacacggagcgggcgctcaaagctgtgtccgactggatagacgagcaggaaaagggtagcagcgagcaggcagagtccgataacatggatgtgcccccagaggacgacagtaaagaaggggctggggaacagaagacggagcacatgaccagaaccctgcggggagtgatgcgggtgggcctggtggcaaagggcctcctactcaagggggacttggatctggagctggtgctgctgtgtaaggagaagcccacaaccgccctcctggacaaggtggccgacaacctggccatccagcttgctgctgtaacagaagacaagtacgaaatactgcaatctgtcgacgatgctgcgattgtgataaaaaacacaaaagagcctccattgtccctgaccatccacctgacatcccctgttgtcagagaagaaatggagaaagtattagctggagaaacgctatcagtcaacgaccccccggacgttctggacaggcagaaatgccttgctgccttggcgtccctccgacacgccaagtggttccaggccagagccaacgggctgaagtcttgtgtcattgtgatccgggtcttgagggacctgtgcactcgcgtgcccacctggggtcccctccgaggctggcctctcgagctcctgtgtgagaaatccattggcacggccaacagaccgatgggtgctggcgaggccctgcggagagtgctggagtgcctggcgtcgggcatcgtgatgccagatggttctggcatttatgacccttgtgaaaaagaagccactgatgctattgggcatctagacagacagcaacgggaagatatcacacagagtgcgcagcacgcactgcggctcgctgccttcggccagctccataaagtcctaggcatggaccctctgccttccaagatgcccaagaaaccaaagaatgaaaacccagtggactacaccgttcagatcccaccaagcaccacctatgccattacgcccatgaaacgcccaatggaggaggacggggaggagaagtcgcccagcaaaaagaagaagaagattcagaagaaagaggagaaggcagagcccccccaggctatgaatgccctgatgcggttgaaccagctgaagccagggctgcagtacaagctggtgtcccagactgggcccgtccatgcccccatctttaccatgtctgtggaggttgatggcaattcattcgaggcctctgggccctccaaaaagacggccaagctgcacgtggccgttaaggtgttacaggacatgggcttgccgacgggtgctgaaggcagggactcgagcaagggggaggactcggctgaggagaccgaggcgaagccagcagtggtggcccctgccccagtggtagaagctgtctccacccctagtgcggcctttccctcagatgccactgccgagaacgtaaaacagcaggggccgatcctgacaaagcacggcaagaacccagtcatggagctgaacgagaagaggcgtgggctcaagtacgagctcatctccgagaccgggggcagccacgacaagcgcttcgtcatggaggtcgaagtggatggacagaagttccaaggtgctggttccaacaaaaaggtggcgaaggcctacgctgctcttgctgccctagaaaagcttttccctgacacccctctcgcccttgatgccaacaaaaagaagagagccccagtacccgtcagagggggaccgaaatttgctgctaagccacataaccctggcttcggcatgggaggccccatgcacaacgaagtgcccccaccccccaaccttcgagggcggggaagaggcgggagcatccggggacgagggcgcgggcgaggatttggtggcgccaaccatggaggctacatgaatgccggtgctgggtatggaagctatgggtacggaggcaactctgcgacagcaggctacagtgactttttcacagactgctacggctatcatgattttgggtcttcc

SEQ ID NO: 6816 - DNA, 2145 bp, Homo sapiens
  source 1..2145: mol_type = genomic DNA
atggaagcacgttctatgctggttccaccccaggcatctgtgtgcttcgaggatgtggctatggcattcacacaggaggagtgggaacagctggacctggcccagaggacactgtaccgagaggtgacactggagacctgggagcatattgtctccctggggcttttcctttccaaatctgatgtgatctctcagctggagcaagaagaggacctgtgcagggcagagcaggaggccccccgagactggaaagctacccttgaggagaataggttgaattctgaaaaagatcgagctagggaagaactatcccaccacgtggaagtgtacaggagtggaccggaggagccaccctctttggtattaggaaaagtgcaagatcagagcaaccagttaagggaacaccaggagaactccttgaggttcatggtactcacctcagagagactgtttgctcaaagggaacattgtgagcttgaacttgggggaggttattctctaccttctactttaagccttctacctacaacattacctacaagtacaggtttccctaagcccaactcacaagttaaagagttgaaacaaaattcagctttcattaatcatgagaaaaatggagcagatgggaagcactgtgagagtcatcagtgtgctagagctttctgtcagagtatttacttgagtaaacttggaaacgttgaaacaggaaagaaaaacccttatgaatatattgtcagtggtgactctctcaactatggttcctccctttgttttcatggtagaactttttcagtgaagaaaagtgatgactgtaaggattatggaaacctcttcagtcacagtgtgtctctgaatgaacagaagccagtgcattttgggaaaagtcagtatgagtgtgatgagtgcagggaaacctgttctgagagtctgtgccttgtacaaacagaaagaagtggccctggagagacccccttcagatgtgaggaacgctgtgctgccttccccatggcctcatctttttctgactgtaacatcattcagactacagagaagccatctgtgtgtaatcagtgtggaaaatctttcagctgttgtaagctcatacaccagagaacacacactggagaaaagcccttcgaatgtactcagtgtgggaaatcttttagccagagctatgaccttgtcatacatcagaggacacacactggagagaagccctatgagtgtgacctgtgtgggaaatccttcacccagagatccaaacttattacacatcagcgaattcacactggagaaaaaccgtatcagtgtattgaatgcagaaaatccttcaggtggaactctaacctcattgtacatcagagaattcatactggagagaaaccgtatgagtgcactcactgtggaaagtccttcagccaaagctatgagttagttacacataaaagaacgcacactggagaaaaacccttcaaatgtactcagtgtgggaaatctttcagccagaagtatgaccttgttgtacatcagaggacacacactggagagaagccctatgagtgcaacctgtgtgggaaatccttctcccagagttccaaacttattacgcatcagcgaattcacactggagaaaaaccgtatcagtgtattgaatgtgggaaatccttcagatggaactctaacctcgtcatacatcagagaattcatactggagagaaaccgtacgattgcactcactgtggaaagtccttcagccaaagctatcagttagttgcacataaaagaactcacactggagaaaagccctatgaatgtaacgagtgtggaaaagccttcaatcgaagcactcagctcatcaggcatctgcaaattcacactggggagaagccgtacaaatgcaatcagtgcaataaagcctttgcaaggagctcctaccttgtgatgcatcagagaactcacactggtgagaaaccttttgagtgtagtcagtgtgggaaagccttttcagggagctctaaccttctttcccatcacagaattcattctggagagaaaccctatgaatgtagtgactgtgggaaatccttccggcagcaatctcaacttgtagtgcatcggcggacacatactggagagaaacct

SEQ ID NO: 6817 - DNA, 1737 bp, Homo sapiens
  source 1..1737: mol_type = genomic DNA
atggaggtgaatgcaggaggtgtgattgcctatatcagttcttccagctcagcctcaagccctgcctcttgtcacagtgagggttctgagaatagtttccagtcctcctcctcttctgttccatcttctccaaatagctctaattctgataccaatggtaatcccaagaatggtgatctcgccaatattgaaggcatcttgaagaatgatcgaatagattgttctatgaaaacaagcaaatcgagtgcacctgggatgacaaaaagtcatagtggtgtgacaaaatttagtggcatggttctactgtgtaaagtctgtggggatgtggcgtcaggattccactatggagttcatgcttgcgaaggctgtaagggtttctttcggagaagtattcaacaaaacatccagtacaagaagtgcctgaagaatgaaaactgttctataatgagaatgaataggaacagatgtcagcaatgtcgcttcaaaaagtgtctgtctgttggaatgtcaagagatgctgttcggtttggtcgtattcctaagcgtgaaaaacagaggatgctaattgaaatgcaaagtgcaatgaagaccatgatgaacagccagttcagtggtcacttgcaaaatgacacattagtagaacatcatgaacagacagccttgccagcccaggaacagctgcgacccaagccccaactggagcaagaaaacatcaaaagctcttctcctccatcttctgattttgcaaaggaagaagtgattggcatggtgaccagagctcacaaggatacctttatgtataatcaagagcagcaagaaaactcagctgagagcatgcagccccagagaggagaacggattcccaagaacatggagcaatataatttaaatcatgatcattgcggcaatgggcttagcagccattttccctgtagtgagagccagcagcatctcaatggacagttcaaagggaggaatataatgcattacccaaatggtcatgccatttgtattgcaaatggacattgtatgaacttctccaatgcttatactcaaagagtatgtgatagagttccgatagatggattttctcagaatgagaacaagaatagttacctgtgcaacactggaggaagaatgcatctggtttgtccaatgagtaagtctccatatgtggaccctcataaatcaggacatgaaatctgggaagaattttcgatgagcttcactccagcagtgaaagaagtggtggaatttgcaaagcgtattcctgggttcagagatctctctcagcatgaccaggtcaaccttttaaaggctgggacttttgaggttttaatggtacggttcgcatcattatttgatgcaaaggaacgtactgtcacctttttaagtggaaagaaatatagtgtggatgatttacactcaatgggagcaggggatctgctaaactctatgtttgaatttagtgagaagctaaatgccctccaacttagtgatgaagagatgagtttgtttacagctgttgtcctggtatctgcagatcgatctggaatagaaaacgtcaactctgtggaggctttgcaggaaactctcattcgtgcactaaggaccttaataatgaaaaaccatccaaatgaggcctctatttttacaaaactgcttctaaagttgccagatcttcgatctttaaacaacatgcactctgaggagctcttggcctttaaagttcaccct

SEQ ID NO: 6818 - DNA, 1158 bp, Homo sapiens
  source 1..1158: mol_type = genomic DNA
atgattataagcacaccacagagactaaccagttcaggaagtgttctgattgggagtccatatacccctgcaccagcaatggttactcagacacacatagcagaagctactggctgggtccctggtgatagaaaacgggctagaaaatttatagactctgatttttcagaaagtaaacgaagcaaaaaaggagataaaaatgggaaaggcttgagacacttttcaatgaaagtgtgtgagaaagttcaacgaaaaggtacaacatcgtacaatgaagtcgctgatgagctggtgtcagagttcaccaattcaaataaccatttggctgctgattcgcaggcttatgatcagaagaacattaggcgaagagtttatgatgctttaaatgtgctaatggcaatgaacataatttcaaaggaaaaaaaagaaatcaagtggattggcctgcctaccaattctgctcaggaatgtcagaatctggagatagagaagcagaggcggatagaacggataaagcagaagcgggcccagctgcaagaacttctcctacagcaaatcgctttcaaaaacctggtacagagaaatcgacaaaatgagcagcaaaaccagggcccgccggctctgaactctaccattcagctgccattcataatcatcaatacaagcagaaaaacagtcatagattgcagcatctccagtgacaagtttgagtatcttttcaattttgacaacacctttgagatccatgatgacatagaagtactaaagcggatgggaatgtcgtttggcctggagtcaggcaaatgctctctggaggatctgaaacttgcgaaatccctggtgccaaaggctttagaaggttatatcacagatatctccacaggaccttcttggttaaatcagggactacttctgaactctacccaatcagtttcaaatttagacctgaccactggtgccaccttaccccagtcaagtgtaaaccaagggttatgcttggatgcagaagtggccttagcaactgggcagttcctggccccaaacagtcaccagtccagcagtgcggcctctcactgctccgagtcccgaggcgagaccccctgttcgttcaatgatgaagatgaggaagatgatgaggaggattcctcctccccagaa

SEQ ID NO: 6819 - DNA, 1191 bp, Homo sapiens
  source 1..1191: mol_type = genomic DNA
atggaaatagtggggtgccgagcagaagacaactcgtgtcctttccgccccccagccatgctctttcacgggatctccggaggccacatccaaggcatcatggaggagatggagcgcagatccaagactgaggcccgtctggccaaaggcgcccagctcaacggccgcgacgcgggcatgcccccgctcagcccggagaagcccgccctgtgcgccggctgcgggggcaagatctcggacaggtactatctgctggctgtggacaaacagtggcatctgagatgcctgaagtgctgtgaatgtaagctggccctcgagtccgagctcacctgctttgccaaggacggtagcatttactgcaaggaggattactacagaaggttctctgtgcagagatgtgcccgctgccaccttggcatttccgcctcggagatggtcatgcgcgcccgagactctgtctaccacctgagctgcttcacctgctccacttgcaacaagactctgaccacgggcgaccatttcggcatgaaggacagcctggtgtactgccgcgcccacttcgagaccctcttgcaaggagagtatccaccgcagctgagctacacggagctggcggccaagagcggcggcctggccctgccttacttcaacggtacgggcaccgtgcagaaagggcggccccggaagcggaagagcccagcgctgggagtggacatcgtcaattacaactcaggttgtaatgagaatgaggcagaccacttggaccgggaccagcagccttatccaccctcgcagaagaccaagcgcatgcgaacctctttcaagcatcaccagctccggaccatgaaatcctactttgccatcaaccacaacccggatgccaaggacctcaagcagcttgcccagaaaacaggtctgaccaaaagagttttgcaggtttggttccaaaacgcacgagccaaattcagaaggaaccttttgcggcaggagaatgggggtgttgataaagctgacggcacgtcgcttccggccccgccctcagcagacagcggagctctcactccacccggcactgcgaccactttaacagacctgaccaatcccactatcactgtagtgacatccgtgacctctaacatggacagccacgaatccggaagcccctcacaaactaccttaacaaaccttttc

SEQ ID NO: 6820 - DNA, 1362 bp, Homo sapiens
  source 1..1362: mol_type = genomic DNA
atggccaccaataaggagcgactctttgcggctggtgccctggggcctggatctggctacccaggggcaggtttccccttcgccttcccaggggcactcagggggtctccgcctttcgagatgctgagccctagcttccggggcctgggccagcctgacctccccaaggagatggcctctctgtcggtggagacacagagcaccagctcagaggagatggtgcccagctcgccctcgccccctccgcctcctcgggtctacaagccatgcttcgtgtgcaatgacaagtcctctggctaccactatggggtcagctcttgtgaaggctgcaagggcttctttcgccgaagcatccagaagaacatggtgtacacgtgtcaccgcgacaaaaactgtatcatcaacaaggtgaccaggaatcgctgccagtactgccggctacagaagtgcttcgaagtgggcatgtccaaggaagctgtgcgaaatgaccggaacaagaagaagaaagaggtgaaggaagaagggtcacctgacagctatgagctgagccctcagttagaagagctcatcaccaaggtcagcaaagcccatcaggagactttcccctcgctctgccagctgggcaagtataccacgaactccagtgcagaccaccgcgtgcagctggatctggggctgtgggacaagttcagtgagctggctaccaagtgcatcatcaagatcgtggagtttgccaagcggttgcctggctttacagggctcagcattgctgaccagatcactctgctcaaagctgcctgcctagatatcctgatgctgcgtatctgcacaaggtacaccccagagcaggacaccatgaccttctccgacgggctgaccctgaaccggacccagatgcacaatgccggcttcgggcccctcacagaccttgtctttgcctttgctgggcagctcctgcccctggagatggatgacaccgagacagggctgctcagcgccatctgcctcatctgcggagaccgcatggacctggaggagcccgaaaaagtggacaagctgcaggagccactgctggaagccctgaggctgtacgcccggcgccggcggcccagccagccctacatgttcccaaggatgctaatgaaaatcaccgacctccggggcatcagcactaagggagctgaaagggccattactctgaagatggagattccaggcccgatgcctcccttaatccgagagatgctggagaaccctgaaatgtttgaggatgactcctcgcagcctggtccccaccccaatgcctctagcgaggatgaggttcctgggggccagggcaaagggggcctgaagtccccagcc

SEQ ID NO: 6821 - DNA, 1611 bp, Homo sapiens
  source 1..1611: mol_type = genomic DNA
atggagcgggtgaacgacgcttcgtgcggcccgtctggctgctacacataccaggtgagcagacacagcacggagatgctgcacaacctgaaccagcagcgcaaaaacggcgggcgcttctgcgacgtactcttgcgggtaggcgacgagagcttcccagcgcaccgcgccgtgctggccgcctgcagcgagtactttgagtcggtgttcagcgcccagttgggcgacggcggagctgcggacgggggtccggctgatgtagggggcgcgacggcagcaccaggcggcggggccgggggcagccgggagctggagatgcacactatcagctccaaggtatttggggacattctggacttcgcctacacttcccgcatcgtggtgcgcttggagagctttcccgaactcatgacggccgccaagttcctgctgatgaggtcggttatcgagatctgccaggaagtcatcaaacagtccaacgtacagatcctggtaccccctgcccgcgccgatataatgctctttcgcccccctgggacctcggacttgggcttccctttggacatgaccaacggggcagccttggcagccaacagcaatggcatcgccggcagcatgcagccagaggaggaggcagctcgggcggctggtgcagccattgcaggccaagcctctttgcctgtgttacctggggtggaccgcttgcccatggtggctggacccctatccccccaactgctgacttccccattccccagtgtggcatccagtgcccctcccctgactggcaagcgaggccggggccgcccaaggaaggccaacctgctggactcaatgtttgggtccccagggggcctgagggaggcaggcatccttccatgcggtctatgtggtaaggtgttcactgatgccaaccggctccggcagcacgaggcccagcacggtgtcaccagcctccagctgggctacatcgaccttcctcctccgaggctgggtgagaatgggctacccatctctgaagaccccgacggcccccgaaagaggagccggaccaggaagcaggtggcttgtgagatctgcggcaagatcttccgtgatgtgtatcatcttaaccggcacaagctgtcccactctggggagaagccctactcctgccctgtgtgtgggttgcggttcaagagaaaagaccgcatgtcctaccatgtgcggtcccatgatgggtccgtgggcaagccttacatctgccagagctgtgggaaaggcttctccaggcctgatcacttgaacggacatatcaagcaggtgcacacttctgagcggcctcacaagtgtcaggtgtgggttgggagcagcagcggcctgccgcccctggaacctcttcctagcgacctgccatcatgggactttgcccagcctgctttgtggaggtcgtcccattcggttcctgacaccgccttttccctttctctaaaaaaatcattcccagcccttgaaaacctgggcccagcacactccagcaacactctcttctgcccagccccgccgggatatctgaggcagggctggaccaccccagagggcagcagggcctttacccagtggcctgttggc

SEQ ID NO: 6822 - DNA, 1632 bp, Homo sapiens
  source 1..1632: mol_type = genomic DNA
atgaccttcgaggatgtggccgtgtacttctcccaggaggagtgggggctcctggacacagcgcagagggccctgtaccgccacgtgatgctggaaaacttcacacttgtgacctcacttggactctctacctcccgacctcgtgtggtcattcaacttgagcgtggcgaggagccctgggttcccagtggaaaggacatgaccctggccaggaacacctacgggaggctcaactctggttcctggagtttgacagaggatagagatgtttctggagaatggccacgagctttcccagataccccacctgggatgactactagcgtcttcccagttgccgatgcctgccacagtgtaaaaagcctgcagcgacaaccgggtgcctccccatctcaggagagaaaacccacgggggtgtcggtgatctactgggagaggctcctgctaggctcgcgcagtgaccaggccagcatcagcctgcgactgacctccccactcaggccccccaagagcagccggcccagggaaaagaccttcacagagtaccgggtgcctgggaggcagcccaggacgcctgagcggcagaagccatgtgcacaggaggtccctgggagagccttcgggaatgcctcggacctgaaggccgccagtggtggcagggatcgcagaatgggcgcagcttggcaggagcctcatagactcctcggtggccaggagccctcgacctgggacgagctgggcgaggctcttcacgctggggagaagtccttcgaatgcagggcgtgcagcaaagtgttcgtgaagagctccgacctcctcaagcacctacgcacccacaccggggagcggccctacgagtgcacccagtgcggcaaggccttcagccagacgtcgcacttgacgcagcaccagcgcatccacagcggcgagacgccctacgcgtgccccgtgtgcggcaaggccttccggcatagctcctcgctggtgcggcaccagcgcatccacacggccgagaagtccttccgctgctccgagtgcggcaaggccttcagccacggctccaacctcagccagcaccgcaagatccacgcgggtgggcgtccttatgcttgcgcacagtgtggccgccgcttctgccgcaactcgcacctgatccagcacgagcgtacgcacacaggcgagaagcccttcgtatgcgcgctctgcggtgctgccttcagccagggctcctcgctctttttgcaccagcgcgtgcacacaggcgagaagcccttcgcctgcgcccagtgcggccgctcctttagccgcagctccaacctcacccagcaccagctcctgcacacgggcgagcggcccttccgctgcgtggactgtggcaagggtttcgccaagggcgccgtgctgctcagccaccggcgcattcacacgggcgagaagcccttcgtgtgcacgcagtgtggccgcgccttccgtgagcgccctgccctcttgcaccaccagaggatccacaccacagagaagaccaatgccgcagcaccagactgcaccccggggccaggtttccttcagggacatcatcggaaggtgcgccggggagggaagccaagcccagtcctgaagccagcgaaggtc

SEQ ID NO: 6823 - DNA, 1557 bp, Homo sapiens
  source 1..1557: mol_type = genomic DNA
atggcttcctccccggcggtggacgtgtcctgcaggcggcgggagaagcggcggcagctggacgcgcgccgcagcaagtgccgcatccgcctgggcggccacatggagcagtggtgcctcctcaaggagcggctgggcttctccctgcactcgcagctcgccaagttcctgttggaccggtacacttcttcaggctgtgtcctctgtgcaggtcctgagcctttgcctccaaaaggtctgcagtatctggtgctcttgtctcatgcccacagccgagagtgcagcctggtgcccgggcttcgggggcctggcggccaagatggggggcttgtgtgggagtgctcagcaggccataccttctcctggggaccctctttgagccctacaccttcagaggcacccaagccagcctcccttccacatactactcggagaagttggtgttccgaggccacgagtgggcaggagcttgcagatttggaatctgagcatgatgagaggactcaagaggccaggttgcccaggagggtgggacccccaccagagaccttcccacctccaggagaggaagagggtgaggaagaagaggacaatgatgaggatgaagaggagatgctcagtgatgccagcttatggacctacagctcctccccagatgatagtgagcctgatgcccccagactactgccttcccctgtcacctgcacacctaaagagggggagacaccaccagcccctgcagcactctccagtcctcttgctgtgccggccttgtcagcatcctcattgagttccagagctcctccacctgcagaagtcagggtgcagccacagctcagcaggacccctcaagcggcccagcagactgaggccctggccagcactgggagtcaggcccagtctgctccaaccccggcctgggatgaggacactgcacaaattggccccaagagaattaggaaagctgccaaaagagagctgatgccttgtgacttccctggctgtggaaggatcttctccaaccggcagtatttgaatcaccacaaaaagtaccagcacatccaccagaagtctttctcctgcccagagccagcctgtgggaagtctttcaactttaagaaacacctgaaggagcacatgaagctgcacagtgacacccgggactacatctgtgagttctgcgcccggtctttccgcactagcagcaaccttgtcatccacagacgtatccacactggagaaaaacccctgcagtgtgagatatgcgggtttacctgccgccagaaggcttccctgaactggcaccagcgcaagcatgcagagacggtggctgccttgcgcttcccctgtgaattctgcggcaagcgctttgagaagccagacagtgttgcagcccaccgtagcaaaagtcacccagccctgcttctagcccctcaagagtcacccagtggtcccctagagccctgtcccagcatctctgcccctgggcctctgggatccagcgaggggtccaggccctctgcatctcctcaggctccaaccctgcttcctcagcaa

SEQ ID NO: 6824 - DNA, 228 bp, Homo sapiens
  source 1..228: mol_type = genomic DNA
atggccgagactgaccccaagaccgtgcaggacctcacctcggtggtgcagacactcctgcagcagatgcaagataaatttcagaccatgtctgaccagatcattgggagaattgatgatatgagtagtcgcattgatgatctggaaaagaatatcgcggacctcatgacacaggctggggtggaagaactggaaagtgaaaacaagatacctgccacgcaaaagagt

SEQ ID NO: 6825 - DNA, 1392 bp, Homo sapiens
  source 1..1392: mol_type = genomic DNA
atgagtgacggaaacccagagctcctgtcaaccagccagacctacaacggccagagcgagaacaacgaagactatgagatccccccgataacacctcccaacctcccggagccatccctcctgcacctgggggaccacgaagccagctaccactcgctgtgccacggcctcacccccaacggtctgctccctgcctactcctatcaggccatggacctcccagccatcatggtgtccaacatgctagcacaggacagccacctgctgtcgggccagctgcccacgatccaggagatggtccactcggaagtggctgcctatgactcgggccggcccgggcccctgctgggtcgcccggcaatgctggccagccacatgagtgccctcagccagtcccagctcatctcgcagatgggcatccggagcagcatcgcccacagctccccatcaccgccggggagcaagtcagcgaccccctctccctccagctccactcaggaagaggagtcggaagtgcatttcaagatctcgggagaaaagagaccttcagccgacccaggaaaaaaggccaagaacccgaagaagaagaaaaagaaggaccccaatgagccgcagaagcctgtgtcggcctacgcactcttcttcagagacactcaggccgccatcaagggtcagaaccccagtgccactttcggtgacgtgtccaaaatcgtggcctccatgtgggacagcctgggagaggaacagaagcaggcctacaagaggaagacagaagcagcaaagaaggaatatctgaaggccctggcagcctaccgggctagcctcgtctccaagagctccccagatcaaggtgagaccaagagcactcaggcaaacccaccagccaaaatgctcccacccaagcagcccatgtatgccatgccaggcctggcctccttcctgacgccgtcggacctgcaggccttccgcagtggggcctcccctgccagcctcgcccggacgctgggctccaagtctctgctgccaggcctcagtgcgtccccgccgccgccaccctccttcccgctcagccccacactgcaccagcagctgtcactgccccctcacgcccagggcgccctcctcagtccacctgttagcatgtccccagccccccagccccctgtcctgcccacccccatggcactccaggtgcagctggcgatgagcccctcacctccagggccacaggacttcccgcacatctctgagttccccagcagctcgggatcctgctcacctggcccatccaaccccaccagcagcggggactgggacagcagctaccccagtggggagtgtggcatcagcacctgcagcctgctccccagggacaaatcgctctacctcacc

SEQ ID NO: 6826 - DNA, 924 bp, Homo sapiens
  source 1..924: mol_type = genomic DNA
atggtttcagacgaagatgaattgaatcttctggttattgtagttgatgccaacccaatttggtggggaaagcaagcattaaaggaatctcagttcactttatccaaatgcatagatgccgtgatggtgctgggaaattcgcatttattcatgaatcgttccaacaaacttgctgtgatagcaagtcacattcaagaaagccgattcttatatcctggaaagaatggcagacttggagacttcttcggagaccctggcaaccctcctgaatttaatccctctgggagtaaagatggaaaatacgaacttttaacctcagcaaatgaagttattgttgaagagattaaagatctaatgaccaaaagtgacataaagggtcaacatacagaaactttgctggcaggatccctggccaaagccctttgctacattcatagaatgaacaaggaagttaaagacaatcaggaaatgaaatcaaggatattggtgattaaggctgcagaagacagtgcgttgcagtatatgaacttcatgaatgtcatctttgcagcacagaaacagaatattttgattgatgcctgtgttttagactccgactcagggctcctccaacaggcttgtgacatcacgggaggactgtacctgaaggtgcctcagatgccttctcttctgcagtatttgctgtgggtgtttcttcccgatcaagatcagagatctcagttaatcctcccacccccggttcatgttgactacagggctgcttgcttctgtcatcgaaatctcattgaaattggttatgtctgttctgtgtgtttgtcaatattctgcaatttcagccccatttgtactacgtgcgagacagcctttaaaatttctctgcctccagtgctgaaagccaagaaaaagaaactgaaagtgtctgcc

SEQ ID NO: 6827 - DNA, 1893 bp, Homo sapiens
  source 1..1893: mol_type = genomic DNA
atgttctacgcacattttgttctcagtaaaagagggcctctggccaaaatttggctagcggcccattgggataagaagctaaccaaagcccatgtgttcgagtgtaatttagagagcagcgtggagagtatcatctcaccaaaggtgaaaatggcattacggacatcaggacatctcttactgggagtagttcgaatctatcacaggaaagccaaataccttcttgcagactgtaatgaagcattcattaagataaagatggcttttcggccaggtgtggttgacctgcctgaggaaaatcgggaagcagcttataatgccattactttacctgaagaatttcatgactttgatcagccactgcctgacttagatgacatcgatgtggcccagcagttcagcttgaatcagagtagagtggaagagataaccatgagagaagaagttgggaacatcagtattttacaagaaaatgattttggtgattttggaatggatgatcgtgagataatgagagaaggcagtgcttttgaggatgacgacatgttagtaagcactactacttctaacctcctattagagtctgaacagagcaccagcaatctgaatgagaaaattaaccatttagaatatgaagatcaatataaggatgataattttggagaaggaaatgatggtggaatattagatgacaaacttattagtaataatgatggcggtatctttgatgatccccctgccctctctgaggcaggggtgatgttgccagagcagcctgcacatgacgatatggatgaggatgataatgtatcaatgggtgggcctgatagtcctgattcagtggatcccgttgaaccaatgccaaccatgactgatcaaacaacacttgttccaaatgaggaagaagcatttgcattggagcctattgatataactgttaaagaaacaaaagccaagaggaagaggaagctaattgttgacagtgtcaaagagttggatagcaagacaattagagcccaacttagtgattattcagatattgttactactttggatctggcaccgcccaccaagaaattgatgatgtggaaagagacaggaggagtagaaaaactgttttctttacctgctcagcctttgtggaataacagactactgaagctctttacacgctgtcttacaccgcttgtaccagaagaccttagaaaaaggaggaaaggaggagaggcagataatttggatgaattcctcaaagaatttgaaaatccagaggttcctagagaggaccagcaacagcagcatcagcagcgtgatgttatcgatgagcccattattgaagagccaagccgcctccaggagtcagtgatggaggccagcagaacaaacatagatgagtcagctatgcctccaccaccacctcagggagttaagcgaaaagctggacaaattgacccagagcctgtgatgcctcctcagcaggtagagcagatggaaataccacctgtagagcttcccccagaagaacctccaaatatctgtcagctaataccagagttagaacttctgccagaaaaagagaaggagaaagagaaggaaaaagaagatgatgaagaggaagaggatgaagatgcatcagggggcgatcaagatcaggaagaaagaagatggaacaaaaggactcagcagatgcttcatggtcttcagcgtgctcttgctaaaactggagctgaatctatcagtttgcttgagttatgtcgaaatacgaacagaaaacaagctgccgcaaagttctacagcttcttggttcttaaaaagcagcaagctattgagctgacacaggaagaaccgtacagtgacatcatcgcaacacctggaccaaggttccatattata

SEQ ID NO: 6828 - DNA, 1683 bp, Homo sapiens
  source 1..1683: mol_type = genomic DNA
atgaattccagcttgaccgcccagaggcgcggcagtgacgccgagttgggaccctgggtgatggctgcgaggtccaaggacgcggcgccgtcccaacgcgacggacttttgcccgtgaaagtggaggaagactcacccggaagttgggagcccaactatcccgcggcttcgccggaccccgaaacttctcgactgcactttaggcagctgcgttaccaggaggtggctggaccggaagaggcgctgagccggctccgagaactctgtcgtcggtggctgagacccgagctgctctccaaggagcagatcctggagctgctggtgctggagcagttcctcaccatcctgcccgaggagcttcaagcctgggtgcgagagcactgcccagagagcggggaggaggcggtggccgtggtgcgggctctgcagcgagcgctcgatggaacctcatcccaggggatggtgactttcgaggacacggctgtgtctctaacctgggaggagtgggagcgcctggacccagcacggagggacttctgcagagagagtgcgcagaaggattccgggagcacagttccgccgagtttggaaagcagagtggagaacaaagagttgattccaatgcaacaaattttagaagaagcggagccacaggggcaactacaagaagcgttccaggggaagcgccccctgttttctaagtgtggcagtacccatgaggacagggtggaaaagcagtccggagaccccttgcccctgaaacttgaaaattctcctgaagcagaaggactcaacagcatctcagatgtcaataagaatggttccatagaaggggaagactctaaaaataatgaattgcagaacagtgccaggtgttccaaccttgttctatgtcagcacatcccgaaagcagagaggcccactgacagtgaggaacacgggaacaagtgcaagcaaagtttccacatggtgacgtggcacgtgctgaaacctcacaagtctgacagtggagacagtttccatcattccagcctttttgagacccagaggcagctccatgaagaaagaccttataaatgtggtaactgtgggaagagtttcaaacaacgctctgacctctttagacaccagagaatccacacaggtgagaaaccctatggctgccaagaatgtgggaaaagcttcagccagagtgctgccctgaccaagcaccagaggacacacacaggcgagaagccgtacacctgtctgaaatgtggggagcgcttcaggcagaattcacacctaaatcgtcatcaaagtacccacagtagagacaaacattttaaatgtgaggaatgcggggaaacctgtcatatttccaacctttttagacatcagagactacataaaggggaaagaccctataagtgtgaagaatgcgagaagagcttcaaacagcgctctgacctctttaaacaccacagaatccacactggggagaagccctatggatgttccgtctgtgggaaacgcttcaatcagagtgcaaccctcattaaacaccagagaattcacactggggaaaagccttacaaatgtcttgaatgtggggaaagatttagacaaagtacacaccttatccgacaccaaagaattcatcaaaataaagtgctgtcggctgggcgtggtggctcacgccta

SEQ ID NO: 6829 - DNA, 1206 bp, Homo sapiens
  source 1..1206: mol_type = genomic DNA
atggcggctgtcatcctgccctcgactgctgctccgtcttccctgttcccagcctctcagcaaaaaggacacacacagggcggagagctggttaatgagctcctgacaagctggctacggggcttggtaaccttcgaggatgtggccgtggagttcacccaggaggagtgggcgttgctggaccctgcccaaaggacactgtacagggatgtgatgctggagaactgcaggaacctggcctcactagggtgtcgtgttaataaacccagtctgatatcccagttggaacaagacaagaaggtggtgacagaggaaagaggaattctaccaagcacctgtccagatttggagactctacttaaagccaaatggttaactcctaagaagaatgttttcagaaaagaacagtctaaaggtgtaaaaacggaaagaagtcatcgtggagtgaaactcaatgaatgtaatcagtgttttaaagtcttcagcacgaaatctaacctaactcagcacaagagaattcatactggagaaaaaccctatgactgtagtcaatgtgggaagtccttcagtagcagatcttaccttactattcataagagaatccataatggggagaaaccctatgaatgcaatcactgtgggaaagcatttagtgatccctcatcccttagactgcatttgagaattcacactggagaaaaaccctatgaatgtaaccagtgttttcacgttttccgcaccagttgtaacctcaaaagccacaagaggattcacacgggggagaatcaccatgaatgtaatcagtgtggaaaagctttcagcacaaggtcctctctcactgggcacaatagcattcatacaggggagaaaccttatgaatgtcacgattgtgggaaaaccttcaggaagagctcctatctgacacagcacgtaagaactcatactggagaaaaaccctatgaatgtaacgagtgtgggaaatccttcagcagtagcttttctcttactgtgcacaagagaatacataccggagagaaaccctacgagtgcagtgactgtggaaaagcctttaataatctctcagctgtgaagaaacacttaagaactcacactggagaaaaaccctatgaatgtaatcattgtgggaaatccttcacaagtaactcctatctttctgtgcacaagagaatacataatagatggata

SEQ ID NO: 6830 - DNA, 1614 bp, Homo sapiens
  source 1..1614: mol_type = genomic DNA
atggtcacctgcgcccacctgggccggcgcgcgcgactcccggcagctcagccctctgcctgcccaggaacctgcttttcccaagaggagagaatggctgctgggtacctgccccgctggtcccaggaattagtaacctttgaggacgtgtccatggacttctcccaggaggagtgggagttgctggagcctgctcagaagaacctgtacagagaggtgatgctggagaactacaggaacgtggtctccctggaagccttgaagaaccaatgtactgatgtggggattaaagagggtccactttccccagcacaaacctcacaagtcactagtctttcctcatggacggggtatttactttttcaaccagtggcttcttcccacttggagcaaagagaagccctgtggatagaggaaaaaggaactcctcaagcctcctgttcagattggatgactgtactaagaaaccaagactcaacttacaagaaggtggctttgcaggaggaaccagccagtggtataaatatgataaagcttatcagagaagatgggggatggaagcagttagaggacagccatgaagacccccaggggcttttgagccaaaaggcatcccttcacgtagtggccgttcctcaggagaaggctactgcatggcatggatttggggaaaatggtaatctgagcccagcccttgttttatcacagggaagctctaaagggaaccacttgtgtggcagcgagttagatattacaagcttggcatccgattcagtcttaaaccaccatcagctgggatatgcagatcggagaccttgtgaaagtaatgaatgtggaaatgccatccgccagaacagtcactttattcaacacggggggaagatgtttgtgtatttggaaaatgggcagtcattgaaccacggtatggccctgactatccacaacaaaatcaacacggcagagaaaccctttgagtgccaccagtgtgggaaggtgttcaaccggaggcattctttgagcgaacatcaaagaattcacacgggggagaaaccctacgagtgtcaggagtgtgggcgagcctttacgcacagctccaccctcacgcgccatctgagaactcatactggagagaagccctacgggtgcggtgagtgcgggaaagccttcaacaggatctcatcgctgactcagcatcagaggattcacaccggggaaaagccctataaatgtgaagactgtgggaaatccttctgccagagctcttacctgatcttgcacaagaggacacacaccggagagaagccctacgaatgcagtgaatgtggaaaggccttcagtgaccgttcctctctcaaccagcacgagcgaactcacacgggcgagaacccctatgaatgtaagcagtgtgggagagccttcagccagaggtcttcccttgtgaggcacgagagaactcacactggagagaaaccctacaggtgtcaggaatgtgggaaagccttcagccagagctcatcccttgtcacacatcagaaaactcacagcagccagaaaacctataaaatcattgactgcgggaaagcgttctaccagaacagacatcttattggatat

SEQ ID NO: 6831 - DNA, 1410 bp, Homo sapiens
  source 1..1410: mol_type = genomic DNA
atggcagccaccctgctcatggctgggtcccaggcacctgtgacgtttgaagatatggccatgtatctcacccgggaagaatggagacctctggacgctgcacagagggacctttaccgggatgttatgcaggagaattatggaaatgttgtctcactagattttgagatcaggagtgagaacgaggtaaatcccaagcaagagattagtgaagatgtacaatttgggactacatctgaaagacctgctgagaatgctgaggaaaatcctgaaagtgaagagggctttgaaagcggagataggtcagaaagacaatggggagatttaacagcagaagagtgggtaagctatcctctccaaccagtcactgatctacttgtccacaaagaagtccacacaggcatccgctatcatatatgttctcattgtggaaaggccttcagtcagatctcagaccttaatcgacatcagaagacccacactggagacagaccctataaatgttatgaatgtggaaaaggcttcagtcgcagctcacaccttattcagcatcaaagaacacatactggggagaggccttatgactgtaacgagtgtgggaaaagttttggaagaagttctcacctgattcagcatcagacaatccacactggagagaagcctcacaaatgtaatgagtgtggaaaaagtttctgccgtctctctcacctaatccaacaccaaaggacccacagtggtgagaaaccctatgagtgtgaggagtgtgggaaaagcttcagccggagctctcacctagctcagcaccagaggacccacacgggtgagaaaccttatgaatgtaacgaatgtggccgaggcttcagtgagagatctgatctcatcaaacactatcgagtccacacaggggagaggccctacaagtgtgatgagtgtgggaagaacttcagtcagaactccgaccttgtgcgtcatcgcagagcccacacgggagagaagccataccactgtaacgaatgtggggaaaatttcagccgcatctcacacttggttcagcaccagagaactcacactggagagaagccatatgaatgcaatgcttgtgggaaaagcttcagccggagctctcatctcatcacacaccagaaaattcacactggagagaagccttatgagtgtaatgagtgttggcgaagctttggtgaaaggtcagatctaattaaacatcagagaacccacacaggggagaagccctacgagtgtgtgcagtgtgggaaaggtttcacccagagctccaacctcatcacacatcaaagagttcacacgggagagaaaccttatgaatgtaccgaatgtgagaagagtttcagcaggagctcagctcttattaaacataagagagttcatacggac

SEQ ID NO: 6832 - DNA, 1437 bp, Homo sapiens
  source 1..1437: mol_type = genomic DNA
atggccagcactattaaggaagccttatcagttgtgagtgaggaccagtcgttgtttgagtgtgcctacggaacgccacacctggctaagacagagatgaccgcgtcctcctccagcgactatggacagacttccaagatgagcccacgcgtccctcagcaggattggctgtctcaacccccagccagggtcaccatcaaaatggaatgtaaccctagccaggtgaatggctcaaggaactctcctgatgaatgcagtgtggccaaaggcgggaagatggtgggcagcccagacaccgttgggatgaactacggcagctacatggaggagaagcacatgccacccccaaacatgaccacgaacgagcgcagagttatcgtgccagcagatcctacgctatggagtacagaccatgtgcggcagtggctggagtgggcggtgaaagaatatggccttccagacgtcaacatcttgttattccagaacatcgatgggaaggaactgtgcaagatgaccaaggacgacttccagaggctcacccccagctacaatgccgacatccttctctcacatctccactacctcagagagactcctcttccacatttgacttcagatgatgttgataaagccttacaaaactctccacggttaatgcatgctagaaacacagggggtgcagcttttattttcccaaatacttcagtatatcctgaagctacgcaaagaattacaactaggccagatttaccatatgagccccccaggagatcagcctggaccggtcacggccaccccacgccccagtcgaaagctgctcaaccatctccttccacagtgcccaaaactgaagaccagcgtcctcagttagatccttatcagattcttggaccaacaagtagccgccttgcaaatccaggcagtggccagatccagctttggcagttcctcctggagctcctgtcggacagctccaactccagctgcatcacctgggaaggcaccaacggggagttcaagatgacggatcccgacgaggtggcccggcgctggggagagcggaagagcaaacccaacatgaactacgataagctcagccgcgccctccgttactactatgacaagaacatcatgaccaaggtccatgggaagcgctacgcctacaagttcgacttccacgggatcgcccaggccctccagccccaccccccggagtcatctctgtacaagtacccctcagacctcccgtacatgggctcctatcacgcccacccacagaagatgaactttgtggcgccccaccctccagccctccccgtgacatcttccagtttttttgctgccccaaacccatactggaattcaccaactgggggtatataccccaacactaggctccccaccagccatatgccttctcatctgggcacttactac

SEQ ID NO: 6833 - DNA, 1059 bp, Homo sapiens
  source 1..1059: mol_type = genomic DNA
atgcagtccaagcgggattgtgagctgtggtgtgagagggtgaatccagagaacaaggcggcgctggaggcgtgggtcagggagacaggcatccgcctggtgcaggtgaacgggcagaggaagtatggcgggccacccccaggctgggtgggcagcccgccgccagctgggtcagaggtgttcatcgggcggctgcctcaggacgtgtacgagcaccagcttatcccgctgttccagcgcgtgggccgcctctacgagttccgcctgatgatgaccttcagcggcctgaaccgcggcttcgcctatgcccgctacagctcgaggcgcggcgcgcaggccgccatcgccacgctgcacaaccatccgctgcggccgtcctgcccgctgctcgtgtgccgcagcaccgagaagtgtgagctgagcgttgacggcctgccgccgaatctgacccgcagcgcgctgctgctcgcgctgcagccgctgggtcccggcttgcaggaggcgcggctgctgcccagccccggaccggcgcccgggcagatcgctctgctcaaattcagctcgcaccgggccgctgccatggccaaaaaggccctggtggaagggcagtcacacctctgtggagagcaggtggctgtggagtggctcaagccagacctgaagcagcgacttcgccagcagcttgtgggtcccttcttgcggtccccacagccagagggcagccagttggctttggcaagggacaagttagggttccaaggggctcgggctaccctgcagttgctgtgccaacgaatgaagctgggcagccctgtgttcctcaccaagtgtttgggcataggacctgctggctggcaccgcttctggtaccaggtggtgattcctgggcatccggtgcccttcagcggcctcatctgggttgtgctgaccctagatggccgggatgggcatgaggtggccaaggatgctgtgtctgtacggctgctgcaggcactcagtgagtctggggccaacctcctgtggtctgctggggctgaggcaggtaccatggttaaacag

SEQ ID NO: 6834 - DNA, 873 bp, Homo sapiens
  source 1..873: mol_type = genomic DNA
atggaggcgcccgccagcgcgcagaccccgcacccgcacgagcccatcagcttcggcatcgaccagatccttaacagcccggaccaggacagcgcacccgccccgcggggccccgacggcgccagctacctgggagggccccccgggggccgtccgggcgccacatacccgtctctgcccgcctcctttgcgggcctcggcgcgcccttcgaggacgcgggatcttacagtgtgaacctgagcctagcgcccgcaggcgtgatccgggtgccggcgcacaggccgctgcccggggccgtgccaccgcctctgccaagcgcgctacccgccatgccctccgtgcccacggtctccagccttggcggtctcaatttcccctggatggagagcagccgccgcttcgtgaaagaccgcttcacagcggcggccgcactcacgcccttcaccgtgacccggcgcatcggccacccctaccagaaccggacgccgcccaagcgtaagaagccgcgcacgtccttttcccgggtgcagatctgcgagctggaaaagcgcttccatcgccagaagtacctggcctctgccgagagggcggcgctcgccaagtccctcaaaatgacggacgcgcaggtcaagacctggttccaaaaccggaggaccaagtggcggcggcagacggcggaggagcgggaggcggagcggcagcaggcgagccggctcatgctgcagctgcaacacgacgccttccaaaagagcctcaacgactccatccagcctgacccgctctgtctgcacaactcgtcactctttgctctgcagaatctgcagccctgggaggaggatagttccaaggttcccgctgtcacctccctggtg

SEQ ID NO: 6835 - DNA, 1395 bp, Homo sapiens
  source 1..1395: mol_type = genomic DNA
atgaacgcgcagctgaccatggaagcgatcggcgagctgcacggggtgagccatgagccggtgcccgcccctgccgacctgctgggcggcagcccccacgcgcgcagctccgtggcgcaccgcggcagccacctgccccccgcgcacccgcgctccatgggcatggcgtccctgctggacggcggcagcggcggcggagattaccaccaccaccaccgggcccctgagcacagcctggccggccccctgcatcccaccatgaccatggcctgcgagactcccccaggtatgagcatgcccaccacctacaccaccttgacccctctgcagccgctgcctcccatctccacagtctcggacaagttcccccaccatcaccaccaccaccatcaccaccaccacccgcaccaccaccagcgcctggcgggcaacgtgagcggtagcttcacgctcatgcgggatgagcgcgggctggcctccatgaataacctctataccccctaccacaaggacgtggccggcatgggccagagcctctcgcccctctccagctccggtctgggcagcatccacaactcccagcaagggctcccccactatgcccacccgggggccgccatgcccaccgacaagatgctcacccccaacggcttcgaagcccaccacccggccatgctcggccgccacggggagcagcacctcacgcccacctcggccggcatggtgcccatcaacggccttcctccgcaccatccccacgcccacctgaacgcccagggccacgggcaactcctgggcacagcccgggagcccaacccttcggtgaccggcgcgcaggtcagcaatggaagtaattcagggcagatggaagagatcaataccaaagaggtggcgcagcgtatcaccaccgagctcaagcgctacagcatcccacaggccatcttcgcgcagagggtgctctgccgctcccaggggaccctctcggacctgctgcgcaaccccaaaccctggagcaaactcaaatccggccgggagaccttccggaggatgtggaagtggctgcaggagccggagttccagcgcatgtccgcgctccgcttagcagcatgcaaaaggaaagaacaagaacatgggaaggatagaggcaacacacccaaaaagcccaggttggtcttcacagatgtccagcgtcgaactctacatgcaatattcaaggaaaataagcgtccatccaaagaattgcaaatcaccatttcccagcagctggggttggagctgagcactgtcagcaacttcttcatgaacgcaagaaggaggagtctggacaagtggcaggacgagggcagctccaattcaggcaactcatcttcttcatcaagcacttgtaccaaagca

SEQ ID NO: 6836 - DNA, 1341 bp, Homo sapiens
  source 1..1341: mol_type = genomic DNA
atgctcctggacgccggcccccagtacccagcgatcggcgtgaccacctttggcgcgtcccgccaccactccgcgggcgacgtggccgaacgagacgtgggcctgggcatcaacccgttcgccgacggcatgggcgccttcaagctcaaccccagttcgcacgagctggcttcggccggccagacggccttcacgtcgcaggcgccaggctacgcggctgctgcggccctgggccatcaccatcacccgggccacgtcggctcctattccagcgcagccttcaactccacgcgggactttctgttccgcaaccggggttttggcgacgcggcggcggcagccagcgcacagcacagcctctttgctgcatcggccgggggcttcgggggcccacacggccacacggacgccgcgggccacctcctcttccccgggcttcacgagcaggctgccggccacgcgtcgcctaacgtggtcaacgggcagatgaggctcggcttctcgggggacatgtacccgcgaccggagcagtacggccaggtgaccagcccgcgttcggagcactatgctgcgccgcagctgcacggctacgggcccatgaacgtgaacatggccgcgcatcacggcgccggcgccttcttccgctacatgcgccaacccatcaagcaagagctcatctgcaagtggatcgagcccgagcagctggccaaccccaaaaagtcgtgcaacaaaactttcagcaccatgcacgagctagttacgcacgtcaccgtggagcacgtaggtggcccggagcagagtaatcacatctgcttctgggaggagtgtccgcgcgagggcaagcccttcaaagccaaatacaaactggttaaccacatccgcgtgcacacgggcgagaagccctttccctgccccttccctggctgtggcaaggtcttcgcgcgctccgagaatttaaagatccacaaaaggacgcacacaggggagaagcccttcaagtgcgagtttgagggctgtgaccggcgcttcgctaacagcagcgaccgcaagaagcacatgcacgtgcacacgagcgacaagccctatctttgcaagatgtgcgacaagtcctacacgcatcccagttcgctgcgcaaacacatgaaggtccacgaatcctcctcgcagggctcgcagccttcgccggccgccagctctggctacgaatcctccacgcctcccaccatcgtgtctccctccacagacaacccgaccacaagctccttatcgccctcctcctccgcagtccaccacacagccggccacagtgcgctctcttccaattttaacgaatggtacgtt

SEQ ID NO: 6837 - DNA, 2382 bp, Homo sapiens
  source 1..2382: mol_type = genomic DNA
atggcgggctggatccaggcccagcagctgcagggagacgcgctgcgccagatgcaggtgctgtacggccagcacttccccatcgaggtccggcactacttggcccagtggattgagagccagccatgggatgccattgacttggacaatccccaggacagagcccaagccacccagctcctggagggcctggtgcaggagctgcagaagaaggcggagcaccaggtgggggaagatgggtttttactgaagatcaagctggggcactacgccacgcagctccagaaaacatatgaccgctgccccctggagctggtccgctgcatccggcacattctgtacaatgaacagaggctggtccgagaagccaacaattgcagctctccggctgggatcctggttgacgccatgtcccagaagcaccttcagatcaaccagacatttgaggagctgcgactggtcacgcaggacacagagaatgagctgaagaaactgcagcagactcaggagtacttcatcatccagtaccaggagagcctgaggatccaagctcagtttgcccagctggcccagctgagcccccaggagcgtctgagccgggagacggccctccagcagaagcaggtgtctctggaggcctggttgcagcgtgaggcacagacactgcagcagtaccgcgtggagctggccgagaagcaccagaagaccctgcagctgctgcggaagcagcagaccatcatcctggatgacgagctgatccagtggaagcggcggcagcagctggccgggaacggcgggccccccgagggcagcctggacgtgctacagtcctggtgtgagaagttggccgagatcatctggcagaaccggcagcagatccgcagggctgagcacctctgccagcagctgcccatccccggcccagtggaggagatgctggccgaggtcaacgccaccatcacggacattatctcagccctggtgaccagcacattcatcattgagaagcagcctcctcaggtcctgaagacccagaccaagtttgcagccaccgtacgcctgctggtgggcgggaagctgaacgtgcacatgaatcccccccaggtgaaggccaccatcatcagtgagcagcaggccaagtctctgcttaaaaatgagaacacccgcaacgagtgcagtggtgagatcctgaacaactgctgcgtgatggagtaccaccaagccacgggcaccctcagtgcccacttcaggaacatgtcactgaagaggatcaagcgtgctgaccggcggggtgcagagtccgtgacagaggagaagttcacagtcctgtttgagtctcagttcagtgttggcagcaatgagcttgtgttccaggtgaagactctgtccctacctgtggttgtcatcgtccacggcagccaggaccacaatgccacggctactgtgctgtgggacaatgcctttgctgagccgggcagggtgccatttgccgtgcctgacaaagtgctgtggccgcagctgtgtgaggcgctcaacatgaaattcaaggccgaagtgcagagcaaccggggcctgaccaaggagaacctcgtgttcctggcgcagaaactgttcaacaacagcagcagccacctggaggactacagtggcctgtccgtgtcctggtcccagttcaacagggagaacttgccgggctggaactacaccttctggcagtggtttgacggggtgatggaggtgttgaagaagcaccacaagccccactggaatgatggggccatcctaggttttgtgaataagcaacaggcccacgacctgctcatcaacaagcccgacgggaccttcttgttgcgctttagtgactcagaaatcgggggcatcaccatcgcctggaagtttgattccccggaacgcaacctgtggaacctgaaaccattcaccacgcgggatttctccatcaggtccctggctgaccggctgggggacctgagctatctcatctatgtgtttcctgaccgccccaaggatgaggtcttctccaagtactacactcctgtgctggctaaagctgttgatggatatgtgaaaccacagatcaagcaagtggtccctgagtttgtgaatgcatctgcagatgctgggggcagcagcgccacgtacatggaccaggccccctccccagctgtgtgcccccaggctccctataacatgtacccacagaaccctgaccatgtactcgatcaggatggagaattcgacctggatgagaccatggatgtggccaggcacgtggaggaactcttacgccgaccaatggacagtcttgactcccgcctctcgccccctgccggtcttttcacctctgccagaggctccctctca

SEQ ID NO: 6838 - DNA, 825 bp, Homo sapiens
  source 1..825: mol_type = genomic DNA
atgcccaaagtcttcctggtgaagaggaggagcctgggggtctcggtccgcagctgggatgagctcccggatgagaaaagggcagacacctacatcccagtgggcctaggccgcctgctccacgacccccccgaggactgccgcagcgacggcggcagcagcagcggcagcggcagcagcagcgcgggggagcctggaggagcagagagcagctcgtccccgcacgcccccgagagcgaaacccccgagcccggcgacgccgagggccccgatggacacctggcgaccaagcagcgcccggtcgccagatcgaaaatcaagttcaccacaggcacgtgcagcgactcggtggttcacagctgtgacctgtgtggcaagggcttccgtctgcagcgcatgctgaaccgtcacctcaagtgccacaaccaggtgaaaagacacctgtgcaccttctgcggcaagggcttcaacgacaccttcgacctgaagaggcacgtccgcacacacacaggcattcgtccctacaaatgcaacgtctgcaataaagccttcacccagcgctgctctctggagtcccacctgaagaaaatccatggggtgcagcagcagtatgcctataagcagcggcgggacaagctctacgtctgcgaggattgcggctacacgggccccacccaggaggacctgtacctgcacgtgaacagtgcccatccgggcagctcgtttctcaaaaagacatctaaaaaactggcagcccttctgcagggcaagctgacatccgcacaccaggagaataccagcctgagtgaggaggaggagaggaag

SEQ ID NO: 6839 - DNA, 2148 bp, Homo sapiens
  source 1..2148: mol_type = genomic DNA
atgccaagcaccagctttccagtcccttccaagtttccacttggccctgcggctgcggtcttcgggagaggagaaactttggggcccgcgccgcgcgccggcggcaccatgaagtcagcggaggaagaacactatggctatgcatcctccaacgtcagccccgccctgccgctccccacggcgcactccaccctgccggccccgtgccacaaccttcagacctccacaccgggcatcatcccgccggcggatcacccctcggggtacggagcagctttggacggtgggcccgcgggctacttcctctcctccggccacaccaggcctgatggggcccctgccctggagagtcctcgcatcgagataacctcgtgcttgggcctgtaccacaacaataaccagtttttccacgatgtggaggtggaagacgtcctccctagctccaaacggtccccctccacggccacgctgagtctgcccagcctggaggcctacagagacccctcgtgcctgagcccggccagcagcctgtcctcccggagctgcaactcagaggcctcctcctacgagtccaactactcgtacccgtacgcgtccccccagacgtcgccatggcagtctccctgcgtgtctcccaagaccacggaccccgaggagggctttccccgcgggctgggggcctgcacactgctgggttccccgcggcactccccctccacctcgccccgcgccagcgtcactgaggagagctggctgggtgcccgctcctccagacccgcgtccccgtgcaacaagaggaagtacagcctcaacggccggcagccgccctactcaccccaccactcgcccacgccgtccccgcacggctccccgcgggtcagcgtgaccgacgactcgtggttgggcaacaccacccagtacaccagctcggccatcgtggccgccatcaacgcgctgaccaccgacagcagcctggacctgggagatggcgtccctgtcaagtcccgcaagaccaccctggagcagccgccctcagtggcgctcaaggtggagcccgtcggggaggacctgggcagccccccgcccccggccgacttcgcgcccgaagactactcctctttccagcacatcaggaagggcggcttctgcgaccagtacctggcggtgccgcagcacccctaccagtgggcgaagcccaagcccctgtcccctacgtcctacatgagcccgaccctgcccgccctggactggcagctgccgtcccactcaggcccgtatgagcttcggattgaggtgcagcccaagtcccaccaccgagcccactacgagacggagggcagccggggggccgtgaaggcgtcggccggaggacaccccatcgtgcagctgcatggctacttggagaatgagccgctgatgctgcagcttttcattgggacggcggacgaccgcctgctgcgcccgcacgccttctaccaggtgcaccgcatcacagggaagaccgtgtccaccaccagccacgaggccatcctctccaacaccaaagtcctggagatcccactcctgccggagaacagcatgcgagccgtcattgactgtgccggaatcctgaaactcagaaactccgacattgaacttcggaaaggagagacggacatcgggaggaagaacacacgggtacggctggtgttccgcgttcacgtcccgcaacccagcggccgcacgctgtccctgcaggtggcctccaaccccatcgaatgctcccagcgctcagctcaggagctgcctctggtggagaagcagagcacggacagctatccggtcgtgggcgggaagaagatggtcctgtctggccacaacttcctgcaggactccaaggtcattttcgtggagaaagccccagatggccaccatgtctgggagatggaagcgaaaactgaccgggacctgtgcaagccgaattctctggtggttgagatcccgccgtttcggaatcagaggataaccagccccgttcacgtcagtttctacgtctgcaacgggaagagaaagcgaagccagtaccagcgtttcacctaccttcccgccaacggtaacgccatctttctaaccgtaagccgtgaacatgagcgcgtggggtgctttttc

SEQ ID NO: 6840 - DNA, 1287 bp, Homo sapiens
  source 1..1287: mol_type = genomic DNA
atggcatcgaacagcatcttcgactccttcccgacctactcgccgaccttcatccgcgacccaagcaccagccgccgcttcacacctccctccccggccttcccctgcggcggcggcggcggcaagatgggcgagaacagcggcgcgctgagcgcgcaggcggccgtggggcccggagggcgcgcccggcccgaggtgcgctcgatggtggacgtgctggcggaccacgcaggcgagctcgtgcgcaccgacagccccaacttcctctgctccgtgctgccctcgcactggcgctgcaacaagacgctgcccgtcgccttcaaggtggtggcattgggggacgtgccggatggtacggtggtgactgtgatggcaggcaatgacgagaactactccgctgagctgcgcaatgcctcggccgtcatgaagaaccaggtggccaggttcaacgaccttcgcttcgtgggccgcagtgggcgagggaagagtttcaccctgaccatcactgtgttcaccaaccccacccaagtggcgacctaccaccgagccatcaaggtgaccgtggacggaccccgggagcccagacggcaccggcagaagctggaggaccagaccaagccgttccctgaccgctttggggacctggaacggctgcgcatgcgggtgacaccgagcacacccagcccccgaggctcactcagcaccacaagccacttcagcagccagccccagaccccaatccaaggcacctcggaactgaacccattctccgacccccgccagtttgaccgctccttccccacgctgccaaccctcacggagagccgcttcccagaccccaggatgcattatcccggggccatgtcagctgccttcccctacagcgccacgccctcgggcacgagcatcagcagcctcagcgtggcgggcatgccggccaccagccgcttccaccatacctacctcccgccaccctacccgggggccccgcagaaccagagcgggcccttccaggccaacccgtccccctaccacctctactacgggacatcctctggctcctaccagttctccatggtggccggcagcagcagtgggggcgaccgctcacctacccgcatgctggcctcttgcaccagcagcgctgcctctgtcgccgccggcaacctcatgaaccccagcctgggcggccagagtgatggcgtggaggccgacggcagccacagcaactcacccacggccctgagcacgccaggccgcatggatgaggccgtgtggcggccctac

SEQ ID NO: 6841 - DNA, 1296 bp, Homo sapiens
  source 1..1296: mol_type = genomic DNA
atgccccattctcctctgatctccattcctcatgtgtggtgtcacccagaagaggaggaaagaatgcatgatgaacttctacaagcagtatccaaggggccggtgatgttcagggatgtttccatagacttctctcaagaggaatgggaatgcctggacgctgatcagatgaatttatacaaagaagtgatgttggagaatttcagcaacctggtttcagtgggactttccaattctaagccagctgtgatctccttattggaacaaggaaaagagccctggatggttgatagagagctgactagaggcctgtgttcagatctggaatcaatgtgtgagaccaaaatattatctctaaagaagagacatttcagtcaagtaataattacccgtgaagacatgtctacttttattcagcccacatttcttattccacctcaaaaaactatgagtgaagagaaaccatgggaatgtaagatatgtggaaagacctttaatcaaaactcacaatttatccaacatcagagaattcattttggtgaaaaacactatgaatctaaggagtatgggaagtcctttagtcgtggctcactcgttactcgacatcagaggattcacactggtaaaaaaccctatgaatgtaaggaatgtggcaaggcttttagttgtagttcatatttttctcaacatcagaggattcacactggtgagaaaccctatgaatgtaaggaatgtggaaaagcctttaagtattgctcaaaccttaatgatcatcagagaattcacactggtgagaaaccctatgaatgtaaagtatgtggaaaagcctttactaaaagttcacaactttttctacatctgagaattcatactggtgagaaaccttatgaatgtaaagaatgtgggaaagcctttactcaacactcaaggcttattcagcatcagagaatgcatactggtgagaaaccttatgaatgtaagcagtgtgggaaggcctttaatagtgcctcaacacttactaaccatcacagaattcatgctggtgagaagctctatgaatgtgaagaatgtagaaaggcctttattcagagctcagaacttattcaacatcagagaatccatacagatgaaaaaccatatgaatgtaatgaatgtgggaaggcctttaataaaggctcaaatcttactcgacatcagagaattcacactggtgagaaaccctatgactgtaaggaatgtggaaaggcttttggtagtcgctctgacctcattcgccatgagggaattcatactggt

SEQ ID NO: 6842 - DNA, 1953 bp, Homo sapiens
  source 1..1953: mol_type = genomic DNA
atgttacgtgaggaagccaccaagaagagcaaagaaaaggagccagggatggctcttcctcagggacgcttgactttcagggatgtggctatagagttctctttggaggagtggaaatgcctgaaccctgcacagagggctttatacagggctgtgatgttggagaactacaggaacctggagtttgtggatagctctttaaaatccatgatggagttctcatcaaccaggcacagtattacaggagaagtgatccacacagggacgttgcaaagacataaaagtcatcacattggagatttttgcttcccagaaatgaagaaagatattcatcactttgagtttcagtggcaagaagttgaaagaaatggccatgaagcacccatgacaaaaatcaaaaagttgactggtagtacagaccgaagtgatcacaggcatgctggaaacaagcctattaaagatcagcttggattaagctttcattcgcatctgcctgaactccacatgtttcagactaaagggaaaattagtaaccaattggacaagtctatcggtgcttcctcagcttcagaatcccaaagaatttcttgtaggctcaaaactcatatttctaataagtatgggaagaatttcctccattcttcattcacacaaatacaggaaatatgcatgagagaaaaaccttgccaaagtaatgagtgtggcaaagcctttaattatagctcactcttaaggagacaccacataacccattcaagagagagagaatataaatgtgatgtatgtggcaagatctttaatcagaagcaatacattgtatatcatcatagatgtcacactggtgagaaaacttacaagtgtaatgagtgtgggaagaccttcactcagatgtcatcccttgtatgccatcgtagacttcatactggagagaaaccttacaagtgtaatgagtgtggcaagaccttcagtgagaagtcatcccttagatgccatcgtagacttcatactggagagaaaccttacaagtgtaatgagtgtggcaagacttttggtcgaaattcagcccttgtaattcataaggcaattcatactggagagaaaccttacaagtgtaatgagtgtggcaagaccttcagtcagaaatcatcccttcaatgccatcatatacttcacactggagagaaaccttacaaatgtgaagaatgtgacaatgtttacattcgcagatcacaccttgaaagacataggaagattcatactggagagggatcatacaaatgtaaggtttgtgacaaggttttccggagtgattcataccttgcagaacatcagagagttcatactggagagaaaccatacaagtgtaataaatgtggcaggagtttcagtcggaagtcatcccttcaataccatcatacacttcacactggagagaaaccttacacatgtaatgaatgtggcaaggtttttagtcgaagagaaaaccttgcacgtcatcatagacttcatgctggagagaaaccttacaaatgtgaagaatgtgacaaagttttcagtcgcagatcacaccttgaaagacataggagaattcatactggggaaaaaccatacaaatgtaaggtttgtgacaaggctttccggagtgattcatgccttgcaaaccatacgagagttcatactggagagaaaccttacaagtgtaataaatgtgcgaaggtttttaatcaaaaaggaatccttgcacaacatcagagagttcatactggagagaaaccttacaagtgtaatgaatgtggcaaggtttttaatcaaaaagcaagccttgcaaaacatcagagagttcatactgcagagaaaccttacaagtgtaatgagtgtggcaaagcctttactggacagtcaacacttattcaccatcaagcaatccatgggtgtagggaaactttacaaatg

SEQ ID NO: 6843 - DNA, 2010 bp, Homo sapiens
  source 1..2010: mol_type = genomic DNA
atggcagaggtggtggctgaggtggccgagatgccaacacagatgtcaccaggggcagtggagatgtcaacacctatgtcggcagagatgatggagatgtcaacagaagtgactgagatgacacctggggaggcccttgcctcatccctcttcttccagcatcaccagttcatgtgctctgagtgtggcagcctctataacacactggaggaagtcctctcacaccaggagcagcacatgcttgctgtctcagaggaggaggcactgaccacacagaatgttggcctggagccggagctggtgccgggtgctgaggggcccttccagtgtggtgaatgcagccagctcatcctctcccctggggagctcctggcccaccaggatgcccacctccgagagtctgcaaaccagatccaataccagtgctgggactgccaggagctgttcccctcgcccgagctgtgggtggctcatcgaaaggcccagcacctttctgctacggtagctgagccaccagtgccacctcctttgcctcccccaacaccactgcctccaccttctcccccatccgaagtcaagatggagccctatgagtgtcctgagtgctctaccctctgcgccacccctgaggagttcttggagcatcagggcacccactttgactccctagagaaagaggagcgcaatgggttggaggaggaggaagaggacgatgaggaggatgaagaagatgatgaagagatggaggatgaggaggccatggcagaggtcggtgatgatgctgtgggaggtgacgagtccacagctggctgggctcagggctgcggggactgtccccagcaccagccctcagcaggggctcgccggcaacaccggcggacggctcacagcccggcatctgccacccaccccttccactgcagccagtgtcagcgcagtttcagctccgccaaccggctgcaggctcatgggcgggcccatgttggtggcacacatgagtgtacaacctgctccaaggtcttcaagaaagcagcatcgcttgagcagcacttgcggctgcatcgcggggaagcccgctacctctgtgtagactgtggccgcggctttggcacagaactcacgttggtggctcaccggcgggcccacactgccaacccattgcatcgctgtcgttgcggcaagacgttcagcaacatgaccaagttcctctaccaccggcgcactcacgccggcaaaagcggggcacctcccacaggagcaacagctcccccagctccagcggagcccacccctccaccaccaccccctgccccacctgcccagctgccctgcccacagtgctccaagtcctttgcctcagcttcccggctgtcccggcaccggcgtgcagtacacgggccccctgaacggcgtcaccgctgtggggtttgtggcaagggcttcaagaagctgatccacgtgcgcaaccacctgcggacacacacgggtgagaggcccttccagtgccactcatgtggcaagacctttgcttctttggccaacctcagccgccaccagctgacccatacgggtgcacgtccctaccaatgcctggactgtggcaagcgcttcacacagagctccaacctgcagcagcaccggcggttgcacttgcggccagtcgcctttgcccgcgccccccgcctccccatcactggtctctacaacaagagtccctactactgcgggacttgtggccgctggttccgcgccatggcgggcttgcgactgcatcagcgggtccatgcccgagctcggactttgacgctacagcctcccagatcaccatctcctgccccacccccacctccagagcctcaacagactatcatgtgcacagagctgggggagaccatcgccatcattgagacatcccagccactggcgcttgaggacaccctgcagctgtgccaggctgcactgggggccagtgaagcaggcgggctcttgcagttggacacggccttcgtg

SEQ ID NO: 6844 - DNA, 483 bp, Homo sapiens
  source 1..483: mol_type = genomic DNA
atgtcggttccaggaccttaccaggcggccactgggccttcctcagcaccatccgcacctccatcctatgaagagacagtggctgttaacagttattaccccacacctccagctcccatgcctgggccaactacggggcttgtgacggggcctgatgggaagggcatgaatcctccttcgtattatacccagccagcgcccatccccaataacaatccaattaccgtgcagacggtctacgtgcagcaccccatcacctttttggaccgccctatccaaatgtgttgtccttcctgcaacaagatgatcgtgagtcagctgtcctataacgccggtgctctgacctggctgtcctgcgggagcctgtgcctgctggggtgcatagcgggctgctgcttcatccccttctgcgtggatgccctgcaggacgtggaccattactgtcccaactgcagagctctcctgggcacctacaagcgtttg

SEQ ID NO: 6845 - DNA, 2019 bp, Homo sapiens
  source 1..2019: mol_type = genomic DNA
atggcagaggcaccggcttccccggccccgctctctccgctcgaagtggagctggacccggagttcgagccccagagccgtccgcgatcctgtacgtggcccctgcaaaggccggagctccaagcgagccctgccaagccctcgggggagacggccgccgactccatgatccccgaggaggaggacgatgaagacgacgaggacggcgggggacgggccggctcggccatggcgatcggcggcggcggcgggagcggcacgctgggctccgggctgctccttgaggactcggcccgggtgctggcacccggagggcaagaccccgggtctgggccagccaccgcggcgggcgggctgagcgggggtacacaggcgctgctgcagcctcagcaaccgctgccaccgccgcagccgggggcggctgggggctccgggcagccgaggaaatgttcgtcgcggcggaacgcctggggaaacctgtcctacgcggacctgatcacccgcgccatcgagagctccccggacaaacggctcactctgtcccagatctacgagtggatggtgcgttgcgtgccctacttcaaggataagggcgacagcaacagctctgccggctggaagaactccatccggcacaacctgtcactgcatagtcgattcatgcgggtccagaatgagggaactggcaagagctcttggtggatcatcaaccctgatggggggaagagcggaaaagccccccggcggcgggctgtctccatggacaatagcaacaagtataccaagagccgtggccgcgcagccaagaagaaggcagccctgcagacagcccccgaatcagctgacgacagtccctcccagctctccaagtggcctggcagccccacgtcacgcagcagtgatgagctggatgcgtggacggacttccgttcacgcaccaattctaacgccagcacagtcagtggccgcctgtcgcccatcatggcaagcacagagttggatgaagtccaggacgatgatgcgcctctctcgcccatgctctacagcagctcagccagcctgtcaccttcagtaagcaagccgtgcacggtggaactgccacggctgactgatatggcaggcaccatgaatctgaatgatgggctgactgaaaacctcatggacgacctgctggataacatcacgctcccgccatcccagccatcgcccactgggggactcatgcagcggagctctagcttcccgtataccaccaagggctcgggcctgggctccccaaccagctcctttaacagcacggtgttcggaccttcatctctgaactccctacgccagtctcccatgcagaccatccaagagaacaagccagctaccttctcttccatgtcacactatggtaaccagacactccaggacctgctcacttcggactcacttagccacagcgatgtcatgatgacacagtcggaccccttgatgtctcaggccagcaccgctgtgtctgcccagaattcccgccggaacgtgatgcttcgcaatgatccgatgatgtcctttgctgcccagcctaaccagggaagtttggtcaatcagaacttgctccaccaccagcaccaaacccagggcgctcttggtggcagccgtgccttgtcgaattctgtcagcaacatgggcttgagtgagtccagcagccttgggtcagccaaacaccagcagcagtctcctgtcagccagtctatgcaaaccctctcggactctctctcaggctcctccttgtactcaactagtgcaaacctgcccgtcatgggccatgagaagttccccagcgacttggacctggacatgttcaatgggagcttggaatgtgacatggagtccattatccgtagtgaactcatggatgctgatgggttggattttaactttgattccctcatctccacacagaatgttgttggtttgaacgtggggaacttcactggtgctaagcaggcctcatctcagagctgggtgccaggc

SEQ ID NO: 6846 - DNA, 2046 bp, Homo sapiens
  source 1..2046: mol_type = genomic DNA
atgcagctggagcactgcctttctccttctatcatgctctccaagaaatttctcaatgtgagcagcagctacccacattcaggcggatccgagcttgtcttgcacgatcatcccattatctcgaccactgacaacctggagagaagttcacctttgaaaaaaattaccagggggatgacgaatcagtcagatacagacaattttcctgactccaaggactcaccaggggacgtccagagaagtaaactctctcctgtcttggacggggtctctgagcttcgtcacagtttcgatggctctgctgcagatcgctacctcctctctcagtccagccagccacagtctgcggccactgctcccagtgccatgttcccgtaccccggccagcacggaccggcgcaccccgccttctccatcggcagccctagccgctacatggcccaccacccggtcatcaccaacggagcctacaacagcctcctgtccaactcctcgccgcagggataccccacggccggctacccctacccacagcagtacggccactcctaccaaggagctccgttctaccagttctcctccacccagccggggctggtgcccggcaaagcacaggtgtacctgtgcaacaggcccctttggctgaaatttcaccggcaccaaacggagatgatcatcaccaaacagggaaggcgcatgtttccttttttaagttttaacatttctggtctcgatcccacggctcattacaatatttttgtggatgtgattttggcggatcccaatcactggaggtttcaaggaggcaaatgggttccttgcggcaaagcggacaccaatgtgcaaggaaatcgggtctatatgcatccggattcccccaacactggggctcactggatgcgccaagaaatctcttttggaaaattaaaacttacgaacaacaaaggagcttcaaataacaatgggcagatggtggttttacagtccttgcacaagtaccagccccgcctgcatgtggtggaagtgaacgaggacggcacggaggacactagccagcccggccgcgtgcagacgttcactttccctgagactcagttcatcgccgtcaccgcctaccagaacacggatattacacaactgaaaatagatcacaacccttttgcaaaaggatttcgggataattatgacacgatctacaccggctgtgacatggaccgcctgaccccctcgcccaacgactcgccgcgctcgcagatcgtgcccggggcccgctacgccatggccggctctttcctgcaggaccagttcgtgagcaactacgccaaggcccgcttccacccgggcgcgggcgcgggccccgggccgggtacggaccgcagcgtgccgcacaccaacgggctgctgtcgccgcagcaggccgaggacccgggcgcgccctcgccgcaacgctggtttgtgacgccggccaacaaccggctggacttcgcggcctcggcctatgacacggccacggacttcgcgggcaacgcggccacgctgctctcttacgcggcggcgggcgtgaaggcgctgccgctgcaggctgcaggctgcactggccgcccgctcggctactacgccgacccgtcgggctggggcgcccgcagtcccccgcagtactgcggcaccaagtcgggctcggtgctgccctgctggcccaacagcgccgcggccgccgcgcgcatggccggcgccaatccctacctgggcgaggaggccgagggcctggccgccgagcgctcgccgctgccgcccggcgccgccgaggacgccaagcccaaggacctgtccgattccagctggatcgagacgccctcctcgatcaagtccatcgactccagcgactcggggatttacgagcaggccaagcggaggcggatctcgccggccgacacgcccgtgtccgagagttcgtccccgctcaagagcgaggtgctggcccagcgggactgcgagaagaactgcgccaaggacattagcggctactatggcttctactcgcacagc

SEQ ID NO: 6847 - DNA, 270 bp, Homo sapiens
  source 1..270: mol_type = genomic DNA
atgcccaagagaaaggctgaaggggatgctaagggagataaagcaaaggtgaaggacgaaccacagagaagatccgcgaggttgtctgctaaacctgctcctccaaagccagagcccaagcctaaaaaggcccctgcaaagaagggagagaaggtacccaaagggaaaaagggaaaagctgatgctggcaaggaggggaataaccctgcagaaaatggagatgccaaaacagaccaggcacagaaagctgaaggtgctggagatgccaag

SEQ ID NO: 6848 - DNA, 1785 bp, Homo sapiens
  source 1..1785: mol_type = genomic DNA
atggcagctctgtcccccacatttgccacgtccacccaggattccacctgtctccaggactcagaatttcctgtttcttcaaaagaccattcctgtccccagaatttggacctgttcgtgtgcagtggtctggagcctcacacacccagtgttggttcccaggaatcggtgactttccaagatgtcgctgtggactttaccgagaaggagtggcccttgctggattcttctcagagaaaactgtacaaagatgtaatgctggagaactacagcaacctcacttcactggggtatcaggtcggcaaacccagcctcatctcacacttggagcaggaggaggagccgaggacagaggagaggggcgctcaccagggcgcttgtgcagattgggagactccatctaaaaccaagtggtcacttcttatggaagatatttttgggaaggaaacgcccagtggtgtgacgatggaaagagccggtcttggagagaagtccactgaatacgctcacttgttcgaagtctttggcatggaccctcatctcactcagccaatgggaaggcacgctggcaagaggccctatcaccgccgcgactatggggtagcgttcaagggcaggccgcacctcactcagcacatgagcatgtacgacgggagaaaaatgcatgaatgtcatcagtgccaaaaagccttcaccacgagcgcgtccctcacacggcacaggagaatccacaccggggagaagccttacgagtgcagcgactgcgggaaagccttcaacgacccttcagcccttaggagccacgcaagaactcacctcaaagagaagccctttgactgcagtcagtgtggaaatgcattccggaccctctcggccctgaaaatccacatgcgagttcacactggcgagaggccttacaagtgtgatcagtgcgggaaggcttacggccggagctgccacctcatcgcacacaagagaacgcacaccggagagaggccctacgagtgtcacgactgtgggaaagctttccagcacccctcccacctcaaagagcacgtgaggaatcacacgggggagaagccctacgcgtgcacgcagtgcggcaaagccttccgctggaagtccaactttaatttgcacaagaagaaccacatggtggagaagacctacgaatgtaaagaatgcgggaaatcctttggcgatctcgtgtcccggaggaaacacatgaggattcacatcgtcaagaaacccgtggaatgtcggcagtgcgggaagaccttccgaaaccagtccatccttaagactcacatgaactctcacactggagagaaaccatacgggtgcgatctctgcgggaaagctttcagcgcgagttcaaacctcaccgcacacaggaagatacacacgcaagagagacgctacgaatgcgccgcctgcgggaaagtcttcggtgactatttatcccggcggaggcacatgagcgttcaccttgtaaagaaacgagttgagtgtaggcagtgtggcaaggccttcaggaaccagtcaacgctgaagacgcacatgcgaagccacacgggggagaaaccgtacgaatgcgatcactgtgggaaggccttcagcataggctccaacctgaatgtgcacaggcggatccacaccggggagaagccctacgaatgccttgtctgcgggaaagccttcagcgaccactcatccctcaggagccacgtgaaaactcaccggggagagaagctctttgtgtcatccgtgtggaaaaggctccag

SEQ ID NO: 6849 - DNA, 1419 bp, Homo sapiens
  source 1..1419: mol_type = genomic DNA
atggaaaccccaacacctttgccgcctgtacccgcctccccgacctgcaacccagccccacggacaatccagatcgagttcccacagcatagctcgtcgctgctggaatctctgaaccgccacaggctagagggaaagttctgtgatgtgtccctcctggtgcagggccgggaacttagggctcataaagcagtgttagctgctgcctctccttacttccatgacaagctgcttctgggggatgcgcctcgtctcactctaccgagtgtcattgaagccgatgccttcgaggggctgctccagctcatttattcagggcgtctccgcctgccactggatgctcttcctgctcatctccttgtggccagtggccttcaaatgtggcaggtagtagatcagtgctcagaaattcttagagaattagaaacttcaggtggtggaatttcagcccgtggaggaaactcctaccatgcccttctttccactacatcctctacaggaggctggtgcattcgctcttcgcctttccagaccccagtacagtcctctgcttctactgaaagccctgcttccactgagagccctgtgggaggggagggaagtgaactgggagaagtgctgcaaattcaggtggaagaagaagaggaggaggaggaagatgatgatgatgaggaccaggggtcagccacactctctcagactcctcagccccagagagtatcaggggtttttccccgtcctcatggaccccacccactgcccatgactgctactccccgaaagcttccagagggtgagagtgcaccacttgagcttcctgcccctcctgcactgccccccaaaatcttctacattaagcaggaacccttcgagcctaaggaggagatatcaggaagcggaactcagcctggaggagcaaaggaggaaaccaaagtgttttctggaggggacactgaagggaatggggagctagggttcttgttgccttcagggccagggccaacatctgggggagggggtccatcctggaaaccagtggatcttcatgggaatgaaatcctgtcagggggtggaggacctgggggagcaggccaggccgtgcatgggcctgtgaagctaggggggacaccccctgcagatggaaaacgctttggttgcctgtgtgggaagcggtttgcagtgaagccaaagcgtgaccggcacatcatgctgaccttcagccttcggccttttggctgtggcatctgcaacaagcgcttcaagctgaagcaccatctgacagagcacatgaagacccatgctggagccctgcatgcctgtccccactgtggccgtcggttccgagtccatgcctgttttctccgccaccgggacctatgcaagggccagggctgggccactgcccactggacttacaag

SEQ ID NO: 6850 - DNA, 1083 bp, Homo sapiens
  source 1..1083: mol_type = genomic DNA
atgacggggaaagcaggggaagcgctgagcaagcccaaatccgagacagtggccaagagtacctcggggggcgccccggccaggtgcactgggttcggcatccaggagatcctgggcttgaacaaggagcccccgagctcccacccgcgggcagcgctcgacggcctggcccccgggcacttgctggcggcgcgctcagtgctcagccccgcgggggtgggcggcatggggcttctggggcccggggggctccctggcttctacacgcagcccaccttcctggaagtgctgtccgacccgcagagcgtccacttgcagccattgggcagagcatcggggccgctggacaccagccagacggccagctcggattctgaagatgtttcctccagcgatcgaaaaatgtccaaatctgctttaaaccagaccaagaaacggaagaagcggcgacacaggacaatctttacctcttaccagctagaggagctggagaaggcattcaacgaagcccactacccagacgtctatgcccgggagatgctggccatgaaaacggagctgccggaagacaggatacaggtctggttccagaaccgtcgagccaagtggaggaagcgggagaagtgctggggccggagcagtgtcatggcggagtatgggctctacggggccatggtgcggcactccatccccctgcccgagtccatcctcaagtcagccaaggatggcatcatggactcctgtgccccgtggctactggggatgcacaaaaagtcgctggaggcagcagccgagtcggggaggaagcccgagggggaacgccaggccctgcccaagctcgacaagatggagcaggacgagcggggccccgacgctcaggcggccatctcccaggaggaactgagggagaacagcattgcggtgctccgggccaaagctcaggagcacagcaccaaagtgctggggactgtgtctgggccggacagcctggcccggagtaccgagaagccagaggaggaggaggccatggatgaagacaggccggcggagaggctcagtccaccgcagctggaggacatggct

SEQ ID NO: 6851 - DNA, 984 bp, Homo sapiens
  source 1..984: mol_type = genomic DNA
atggctgcccacgttggtgcttcccggactccccaagaggtgatggagcattacgtgagcatgtacatccacgggaacctggggaaggcctgcatccccgacaccatccccaaccgcgtgacagaccacacctgtcccagcggaggccccctctcacccagcctcaccaccccgctgcccccgctggacatctctgtggctgagcagcagcagctgggctacatgccgctgcgggatgattacgagatcgagtatgaccaggatgccgagacgctcatcagcgggctctctgtcaactatgatgacgacgacgtggagatcgagctgaagcgcgcccacgtggacatgtacgtgcggaagctgaaagagagacagcggcggaagaacatcgcccgtgactacaatctggtgccagccttcctggggaaggacaagaaggagaaggaaaaggcgctgaagcgcaagatcaccaaggaggagaaggagctgcgcctgaagctgaggccgctgtaccagttcatgtcatgcaaggagtttgatgacctttttgaaaacatgcacaaagaaaaaatgctccgggccaagatccgagaactgcagcggtaccggcgaaacgggatcaccaagatggaagagtcggcagagtacgaggcagcgcggcataaacgggagaagaggaaggagaacaaaaacctagccggctccaaacggggaaaggaggacggcaaagacagcgagttcgccgccattgagaaccttccaggcttcgagctcctgtcagatcgcgagaaggtgctctgcagctctttaaacttgagtccagcccgctacgtgactgtgaagactattataattaaagaccacctccagaagcggcaaggaatcccctccaaaagccgccttcctagctacctggacaaagtcctaaagaaaaggattttgaatttcctcacagaaagcggctggatctccagggacgcgtct

SEQ ID NO: 6852 - DNA, 1689 bp, Homo sapiens; identical to SEQ ID NO: 5737
  source 1..1689: mol_type = genomic DNA

SEQ ID NO: 6853 - DNA, 1587 bp, Homo sapiens
  source 1..1587: mol_type = genomic DNA
atggagcaagaaaaaaaactgttggtctcagattctaacagctttatggagagggagagtttgaaaagccctttcacaggagatacaagtatgaataatttggaaactgttcaccacaataattctaaggcagataaacttaaagagaaaccttcagaatggtctaaaagacatagaccacaacattataagcatgaggatgcaaaagaaatgccactgacatgggttcaagatgagatttggtgtcatgattcctatgagagtgatggcaagtcagagaattggggaaattttatagctaaagaggaggaaaaacccaatcaccaggaatgggactcaggagaacataccaatgcctgtgtccagcagaattcatcctttgtagacagaccctataaatgttccgaatgttggaaaagcttcagtaatagttctcatttgcgtactcaccagaggacccactcaggagaaaagccttataaatgctctgagtgtgcaaaatgtttttgtaacagttctcacctgattcagcatctaagaatgcacacaggagagaagccctaccagtgtggtgaatgtgggaaaagcttcagcaatacctcccatcttattatccatgagagaactcacacgggagagaaaccctacaaatgtcccgagtgtgggaagagattcagcagcagctctcaccttattcagcatcacagatcacatacaggtgaaaaaccatatgaatgttctgtctgcggaaaaggcttcagtcacagctatgtcctaatagaacatcagaggactcacactggagaaaaaccttataagtgccctgattgtgggaagagttttagtcagagttccagcctcattcgccaccagcggacacacacaggtgagaagccctacaaatgtcttgagtgtgaaaaaagctttggttgtaattctactctaataaaacatcagagaatacatacaggagaaaagccttatcaatgtccagaatgtgggaagaattttagtcgtagttcaaaccttattacacaccagaaaatgcacacaggagagaaatcctatgaaagttctgaatatgaggaaagtttgggtcagaactgcaatgtgatagaagaatgcagaatccagttaggagagaaaccatatagatgttgtgaatgtgggaagagttttggccttagctcccatctcattagacatcagagaacacatacaggagaaaaaccttacagatgttctgagtgctggaaaactttcagtcagagttccaccctggtgattcaccaaaggacacatacaggagagaaaccttataaatgtcctgattgtggtgaaagcttcagtcagagctttaaccttatcaggcaccggaggacccacataggggaaaaaccttacaaatgtaccagctgtgagaaatgcttcagcagaagtgcctacctcagtcagcatcggaaaattcacgtagaaaagccttttgagtctcccgacgttggggattttcctcatgaatggacttggaaaaactgttcaggggaaatgcccttcatctcttcattttccgtctcaaattcatcttcc

SEQ ID NO: 6854 - DNA, 2556 bp, Homo sapiens
  source 1..2556: mol_type = genomic DNA
atgaccaagtccctggaatcagtgtcattcaaggacgtaactgtagacttcagtagggatgagtggcaacaattagaccttgctcagaaaagcctgtacagagaagtgatgctggaaaactatttcaacttgatctcagtgggatgtcaagttcccaaaccagaagtcatcttcagcttggaacaagaagagccatgtatgttggatggtgagatccccagtcagagccgtccagatggggacattggttttggacctttacaacagaggatgtctgaagaagtttctttccagtctgagattaatattaatctcttcacaagagatgacccatattccattttagaagaattgtggaaagacgatgaacacacaagaaaatgtggagaaaaccagaacaaacctttaagtcgtgttgtcttcattaacaagaaaacactagctaatgacagcatctttgaatataaggacattggggaaatagttcatgtaaacacacacctggtttcctcaagaaaaagaccccataactgtaactcgtgtggaaagaatttggagcctatcataaccttatataatagaaacaatgcaacagaaaattctgataagactattggagatggtgatattttcactcatttgaattctcatacagaagtgactgcttgtgaatgtaaccaatgtgggaaacctctgcatcataagcaagctctcattcaacaacagaaaattcatactagagagagcctctatttgttttctgactacgtaaatgttttctccccgaagtcacatgcctttgcacatgagagtatttgtgctgaagaaaagcagcatgaatgccatgaatgtgaggcagtcttcactcagaagtcccagcttgatggcagtcagagggtttatgcaggaatatgcactgaatatgagaaggatttttccctcaagtcaaaccgtcagaaaactccttatgaggggaattactataaatgcagtgactatggaagagcctttatccagaagtcagatctgttcagatgccagagaattcattctggagaaaaaccttatgagtacagtgaatgtgagaaaaacctccctcagaattcaaaccttaatatacataaaaaaattcatactggagggaaacactttgaatgtactgaatgtggaaaagctttcacaaggaaatcaacactaagtatgcatcagaaaatccatacaggagaaaaaccttatgtatgtactgaatgtgggaaggcctttatccggaagtcacattttatcacacatgaaagaattcatactggagaaaaaccctatgaatgcagtgactgtgggaaatcctttattaaaaaatcacaactccatgtgcatcagcgaattcacacaggagagaatccctttatatgttcagaatgtgggaaggtcttcactcacaagacaaatctcattatacaccagaaaattcatacaggagaaagaccctatatatgtactgtgtgtggtaaggcctttactgacaggtcaaatctcattaagcaccaaaaaattcatactggagagaaaccttataaatgcagcgactgtggaaaatcattcacctggaagtctcggctcaggatacatcagaagtgtcatactggagagagacattatgaatgcagtgaatgtgggaaagcattcattcagaagtcaacattaagtatgcaccagagaattcatagaggggaaaaaccatatgtttgcactgaatgtggtaaggccttcttccacaaatcccattttattacacatgagagaattcatactggagagaaaccctatgaatgcagtatttgtgggaaatccttcactaagaaatcacagctccacgtacatcagcagattcacacaggagagaaaccctataggtgtgctgaatgtggaaaggcttttactgacagatcaaatctctttacacaccagaaaattcacactggagagaaaccttataaatgtagtgactgtgggaaagccttcactaggaagtcaggtctccatatacatcagcaatcccatactggagaaaggcattatgagtgcagtgaatgtgggaaagcctttgcaagaaaatcaacactaattatgcatcagagaattcatacaggagagaaaccctatatttgtaatgaatgtgggaaatccttcatccagaagtcacacttaaatagacacaggagaattcatactggagagaaaccctatgaatgcagtgactgtggcaagtctttcattaagaaatcacaactccatgagcatcatcgaattcacacaggagagaaaccatatatatgtgctgagtgtggaaaggccttcaccatcagatcaaatcttattaaacaccagaaaattcatactaaacagaaaccctataagtgcagtgacttggggaaagccttaaactggaagccacaactcagtatgcctcagaaatctgacaatggggaagtagagtgctccatgccacaattatggtgtggggactcagaaggtgaccaaggccaactttcttctatc

SEQ ID NO: 6855 - DNA, 1737 bp, Homo sapiens
  source 1..1737: mol_type = genomic DNA
atgaacaaatcccaggaacaagtgtcattcaaggatgtatgtgtggacttcactcaggaagagtggtatctgctggaccctgctcagaagattctatacagagatgtgatcctggaaaattatagcaatcttgtctcagtagggtattgcattactaaaccagaagtgatctttaagatcgagcaaggagaagagccctggatattagaaaaaggattcccaagccagtgccacccagaaaggaaatggaaagttgatgacgtgttagagagcagccaggaaaatgaagatgaccatttttgggagcttctattccacaacaacaaaacagtaagtgtagaaaatggagatagaggaagcaaaactttcaatttgggcacagaccctgtttctttaagaaattatccctataaaatatgtgactcatgtgaaatgaatttgaaaaatatttcgggcttaattattagtaaaaagaactgttccagaaagaagcctgatgagtttaatgtatgtgagaaattgctccttgatattaggcatgagaaaatccctattggagagaagtcttataaatatgatcaaaaaaggaatgccattaattatcaccaggatctcagtcagccaagttttggccaatcttttgagtatagtaaaaatggacaaggcttccatgatgaggcagcattttttacaaataagagatctcagataggagagacagtctgtaaatataacgaatgtggaagaaccttcattgaaagtttaaagctgaatatatctcaaagacctcatttggaaatggagccgtatggatgcagtatttgcgggaagtccttctgcatgaatttaaggtttggacatcagagagctcttacaaaggacaatccttatgaatataatgaatatggggaaatcttctgtgacaattcagctttcattatccatcagggagcttacacaagaaagattctccgtgaatataaagtgagtgacaaaacctgggaaaagtcagctctcttaaaacatcaaatagtacacatggggggaaagtcttatgattacaatgaaaatgggagtaatttcagcaagaagtcacatcttacccagcttcggagagctcacacaggagaaaaaacctttgaatgtggtgaatgtgggaaaaccttctgggagaagtcaaacctcactcaacatcagagaacacacacaggagagaagccctatgaatgtactgaatgtgggaaagccttttgccagaaaccacacctgaccaaccatcagcgaacacatacaggagaaaaaccctatgaatgtaagcaatgtggaaaaacattctgtgtgaagtcaaacctcactgaacatcagagaacacacacaggggagaagccctatgaatgtaatgcatgtgggaaatccttctgccacagatcagccctcactgtgcatcagagaacacacacaggggagaaaccgtttatatgtaatgaatgtggaaaatccttctgtgtgaagtcaaacctcattgtacatcaaagaactcacactggggagaaaccatataagtgtaatgaatgtgggaaaaccttctgtgaaaaatcagctctcactaaacatcagaggactcacacaggggagaagccgtatgagtgtaatgcatgtgggaagacctttagtcagaggtcagtgctcaccaaacatcagagaattcacacaagggtgaaagctctttcaacatcc

SEQ ID NO: 6856 - DNA, 627 bp, Homo sapiens
  source 1..627: mol_type = genomic DNA
atgaaattcaagttacatgtgaattctgccaggcaatacaaggacctgtggaatatgagtgatgacaaaccctttctatgtactgcgcctggatgtggccagcgttttaccaacgaggatcatttggctgtccataaacataaacatgagatgacactgaaatttggtccagcacgtaatgacagtgtcattgtggctgatcagaccccaacaccaacaagattcttgaaaaactgtgaagaagtgggtttgtttaatgagttggcgagtccatttgagaatgaattcaagaaagcttcagaagatgacattaaaaaaatgcctctagatttatcccctcttgcaacacctatcataagaagcaaaattgaggagccttctgttgtagaaacaactcaccaggatagtcctttacctcacccagagtctactaccagtgatgagaaggaagtaccattggcacaaactgcacagcccacatcagctattgttcgtccagcatcattacaggttcccaatgtgctgcttacaagttctgactcaagtgtaattattcagcaggcagtaccttcaccaacctcaagtactgtaatcacccaggcaccatcctctaacaggccaattgtg

SEQ ID NO: 6857 - DNA, 2397 bp, Homo sapiens
  source 1..2397: mol_type = genomic DNA
atgccatctcagaactatgaccttccccagaagaagcaggagaaaatgaccaagtttcaggaggctgtgacattcaaggatgtggctgtggtcttctccagggaggaactgcgactgctcgatcttacccagaggaagctgtaccgagatgtcatggtggagaacttcaagaacctggttgcagtggggcatcttcccttccaaccagatatggtatcccaattggaagcagaagaaaagctttggatgatggaaacagaaacccaaagaagcagcaagcatcaaaataagatggaaacactccaaaaatttgcattaaaatacctttcaaatcaagagctgtcctgctggcaaatctggaaacaggttgcaagtgaattaaccaggtgtcttcaggggaagagttcccagttattacaaggtgactctattcaggtttctgaaaatgagaacaatataatgaaccctaaaggagatagctctatttatattgaaaatcaagagtttccattttggagaacccagcattcttgcgggaatacatatctgagtgagtcacagattcagagtagaggtaagcaaattgatgtgaaaaataacctgcaaatacatgaagacttcatgaagaaatcaccatttcatgagcatattaaaactgacacagaaccaaaaccctgcaaaggtaatgaatatggcaaaatcattagtgatggctccaaccagaaattacccttaggagagaaaccccatccatgtggtgagtgtggaaggggcttcagttatagcccaaggcttccccttcatccgaatgttcacacaggagaaaaatgcttcagtcaaagctcacatctgcgaactcatcagagaattcacccaggagagaaactcaatagatgtcatgaatctggtgattgcttcaataagagctcttttcattcttatcaatctaatcatacaggagagaagtcttatagatgcgacagttgcggcaagggattcagtagcagcacgggtcttatcattcattacagaactcatactggagagaaaccctataaatgcgaggaatgtggtaaatgctttagtcaaagttcaaattttcagtgccatcagagagtccacactgaagaaaaaccatacaaatgcgaagagtgtggtaagggcttcggttggagtgttaatctccgtgttcaccagagggtccacaggggtgagaagccctataaatgtgaggaatgtggtaagggcttcactcaggctgcacattttcacatccatcagagagtccacactggagagaaaccctacaagtgtgatgtgtgtggtaagggcttcagccacaattcaccattaatatgccatcggagagtccacacaggagagaagccatacaagtgtgaggcgtgtgggaaaggctttacccgtaatacagatctgcatattcatttcagagttcacacgggagagaaaccctataaatgtaaggagtgtggtaagggcttcagtcaggcttcaaatcttcaagtccatcagaatgtccacactggggagaaacgattcaagtgtgaaacgtgtgggaagggcttcagtcagtcctcaaagcttcaaacccatcagcgagtccacactggagagaaaccatatagatgtgatgtgtgtggtaaggacttcagttatagttcaaatcttaaactacaccaagtaattcacactggagaaaaaccatataaatgtgaggaatgtgggaagggcttcagttggagatcaaatcttcatgcacatcaaagagttcactcaggagaaaaaccctataaatgtgagcagtgtgataagagcttcagtcaggccatagattttcgggtacatcagagagtccatactggagagaagccatacaaatgtggtgtctgtggtaagggcttcagtcagtcctctggtcttcaatcccatcagagagtccacacgggggaaaagccatacaaatgtgatgtgtgtggaaagggctttagatacagttcgcagtttatataccatcagagaggccacactggagaaaaaccttacaaatgtgaagagtgtgggaaaggctttggtaggagcttgaatcttcgccatcatcagagggtccacacgggagagaaaccccatatatgtgaggagtgtggtaaggccttcagtctcccctcaaatcttcgagtccacctgggtgttcacaccagggaaaaactctttaaatgtgaagagtgtggtaaaggcttcagtcagagtgcacgtcttgaagcccatcagagagtccacactggagaaaaaccatacaaatgtgacatatgtgataaggacttccgtcaccgttcacgtcttacatatcatcagaaagtccatactggtaaaaagctt

SEQ ID NO: 6858 - DNA, 1404 bp, Homo sapiens
  source 1..1404: mol_type = genomic DNA
atgggtccagtcatgcctcccagtaagaagccagaaagctcaggaattagtgtctccagtggactgagtcagtgttacgggggcagcggtttctccaaggcccttcaggaagacgatgacctcgacttttctctgcctgacatccgattagaagagggggccatggaagatgaagagctgaccaacctgaactggctgcacgagagcaagaacttgctgaagagctttggggagtcggtcctcaggagtgtcagccccgtccaggacctggacgatgacacccccccatcccctgcccactctgacatgccctacgatgccaggcagaaccccaactgcaaacccccctactccttcagctgcctcatatttatggccatcgaggactctccaaccaagcgcctgccagtgaaggatatctacaactggatcttggaacattttccgtattttgcaaatgcacctactgggtggaaaaactcagtgagacacaatttatcattgaataagtgttttaagaaagtggacaaagagaggagtcagagtattgggaaagggtcgttgtggtgcatagacccagagtatagacaaaatctaattcaggctttgaaaaagacaccttatcacccacacccacacgtgttcaatacacctcccacctgtcctcaggcatatcaaagcacatcaggtccacccatctggccgggcagtaccttcttcaagagaaatggagcccttctccaagttcctccaggagtgatccaaaatggagcgcgggtcctgagccgagggctgtttcctggcgtgcggccgctgccaatcactcccattggggtgacagcggccatgaggaatggcatcaccagctgccggatgcggactgagagtgagccatcttgtggctccccagtggtcagcggagaccccaaggaggatcacaactacagcagtgccaagtcctccaacgcccggagcacctcgcccaccagcgactccatctcctcctcctcctcctcagccgacgaccactatgagtttgccaccaaggggagccaggagggcagcgagggcagcgaggggagcttccggagccacgagagccccagcgacacggaagaggacgacaggaagcacagccagaaggagcccaaggattctctgggggacagcgggtacgcatcccagcacaagaagcgccagcacttcgccaaggccaggaaggtccccagcgacacactgcccctcaaaaagagacgcaccgaaaagccccccgagagcgatgatgaggagatgaaagaagcggcagggtccctcctgcacttagcagggatccggtcctgtttgaataacatcaccaatcggacggcaaaggggcagaaagagcaaaaggaaaccacaaaaaat

SEQ ID NO: 6859 - DNA, 1752 bp, Homo sapiens
  source 1..1752: mol_type = genomic DNA
atggctctttctcagggactgtttacattcaaggatgtggccatagaattctctcaagaggagtgggagtgcctggaccctgcccagagggccttgtacagggacgtgatgttggagaactacaggaacctgctttctctcgatgaggataacatccctccagaagatgatatttctgttggatttacaagcaagggattatcaccaaaggaaaataataaagaggaattataccatctggtgatattagaaagaaaggaaagccatggcatcaacaattttgacctcaaggaagtctgggaaaatatgcctaagtttgacagcctgtgggactatgatgtaaaaaattacaaaggaatgcctttgacctgtaacaaaaatctcactcacagaaaagatcaacaacataataaatcctcaatacatttctctttaaagcagagtgtttctataagagatagtgcacaccagtatttcatccatgacaagccatttataaggaatttgttaaaactgaaaaataacataaggtatgccggaaacaaatacgtgaagtgttttgaaaataaaattggattaagcttacaggcacagctggctgaactacagagatttcaaactggggagaaaatgtatgaatgtaatccagttgagaagtctatcaatagttcctcagtttcaccacttcctccttgtgtcaaaaacatttgtaataaatataggaagattttgaaataccctttattacatacacagtatgggagaacacacattagagaaaaatcatacaagtgtaatgactgtggaaaggcttttagcaaaagttcgaacctcactaatcatcagagaattcactctggacagagaccttacaaatgtaacgagtgtggcaaagcctttaaccagtgttcgaacctcactaggcatcagagagtccatacaggagagaaaccatatcaatgtaatatatgtggcaaggtctgtagtcaaaattcaaatcttgcaagtcatcagaggatgcatactggagagaaaccttacaaatgtaatgaatgtggtaaggcatttatccagcgttcacacctttggggtcatgaaagaattcatactggagagaaaccttacaaatgtaatgaatgtgacaaagcctttgctgaacgttcaagccttacccaacataagagaatccatactggagagaagccttacatatgtaatgagtgtggcaaagcttttaagcagtgctcacatctcactaggcatcagaatatacatcctggagagaaaccacacaaatgtaatgtgtgtggcagggcttttatccaaagttcaagtcttgtggaacatcagagaattcacactggagaaaaaccttacaaatgtaataaatgtgataaagcttttatcaaacgttcacacctttggggtcatcagagaactcatactggagagaaaccttacaaatgtactgaatgtggcaaagcctttactgaacgttcaaatcttactcagcataagaaaatccatactggagagaaaccttacaaatgtactgaatgtggcaaagcttttacccaatttgcaaacctcactagacaccagaaaatacacattgaaaagaaacattgtaaacataatatacatggtaatgctttattccaaagttcaaaccttggagatcatcaaaaaagttataatagagaaaaacatatcaaatataatgagacaaaaattaagtattcaagctgtacc

SEQ ID NO: 6860 - DNA, 1554 bp, Homo sapiens
  source 1..1554: mol_type = genomic DNA
atggctgtggccctgggttgtgcaatccaggcatccttgaatcaaggctctgtgtttcaagaatatgatactgactgtgaagttttccgtcagcgcttcaggcagttccagtacagagaagcagctgggcctcatgaagcatttaacaaactctgggagctttgctgtcaatggctgaagccaaagatgcgctctaaggaacaaatcctggagctgctagtgttggagcaattcctaactatcctgcccacagagatagagacctgggtgagggagcactgcccagagaatagagaaagagttgtgtcactgatagaagacttacagagagaacttgagataccagagcagcaggttgatatgcatgacatgctcttggaagaactggcaccagtgggaacggcacacataccaccaaccatgcacctagagtcacctgcactccaggtaatgggacctgcccaggaggccccagtagcagaggcatggatcccacaggcagggccaccggagctgaactatggtgctactggagaatgtcagaactttctggaccctggatatccattaccaaaacttgacatgaacttctcattggagaatagagaagagccatgggtgaaggaattacaggattctaaagaaatgaaacaattacttgattccaagataggttttgagatcgggatagaaaatgaagaagatacttcaaaacagaaaaaaatggagactatgtatccatttattgtaactttagaggggaatgctctccagggtcccattttgcaaaaagactatgtacagttagaaaatcaatgggaaacccccccagaggatttacagacagatttagcaaaactggtagatcagcagaaccccactctgggagagacacctgagaactccaacttggaagaacctctcaaccctaaaccccacaagaaaaagagtccaggagagaaacctcaccgatgtcctcagtgtggaaaatgttttgctcggaagtcacaacttactgggcatcagagaattcattcaggagaagaacctcacaaatgccctgaatgtgggaaaagattccttcgtagttcagacctttatagacaccaacgacttcatacaggggagagaccctatgaatgcactgtatgtaaaaagcgattcactcggcggtcacatcttatagggcaccagagaacccattctgaagaagaaacatataaatgtcttgagtgtgggaaaagtttttgtcatggatcaagtcttaaaagacatctgaaaactcatacaggtgaaaaacctcatagatgtcataattgtgggaaaagttttagtcgactgacagctcttactttgcaccagagaacgcatactgaagagagaccttttaaatgtaattattgtgggaaaagttttagacagagaccaagcctcgttattcatttaagaatccacacaggggagaagccatacaagtgtactcattgttctaaaagcttcagacagagagccggccttattatgcaccaggtcactcactttagaggacttatt

SEQ ID NO: 6861 - DNA, 2073 bp, Homo sapiens
  source 1..2073: mol_type = genomic DNA
atgatggctgaaaacaatttaaaaatgctaaagattcaacagtgtgtggtagccaacaaactacctagaaacaggccatatgtttgcaatatttgttttaagcactttgaaacaccatcaaaattagctaggcactatctcattcatactggtcaaaagccatttgaatgtgatgtgtgtcataaaacctttagacaactagttcatctggagaggcatcaactaactcatagtctgccttttaaatgtagtatttgtcagcgtcactttaaaaatctgaagacatttgtgaagcaccaacaacttcacaatgaaacctatcagaataatgttaaacaggtcagaagattgctggaggccaagcaagaaaagtcaatgtatggagtgtataatacttttaccacagaggaaagatgggcattacacccgtgctctaagtctgatcccatgtatagcatgaaaagaagaaagaatattcatgcatgtacaatctgtggcaagatgtttccatcacagtcaaaacttgataggcatgtacttattcatactggtcagaggccttttaaatgtgtcttgtgtactaaatcttttcgacagtcaactcacttaaaaatccaccaacttacacattcagaagaaagaccttttcaatgttgtttttgtcaaaaaggatttaagattcaaagcaaacttctgaagcataaacaaatccatactaggaataaggcttttcgggctcttttattaaagaagaggcgtacagaatctcgccccctgcctaataagttaaatgcaaatcagggtggttttgaaaatggtgagattggtgaatctgaggagaataatccacttgatgtccactcaatttatattgtcccttttcaatgtccaaagtgtgaaaagtgttttgaatcagagcagattctcaatgaacacagctgttttgctgctagaagtggcaaaattccaagcaggttcaaaagaagctacaactataaaaccattgttaaaaaaatcttggccaagcttaagcgtgctaggagtaaaaaattagataactttcaatctgagaaaaaagtttttaaaaagagtttcttgagaaattgtgatcttatttctggtgagcagagctctgaacaaacccagagaacatttgtgggttctcttggcaaacatggaacatataaaacaattggcaatagaaagaagaaaacattgactttgccattttcttggcaaaatatgggaaaaaatttgaaaggcatccttacgacagaaaacatattaagcattgataattcagtgaataagaaagacttgtcaatctgtggttcatcaggtgaggaattctttaataactgtgaggtacttcagtgtggtttttcagttccaagggaaaacatacgtactagacataagatatgtccttgtgacaaatgtgagaaggtatttccttctatatccaaactaaaaagacactatttaattcatactggacagaggccctttggctgtaatatttgtgggaaatcttttagacagtcagctcacttaaaaagacatgaacagactcataatgaaaagagtccttatgcatctctttgccaagtagaatttggaaacttcaacaatctttctaatcattcaggtaataatgttaactataatgcttcccaacaatgtcaggctcctggtgttcaaaaatacgaggtctcagagtcagatcaaatgtcaggagttaaggcagagtcacaggattttattcctggtagcaccgggcaaccctgtcttcctaatgtacttttggaatcagagcaaagcaatcctttttgcagttattcagagcatcaggagaaaaatgatgtcttcctgtaccgatgcagtgtttgtgctaaaagtttccgatctccatctaaactggaaagacactacctaattcatgcagggcagaaaccatttgaatgctcagtttgtggcaaaacattcagacaggctcctcactggaagagacatcagcttactcactttaaagaacgaccacaagggaaagtggttgccttagattcggttatg

SEQ ID NO: 6862 - DNA, 990 bp, Homo sapiens
  source 1..990: mol_type = genomic DNA
atgcagcagcagcctctgcccgggcctggcgcccccacaactgagccaaccaagcctccctacagctacatcgcccttattgctatggccatccagagctcaccggggcagcgggccaccctcagtggcatctaccgctacatcatgggccgattcgccttctaccgccacaaccggcccggctggcagaacagcatccgccacaacctgtcactcaacgagtgctttgtcaaggtgccccgcgatgaccgcaagccaggcaagggcagctactggacgctggaccctgactgccacgacatgtttgagcacggcagcttcctacgccgccgccgccgcttcacccggcagacaggtgctgagggcacccggggccccgccaaggcacgccgtggacccctcagggcgaccagccaggacccaggagtccccaacgccacgaccggcaggcagtgctcattcccaccagagctgccagatcccaagggcctaagctttgggggtctggtgggggccatgccagccagtatgtgcccagcaaccactgatggcaggcctcggccacccatggagcccaaagagatttccacgcccaagcctgcatgcccaggggagctccccgtggccacctcatcttcctcatgcccagcgtttggctttcctgccggcttctcagaggctgagagttttaataaggcccctacgcccgtcttgtccccggaatcaggcatcgggagcagctaccagtgtcggctgcaggcactgaatttttgcatgggggctgacccaggccttgagcacctcttggcctcagcagccccctcccctgcaccacccacccctccaggctcactccgggccccactgcccctgccaactgaccacaaggaaccctgggttgcaggtggcttccctgtccagggaggctccggctacccattggggctgaccccctgcctataccggacgccaggcatgttcttctttgag

SEQ ID NO: 6863 - DNA, 2586 bp, Homo sapiens
  source 1..2586: mol_type = genomic DNA
atgaactccatgaaccccatgaaacctgccctgccccctgcgccacacggtgatggttcattcgcatatgagtctgtgccttggcaacaaagcgccactcagccggctggatcgctgtctgtggtcactactgtgtggggagttggcaacgcgacacagagccagtgcctgggacagcaggcgtttgctgaaggcggcgccaacaagggctacgtgcagcaaggcgtgtacagccgcgggggctaccctggggcccccggcttcaccaccgggtatgcaggcggcccggggggcctgggcctcccctcacatgctgcaagaccctccactgacttcacgcaagcggcagctgctgcagctgtggctgctgcggcagccactgccaccgccacagccacagccaccgtggctgctctccaggagaagcagagccaggagctgagccagtatggagcgatgggggccggacagtcttttaacagccagtttctgcagcatggaggtccccgggggcctagtgtccccgctggcatgaaccctactggcataggaggggtaatgggcccctctggcctctcccccttggctatgaaccccacccgggcagcaggaatgacacccttgtatgcagggcagcgtctgccccaacatgggtatcctgggcctccccaggcccagccactgccccgacagggggtcaagagaacctactctgaggtgtatccagggcagcagtatctgcaaggaggccagtatgcacccagcaccgcccagtttgcgcccagccctgggcagccccctgccccctccccttcctaccctgggcacaggctgcccctgcagcagggcatgacccagtccctgtccgtgcctggccccacgggactgcattataagcctacccgttccatcccgggctatcccagttccccactgccagggaaccccacgccacccatgaccccaagcagcagcgtcccttacatgtcaccaaaccaagaggtcaagtctcccttcttgcctgatctcaagcccaacctcaactccttgcactcatcgccctctggaagcgggccttgtgacgagttgcggctgaccttccctgtgcgcgatggggtggtcctggagcccttccgcctgcagcacaacctggctgtaagcaaccatgtcttccagctgcgagactcagtctacaagaccctgataatgaggcctgacctggagctgcaattcaagtgctaccaccacgaggaccggcagatgaacaccaactggccagcctcggtgcaggtcagcgtcaatgccacgccgctcaccatcgagcgtggcgacaacaagacctcgcacaagccactctacctgaagcatgtgtgccagccaggccgcaacaccatccagatcaccgtcaccgcctgctgctgctcccacctcttcgtgctgcagctagtgcaccgcccatccgtccgctcggtgctgcagggcctcctcaaaaagcgcctcctgcctgctgagcactgcatcaccaagataaagcggaacttcagcagcggcaccatccctggcacccctgggcccaacggagaggacggggtggagcagacagctatcaaggtgtccctgaagtgccccatcaccttccgcaggatccagctccctgcccgaggtcatgactgtcgccacatacagtgctttgacctggagtcgtacctgcagctcaactgtgagcgggggacttggaggtgtcctgtgtgcaacaagacagctttgctggagggcctggaggtggaccagtacatgctgggcatcctgatttacattcagaactctgactatgaggagatcaccatcgaccccacgtgcagctggaagccagtgcccgtgaagcctgacatgcacatcaaggaggagccggatgggccagcactgaagcgctgccgcaccgtgagccccgcccacgtgctcatgcccagcgtgatggagatgatcgccgccctgggccccggcgctgccccctttgcccccctgcagcccccctcagtccctgcccccagcgactaccctggccagggttccagcttcctggggcctggaactttccctgagtccttcccacccaccacgcccagcaccccaacccttgctgagttcaccccgggaccaccccccatctcctaccagtctgacattcccagcagcctcctgacttcagagaagtctaccgcctgcctcccaagccagatggcaccagcaggtcacctggaccccactcacaatcctgggacaccaggactacacacctccaaccttggggcccctccaggtccccagctgcaccattcaaaccctcccccagcgtcccggcagtccttgggccaagcgagcttaggacctacgggtgaactggccttcagtcctgccacaggcgtgatggggccccccagcatgtctggagccggggaggccccagaaccagctctggacctgctcccggaactgaccaaccctgatgagctactgtcctacttgggcccacccgacctccctacgaacaacaatgacgacctgctttctctgtttgagaacaac

SEQ ID NO: 6864 - DNA, 645 bp, Homo sapiens
  source 1..645: mol_type = genomic DNA
atgggcaaaggagatcctaagaagccgagaggcaaaatgtcatcatatgcattttttgtgcaaacttgtcgggaggagcataagaagaagcacccagatgcttcagtcaacttctcagagttttctaagaagtgctcagagaggtggaagaccatgtctgctaaagagaaaggaaaatttgaagatatggcaaaagcggacaaggcccgttatgaaagagaaatgaaaacctatatccctcccaaaggggagacaaaaaagaagttcaaggatcccaatgcacccaagaggcctccttcggccttcttcctcttctgctctgagtatcgcccaaaaatcaaaggagaacatcctggcctgtccattggtgatgttgcgaagaaactgggagagatgtggaataacactgctgcagatgacaagcagccttatgaaaagaaggctgcgaagctgaaggaaaaatatgaaaaggatattgctgcatatcgagctaaaggaaagcctgatgcagcaaaaaagggagttgtcaaggctgaaaaaagcaagaaaaagaaggaagaggaggaagatgaggaagatgaagaggatgaggaggaggaggaagatgaagaagatgaagatgaagaagaagatgatgatgatgaa

SEQ ID NO: 6865 - DNA, 1770 bp, Homo sapiens
  source 1..1770: mol_type = genomic DNA
atgattaagttccaggaaagggtgacattcaaggatgtggctgttgtcttcaccaaggaagagctggcactattggataaagcccagataaacctgtaccaagatgtgatgctggaaaacttcaggaacctcatgttagtgagagacgggattaaaaacaacattttgaatcttcaggcaaaggggttaagttacctttcgcaagaagtgcttcattgctggcagatttggaaacaaaggatccgggatttaactgtgagtcaggattatatcgtgaaccttcaagaagagtgttccccacatttagaagatgtttccctcagtgaagagtgggcaggcatttctcttcagatttctgaaaatgaaaactatgtagtaaatgccattatcaaaaatcaagatatcacagcatggcaaagcctgacacaggttcttaccccagaatcgtggaggaaagccaacataatgaccgagccccagaactctcagggaagatataagggaatttacatggaagagaaattgtacagacgtgctcagcatgatgacagcctcagttggacctcatgtgatcatcatgagtcccaagaatgtaaaggagaggaccctggtagacatcccagctgtgggaaaaacttgggtatgaaatcaacggttgaaaaacgtaatgcggcccatgtattaccacagcctttcccatgtaataactgtggggtggcctttgcagatgatacagatcctcatgtccatcacagcactcacctaggagaaaaatcttataaatgtgaccagtatggaaagaactttagtcagagccaagatcttatcgttcattgtaaaactcactctggcaagactccctatgaattccacgaatggcctatgggctgcaaacagagctcagaccttcccagatatcagaaagtctcctcaggagacaaaccctacaaatgtaaagaatgtggcaagggcttcaggcgcagctcttcccttcacaaccatcatcgagtccacacaggggagatgccctacaaatgcgatgaatgtgggaaagggtttggatttaggtcacttctttgtattcatcagggagtacacacagggaaaaagccctataaatgtgaagagtgtgggaagggctttgatcagagctccaaccttcttgtccatcagagagtccacactggagagaagccctacaaatgcagtgagtgtggcaagtgctttagttcaagctccgttcttcaagtccactggaggtttcacacaggggagaaaccatataggtgtggtgagtgtggaaagggcttcagccaatgtacacaccttcacattcaccagagagtccacacaggggagaaaccatacaaatgcaatgtgtgtggaaaggattttgcgtatagctctgttcttcacactcatcagagagttcacactggagaaaaaccatataaatgtgaagtgtgtggaaagtgcttcagttacagttcatattttcacttacatcaaagagatcacatcagagagaaaccatataaatgtgatgagtgtggtaaaggcttcagccggaattcagatcttaatgttcacctcagagtccacacaggagagaggccctataagtgtaaggcatgtggtaagggcttcagtcgtaattcatacctccttgcccatcagagagtgcatatagatgagacacagtacacacactgtgagcgtggaaaggaccttctgactcatcaaagactacatgagcagagagaaacatta

SEQ ID NO: 6866 - DNA, 717 bp, Homo sapiens
  source 1..717: mol_type = genomic DNA
atgggcctaatctggctgctactgctcagcctgctggagcccggctggcccgcagcgggccctggggcgcggttgcggcgcgatgcgggcggccgtggcggcgtctacgagcaccttggcggggcgccccggcgccgcaagctctactgcgccacgaagtaccacctccagctgcacccgagcggccgcgtcaacggcagcctggagaacagcgcctacagtattttggagataacggcagtggaggtgggcattgtggccatcaggggtctcttctccgggcggtacctggccatgaacaagaggggacgactctatgcttcggagcactacagcgccgagtgcgagtttgtggagcggatccacgagctgggctataatacgtatgcctcccggctgtaccggacggtgtctagtacgcctggggcccgccggcagcccagcgccgagagactgtggtacgtgtctgtgaacggcaagggccggccccgcaggggcttcaagacccgccgcacacagaagtcctccctgttcctgccccgcgtgctggaccacagggaccacgagatggtgcggcagctacagagtgggctgcccagaccccctggtaagggggtccagccccgacggcggcggcagaagcagagcccggataacctggagccctctcacgttcaggcttcgagactgggctcccagctggaggccagtgcgcac

SEQ ID NO: 6867 - DNA, 810 bp, Homo sapiens
  source 1..810: mol_type = genomic DNA
atgtggaacagtggattcgaaagctatggcagctcctcatacgggggagccggcggctacacgcagtccccggggggctttggatcgcccgcaccttctcaagccgaaaagaaatcaagagcccgagcccagcacattgtgccctgtactatatctcagctgctttctgccactttggttgatgaagtgttcagaattgggaatgttgagatttcacaggtcactattgtggggatcatcagacatgcagagaaggctccaaccaacattgtttacaaaatagatgacatgacagctgcacccatggacgttcgccagtgggttgacacagatgacaccagcagtgaaaacactgtggttcctccagaaacatatgtgaaagtggcaggccacctgagatcttttcagaacaaaaagagcctggtagcctttaagatcatgcccctggaggatatgaatgagttcaccacacatattctggaagtgatcaatgcacacatggtactaagcaaagccaacagccagccctcagcagggagagcacctatcagcaatccaggaatgagtgaagcagggaactttggtgggaatagcttcatgccagcaaatggcctcactgtggcccaaaaccaggtgttgaatttgattaaggcttgtccaagacctgaagggttgaactttcaggatctcaagaaccagctgaaacacatgtctgtatcctcaatcaagcaagctgtggattttctgagcaatgaggggcacatctattctactgtggatgatgaccattttaaatccacagatgcagaa

SEQ ID NO: 6868 - DNA, 480 bp, Homo sapiens
  source 1..480: mol_type = genomic DNA
atgagcgataacgatgacatcgaggtggagagcgacgaagagcaaccgaggtttcaatctgcggctgacaaacgggctcatcataatgcactggaacgaaaacgtagggaccacatcaaagacagctttcacagtttgcgggactcagtcccatcactccaaggagagaaggcatcccgggcccaaatcctagacaaagccacagaatatatccagtatatgcgaaggaaaaaccacacacaccagcaagatattgacgacctcaagcggcagaatgctcttctggagcagcaagtccgtgcactggagaaggcgaggtcaagtgcccaactgcagaccaactacccctcctcagacaacagcctctacaccaacgccaagggcagcaccatctctgccttcgatgggggctcggactccagctcggagtctgagcctgaagagccccaaagcaggaagaagctccggatggaggccagc

SEQ ID NO: 6869 - DNA, 288 bp, Homo sapiens
  source 1..288: mol_type = genomic DNA
atgagcgataacgatgacatcgaggtggagagcgacgaagagcaaccgaggtttcaatctgcggctgacaaacgggctcatcataatgcactggaacgaaaacgtagggaccacatcaaagacagctttcacagtttgcgggactcagtcccatcactccaaggagagaagctctatttcctcttttggaaattgtgtactcctgtccttcatcgtcaaagtttgatgcagaaatgccacaccttcatttcaagctaccaagtgcacaagaaaaaagaatgcaagatt

SEQ ID NO: 6870 - DNA, 1263 bp, Homo sapiens
  source 1..1263: mol_type = genomic DNA
atggcggagagctggctgcgcctctcgggagccgggccggcggaggaggccgggccggagggcggcctggaggagcccgacgccctggatgacagcctgaccagcctgcagtggctgcaggaattctccattctcaacgccaaggcccccgccctgcccccggggggcaccgacccccacggctaccaccaggtgccaggttcagcggcgcccgggtcccccctggcggccgaccccgcctgcctggggcagccacacacgccgggcaagcccacgtcgtcgtgcacgtcgcggagcgcgcccccggggctgcaggccccaccccccgacgacgtggactacgccaccaatccgcacgtgaagcctccctactcgtatgccacgctcatctgcatggccatgcaggccagcaaggccaccaagatcaccctgtcggccatctacaagtggatcacggacaacttctgctacttccgccacgcagatcccacctggcagaattcaatccgccacaacctgtctctgaacaagtgcttcatcaaagtgcctcgggagaaggacgaaccaggcaaggggggcttctggcgcattgacccccagtacgcggagcggctactgagcggcgctttcaagaagcggcgactgccccctgtccacatccacccagcctttgcccgccaggccgcgcaggagcccagcgctgtcccccgggccgggccgctgacggtgaataccgaggcccagcagctgctgcgggagttcgaggaggccaccggggaggcgggctggggtgcaggcgagggcaggctggggcataagcgcaaacagccgctgcccaagcgggtggccaaggtcccgcggccccccagcaccctgctgcccaccccggaggagcagggtgagctggaacccctcaaaggcaactttgactgggaggccatcttcgacgccggcactctgggcggggagctgggtgcactggaggccctggagctgagcccgcctctgagccccgcctcacacgtggacgtggacctcaccatccacggccgccacatcgactgccctgccacctgggggccttcggtggagcaggctgccgacagcctggacttcgatgagaccttcctggccacatccttcctgcagcacccctgggacgagagcggcagtggctgcctgcccccggagcccctctttgaggctggggatgccaccctggcctccgacctgcaggactgggccagcgtgggggccttcttg

SEQ ID NO: 6871 - DNA, 3852 bp, Homo sapiens
  source 1..3852: mol_type = genomic DNA
atgcataagaagagggttgaagagggggaggcctcagacttctcgctggcctgggattcctccgtgacagcagcaggaggcctagaaggagagccagagtgcgatcagaaaaccagccgtgcgctggaagacaggaacagcgtgacaagtcaagaggagagaaatgaggatgatgaagacatggaggatgaatcaatttacacctgcgatcactgtcagcaggacttcgagtctctggcagacctgacggaccaccgggcccaccgctgtcctggagatggtgatgacgacccacaactctcctgggtggcctcgtctccctccagcaaggatgttgcgtcacccacgcagatgatcggagatggttgtgacctcggcctcggcgaggaggaagggggcacgggcctgccatacccttgccagttctgcgacaagtccttcatccgcttgagctacttgaagaggcacgagcagatccacagcgacaagctgccgttcaagtgcacctactgcagccgcctcttcaagcacaagaggagccgcgaccggcacatcaagctgcatacgggcgacaagaagtatcactgccacgagtgcgaggcagccttctcccgcagcgaccacctcaagatccacctgaagacccacagctccagcaagcccttcaagtgcactgtgtgcaagcgcggcttctcctccaccagctcgctgcagagccacatgcaggcccacaaaaagaacaaggagcatctggccaagtcggagaaggaagccaagaaggacgacttcatgtgcgactactgcgaggacaccttcagccagacggaggagctggagaagcacgtgctcacccgccacccgcagctgtccgagaaggcggacctgcagtgcattcactgccctgaggtcttcgtcgacgagaacacactgctcgcccatatccaccaagcccacgccaaccagaaacacaagtgccccatgtgccctgagcagttctcctcagtggaaggtgtctactgccacctggacagccaccggcagcccgactccagcaaccacagtgtcagtcccgaccctgtactgggcagcgtggcctccatgagcagcgccacacccgactccagcgcctctgtggagcgtggctccaccccggactccaccttgaagccgctgcgggggcagaagaagatgcgggatgacgggcagggctggaccaaggtggtctatagctgcccctattgttccaagcgggactttaacagcctggccgtgctggagatccacctgaagaccatccacgcggacaagccccagcagagccacacatgtcagatctgcctggactccatgcccaccctctacaacctcaacgagcacgttcgcaagctgcacaagaaccatgcctaccctgtgatgcagtttggcaacatctctgccttccactgcaactactgccccgagatgttcgccgacatcaatagcctgcaggagcacatccgcgtctcccactgcggccccaacgccaacccctctgacggtaataatgctttcttctgcaaccagtgctccatgggtttccttactgagtcctccctcaccgagcacatccagcaggcccactgcagtgtgggcagtgccaaactagagtctccggtggtgcagcccacgcagtccttcatggaggtctattcctgcccctactgcaccaactcccccatctttggctccatcctgaaactcaccaagcacatcaaggagaaccacaagaacattccactggcccacagcaagaagtccaaggccgagcagagcccagtctcgtccgatgtggaggtgtcttccccgaagcggcagcggctctcagcaagcgccaactccatctccaatggggagtatccttgtaatcaatgcgacctcaagttctccaactttgagagcttccagacccacctgaagctgcacctggagctgctgctgcggaagcaagcgtgcccccagtgcaaagaggactttgactcccaggagtccctcctgcagcacctgacagtgcattacatgaccacgtcgacccactatgtgtgcgagagctgcgacaagcaattttcctcggtggatgacctgcagaagcacctgctggacatgcacacctttgtgttgtaccactgcaccctgtgtcaggaggtcttcgactccaaggtgtccatccaggtgcacctggcggtgaagcacagcaatgagaagaagatgtaccgctgcacggcctgcaactgggacttccgcaaggaggctgacctgcaggtgcacgtcaaacacagccacctgggcaacccggccaaggctcacaagtgcatcttctgtggggagaccttcagcaccgaggtggagctgcagtgccacatcaccacacacagcaagaagtataactgtaagttctgcagcaaggccttccacgccatcatcctgctggagaagcacctgcgggagaagcactgtgtgtttgatgctgcgaccgagaacggcacggccaatggggtacccccaatggccaccaagaaagctgagcctgctgacctgcagggcatgctgcttaagaaccctgaggcacctaacagccatgaggccagcgaggatgacgtggacgcgtcggagcccatgtacggctgtgacatctgcggggcggcctacaccatggaggtgctgctgcagaatcaccggctgcgggaccacaatatccggccgggcgaggatgatggctcacgcaagaaggctgagtttatcaagggcagtcacaagtgcaacgtttgttcacggactttcttctcggagaacgggctacgggagcacctgcagacgcaccggggccctgccaagcactacatgtgtcccatctgtggtgagcgcttcccttcgctgctgacgctcaccgaacacaaggtgacccacagcaagagcctggacacgggcacctgtcgcatctgcaagatgcccctgcagagcgaggaggagtttattgagcactgccagatgcaccctgacctgcgcaactcactcacgggcttccgctgtgtggtctgcatgcagacagtcacttccacgcttgagctcaagatccatggcaccttccacatgcagaagctggcgggcagctcagcggcgtcctcccccaatggccaggggctgcagaagctctacaagtgcgccctgtgcctcaaggagttccgcagcaagcaggacctggtgaagcttgacgtcaatgggctgccctacggcctctgcgccggctgcatggcccgcagcgccaacggacaggtgggtggcctggccccgcccgagcccgccgaccggccctgtgccggcctccgttgccccgagtgcagtgtcaagtttgagagtgccgaagacctggagagccacatgcaggtggaccaccgtgacctcacgccggagaccagtgggccccggaaaggcacccagacatcgccagtgccccggaaaaagacataccagtgcatcaagtgccagatgaccttcgagaacgagagagagatccaaatccacgttgccaaccacatgattgaggaaggcatcaaccacgagtgtaagctgtgcaaccagatgttcgactccccggccaagctcctctgtcacctcattgagcacagcttcgagggcatgggcggcaccttcaaatgccccgtgtgtttcacagtcttcgtccaggccaacaagttgcagcagcacatctttgccgtgcacgggcaggaggacaagatctacgactgctcacagtgccctcagaagttcttcttccagaccgagctgcagaaccacacgatgagccagcacgcacag

SEQ ID NO: 6872 - DNA, 1041 bp, Homo sapiens
  source 1..1041: mol_type = genomic DNA
atgtgcactaaaatggaacagcccttctaccacgacgactcatacacagctacgggatacggccgggcccctggtggcctctctctacacgactacaaactcctgaaaccgagcctggcggtcaacctggccgacccctaccggagtctcaaagcgcctggggctcgcggacccggcccagagggcggcggtggcggcagctacttttctggtcagggctcggacaccggcgcgtctctcaagctcgcctcttcggagctggaacgcctgattgtccccaacagcaacggcgtgatcacgacgacgcctacacccccgggacagtacttttacccccgcgggggtggcagcggtggaggtgcagggggcgcagggggcggcgtcaccgaggagcaggagggcttcgccgacggctttgtcaaagccctggacgatctgcacaagatgaaccacgtgacaccccccaacgtgtccctgggcgctaccggggggcccccggctgggcccgggggcgtctacgccggcccggagccacctcccgtttacaccaacctcagcagctactccccagcctctgcgtcctcgggaggcgccggggctgccgtcgggaccgggagctcgtacccgacgaccaccatcagctacctcccacacgcgccgcccttcgccggtggccacccggcgcagctgggcttgggccgcggcgcctccaccttcaaggaggaaccgcagaccgtgccggaggcgcgcagccgggacgccacgccgccggtgtcccccatcaacatggaagaccaagagcgcatcaaagtggagcgcaagcggctgcggaaccggctggcggccaccaagtgccggaagcggaagctggagcgcatcgcgcgcctggaggacaaggtgaagacgctcaaggccgagaacgcggggctgtcgagtaccgccggcctcctccgggagcaggtggcccagctcaaacagaaggtcatgacccacgtcagcaacggctgtcagctgctgcttggggtcaagggacacgccttc

SEQ ID NO: 6873 - DNA, 1041 bp, Homo sapiens; identical to SEQ ID NO: 6872
  source 1..1041: mol_type = genomic DNA

SEQ ID NO: 6874 - DNA, 1095 bp, Homo sapiens
  source 1..1095: mol_type = genomic DNA
atgaccggccgggactcgctttccgacgggcgcactagcagcagggcgctggtgcctggcggttcccctaggggctcgcgcccccggggcttcgccatcacggacctgctgggcttggaggccgagctgccggcgcccgctggcccaggacagggatctggctgcgagggtccggcagtcgcgccgtgcccgggcccggggcttgacggctccagcctggcgcgtggggccctaccgctgggactcggcctcctctgtggcttcggcacgcagccgccggcggccgctcgagcaccctgcctgctcctagcggacgtgccgttcctgccgcccaggggccccgagcccgctgccccgctggctcccagccgtccgccgcctgcgctcggccgccagaagcgcagcgacagcgtctccacgtccgatgaggacagccagtctgaagacaggaatgacctaaaggcatcccccaccttgggcaagaggaagaagcggcggcacaggacagttttcactgctcaccagctggaagagttggagaaggcattcagcgaggcccactaccctgatgtgtatgcccgagaaatgctggctgtgaaaactgagctccccgaagaccggatacaggtctggtttcaaaaccgcagggccaaatggcgcaagcgggagaagcgctggggcggcagcagcgtgatggccgagtacgggctgtacggggccatggtgcgccactgcatcccgctgccagactccgtgctcaactccgccgagggcggcctgctgggctcctgcgcgccctggctcctggggatgcataaaaaatccatggggatgataaggaagccaggaagtgaagataagttggcaggactctggggctctgaccacttcaaagaaggttctagccagagtgagtcaggatcacagagaggctcagataaagtgagccctgagaatggcttggaagatgtggctattgacctctccagctctgcccggcaggagaccaagaaagtgcaccctggggctggtgctcaaggaggctccaactccacggcactggaggggccccagccagggaaggtgggagccaca

SEQ ID NO: 6875 - DNA, 1527 bp, Homo sapiens
  source 1..1527: mol_type = genomic DNA
atggctctttctcagggtctactgacattcagggatgtggccatagaattctctcaggaggagtggaaatgcctggaccctgctcagaggactctatacagagacgtgatgctggagaattataggaacctggtctccctggatatctcttccaaatgcatgatgaatacattgtcatcaacagggcaaggcaatacagaagtgatccacacagggacattgcagagacaagcaagttatcacattggagcattttgctcccaggaaattgagaaagacattcatgactttgtgtttcagtggcaagaagatgaaacaaatgaccatgaagcacccatgacagaaataaaaaagttgactagtagtacagaccgatatgatcaaaggcatgctggaaacaagcctattaaaggtcagcttgaatcaagatttcatttgcatttgcgaagacataggagaattcatactggagagaaaccttacaaatgtgaagaatgtgagaaagttttcagttgcaaatcacatcttgaaatacataggataattcatactggagagaaaccatacaaatgtaaggtttgcgacaaggcttttaagcatgattcacacctggcaaaacatactagaattcacaggggagacaaacattacacatgtaatgaatgtggcaaggtttttgatcaaaaagcaacccttgcatgtcatcatagaagtcatactggagagaaaccttataagtgtaatgagtgtggcaagacctttagtcagacatcacaccttgtgtaccatcatagactgcatactggagagaaaccttacaaatgtaatgagtgtggcaagaccttcgctcgaaattcagtcctcgtaattcataaggcagttcatactgcagagaaaccctataagtgtaatgaatgtggcaaggtttttaagcaacgagcaactcttgcaggacatcgtagagttcacactggagagaaaccttacagatgtgaagaatgcgacaaagttttcagtcgcaaatcacatcttgaaagacataggaggattcatactggagagaaaccatacaaatgtaaggtttgtgacaaggctttccggagtgattcacgtcttgcagaacatcagagagttcatactggagagagaccttacacatgtaatgaatgtggcaaggtttttagtacaaaagcgtacctcgcatgtcatcaaaaacttcatactggagagaaactttacgaatgtgaagaatgtgacaaagtttacattcgcaaatcacaccttgaaagacataggaggattcatacaggagagaaacctcacaagtgtggtgattgtggtaaagcctttaattcaccttcacaccttattaggcatcagagaatccatactggacagaaatcttacaaatgtcatcagtgtggcaaggtctttagtctgaggtcactccttgcagaacatcagaaaattccttttggagacaattgtttcaagtgcaatgagtatagcaaaccatcaagcattaat

SEQ ID NO: 6876 - DNA, 2601 bp, Homo sapiens
  source 1..2601: mol_type = genomic DNA
atggagaacgaaaaggaaaatctcttttgtgagccacataaaaggggactaatgaaaacacctctgaaagaatccaccacagcaaatatcgtgttggcagagatccagcctgactttggccctttaaccacacctaccaagcccaaggaaggctctcagggagagccgtggacaccgacagccaacctgaaaatgctcatcagtgctgtgagccctgagatccgcaacagagatcagaaaaggggtttgtttgacaacagaagtggattacctgaggccaaagactgtatacacgaacacttatctggagatgaatttgagaaatcccaaccaagtcgaaaagagaaaagtttaggattattgtgtcataagttcttagcacgatatcctaattatcccaaccctgctgtgaataatgacatctgccttgacgaagtggcagaggaacttaatgttgaacgtcgacgcatttacgatatcgtgaacgtcctagagagtttacatatggtgagccgcctcgccaaaaacaggtacacttggcacgggcgacacaatctcaacaaaacccttggcaccttgaagagcatcggggaggagaataagtacgccgagcagattatgatgatcaaaaagaaagaatatgagcaagagtttgactttattaagagttacagtatagaggatcatatcatcaaatcaaacactggcccaaatggacacccagacatgtgttttgtggaactccctggagtggaatttcgggcagcttctgtaaacagccgcaaagacaagtctttaagggtaatgagccagaaatttgtgatgctgtttttggtgtcaacgcctcagatagtaagcctagaagttgctgccaagattttaattggggaggaccatgtggaagatttggataaaagcaagtttaaaacaaaaattaggaggttgtatgatatagctaatgttctgagtagcctggatcttatcaagaaagttcatgttacagaggaaagaggccgaaaaccagctttcaaatggaccggcccagaaatcagtccaaataccagtggctccagcccagtcattcattttactccctctgatttggaggtgagacggtcttcaaaagagaactgtgccaaaaacctcttttccacacgtgggaaaccaaactttactcgacacccatctcttatcaaattggtaaagagtatagaaagtgatcggagaaagataaattctgcgcccagtagccctatcaagaccaacaaagctgagagttctcagaattctgcacccttcccaagtaaaatggctcagctcgcagctatttgtaaaatgcagttagaagagcaatcaagtgaatccagacagaaagtgaaagtacagctggcaagatctggaccctgcaaaccagtagcccctctggaccccccagtgaatgctgagatggagctgacagcaccgtccctcatccagcccctgggaatggttcccctgatccccagccccttgtcatcagcagtgcccctgatcctacctcaggccccttcaggcccatcctatgccatctacctgcagcccactcaagcccaccaaagtgtgaccccaccccaaggcctgagcccaacggtgtgcaccacccactcttctaaagctactggctcaaaagactccacagatgccaccactgagaaggcagccaatgatacctcaaaggccagtgcctctaccaggcctggaagcttgctgccagcaccagagaggcaaggggcaaagagccgaaccagggagccagctggagaaagaggctcaaagagggcaagcatgctcgaggacagtggttccaaaaagaaatttaaagaggacctaaaaggacttgaaaatgtctccgcaaccttgttcccatcaggatacctaatccctctcacgcagtgctcatccctgggggcagagtccattttgtctggtaaagaaaactcaagtgctctttccccaaaccacaggatttacagctccccaattgcaggtgttattccagtgacatcatctgaactcactgctgttaattttccctcttttcatgtaacaccgttgaagctaatggtctcaccaacttccgtggcagccgtacctgtcgggaacagcccggctctcgcttcaagccaccctgttcccatccagaacccaagctcagccattgtaaacttcaccctgcagcacctgggactcatctcacccaatgtgcagttgtctgccagccctgggtctggaatcgttcctgtgtctccaagaatagagtctgttaatgtcgcaccagaaaatgcaggcactcagcaaggaagggccaccaactatgactcaccagtcccaggccagagccagccaaatggacaatcagttgctgtgacaggggcacaacagcctgttcctgtgacacccaaagggtcacaattagtggccgaaagtttcttccgtaccccaggtggacccaccaagccaaccagctcatcctgcatggattttgagggtgctaataaaacctccttaggaactctctttgtcccacagcgaaaactggaagtctcaacagaggatgtccat

SEQ ID NO: 6877 - DNA, 1398 bp, Homo sapiens
  source 1..1398: mol_type = genomic DNA
atggcggaggagcaggacctatcggaggtggagctgagccccgtgggctcggaggagccccgctgcctgtccccggggagcgcgccctcgctagggcccgacggcggcggcggcggatcgggcctgcgagccagcccggggccaggcgagctgggcaaggtcaagaaggagcagcaggacggcgaggcggacgatgacaagttccccgtgtgcatccgcgaggccgtcagccaggtgctcagcggctacgactggacgctggtgcccatgcccgtgcgcgtcaacggcgccagcaaaagcaagccgcacgtcaagcggcccatgaacgccttcatggtgtgggctcaggcagcgcgcaggaagctcgcggaccagtacccgcacctgcacaacgctgagctcagcaagacgctgggcaagctctggaggctgctgaacgaaagtgacaagcgccccttcatcgaggaggctgagcggctccgtatgcagcacaagaaagaccacccggactacaagtaccagcccaggcggcggaagaacgggaaggccgcccagggcgaggcggagtgccccggtggggaggccgagcaaggtgggaccgccgccatccaggcccactacaagagcgcccacttggaccaccggcacccaggagagggctcccccatgtcagatgggaaccccgagcacccctcaggccagagccatggcccacccacccctccaaccaccccgaagacagagctgcagtcgggcaaggcagacccgaagcgggacgggcgctccatgggggagggcgggaagcctcacatcgacttcggcaacgtggacattggtgagatcagccacgaggtaatgtccaacatggagacctttgatgtggctgagttggaccagtacctgccgcccaatgggcacccaggccatgtgagcagctactcagcagccggctatgggctgggcagtgccctggccgtggccagtggacactccgcctggatctccaagccaccaggcgtggctctgcccacggtctcaccacctggtgtggatgccaaagcccaggtgaagacagagaccgcggggccccaggggcccccacactacaccgaccagccatccacctcacagatcgcctacacctccctcagcctgccccactatggctcagccttcccctccatctcccgcccccagtttgactactctgaccatcagccctcaggaccctattatggccactcgggccaggcctctggcctctactcggccttctcctatatggggccctcgcagcggcccctctacacggccatctctgaccccagcccctcagggccccagtcccacagccccacacactgggagcagccagtatatacgacactgtcccggccc

SEQ ID NO: 6878 - DNA, 1128 bp, Homo sapiens
  source 1..1128: mol_type = genomic DNA
atggcgaactcggcaaatacaaacaccgtgcctaaattatacagatctgtgattgaagatgtcattaatgatgtgagagacatctttctggatgatggagtggatgaacaagtactgatggaactaaaaactttatgggaaaacaaactaatgcagtccagggcagtagatggatttcattcagaagagcagcagcttctactgcaagttcaacagcagcatcaaccccagcagcagcagcatcaccaccatcaccatcatcagcaagctcagcctcagcagacagtacctcagcaagcgcagacccagcaggttcttattcctgcatcacagcaagccacagcaccacaagttattgttccagattctaagttgatacagcatatgaatgcatcaaacatgagtgctgctgctacagctgctaccttagcactccctgcaggtgtgactcctgttcagcagatattaacaaattcaggccagcttcttcaggtggtcagagcagccaatggtgcccaatatatctttcagcctcagcagtcagtggttctacaacaacaggttataccacaaatgcagcctggtggagtacaagctcctgttatacagcaggtgctggctcctcttcctggagggatttcaccacagacaggtgtcatcatccagcctcagcaaatcttatttacaggaaataagactcaagttatacctacgacagtggcagcacctacaccagcccaagcacagataactgcaactggccagcagcaaccgcaggcccagcctgctcaaacacaagctccattggtcttacaagttgatggaactggggatacatcatctgaagaagatgaagatgaagaagaagactatgatgatgatgaggaggaagacaaagagaaagatggagctgaagatgggcaggtggaagaagagcccctcaatagtgaagatgatgtgagtgatgaggaaggacaggaactctttgacacagaaaatgttgttgtatgccaatatgataagatacacagaagtaaaaacaaatggaaatttcatctcaaggatggcattatgaatcttaatggaagagattatatattttccaaagccattggagatgcagaatgg

SEQ ID NO: 6879 - DNA, 807 bp, Homo sapiens
  source 1..807: mol_type = genomic DNA
atgagctcgtactttgtaaactccttctcggggcgttatccaaatggcccggactatcagttgctaaattatggcagtggcagctctctgagcggctcttacagggatcccgctgccatgcacaccggctcttacggctacaattacaatgggatggacctcagcgtcaaccgctcctcggcctcctccagccactttggggcggtgggcgagagctcgcgcgccttccccgcgcccgcccaggagccccgcttcaggcaagcggcttcgagctgctccctgtcctcgcccgagtccctgccctgcaccaacggcgacagccacggcgccaagccctctgcttcgtccccctccgaccaggcgacctcagccagctccagcgccaatttcaccgaaatagacgaggccagcgcgtcctcggagcctgaggaagcggcaagccagctaagcagccccagcctagctcgggcgcagccagagcccatggccacctccacagccgcgcccgaggggcagactccgcaaatattcccctggatgaggaagcttcacatcagccatgatatgaccgggccggacgggaaaagggcccggaccgcgtatacccgctaccagaccctggagctggaaaaggagttccacttcaaccgctacctgacccggcgacggcgcatcgagatcgcccacgcactctgcctgtccgagcgccagatcaagatctggttccagaaccggcgcatgaagtggaagaaggacaacaaattgaaaagtatgagcctggctacagctggcagcgccttccagccc

SEQ ID NO: 6880 - DNA, 768 bp, Homo sapiens
  source 1..768: mol_type = genomic DNA
atgctctggcaaaaacccacagctccggagcaagccccagccccggcccggccataccagggcgtccgtgtgaaggagccagtgaaggaactgctgaggaggaagcgaggccacgccagcagtggggcagcacctgcacctacggcggtggtgctgccccatcagcccctggcgacctacaccacagtgggtccttcctgcctggacatggaaggttctgtgtctgcagtgacagaggaggctgccctgtgtgccggctggctctcccagcccaccccggccaccctgcagcccctggccccatggacaccttacaccgagtatgtgccccatgaagctgtcagctgcccctactcagctgacatgtatgtgcagcccgtgtgccccagctacacggtggtggggccctcctcagtgttgacctatgcctctccgccactcatcaccaatgtcacgacaagaagctccgccacgcccgcagtggggcccccgctggagggcccagagcaccaggcacccctcacctatttcccgtggcctcagcccctttccacactacccacctccaccctgcagtaccagcctccggccccagccctacctgggccccagtttgtccagctccccatctctatcccagagccagtccttcaggacatggaagaccccagaagagccgccagctcgttgaccatcgacaagctgcttttggaggaagaggatagcgacgcctatgcgcttaaccacactctctctgtggaaggcttt

SEQ ID NO: 6881 - DNA, 1587 bp, Homo sapiens
  source 1..1587: mol_type = genomic DNA
atgcgcaggaattccagtctcagtttccagatggagcgacccctcgaggagcaagtccagagcaagtggtcgtctagtcaaggccgcacaggaacaggagggtctgatgtcctccagatgcagaacagtgaacaccatggacaaagcatcaagactcaaactgactccatctcccttgaggatgtggctgtgaacttcaccctggaggagtgggctttgctggatcctggccagaggaatatctacagagatgtgatgcgggcaaccttcaagaacctggcctgtataggggaaaaatggaaagaccaggatattgaagatgaacacaaaaaccagggaagaaatctaagaagtcctatggttgaagcactctgtgaaaataaagaagattgtccatgtggaaaaagcactagccagattcctgatcttaatacgaacctggaaactcctactggattaaaaccatgtgactgcagtgtgtgtggggaagtcttcatgcatcaggtctcccttaataggcacatgagatctcacactgaacagaaaccaaatgagtgtcacgaatatggagagaagccacataaatgcaaagaatgtgggaaaaccttcactcgcagctccagtattcgaacccatgaaagaattcacactggagagaaaccctatgaatgtaaggaatgtggcaaagccttcgcatttctcttttcctttcgaaaccatataagaattcatactggagagacaccctatgaatgtaaggaatgtgggaaggcattcagatatctcactgctcttcggcgccatgaaaaaaatcacactggagagaaaccctacaaatgtaaacagtgtggaaaagcctttatatattaccagccttttctaacccatgaaaggactcacactggagagaaaccttatgaatgtaagcaatgtgggaaagccttcagttgtcccacgtacttacggagtcatgagaaaactcatactggagagaaaccttttgtatgtagggaatgtgggagagccttcttttctcactcaagccttcgaaaacacgtgaaaacccacaccggagttcaaccttatacatgtaagaaatgtggggaagccttcaagtcatctagttcctgtgaagtgcacgaaagaactcattttggagaaaaaccctatgaatgtaaacaatgtggtaaagccttcaattcttcaagttaccttcagttgcacgaaagagttcacactggcgagaaaacttacgaatgtaaagaatgtggtaaagcctttctttattccactcactttcgaatccatgaaagaacccatactagagagaaaccctatgaatgcaaacagtgtggtcgggtcttcatttacttcagtcaccttcgaaggcacgaaagaagtcacactggagtgaaaccatgtgagtgtaagcagtgtggcaaagctttcacttgtttaaattccctgaaagtacacaaaagaattcatactggagaaagaccctttcagtgtagacaatgtggtaaagccttcagttactcaaagtctttgcacgtgcacgaaaggactcatagtagacagaagccc

SEQ ID NO: 6882 - DNA, 1620 bp, Homo sapiens
  source 1..1620: mol_type = genomic DNA
atggactcggtggcttttgaggatgtagatgtgaacttcacccaggaggagtgggctttgctagatccttcccagaagaatctctacagagatgtgatgtgggaaaccatgaggaatctggcctctatagggaaaaaatggaaggaccagaacattaaagatcactacaaacaccgagggagaaatctaagaagtcatatgttagaaagactctatcaaactaaggatggtagtcagcgtggaggaatttttagccagtttgcaaatcagaatctgagcaagaaaatccctggagtgaaactctgtgaaagcattgtatatggagaagtcagcatgggtcagtcatcccttaatagacacatcaaagatcacagtggacatgaaccaaaggaatatcaggaatatggagagaagccagatacacgtaaccagtgttggaaacccttcagttctcaccactcctttcgaacacatgagataattcacactggagagaaactctatgattgtaaggaatgtggaaaaaccttcttttctctcaaaagaattagaagacacatcatcacacacagtggatatacaccatataaatgtaaggtgtgtgggaaagcttttgattatcccagtagatttcgaacacatgaaagaagtcacactggagagaaaccctatgaatgtcaggaatgtggaaaagccttcacttgtatcacaagtgttcgaagacacatgataaagcacactggagatggaccttataaatgtaaggtatgtgggaaaccctttcattctctgagttcatttcaagtgcatgaaagaattcacactggagaaaaaccctttaaatgtaagcaatgtggtaaagccttcagttgttccccaaccttacgaatacatgaaagaacccatactggagagaaaccttatgaatgcaagcagtgtgggaaggccttcagttatctcccctcccttcgactacatgaaagaattcacactggtgagaaacccttcgtatgtaaacaatgtggtaaagcctttagatctgccagtacctttcaaatacatgaaaggactcacactggagaaaaaccttatgaatgtaaggaatgtggggaagcattcagttgtatcccaagtatgcgaagacacatgataaaacatactggagaaggaccttataaatgtaaggtatgtgggaaaccctttcattctctgagtccatttcgaatacatgaaagaactcacactggagagaaaccttatgtatgtaaacattgtggtaaagctttcgtttcttcaacatcaattcgaatacatgaaagaactcatactggagagaaaccctatgagtgtaagcaatgtgggaaagccttcagttatctcaactcctttcgaacacatgaaatgattcacactggtgagaaaccctttgaatgtaagcgatgtggtaaagcctttagatcttctagttcctttcgactacatgaaaggactcacactggacagaaaccctatcattgcaaggaatgtgggaaagcctattcttgccgtgccagctttcagagacacatgttaacacatgctgaagatggaccaccttataaatgcatgtgggaaagcctt

SEQ ID NO: 6883 - DNA, 2229 bp, Homo sapiens
  source 1..2229: mol_type = genomic DNA
atgggactgttgacattcagggatgtggccgtagaattctctttggaggagtgggaacacctggaaccagctcagaagaatttgtatcaggatgtgatgttagaaaactacagaaacctggtctctctgggtcttgttgtctctaagccggacctgatcacctttttggaacaaaggaaagagccttggaatgtgaagagtgaggagacagtagccatccagccagatgtgttttcgcattataacaaggacctgttgacagagcactgcacagaagcttcattccaaaaagtgatatcgaggagacatgggagctgtgatcttgagaatttacatttaagaaaaaggtggaaaagggaggagtgtgaagggcacaatggatgttatgatgaaaagacttttaaatatgatcaatttgatgaatcctctgttgaaagtttgtttcaccagcaaatactttcttcttgtgccaaaagctataactttgatcaatataggaaggtctttactcattcatcattgcttaatcaacaagaggaaatagatatttggggaaaacatcacatatatgataaaacttcagtgttatttaggcaggtctctactctaaatagttaccgaaatgtttttattggagagaaaaattatcattgcaataattctgaaaaaaccttgaaccaaagctcaagccctaaaaatcatcaggaaaattattttctagaaaaacaatacaaatgtaaagaatttgaggaagtctttcttcagagtatgcatgggcaagagaaacaagaacagtcttacaaatgtaataaatgtgtagaagtttgtacccagtcattaaaacatattcaacatcagaccatccatatcagagaaaactcatatagctataacaaatatgataaagatcttagtcagtcatcaaatcttagaaagcagataatccataatgaagagaaaccatacaaatgtgaaaaatgtggggatagcttaaaccatagtttgcaccttactcaacatcagatcattcctaccgaagagaaaccctgtaaatggaaagaatgtggcaaggtctttaaccttaactgtagtttataccttactaaacagcagcaaattgatactggagaaaacctttacaaatgtaaagcatgtagcaaatcttttactcgttcctccaatcttattgtgcatcagagaattcacactggagagaaaccatacaaatgtaaagaatgtggcaaagcctttcgctgtagttcataccttactaaacataagcgaattcatactggagagaaaccttataaatgtaaagaatgtggaaaagcttttaaccgtagttcatgccttactcaacatcagacaactcatacaggagaaaaactttacaaatgtaaagtatgtagcaaatcttatgctcgttcttcaaatcttattatgcatcagagagttcatactggagagaagccttataaatgtaaagaatgtggcaaagtctttagccgtagttcttgccttactcaacatcggaaaattcatactggagaaaatctttacaaatgcaaagtatgtgctaaaccttttacttgtttctcaaatcttattgtgcatgagagaattcatactggagagaaaccctataaatgtaaagaatgtggcaaagcctttccttatagttcacaccttattcgacatcatcgaattcatactggagaaaaaccatacaaatgtaaagcatgtagcaaatcttttagtgactcctcaggtcttactgtgcatcggcgaactcatactggagagaaaccctatacatgtaaagaatgtggcaaagcctttagttatagttcagatgttattcagcatcggagaattcatactggccagagaccctacaaatgtgaagaatgtggcaaagccttcaactataggtcatacctcactacacatcagagaagtcatactggagagagaccctacaaatgtgaagaatgtggcaaagccttcaactctaggtcatacctcactacacatcggagaagacatactggagagagaccctacaaatgtgatgaatgtggtaaagccttcagctataggtcatacctcactacacatcggagaagtcatagtggagagagaccctacaaatgtgaagaatgtggcaaagcctttaactctaggtcatacctcattgcacatcagagaagtcatactagagaaaaactt

SEQ ID NO: 6884 - DNA, 732 bp, Homo sapiens
  source 1..732: mol_type = genomic DNA
atgcaagctgtagtgcccttgaacaagatgacagccatctcaccagaacctcaaactctggcctcgactgaacaaaatgaggtcccaagagtggttacttctggggaacaagaagctattttaagaggaaatgctgctgatgcagagtctttcagacagaggtttaggtggttttgttactcagaagtagctggacccaggaaagctctgagtcaactctgggagctctgcaatcagtggctgagaccagacattcacacgaaagaacagattttagagcttctggtgtttgagcagttcctgaccattttgcctggggagatcaggatttgggtaaagtcacaacatcctgagagtagtgaggaagtggtgaccctaatagaagatttgacccagatgcttgaagaaaaagatccagtctctcaagattctactgtttcccaagaggagaactcaaaagaggataaaatggtcactgtttgtcccaatactgagtcctgtgaatctataacattgaaggatgtagctgtgaacttttcaagaggagagtggaagaagctggagccttttcaaaaggagctatataaggaagtgctactggaaaacctcaggaacctagaatttctggactttccagtttcaaaattagagttgatttcccagctaaagtgggttgaattgccatggctgctggaagaagtctcaaaaagctcccgactaggaagtgtgatt

SEQ ID NO: 6885 - DNA, 486 bp, Homo sapiens
  source 1..486: mol_type = genomic DNA
atgacgacccccaataaaggaaacaaggccttgaaggtgaagcgggagccgggtgagaatggcaccagcctgacggatgaggagctggtgaccatgtcggtgcgggagctgaaccagcacctgcggggcctgtccaaggaggagatcgtccagctgaagcagcgccggcgcacgctcaagaaccgcggctacgctgccagctgccgcgtgaagcgggtgacgcagaaggaggagctggagaagcagaaggcggagctgcagcaggaggtggagaagctggcctcagagaacgccagcatgaagctggagctcgacgcgctgcgctccaagtacgaggcgctgcagaccttcgcccggacggtggcccgcagccccgtggcgccagcccggggcccccttgccgccggcctggggcccctcgtcccaggcaaggtggccgccaccagcgtcatcacaatagtaaagtccaagacggatgcccgatcg

SEQ ID NO: 6886 - DNA, 780 bp, Homo sapiens
  source 1..780: mol_type = genomic DNA
atgtcggcgacggggcccatcagtaactattacgtggactcgctcatctctcacgacaatgaagacctcctagcgtccaggtttccggccaccggggctcatcccgccgccgccagacccagcggtttggtgccggactgtagcgattttccgtcctgtagcttcgcgcccaagccggcagtgttcagcacgtcgtgggcgcccgtgccctctcagtcgtccgtggtatatcacccgtacggcccccagccccacctcggcgccgacacgcgctacatgcggacttggctcgagccgctgtccggcgccgtctccttccccagcttcccggccgggggccgtcactacgccctcaagccggacgcctaccccgggcgccgcgcggactgcggcccaggggagggccgcagctacccggactacatgtacggctcgcccggggagctgcgcgaccgcgccccgcagacactgccctcgcccgaggcggacgcgctcgccggcagcaagcacaaagaggagaaggctgacctggaccccagcaaccccgtggccaactggattcacgcccgctccacgaggaagaagcgctgcccctacaccaagtaccagacgctggaactggagaaggagtttctcttcaatatgtatttaaccagggaccgtcggtatgaggtggcccgggttctcaatctcaccgagcggcaggtcaaaatctggtttcagaatcgaaggatgaagatgaaaaagatgaataaagagaaaaccgacaaggagcagtcc

SEQ ID NO: 6887 - DNA, 1197 bp, Homo sapiens
  source 1..1197: mol_type = genomic DNA
atgccccaactctccggaggaggtggcggcggcgggggggacccggaactctgcgccacggacgagatgatccccttcaaggacgagggcgatcctcagaaggaaaagatcttcgccgagatcagtcatcccgaagaggaaggcgatttagctgacatcaagtcttccttggtgaacgagtctgaaatcatcccggccagcaacggacacgaggtggccagacaagcacaaacctctcaggagccctaccacgacaaggccagagaacaccccgatgacggaaagcatccagatggaggcctctacaacaagggaccctcctactcgagttattccgggtacataatgatgccaaatatgaataacgacccatacatgtcaaatggatctctttctccacccatcccgagaacatcaaataaagtgcccgtggtgcagccatcccatgcggtccatcctctcacccccctcatcacttacagtgacgagcacttttctccaggatcacacccgtcacacatcccatcagatgtcaactccaaacaaggcatgtccagacatcctccagctcctgatatccctactttttatcccttgtctccgggtggtgttggacagatcaccccacctcttggctggcaaggtcagcctgtatatcccatcacgggtggattcaggcaaccctacccatcctcactgtcagtcgacacttccatgtccaggttttcccatcatatgattcccggtcctcctggtccccacacaactggcatccctcatccagctattgtaacacctcaggtcaaacaggaacatccccacactgacagtgacctaatgcacgtgaagcctcagcatgaacagagaaaggagcaggagccaaaaagacctcacattaagaagcctctgaatgcttttatgttatacatgaaagaaatgagagcgaatgtcgttgctgagtgtactctaaaagaaagtgcagctatcaaccagattcttggcagaaggtggcatgccctctcccgtgaagagcaggctaaatattatgaattagcacggaaagaaagacagctacatatgcagctttatccaggctggtctgcaagagacaattatggtaagaaaaagaagaggaagagagagaaactacaggaatctgcatcaggtacaggtccaagaatgacagctgcctacatc

SEQ ID NO: 6888 - DNA, 1998 bp, Homo sapiens
  source 1..1998: mol_type = genomic DNA
atgcaggaggttgtgctgttggatgagagttcaggaccaccaagccagctgctttggacccgccaggatacccagctccctcaggaaagcgctctattacctgctccatatcctgccttcactaaagatggaagccaaggaaacctgccgcaagcagatatcacactaatgagccaggcccaagagtcagtgacatttgaggatgtagctgtgaacttcactaacagggagtggcagtgtctgacctacgctcaaaggcatctctataaggatgtgatgttggaaaattatgggaacatggtatcacttggatttccatttcctaaacctcctttaatctctcatctggagcgagaagtagacccctgtgtgcaggatccacaggacagggagtccctaagctgctcctacccagtgtcagctgacaagatgtggcctgagaatgaaaaggcaagttcacaacaagagatttttgaaaatggagaagcctactggatgaaatttaacagtctcctaaaagttgattcccgggatcctaaggttagagaagtttgtgttcaggatgtcaaattagagaatcaatgggaaacatctataagggagaaactgagagaagagaaagaaggctctgaggaagtgacctgcaaaaaaggaaagaaccagaaagtgcttagtaaaaacttgaatccaaactcaaaacatagtcaatgtaataaagttcttatagcacagaaactccatgaatgtgccaggtgtggcaaaaacttcagttggcactcagatctaattctccatgagcaaattcattctggtgagaaaccccatgtgtgtaatgagtgtgggaaagcattcaagaccagaaatcagctttctatgcaccggataatccacacaggggagaaaccttttaattgcacccagtgtgggaaggctttcaacagtagatcagctctttgccgacataaaaaaacccacagtggggagaagcctcacgagtgcagggactgtgggaaggccttcaagaccaggaaccgtctctgtatgcatcagcttatccacaccggggagaagccttacaaatgtaactgctgtgggaaggccttccagtttaagcattcccttaccatccatggcagaatccacactggggagaagccatatgaatgtgaggagtgcgggaaggccttcagtgggagttcagacctcaccaaacacataagaatccacactggggaacgaccttatgagtgcagcaagtgtggaagggccttcagtcggagctcagacctaagcaaacacaaacgaatccatactcgggagaaacactatgggtgtccccagtgtggaaaagacttcagcatcaaggcagaactcaccaaacacagaaggatccacactgaagagaaacgttacaggtgtgaggagtgtgggaaagcctttcgtcataactgtaagcgcagggctcatgaacgagagcatacaggggagaagccctatcaatgcagggattgtgggaaaaccttccaagataagcactgccttaccatccatcagagaatccacactggagagaaaccttacaaatgtttagagtgtgggaaagctttcagtgggaagtcaaacttgaccaatcatcgaagaattcacactggagagaagcctcacaaatgtgaggtatgtggaatggccttccatcatagttcagtcctgaggcagcacaaaagaatccacactggtgagaagccatacacctgcagtgagtgtggcacgtccttccgtcagggctcagctctgattggacataagcgagttcatactggggagaaaccttatgaatgtgaggaatgtggaaaagcttttagagtgagctcaaatcttactggacataagaaaagaaaacatcaagtatggagtacccatgaacttgatgggagtaggaaatccctctctccagtgactgtttctcagacctcagtagtcagtattttgaccagtgcc

SEQ ID NO: 6889 - DNA, 1713 bp, Homo sapiens
  source 1..1713: mol_type = genomic DNA
atgcctcaggtgacatttaatgatgtggctatagacttcactcatgaagagtggggatggctcagttctgctcagagggacttatacaaggatgtgatggtccagaattatgagaacctggtctctgtagcaggtctttctgtaactaagccatatgtgatcacgttattggaggatggaaaagagccctggatgatggagaaaaaactgtcaaaaggtatgattccagattgggaatcaagatgggaaaacaaggaattatcaacaaagaaggataattatgatgaagattcaccccaaacagtaataatagaaaaagttgtaaaacaaagttatgaattttcaaattctaagaagaatttggaatatatagagaagttggaagggaagcatggaagtcaggtagaccatttcagaccagcaattctcacctctagagaaagccccactgcagacagtgtttacaaatacaatatatttagaagcacctttcattcaaagtctactctttctgaaccacaaaaaatttctgctgaagggaattcacacaaatatgatatattaaagaagaacttaccaaaaaagtcagttataaaaaatgagaaagtcaatggtggaaagaaacttttgaattctaataaaagtggggcagccttcagccagggcaaatctcttacccttccccagacttgtaatagagagaaaatctatacatgcagtgaatgtgggaaagcctttggcaaacagtcaatcctcaatcgccactggagaattcatacaggagagaagccctatgaatgtcgtgaatgtgggaagacttttagccatggctcatcccttacacgacatctgataagccatagtggagagaaaccttacaaatgtattgaatgtgggaaggcctttagccatgtctcatcacttactaaccatcagagcactcacactggagagaaaccatatgaatgtatgaactgtggaaagtcttttagtcgtgtgtcccatcttattgaacatctaagaattcatactcaagaaaaactctatgagtgtcgtatatgtggaaaggccttcattcataggtcatctctcattcaccatcagaaaatccatactggagagaagccttatgaatgtagagaatgtgggaaagctttctgctgtagctcacaccttactcgacatcaaagaattcacactatggagaaacaatatgaatgcaacaaatgtctgaaagtctttagtagcctctcatttcttgttcagcatcagagtattcatactgaagaaaaaccctttgaatgtcagaaatgcaggaaatccttcaaccagcttgaatcactgaatatgcatttgagaaatcacattagattgaaaccctacgaatgcagtatatgtgggaaagcctttagtcataggtcatccctgcttcaacatcacagaattcatactggagagaaaccttatgaatgtattaaatgtgggaagaccttcagctgtagttcaaaccttaccgtacatcagagaattcacactggagaaaagccatataaatgtaatgagtgtgggaaagcttttagcaaaggctcaaatcttactgcccatcaaagagtacataatggagagaaacccaatagtgtggtaagtgtggaaaagcctttagactatatgaatcactatacatgtgagaaatcttacagaagagaaactgta

SEQ ID NO: 6890 - DNA, 1734 bp, Homo sapiens
  source 1..1734: mol_type = genomic DNA
atggctgaagaatcaagaaagccttcagccccatccccaccagaccagactcctgaagaggatcttgtaatcgtcaaggtagaggaggatcatggttgggaccaggaatctagtctgcatgaaagtaaccctcttggccaagaagtgttccgcctgcgcttcaggcagttacgctaccaggagacactaggaccccgagaagctctgatccaactacgggccctttgccatcagtggctgaggccagatttgaacaccaaggaacagatcctggagctgctggtgctggagcagttcttgaccatcctacctgaggagctccagacactggttaaggaacatcagctagagaacggagaggaggtggtgaccctattagaggatttggaaaggcagattgatatactaggacgaccagtctcagctcgcgtacatggacatagggtactctgggaggaggtagtacattcagcatctgcaccagagcctccaaatactcagctccaatctgaggcaacccaacataaatctccagtgccccaagagtcacaagagagagccatgtctacttcccagagtcctactcgttcccagaaaggaagttctggagaccaggaaatgacagctacacttctcacagcagggttccagactttggagaagattgaagacatggctgtgtcccttattcgagaggagtggcttcttgatccatcacagaaggatctgtgtagagataacaggccagaaaatttcagaaacatgttctccctgggtggtgagaccaggagtgagaacagggaattagcttcaaaacaggtaatatctactggaatccagccacatggagagacagctgccaaatgcaacggggatgttatcaggggtcttgagcatgaagaagcccgagaccttctgggcagattagagaggcagcggggaaatcccacacaagagagacgacataaatgtgatgaatgtgggaaaagctttgctcagagctcaggccttgttcgccactggagaatccacactggggagaaaccctatcagtgtaatgtgtgtggtaaagccttcagttacaggtcagcccttctttcacatcaggatatccacaacaaagtaaaacgctatcactgtaaggagtgtggcaaagccttcagtcagaacacaggcctgattctgcaccagagaatccacactggggagaagccatatcagtgcaatcagtgtgggaaggctttcagtcagagtgcgggccttattctgcaccagagaatccacagtggagagagaccctatgaatgtaatgagtgtgggaaagctttcagtcatagctcacacctcattggacatcagagaatccacactggggagaagccctatgagtgtgatgagtgtgggaaaaccttcaggcggagctcacatcttattggtcatcagaggagccacactggggagaaaccctacaaatgcaatgagtgtgggagggccttcagtcagaagtcaggccttattgaacatcagagaatccacactggagaaagaccctataaatgtaaagaatgtgggaaagctttcaatgggaacactggtctcattcaacacctgagaattcacacaggggagaagccctaccaatgtaatgagtgtgggaaagcctttattcagaggtcaagtctcattcgacatcagagaatccacagtggtgaaaaatctgaatccataagcgtt

SEQ ID NO: 6891 - DNA, 462 bp, Homo sapiens
  source 1..462: mol_type = genomic DNA
atggcgcagtctattaacatcacggagctgaatctgccgcagctagaaatgctcaagaaccagctggaccaggaagtggagttcttgtccacgtccattgctcagctcaaagtggtacagaccaagtatgtggaagccaaggactgtctgaacgtgctgaacaagagcaacgaggggaaagaattactcgtcccactgacgagttctatgtatgtccctgggaagctgcatgatgtggaacacgtgctcatcgatgtgggaactgggtactatgtagagaagacagctgaggatgccaaggacttcttcaagaggaagatagattttctaaccaagcagatggagaaaatccaaccagctcttcaggagaagcacgccatgaaacaggccgtcatggaaatgatgagtcagaagattcagcagctcacagccctgggggcagctcaggctactgctaaggcc

SEQ ID NO: 6892 - DNA, 1635 bp, Homo sapiens
  source 1..1635: mol_type = genomic DNA
atggactgcgtgatctttgaggaagtggctgtgaacttcaccccagaagagtgggcattgctggatcatgctcagaggagcctctacagagatgtgatgctggagacctgcaggaaccttgcctccttggattgttacatttatgttagaaccagtggatcaagttctcagagggacgtttttgggaatggaatatccaatgatgaagaaattgtaaagttcacaggaagtgattcctggtctatttttggagaaaattggagatttgataacactggagatcagcaccaaatcccacagaggcatctgagaagtcagctggggagactctgtgaaagtaatgaaggtcatcaatgcggagagaccttgagccagactgcgaaccttcttgtgcacaagagttaccctaccgaagctaaaccctctgagtgcactaagtgtggcaaagccttcgagaatcggcagagatctcacactggacagagaccgtgtaaggaatgtgggcaagcctgcagctgcctctcctgccaaagccctcctatgaaaacgcagactgtagagaaaccctgtaattgccaggactcaaggacagcatctgtgacatacgtgaaaagtctcagcagtaaaaagtcttatgaatgtcagaaatgtggaaaagctttcatttgtccctcatctttcaggggacatgtgaatagtcatcatgggcagaaaacccatgcatgtaaagtatgtgggaagacctttatgtattactcctaccttacacggcacgtaagaactcacacaggagagaaaccctatgagtgtaaggagtgtgggaaagccttcagctgtccctcgtactttcgagaacatgtcagaacacacactggagagaaaccgtatgaatgtaagcattgtggaaaatcattcagctgttactcctcctttagagatcacgtgaggacgcacactggagagaaaccctgtcagtgtaaacattgcggaaaagcgttcacttgttactcgtctcttcgagaacatgggagaacgcacagtggagagaaaccctatgaatgtaaggaatgcggcaaagccttcaggtacccctcctctctgcgagcacacatgagaatgcacaccggagagaagccctatgtgtgcaagcagtgtgggaaggccttcggatgtcccacttactttagaagacatgtgaaaacacacagcggggtgaagccctatcaatgtaaagagtgtgggaaagcctacagtttttcctcctcccttcgaatccacgtgaggacgcatactggagagaagccctttgagtgtaagcattgtgggaaagccttcagctgtcactcctcccttcgagagcatgtgcgaacccacagcggagagaaaccgtacgaatgtaatcaatgtgggaaagccttcagccacgctcagtactttcaaaagcatgtgagatcacacagtggggtcaaaccctacgaatgtactgaatgtgggaaagcctacagttgttcctcgtcccttcgtgtgcacgtgagaacgcacactggagagagaccgtatgaatgcaagcagtgtgggaaaaccttcaggtatctcgcatcgcttcaagcacatgtgagaacacatgctggagcg

SEQ ID NO: 6893 - DNA, 1455 bp, Homo sapiens
  source 1..1455: mol_type = genomic DNA
atggggggctgcaggaaatttggtgagcggcctccacctaaacgacttactagggaagctatgcgaaattatttaaaagagcgaggggatcaaacagtacttattcttcatgcaaaagttgcacagaagtcatatggaaatgaaaaaaggtttttttgcccacctccttgtgtatatcttatgggcagcggatggaagaaaaaaaaagaacaaatggaacgcgatggttgttctgaacaagagtctcaaccgtgtgcatttattgggataggaaatagtgaccaagaaatgcagcagctaaacttggaaggaaagaactattgcacagccaaaacattgtatatatctgactcagacaagcgaaagcacttcatgttgtctgtaaagatgttctatggcaacagtgatgacattggtgtgttcctcagcaagcggataaaagtcatctccaaaccttccaaaaagaagcagtcattgaaaaatgctgacttatgcattgcctcaggaacaaaggtggctctgtttaatcgactacgatcccagacagttagtaccagatacttgcatgtagaaggaggtaattttcatgccagttcacagcagtggggagccttttttattcatctcttggatgatgatgaatcagaaggagaagaattcacagtccgagatggctacatccattatggacaaacagtcaaacttgtgtgctcagttactggcatggcactcccaagattgataattaggaaagttgataagcagaccgcattattggatgcagatgatcctgtgtcacaactccataaatgtgcattttaccttaaggatacagaaagaatgtatttgtgcctttctcaagaaagaataattcaatttcaggccactccatgtccaaaagaaccaaataaagagatgataaatgatggcgcttcctggacaatcattagcacagataaggcagagtatacattttatgagggaatgggccctgtccttgccccagtcactcctgtgcctgtggtagagagccttcagttgaatggcggtggggacgtagcaatgcttgaacttacaggacagaatttcactccaaatttacgagtgtggtttggggatgtagaagctgaaactatgtacaggtgtggagagagtatgctctgtgtcgtcccagacatttctgcattccgagaaggttggagatgggtccggcaaccagtccaggttccagtaactttggtccgaaatgatggaatcatttattccaccagccttacctttacctacacaccagaaccagggccgcggccacattgcagtgcagcaggagcaatccttcgagccaattcaagccaggtgccccctaacgaatcaaacacaaacagcgagggaagttacacaaacgccagcacaaattcaaccagtgtcacatcatctacagccacagtggtatcc

SEQ ID NO: 6894 - DNA, 1356 bp, Homo sapiens
  source 1..1356: mol_type = genomic DNA
atgtctgagactcctgctcagtgtagcattaagcaggaacgaatttcatatacacctccagagagcccagtgccgagttacgcttcctcgacgccacttcatgttccagtgcctcgagcgctcaggatggaggaagactcgatccgcctgcctgcgcacctgcgcttgcagccaatttactggagcagggatgacgtagcccagtggctcaagtgggctgaaaatgagttttctttaaggccaattgacagcaacacgtttgaaatgaatggcaaagctctcctgctgctgaccaaagaggactttcgctatcgatctcctcattcaggtgatgtgctctatgaactccttcagcatattctgaagcagaggaaacctcggattcttttttcaccattcttccaccctggaaactctatacacacacagccggaggtcatactgcatcagaaccatgaagaagataactgtgtccagaggacccccaggccatccgtggataatgtgcaccataaccctcccaccattgaactgttgcaccgctccaggtcacctatcacgacaaatcaccggccttctcctgaccccgagcagcggcccctccggtcccccctggacaacatgatccgccgcctctccccggctgagagagctcagggacccaggccgcaccaggagaacaaccaccaggagtcctaccctctgtcagtgtctcccatggagaataatcactgcccagcgtcctccgagtcccacccgaagccatccagcccccggcaggagagcacacgcgtgatccagctgatgcccagccccatcatgcaccctctgatcctgaacccccggcactccgtggatttcaaacagtccaggctctccgaggacgggctgcatagggaagggaagcccatcaacctctctcatcgggaagacctggcttacatgaaccacatcatggtctctgtctccccgcctgaagagcacgccatgcccattgggagaatagcagactgtagactgctttgggattacgtctatcagttgctttctgacagccggtacgaaaacttcatccgatgggaggacaaagaatccaaaatattccggatagtggatcccaacggactggctcgactgtggggaaaccataagaacagaacaaacatgacctatgagaaaatgtccagagccctgcgccactactacaaactaaacattatcaggaaggagccaggacaaaggcttttgttcaggtttatgaaaaccccagatgaaatcatgagtggccgaacagaccgtctggagcacctagagtcccaggagctggatgaacaaatataccaagaagatgaatgc

SEQ ID NO: 6895 - DNA, 2133 bp, Homo sapiens
  source 1..2133: mol_type = genomic DNA
atgcctgctgatgtgaatttatcccagaagcctcaggtcctgggtccagagaagcaggatggatcttgcgaggcatcagtgtcatttgaggacgtgaccgtggacttcagcagggaggagtggcagcaactggaccctgcccagagatgcctgtaccgggatgtgatgctggagctctatagccatctcttcgcagtggggtatcacattcccaacccagaggtcatcttcagaatgctaaaagaaaaggagccgcgtgtggaggaggctgaagtctcacatcagaggtgtcaagaaagggagtttgggcttgaaatcccacaaaaggagatttctaagaaagcttcatttcaaaaggatatggtaggtgagttcacaagagatggttcatggtgttccattttagaagaactgaggctggatgctgaccgcacaaagaaagatgagcaaaatcaaattcaacccatgagtcacagtgctttcttcaacaagaaaacattgaacacagaaagcaattgtgaatataaggaccctgggaaaatgattcgcacgaggccccaccttgcttcttcacagaaacaacctcagaaatgttgcttatttacagaaagtttgaagctgaacctagaagtgaacggtcagaatgaaagcaatgacacagaacagcttgatgacgttgttgggtctggtcagctattcagccatagctcttctgatgcctgcagcaagaatattcatacaggagagacattttgcaaaggtaaccagtgtagaaaagtctgtggccataaacagtcactcaagcaacatcaaattcatactcagaagaaaccagatggatgttctgaatgtggggggagcttcacccagaagtcacacctctttgcccaacagagaattcatagtgtaggaaacctccatgaatgtggcaaatgtggaaaagccttcatgccacaactaaaactcagtgtatatctgacagatcatacaggtgatataccctgtatatgcaaggaatgtgggaaggtctttattcagagatcagaattgcttacgcaccagaaaacacacactagaaagaagccctataaatgccatgactgtggaaaagcctttttccagatgttatctctcttcagacatcagagaactcacagtagagaaaaactctatgaatgcagtgaatgtggcaaaggcttctcccaaaactcaaccctcattatacatcagaaaattcatactggtgagagacagtatgcatgcagtgaatgtgggaaagcctttacccagaagtcaacactcagcttgcaccagagaatccactcagggcagaagtcctatgtgtgtatcgaatgcgggcaggccttcatccagaaggcacacctgattgtccatcaaagaagccacacaggagaaaaaccttatcagtgccacaactgtgggaaatccttcatttccaagtcacagcttgatatacatcatcgaattcatacaggggagaaaccttatgaatgcagtgactgtggaaaaaccttcacccaaaagtcacacctgaatatacaccagaaaattcatactggagaaagacaccatgtatgcagtgaatgcgggaaagccttcaaccagaagtcaatactcagcatgcatcagagaattcacaccggagagaagccttacaaatgcagtgaatgtgggaaagccttcacttctaagtctcaattcaaagagcatcagcgaattcacacgggtgagaaaccctatgtgtgcactgaatgtgggaaggccttcaacggcaggtcaaatttccataaacatcaaataactcacactagagagaggccttttgtctgttacaaatgtgggaaggcttttgtccagaaatcagagttgattacccatcaaagaactcacatgggagagaaaccctatgaatgccttgactgtgggaaatcgttcagtaagaaaccacaactcaaggtgcatcagcgaattcacacgggagaaagaccttatgtgtgttctgaatgtggaaaggccttcaacaacaggtcaaacttcaataaacaccaaacaactcataccagagacaaatcttacaaatgcagttattctgtgaaaggctttaccaagcaa

SEQ ID NO: 6896 - DNA, 1836 bp, Homo sapiens
  source 1..1836: mol_type = genomic DNA
atggcttccccgagccccccgccggagtcgaaggaggagtgggattatctggacccagctcagagaagcctgtataaagatgtcatgatggagaattatggaaacctggtctcactggatgttttgaacagagataaggatgaggagccaactgtaaaacaagagattgaagaaattgaggaagaagtggaaccacagggtgtaatagttacaagaatcaaaagtgaaattgaccaggatcctatgggtagagaaacatttgaacttgttggtaggttagataaacaaagagggatcttcctatgggaaataccaagggaatctttgacccaggaacagagaatgttcagagaaaacactaacattatccgtaaaagaccaaactcagaagagaaatgccataaatgtgaagaatgtggaaagggttttgtccgcaaggcccatttcattcaacatcaaagggtccatactggtgagaaaccttttcagtgcaatgaatgtgggaaaagttttagtcgcagttcatttgttattgaacatcagagaattcacactggggaaaggccctatgagtgtaattactgtggaaaaacctttagtgtgagctcaacccttattagacatcagagaatccacactggagaaagaccctatcagtgtaatcagtgtaaacagagcttcagccagagaaggagccttgttaaacatcaaaggattcatacaggtgagaaaccccataaatgtagtgactgtgggaaagccttcagttggaaatcacaccttattgagcatcaaagaactcacactggtgagaaaccttatcactgtaccaaatgtaagaagagctttagtcgaaattcattgcttgttgagcatcaaagaattcacactggggaaagaccccataaatgtggtgaatgtgggaaagcctttcgattaagcacataccttatacaacaccaaaaaattcacactggcgagaagccttttctttgtattgagtgtggaaaaagtttcagtcggagctcattccttattgaacatcagaggatccatactggtgaaagaccttatcagtgcaaagagtgtgggaaaagtttcagtcagctttgcaaccttactcgtcatcagagaattcacacaggagacaagccccataaatgtgaggaatgtggaaaagcctttagtagaagctcaggtcttattcagcatcagagaattcacaccagggagaagacttatccatacaatgaaactaaggaaagttttgatccaaattgcagtcttgttatacagcaggaagtctaccctaaggagaaatcttataaatgtgatgaatgtgggaaaacttttagtgttagtgctcatcttgtacaacatcaaagaatccacactggtgaaaagccctatctatgtactgtctgtgggaaaagcttcagccggagctcatttcttattgaacatcagagaatccacactggtgagagaccctatctgtgcagacagtgtggaaaaagctttagtcagctttgtaatcttattcgacatcagggtgttcacacaggtaataaaccccataaatgtgatgaatgtggaaaggcctttagccggaactcgggtcttattcagcatcagagaatacacacaggagagaaaccttataagtgtgagaagtgcgacaaaagtttcagtcaacagcgcagtcttgtcaaccatcagaagatccatgcagaggtgaaaacccaagaaacccatgaatgtgacgcttgtggtgaagcctttaattgccgtatttctcttattcagcatcagaaattgcacacagcatggatgcaa

SEQ ID NO: 6897 - DNA, 1992 bp, Homo sapiens
  source 1..1992: mol_type = genomic DNA
atgcctttaagggacaaatactgtcagactgaccaccatcatcacggatgctgtgaaccagtttatatcctggaacctggagatcctcctttgttacagcaaccactacagacatccaaatctggtattcaacaaataattgagtgctttcgatcaggaactaaacaacttaagcatattttattaaaagatgtggacactatttttgaatgtaagttatgccgcagtctcttcagaggattaccaaatttaattacccataaaaaattctactgcccaccaagtctccagatggatgacaaccttcctgatgtaaatgataaacaaagccaagccataaatgatctcctagaagccatatatccaagtgtggacaaacgagaatatattattaagctagaacccatagaaactaatcaaaatgcagtatttcaatatatttcgaggactgataatcctattgaagtcacagagtcaagcagtactcctgaacaaaccgaagttcagatacaggaaactagcactgaacagtcaaaaacagtaccggttacagatacagaggtggaaactgtagagccccctcctgttgagattgttacagatgaagttgcacctacatctgatgaacaacctcaggagtcgcaggctgacttggaaacttctgacaattctgattttggtcaccagttgatatgttgtctttgtagaaaagaattcaattctagacgaggtgttcgccgtcacattcgaaaagtacacaagaaaaagatggaagaactaaaaaagtacattgaaacacgaaagaatccaaaccaatcctctaaaggacgcagtaagaatgttctagttccattaagtaggagttgtccagtatgttgtaaatcatttgctacaaaagcgaatgtaaggaggcattttgatgaagttcatagaggactaaggagggattcaattactcctgatatagcaacaaagcctgggcaacctttgttcctggattctatttctcctaaaaaatcttttaagactcgaaaacaaaagtcttcttcaaaggctgaatacaatttaactgcatgcaaatgcctcctttgcaagaggaaatatagttcacaaataatgcttaaaagacatatgcaaattgtccacaagataactctttctggaacaaactctaaaagagaaaaaggccctaataatactgccaacagttcagaaataaaagttaaagttgaaccagcagattctgtagaatcttcacccccttccattacccattctccacagaatgaattaaagggaacaaatcattcaaatgaaaaaaagaacacaccggcagcacagaaaaataaagttaaacaagactctgaaagccctaaatcaactagtccgtcggctgcaggtggccagcaaaaaaccagaaaaccaaaactttcagctggctttgactttaagcaactttactgtaaactttgtaaacgtcagtttacttccaaacagaacttgactaaacacatcgagttgcacacagatggaaataacatttatgttaaattctacaagtgtcctctttgcacttatgaaactcgtcggaaacgtgatgtgatacgacatataactgtggttcataaaaagtcatctcgttatcttgggaaaataacagccagtttagagatcagagctataaaaaagcctattgattttgttctaaataaagtggcaaaaagaggcccttcgagggatgaagcaaaacatagtgattcaaaacatgatggcacttctaactctcctagtaaaaagtatgaagtagctgacgtcggtattgaagtaaaagtcacaaaaaacttttctcttcacagatgcaataaatgtggaaaggcatttgccaaaaagacttaccttgaacatcataagaaaactcataaggcaaatgcttccaattcacctgaaggaaacaaaaccaaaggccgaagtacaagatctaaggctcttgtc

SEQ ID NO: 6898 - DNA, 483 bp, Homo sapiens
  source 1..483: mol_type = genomic DNA
atgaaccagtttggcccctcagccctaatcaacctctccaatttctcatccataaaaccggaaccagccagcacccctccacaaggctccatggccaatagtactgcagtggtaaagataccaggcactcctggggcaggaggtcgtcttagccctgaaaacaatcaggtattgaccaagaagaaattacaggacttagtaagagaagtggatcctaatgagcagttggatgaagatgtggaggagatgctgctgcagattgctgatgattttatcgagagtgtggtgacagcagcctgtcagcttgcgcggcatcgcaagtctagcaccctggaggtgaaagatgtccagctgcatttagagcgccagtggaacatgtggatcccaggatttggctctgaagaaatccgaccctacaaaaaagcttgcaccacagaagctcacaaacagagaatggcattgatccggaaaacaaccaagaaa

SEQ ID NO: 6899 - DNA, 1563 bp, Homo sapiens
  source 1..1563: mol_type = genomic DNA
atggggaggaaaaagattcagatccagcgaatcaccgacgagcggaaccgacaggtgactttcaccaagcggaagtttggcctgatgaagaaggcgtatgagctgagcgtgctatgtgactgcgagatcgcactcatcatcttcaaccactccaacaagctgttccagtacgccagcaccgacatggacaaggtgctgctcaagtacacggagtacaatgagccacacgagagccgcaccaacgccgacatcatcgagaccctgaggaagaagggcttcaacggctgcgacagccccgagcccgacggggaggactcgctggaacagagccccctgctggaggacaagtaccgacgcgccagcgaggagctcgacgggctcttccggcgctatgggtcaactgtcccggcccccaactttgccatgcctgtcacggtgcccgtgtccaatcagagctcactgcagttcagcaatcccagcggctccctggtcaccccttccctggtgacatcatccctcacggacccgcggctcctgtccccccagcagccagcactacagaggaacagtgtgtctcctggcctgccccagcggccagctagtgcgggggccatgctggggggtgacctgaacagtgctaacggagcctgccccagccctgttgggaatggctacgtcagtgctcgggcttcccctggcctcctccctgtggccaatggcaacagcctaaacaaggtcatccctgccaagtctccacccccacctacccacagcacccagcttggagcccccagccgcaagcccgacctgcgagtcatcacttcccaggcaggaaaggggttaatgcatcacttgactgaggaccatttagatctgaacaatgcccagcgccttggggtctcccagtctactcattcgctcaccaccccagtggtttctgtggcaacgccgagtttactcagccagggcctccccttctcttccatgcccactgcctacaacacagattaccagttgaccagtgcagagctctcctccttaccagcctttagttcacctggggggctgtcgctaggcaatgtcactgcctggcaacagccacagcagccccagcagccgcagcagccacagcctccacagcagcagccaccgcagccacagcagccacagccacagcagcctcagcagccgcaacagccacctcagcaacagtcccacctggtccctgtatctctcagcaacctcatcccgggcagccccctgccccacgtgggtgctgccctcacagtcaccacccacccccacatcagcatcaagtcagaaccggtgtccccaagccgtgagcgcagccctgcgcctccccctccagctgtgttcccagctgcccgccctgagcctggcgatggtctcagcagcccagccgggggatcctatgagacgggagaccgggatgacggacggggggacttcgggcccacactgggcctgctgcgcccagccccagagcctgaggctgagggctcagctgtgaagaggatgcggcttgatacctggacattaaag

SEQ ID NO: 6900 - DNA, 792 bp, Homo sapiens
  source 1..792: mol_type = genomic DNA
atggacacccccagcccagacccgttgccttcgcctttgcccggggaggaagagaaacctctggccttatctcctcctgttccccggggccgccgaggccgtcgtcctgggggagccacctcctcaaatcggacactcaaggcctccctccctcgcaagcggggccgcccccccaagtcagggcaggagcccccactggtgcaggtgcagggggtgacagccccagtaggcagcagtggcgggagcgacctcctcctgatcgatgatcagggtgtgccctatacggtctctgaaggttcagcggctgggcctgagggctctggccccaggaaggccccacacttctgcccggtgtgcctgcgggccttcccctacctctccgacctggagcgccacagcatctcgcactcagagctgaagccgcaccagtgcaaggtttgcggcaagaccttcaagcgctccagccacctgcggcggcactgcaacatccatgccggcctgcggcccttccgctgcccgctgtgcccccgccgcttccgcgaggcgggcgagctggcgcaccaccaccgcgtgcactcgggggagcgcccgtaccagtgccccatctgccggctgcgctttacagaggccaacacgctccggcgccatgcgaagcgcaagcacccggaggccatgggggtacccctgtgtgcaccagatccagggtctgaaccgccgtgggacgaggagggcatcccggccacagcaggggccgaggaagaggaggagacagaggggaaaggggagccggcc

SEQ ID NO: 6901 - DNA, 801 bp, Homo sapiens
  source 1..801: mol_type = genomic DNA
atgccccgcgcgttcctggtgaagaagccgtgcgtctccacgtgcaagaggaactggagcgagctccccgacgaggagcgcggcgagatctacgtgccagtcagcctgggcttctgcccaccacagccctaccgggagccggaaccctctgtggccgaacccccttcctgcccgctggctttgaacatgagccttcgagactctagctacagcatggcccccgggccctgtgtggtggcccagctgccctctgaagacatgggccacttgacagacccccagagcagagaccatggcttcctgcgcaccaagatgaaggtgacccttggggacagtcccagtggagacctgttcacctgccgtgtctgccagaaggccttcacctaccagcgcatgctgaaccgccacatgaagtgtcacaacgacgtcaagaggcacctctgcacgtactgcgggaagggcttcaatgacaccttcgacctcaagagacacgtccgaactcacactggcgtgcggccctacaagtgcagcctgtgtgacaaggccttcacgcagcgctgctctctggagtctcacctcaagaagatccatggtgtgcagcagaagtacgcgtacaaggagcggcgggccaagctgtacgtgtgtgaggagtgcggctgcacatctgagagccaggagggccacgtcctgcacctgaaggagcaccaccctgacagcccgctgctgcgcaagacctccaagaaggtggccgtggcactacagaacactgtcacttccctgctgcagggcagcccccacctg

SEQ ID NO: 6902 - DNA, 843 bp, Homo sapiens
  source 1..843: mol_type = genomic DNA
atgtcccacgggacctactacgagtgtgagccccggggtggccagcagccactcgagttctcagggggccgagctgggcccggggagctaggggacatgtgtgagcatgaggcctccattgacctctccgcctacatcgagtctggggaagagcagcttctctccgatctctttgccgtgaagccagcgcctgaggccagaggcctcaagggccccggaacccctgccttcccccactacttgccgcctgaccctcggccctttgcctaccctccacataccttcggcccagacaggaaggcgctggggcctggcatctacagcagcccagggagctacgaccccagggctgtggcggtgaaggaggagccccgggggccagagggcagccgagctgccagccgaggcagctacaatcccctgcagtaccaagtggcacactgtgggcagacagccatgcacctgcccccaactctggcagcacccggccagcctctgcgcgttctcaaggcccctttggccactgccgcacccccctgcagtcccctcctgaaggcgccctccccggctggccccttacacaagggcaagaaggcagtgaacaaagatagccttgagtaccggctgaggcgggagcgcaacaacatcgccgtgcgcaagagccgagacaaggccaagaggcgcattctggagacgcagcagaaggtgctggagtacatggcagagaacgagcgcctccgcagccgcgtggagcagctcacccaggagctagacaccctccgcaacctcttccgccagattcctgaggcggccaacctcatcaagggcgtggggggttgcagc

SEQ ID NO: 6903 - DNA, 1599 bp, Homo sapiens
  source 1..1599: mol_type = genomic DNA
atggccaccagtttccggacagcttcgtgctggggattattgtcattcaaggatatatctatggagttcacctgggatgaatggcagctactggattctacacagaagtacctgtacagagatgtgatattggaaaactatcataacctgatatcagtggggtatcatggtaccaagcctgacttaatcttcaagttggaacaaggagaagatccatggataataaatgccaaaatttccaggcagagctgtccagatggctgggaagaatggtaccagaacaatcaagatgagcttgagagtattgaaagaagctatgcttgtagtgtgttgggaagacttaatctgagcaaaacccatgattcttcaagacagagactctataacacacgtggaaaaagtttgacacaaaactcagctccaagcagaagttatttaagaaagaatcctgataagtttcatggttatgaagaaccatattttcttaagcatcaaagagctcatagcatagaaaaaaactgtgtgtgtagtgaatgtgggaaagcttttcgttgtaagtcacagctcattgtacatctcagaattcatacaggagagagaccttatgaatgcagtaaatgtgaaagagccttcagtgccaagtcaaaccttaatgctcatcagagagttcatacaggagaaaaaccctactcatgtagtgagtgcgagaaggtcttctctttcaggtcacagctcattgtccatcaggaaattcacacaggagggaaaccctatggctgcagtgaatgtgggaaagcctacagttggaaatcacagcttcttttacaccagagaagtcacacaggagtgaaaccgtatgaatgcagcgaatgtgggaaagcctttagtttgaagtctccattcgttgtacaccagagaactcatacaggagtgaaaccccataaatgcagtgaatgtgggaaagcctttaggagtaagtcctatctccttgttcacatccgaatgcatacaggagaaaaaccctatcaatgcagtgattgtgggaaagccttcaatatgaagacacaactcattgtacatcagggagttcacacaggaaataatccttatcaatgcggcgaatgtgggaaagcctttggtaggaaggaacagctcactgcacatctgagagctcatgcaggagagaagccctatggatgcagtgaatgtgggaaggctttcagcagcaagtcataccttgttatacataggagaacacacaccggagagagaccctatgaatgtagtttgtgtgagagagccttttgtggaaaatcacagctgattatacatcagagaactcattcaactgagaagccctatgaatgcaatgaatgtgaaaaagcctaccctaggaaggcatcacttcagatacaccagaaaactcattcgggagagaaaccttttaaatgcagtgaatgtggaaaagccttcactcagaagtcatctctcagtgaacatcagagagttcacactggagagaaaccatggaaatgctctgaatgtgggaaatccttctgttggaattcagggcttcgtatacatcggaagactcataaa

SEQ ID NO: 6904 - DNA, 1797 bp, Homo sapiens
  source 1..1797: mol_type = genomic DNA
atggcggcggaagaggaggctgcggcgggaggtgaggttgccggtggcgaggcgacggccccaggtaaagtgttgagagaggagaaccagtgcattgctcctgtggtttccagccgcgtgagtccagggacaagaccaacagctatggggtctttcagctcacacatgacagagtttccacgaaaacgcaaaggaagtgattcagacccatcccaagaagctcatagccaaactgaaaagcggaggagagataaaatgaataacctgattgaagaactgtctgcaatgatccctcagtgcaaccccatggcgcgtaaactggacaaacttacagttttaagaatggctgttcaacacttgagatctttaaaaggcttgacaaattcttatgtgggaagtaattatagaccatcatttcttcaggataatgagctcagacatttaatccttaagactgcagaaggcttcttatttgtggttggatgtgaaagaggaaaaattctcttcgtttctaagtcagtctccaaaatacttaattatgatcaggctagtttgactggacaaagcttatttgacttcttacatccaaaagatgttgccaaagtaaaggaacaactttcttcttttgatatttcaccaagagaaaagctaatagatgccaaaactggtttgcaagttcacagtaatctccacgctggaaggacacgtgtgtattctggctcaagacgatcttttttctgtcggataaagagttgtaaaatctctgtcaaagaagagcatggatgcttacccaactcaaagaagaaagagcacagaaaattctatactatccattgcactggttacttgagaagctggcctccaaatattgttggaatggaagaagaaaggaacagtaagaaagacaacagtaattttacctgccttgtggccattggaagattacagccatatattgttccacagaacagtggagagattaatgtgaaaccaactgaatttataacccggtttgcagtgaatggaaaatttgtctatgtagatcaaagggcaacagcgattttaggatatctgcctcaggaacttttgggaacttcttgttatgaatattttcatcaagatgaccacaataatttgactgacaagcacaaagcagttctacagagtaaggagaaaatacttacagattcctacaaattcagagcaaaagatggctcttttgtaactttaaaaagccaatggtttagtttcacaaatccttggacaaaagaactggaatatattgtatctgtcaacactttagttttgggacatagtgagcctggagaagcatcatttttaccttgtagctctcaatcatcagaagaatcctctagacagtcctgtatgagtgtacctggaatgtctactggaacagtacttggtgctggtagtattggaacagatattgcaaatgaaattctggatttacagaggttacagtcttcttcataccttgatgattcgagtccaacaggtttaatgaaagatactcatactgtaaactgcaggagtatgtcaaataaggagttgtttccaccaagtccttctgaaatgggggagctagaggctaccaggcaaaaccagagtactgttgctgtccacagccatgagccactcctcagtgatggtgcacagttggatttcgatgccctatgtgacaatgatgacacagccatggctgcatttatgaattacttagaagcagaggggggcctgggagaccctggggacttcagtgacatccagtggaccctc

SEQ ID NO: 6905 - DNA, 1764 bp, Homo sapiens
  source 1..1764: mol_type = genomic DNA
atggcggcggaagaggaggctgcggcgggaggtaaagtgttgagagaggagaaccagtgcattgctcctgtggtttccagccgcgtgagtccagggacaagaccaacagctatggggtctttcagctcacacatgacagagtttccacgaaaacgcaaaggaagtgattcagacccatcccaagaagctcatagccaaactgaaaagcggaggagagataaaatgaataacctgattgaagaactgtctgcaatgatccctcagtgcaaccccatggcgcgtaaactggacaaacttacagttttaagaatggctgttcaacacttgagatctttaaaaggcttgacaaattcttatgtgggaagtaattatagaccatcatttcttcaggataatgagctcagacatttaatccttaagactgcagaaggcttcttatttgtggttggatgtgaaagaggaaaaattctcttcgtttctaagtcagtctccaaaatacttaattatgatcaggctagtttgactggacaaagcttatttgacttcttacatccaaaagatgttgccaaagtaaaggaacaactttcttcttttgatatttcaccaagagaaaagctaatagatgccaaaactggtttgcaagttcacagtaatctccacgctggaaggacacgtgtgtattctggctcaagacgatcttttttctgtcggataaagagttgtaaaatctctgtcaaagaagagcatggatgcttacccaactcaaagaagaaagagcacagaaaattctatactatccattgcactggttacttgagaagctggcctccaaatattgttggaatggaagaagaaaggaacagtaagaaagacaacagtaattttacctgccttgtggccattggaagattacagccatatattgttccacagaacagtggagagattaatgtgaaaccaactgaatttataacccggtttgcagtgaatggaaaatttgtctatgtagatcaaagggcaacagcgattttaggatatctgcctcaggaacttttgggaacttcttgttatgaatattttcatcaagatgaccacaataatttgactgacaagcacaaagcagttctacagagtaaggagaaaatacttacagattcctacaaattcagagcaaaagatggctcttttgtaactttaaaaagccaatggtttagtttcacaaatccttggacaaaagaactggaatatattgtatctgtcaacactttagttttgggacatagtgagcctggagaagcatcatttttaccttgtagctctcaatcatcagaagaatcctctagacagtcctgtatgagtgtacctggaatgtctactggaacagtacttggtgctggtagtattggaacagatattgcaaatgaaattctggatttacagaggttacagtcttcttcataccttgatgattcgagtccaacaggtttaatgaaagatactcatactgtaaactgcaggagtatgtcaaataaggagttgtttccaccaagtccttctgaaatgggggagctagaggctaccaggcaaaaccagagtactgttgctgtccacagccatgagccactcctcagtgatggtgcacagttggatttcgatgccctatgtgacaatgatgacacagccatggctgcatttatgaattacttagaagcagaggggggcctgggagaccctggggacttcagtgacatccagtggaccctc

SEQ ID NO: 6906 - DNA, 1377 bp, Homo sapiens
  source 1..1377: mol_type = genomic DNA
atggcagcccccttggaggcccaggaccaggcccctggggagggagaagggcttctgattgtgaaagtggaagattcctcctgggaacaggaatctgcccagcatgaggatggcagggattccgaagcctgccgccagcgcttccggcaattctgctacggggatgtgcatgggcctcatgaggccttcagccagctctgggagctctgctgccgctggctgcggcccgagctgcgtaccaaggagcagatcctggagctgctggtgctggagcagttcctgacagtgctgccaggggagatccagggctgggtgcgtgagcagcacccgggaagcggtgaggaggctgtcgccttggtggaggacctacagaagcagccagtgaaagcctggcgacaggatgtgccctcggaggaggcggaacccgaggctgcaggccggggatcccaggccacggggcctcccccgacggtgggggcacggaggcggccgtctgttccccaggagcagcacagccatagcgcccagcctcctgctcttcttaaagagggtcgtcccggagagacgacggacacctgctttgtctctggggtccatggacctgtggcattgggagacatcccattctatttctcccgggaagaatggggcaccctggaccctgctcagcgggatctcttctgggacataaagcgggagaactcccggaacaccaccctgggttttgggctcaaaggccaaagtgagaagtccctgctgcaggagatggtgccggtggtgccaggccagacaggcagcgacgtgactgtgtcctggagccccgaggaggctgaggcctgggagagcgagaaccggccgagggcggccctgggcccagtggtgggcgcgcgacgggggcggccacccactcgccggcgccagttccgggacctggcagccgagaagccgcacagctgcgggcagtgtggaaagcgcttccgctggggctcggacctggcgcggcaccagcgcacgcacacgggcgagaagccacacaagtgccctgagtgcgacaagagcttccgcagctcctcggacctggtgcgccaccaaggcgtgcacacgggcgagaagcccttctcctgttccgagtgcggcaagagcttcagccgcagcgcctacctggccgaccaccagcgcatacacacgggcgagaagcctttcggctgcagcgactgcggcaagagcttctcgctgcgctcctacctgctggaccatcggcgtgtgcacaccggtgagcggcccttcggctgcggagagtgcgacaagagcttcaagcagcgcgcgcacctcatcgcgcatcagagcctgcacgccaagatggcccagcccgtgggg

SEQ ID NO: 6907 - DNA, 1002 bp, Homo sapiens
  source 1..1002: mol_type = genomic DNA
atgaagccacctcccaggcggcgagcggccccggcgcgctatctgggcgaggtgaccggtcccgcgacctggagcgctcgcgagaagcggcagctagtgcgactcctgcaggcgcggcagggccagccggagccggacgccaccgagctggcccgggagctgcggggccggagcgaggctgagatccgggtcttcctccagcagctcaagggccgcgtagcccgggaggccattcagaaagtgcatccgggtggccttcagggaccaaggcgccgggaggcacagcccccagcccccatagaggtctggacggatctggctgagaagataacagggccactggaagaagccctggcagtggctttctcgcaggtgctcaccatcgcggccacggaaccggtcaccctcctgcactccaagccccccaagcccacgcaggcccgtggaaagcctttgctcctgagcgcccctggaggacaggaagaccccgcccctgaaatacctagctctgcccctgctgcacctagctccgcacccaggactcctgaccctgcccctgagaaaccttctgagtcgtcggctggtccctccactgaagaagactttgctgtggactttgagaagatctacaagtacttgtcctctgtctcccgaagtggccgcagccccgagctctcagcagctgagtccgctgtggtcctcgacctgctcatgtcacttccagaggagctgccactcctgccctgcacagccctggttgagcatatgacggagacgtacctacgcctgacagccccccagcccattcccgctggagggagcctggggcctgcagcagaaggggatggggctggctccaaggcaccagaggagacccccccagccaccgagaaggccgagcacagcgaactgaaatcgccttggcaagcagctgggatctgtcccctgaacccgttcctggtgcccctggagcttctgggtcgggcagccacccctgccagg

SEQ ID NO: 6908 - DNA, 1617 bp, Homo sapiens
  source 1..1617: mol_type = genomic DNA
atggcggccttgttcctgtctgccccaccccaggccgaggtgaccttcgaggacgtggctgtgtacctctcccgggaggaatggggccgcctgggccctgctcagaggggcctctacagggacgtgatgctggagacctacgggaacctagtctcactgggagtaggacctgcaggccccaagcctggagtgatctcgcagttggagcgaggggatgagccctgggtcctggatgttcagggcacctctgggaaagagcacctgagagtcaacagcccagctcttgggaccagaactgagtacaaggagttgacttcacaggagacatttggtgaggaagatccccagggatctgagccagtagaagcctgtgaccacatcagtaagtcagaggggagcctggaaaagctagtggagcagagaggccccagggcagtcacactgaccaacggggagagcagcagggagtctgggggaaacctcaggttgctgtcaagacctgttcctgatcagagacctcacaaatgtgatatatgtgagcaaagttttgaacagagatcatatctcaacaaccataagcgtgtacacaggtcaaaaaaaacaaatacagttcgtaactctggggaaatcttcagtgcaaacttagttgttaaagaagatcagaaaattcctactgggaaaaaattgcattattgcagttactgtgggaaaacattcaggtacagtgccaaccttgtcaagcatcagcggcttcacactgaagagaagccctacaaatgtgatgagtgtgggaaagccttcagccagagctgcgagttcatcaatcaccgaaggatgcactcaggagagattccctaccggtgtgacgagtgtgggaagacattcacccggaggcccaacctcatgaagcaccagaggattcacactggggagaaaccctacaagtgtggggagtgtgggaagcactttagcgcctactcttccctgatttatcaccagagaatccacaccggagagaaaccctataaatgtaatgactgcgggaaagccttcagtgatggctcaatccttatccgacatcgtcggactcacaccggagagaagccatttgagtgcaaggaatgtggcaaaggctttacacaaagttctaaccttatccaacatcagagaattcacactggagagaaaccctataaatgtaatgaatgtgagaaagctttcattcaaaaaaccaaactcgtggaacatcagagaagccacactggagagaagccctatgaatgcaatgactgtggcaaagttttcagccaaagcacacacctcatccagcaccagagaatccacacaggagagaagccctacaagtgcagcgagtgtgggaaggccttccacaacagttccagactcatccaccaccagaggctgcaccacggagagaaaccctacagatgcagcgattgcaagaaagccttcagccagagcacgtacttgattcagcaccggaggatccacaccggggagaagccctacaagtgcagcgagtgtgggaaggccttccggcacagttccaacatgtgtcagcatcagcggattcacctccgggaggacttctccatg

SEQ ID NO: 6909 - DNA, 2241 bp, Homo sapiens
  source 1..2241: mol_type = genomic DNA
atggaaataccaaatccccctacctccaaatgtatcacttactggaaaagaaaagtgaaatctgaatacatgcgacttcgacaacttaaacggcttcaggcaaatatgggtgcaaaggctttgtatgtggcaaattttgcaaaggttcaagaaaaaacccagatcctcaatgaagaatggaagaagcttcgtgtccaacctgttcagtcaatgaagcctgtgagtggacacccttttctcaaaaagtgtaccatagagagcattttcccgggatttgcaagccaacatatgttaatgaggtcactgaacacagttgcattggttcccatcatgtattcctggtcccctctccaacagaactttatggtagaagatgagacggttttgtgcaatattccctacatgggagatgaagtgaaagaagaagatgagacttttattgaggagctgatcaataactatgatgggaaagtccatggtgaagaagagatgatccctggatccgttctgattagtgatgctgtttttctggagttggtcgatgccctgaatcagtactcagatgaggaggaggaagggcacaatgacacctcagatggaaagcaggatgacagcaaagaagatctgccagtaacaagaaagagaaagcgacatgctattgaaggcaacaaaaagagttccaagaaacagttcccaaatgacatgatcttcagtgcaattgcctcaatgttccctgagaatggtgtcccagatgacatgaaggagaggtatcgagaactaacagagatgtcagaccccaatgcacttccccctcagtgcacacccaacatcgatggccccaatgccaagtctgtgcagcgggagcaatctctgcactccttccacacacttttttgccggcgctgctttaaatacgactgcttccttcacccttttcatgccacccctaatgtatataaacgcaagaataaagaaatcaagattgaaccagaaccatgtggcacagactgcttccttttgctggaaggagcaaaggagtatgccatgctccacaacccccgctccaagtgctctggtcgtcgccggagaaggcaccacatagtcagtgcttcctgctccaatgcctcagcctctgctgtggctgagactaaagaaggagacagtgacagggacacaggcaatgactgggcctccagttcttcagaggctaactctcgctgtcagactcccacaaaacagaaggctagtccagccccacctcaactctgcgtagtggaagcaccctcggagcctgtggaatggactggggctgaagaatctctttttcgagtcttccatggcacctacttcaacaacttctgttcaatagccaggcttctggggaccaagacgtgcaagcaggtctttcagtttgcagtcaaagaatcacttatcctgaagctgccaacagatgagctcatgaacccctcacagaagaagaaaagaaagcacagattgtgggctgcacactgcaggaagattcagctgaagaaagataactcttccacacaagtgtacaactaccaaccctgcgaccacccagaccgcccctgtgacagcacctgcccctgcatcatgactcagaatttctgtgagaagttctgccagtgcaacccagactgtcagaatcgtttccctggctgtcgctgtaagacccagtgcaataccaagcaatgtccttgctatctggcagtgcgagaatgtgaccctgacctgtgtctcacctgtggggcctcagagcactgggactgcaaggtggtttcctgtaaaaactgcagcatccagcgtggacttaagaagcacctgctgctggccccctctgatgtggccggatggggcaccttcataaaggagtctgtgcagaagaacgaattcatttctgaatactgtggtgagctcatctctcaggatgaggctgatcgacgcggaaaggtctatgacaaatacatgtccagcttcctcttcaacctcaataatgattttgtagtggatgctactcggaaaggaaacaaaattcgatttgcaaatcattcagtgaatcccaactgttatgccaaagtggtcatggtgaatggagaccatcggattgggatctttgccaagagggcaattcaagctggcgaagagctcttctttgattacaggtacagccaagctgatgctctcaagtacgtggggatcgagagggagaccgacgtcctt

SEQ ID NO: 6910 - DNA, 516 bp, Homo sapiens
  source 1..516: mol_type = genomic DNA
atgcataaattttcaaattcaaatagacacaagataagacatactgaaaataaacatttcagatgtaaagaatgtgacaaatcactttgcatgctttcacgcctaactcaacataaaaaaattcatactagagagaatttctacaaatgtgaagagtgtggaaaaacctttaactggtccacaaacctttctaaacctaagaaaattcatactggagaaaaaccctacaaatgtgaagtatgtggaaaagcctttcaccaatcctcaatccttactaaacataagataattcgtactggagaaaaaccctataaatgtgcacactgtggcaaagcctttaaacagtcctcacaccttactagacataagataattcatactgaagagaaaccctacaaatgtgaacaatgtggcaaggtctttaagcagtccccaacccttactaaacatcagataatttatactggagaggaaccatacaaatgtgaggaatgtggcaaagcttttaacctatct

SEQ ID NO: 6911 - DNA, 1653 bp, Homo sapiens
  source 1..1653: mol_type = genomic DNA
atgtttgggattcaggagaatattccgcgcggggggacgaccatgaaggaggagccgctgggcagcggcatgaacccggtgcgctcgtggatgcacacggcgggcgtggtggacgccaacacggccgcccagagcggcgtggggctggcgcgggcgcacttcgagaagcagccgccttccaacctccggaaatccaatttcttccacttcgtgctggcgctctacgataggcaggggcagccggtggagattgaaaggaccgcttttgtggactttgtggagaaagagaaagagccaaacaacgagaaaaccaacaacggcatccactataaactccagttattgtacagcaacggagtcagaacagagcaagatctgtatgttcgcctcatagattcaatgaccaaacaggccatcgtctacgagggccaggacaagaacccggagatgtgccgtgtgctgctgacccacgagatcatgtgcagccggtgctgtgacaagaaaagttgtggcaatagaaacgaaacgccctcagaccctgtaatcattgacagattctttctaaagtttttcctcaagtgcaatcagaactgtttgaagaatgcaggcaaccctcgagatatgcggagattccaggttgttgtatcgacaacagtcaacgtggacggccacgtgctggccgtgtcagacaacatgtttgtgcacaacaattccaaacacgggaggcgggcccgccgcctagacccgtcagaagccactccgtgcatcaaggccatcagtcccagtgaaggctggaccacggggggtgccaccgtcatcataattggcgacaacttctttgacgggctgcaagttgtattcggaactatgttggtgtggagcgagctgataactccccatgccatccgagtccagaccccgccgaggcacattcctggcgtcgtcgaagtgaccctctcctacaaatccaagcagttctgcaaaggtgctcctgggcgctttgtctacaccgcccttaatgaaccaaccatagattacggctttcagaggttgcagaaagtgatcccaagacatccgggtgatcccgaaaggttacccaaggaggtgttactgaagcgggcggcggacctggtggaagccttatacggaatgcctcacaacaaccaggagatcatcttgaagcgagcggcggacatcgccgaggcgctgtacagcgttccccgcaatcacaaccagatccccaccctgggcaacaaccctgcacacacgggcatgatgggcgtcaactccttcagcagccagctagccgtcaacgtgtcagagacgtcacaagccaacgaccaagtcggctacagtcgcaatacaagcagcgtgtccccgcgaggctacgtccccagcagtactccccagcagtccaattacaacacagtcagcactagcatgaatggatatggaagtggcgccatggccagtctaggggtccctggctcgcctggatttcttaatggctcctccgctaactctccctacggcatgaaacagaagagcgccttcgcgcccgtggtccggccccaagcctctcctcctccttcctgcaccagcgccaacgggaatggactgcaagctatgtctgggctggtagtcccgccaatg

SEQ ID NO: 6912 - DNA, 2403 bp, Homo sapiens
  source 1..2403: mol_type = genomic DNA
atgcatcacaggatgaatgaaatgaacctgagtccagtggggatggagcagctgacttcatcctctgtgagcaatgccttgccagtctcaggaagtcacctgggattggctgcctcacccactcacagtgccatccctgccccaggcctcccagtggcaattccaaacctgggtccctccctgagctctctgccttctgctctgtctttaatgctaccaatgggtattggggatcgaggggtgatgtgtgggttacctgaaagaaactacaccctacctccaccaccttaccctcacctggagagcagttatttcagaaccattctacctggcattttatcttatttagctgacagaccacctccacagtacatccaccctaactctataaatgttgatggtaatacagcattatctatcaccaataacccttcagcactagatccctatcagtccaatggaaatgttggattagaaccaggcattgtttcaatagactctcgctctgtgaacacacatggtgcccaaagtcttcatcccagtgatggccatgaggtggccttggacacagcaatcactatggagaacgtttctagggttaccagcccaatttcgacagatggaatggcagaggagcttacgatggacggtgttgcaggcgagcattcccaaatcccaaatggctccagaagtcatgaacctctgtctgtggattctgtgagcaacaaccttgcagcagacgctgtaggacatggtggtgtgatacccatgcatgggaatggcctggagctccctgtggtcatggagacagaccacattgcaagtcgggtcaatggcatgtctgacagtgccctcagtgactccattcacactgtggccatgagcaccaactctgtaagcgtggcactctctacctcacacaaccttgcctccctagaatctgtttccctccatgaagttggcctcagcctagaacctgtggctgtctcctccatcacccaggaggttgctatggggacaggtcatgtagatgtatcttcagacagtctttcttttgtatcaccttcactgcaaatggaagactccaattcaaacaaggagaacatggcaaccttgtttacaatttggtgtactctgtgtgaccgcgcctatccctcggactgtcccgaacatggaccagtgacttttgttcctgacactccaatagagagcagagcaaggctttctctcccaaagcagcttgttctccgtcagtcaattgtgggagcagaagttggtgtatggactggagaaaccattcctgtgcggacttgctttggacctctaattggccagcagagtcactccatggaagtagcagaatggacagacaaggcagttaaccatatctggaagatataccacaatggtgtcctagaattctgcatcattacaactgatgaaaatgaatgtaattggatgatgtttgtgcgcaaagccaggaaccgggaagagcagaatttggtggcttatcctcatgatggaaaaatctttttctgcacctcacaagatatccctcctgaaaatgaactgcttttttattatagccgagattatgctcaacagattggtgttcctgaacacccagatgtgcatctctgtaactgtggcaaggagtgcaattcttacacagagttcaaagcccatctgaccagccacatccataaccatcttcctacccagggacatagcggcagccatgggccaagtcacagcaaagaaaggaagtggaagtgctcaatgtgcccccaagcttttatctctccttccaaacttcatgtccactttatgggtcacatgggtatgaagccccacaagtgtgatttctgtagcaaggcttttagtgatcccagcaacctgcggacccacctcaagatacatacaggtcagaagaactacaggtgtaccttgtgtgacaagtctttcacccagaaggctcacctggagtcccacatggttatccacactggggagaagaatcttaagtgtgattactgtgacaagttgtttatgcggaggcaggacctcaagcagcacgtgctcatccacactcaagaacgccagatcaagtgtcccaagtgtgataagctgttcttgagaacaaatcacttaaagaagcatctcaattctcatgaaggaaaacgggattatgtctgtgaaaaatgtacaaaggcttatctaaccaaataccatctcacccgccacctgaaaacctgcaaagggcccacctccagttcgtcagcaccagaggaggaagaagaggatgactcagaagaggaagatctagcagactctgtggggacagaagactgtaggattaacagtgctgtgtattcagcggatgagtctctttctgcacataaa

SEQ ID NO: 6913 - DNA, 1884 bp, Homo sapiens
  source 1..1884: mol_type = genomic DNA
atgaaaggcagtaatagaaataaggatcattcagcagaaggagaaggggttggaaaacgaccaaaacgaaagtgtcttcagtggcatccattgctagcaaagaaacttcttgatttttcagaagaggaagaagaggaagacgaagaggaggatattgataaggttcaacttcttggggccgatggcctagagcaagatgttggtgaaactgaagatgatgaatcaccagagcagcgagcccggagaccaatgaatgcatttcttttattttgcaaacgccatcgctctcttgtacgtcaggaacaccccaggcttgataaccgaggtgctaccaagatactagctgattggtgggctgttcttgatccaaaggaaaagcagaaatacacagacatggccaaggagtataaggatgcatttatgaaagcaaatcctggctacaaatggtgtcctaccacaaacaagcctgtgaaatccccaacacccactgtcaatccacgaaagaaactttgggccttcccatctgactcttcaagagacttgccaagccccaagaaagcaaagactgaagaaatgcctcagcttaactttggaatggctgatcctactcaaatgggaggcctgagtatgctgctgttagctggagaacatgctcttggcacaccagaggtatcctctggcacatgcaggcctgatgtttcagaatctcctgaattacgtcagaagtcaccattgtttcagtttgccgagatatcttcaagtacgtcccactctgatgcttctacaaagcagtgtcaaacatctgccttgtttcagtttgcagagatttcttcaaacacttcgcagttgggtggtgctgagcctgtaaaacgctgtggaaagtctgcactctttcaactggcagaggaaaacgaagctcaggaaaaggaaactcctctgatcatgaagggtgttggaatgaagaaagctggacatttagtcagagtgggaccagtgggagcaagaagttcaagaagacaaagccaaaagaagactgtctccttggctccgcaaagctggatgaagaatttgaaaaaaaattcaacagcctccctcaatatagtcctgttacatttgaccggaaatgtgtacctgtcccaagaaaaaagaagaagactggaaatgtgtcctcagaaccgactaaaaccagcaaaggtcctttccagtctcagaaaaagaacttattccacaaaattgtcagcaaatataagcacaaaaaggagaagcccaatgttccggaaaaaggaagtggggataaatggtcaaacaagcaactcttcttggatgccattcaccctacagaagccatattttcagaagacagaaacaccatggagcctgttcataaggttaaaaatatcccatccattttcaacactccagagccaacaacaacgcaagaacctttggtgggcagccaaaagagaaaagcaaggaaaaccaagattacacaccttgtcaggacagcagatggccgggtatcaccagcaggaggtactttggatgacaaaccaaaggaacaactgcagaggagtctccctaaagcaactgagacagactgcaatgacaaatgctcacacaacaccgaggtcggggagacgcggagcagtactccagaaatgcctgccgtgtctgcgttctttagcctcgctgcgctggctgaagtggcagccatggaaaatgtgcacagaggtcagaggtcaactccgctcacccatgatggacagccaaaagaaatgccgcaggctcctgtacttatttcctgcgctgaccagtgaagcgccctttcattgtaaaacattgtgctttacctactaccctagccttgtctttaccgagggatgc

SEQ ID NO: 6914 - DNA, 321 bp, Homo sapiens
  source 1..321: mol_type = genomic DNA
atgagtgagtcgagctcgaagtccagccagcccttggcctccaagcaggaaaaggacggcactgagaagcggggccggggcaggccgcgcaagcagcctccggtgagtcccgggacagcgctggtagggagtcagaaggagcccagcgaagtgccaacacctaagagacctcggggccgaccaaagggaagcaaaaacaagggtgctgccaagacccggaaaaccaccacaactccaggaaggaaaccaaggggcagacccaaaaaactggagaaggaggaagaggagggcatctcgcaggagtcctcggaggaggagcag

SEQ ID NO: 6915 - DNA, 288 bp, Homo sapiens
  source 1..288: mol_type = genomic DNA
atgagtgagtcgagctcgaagtccagccagcccttggcctccaagcaggaaaaggacggcactgagaagcggggccggggcaggccgcgcaagcagcctccgaaggagcccagcgaagtgccaacacctaagagacctcggggccgaccaaagggaagcaaaaacaagggtgctgccaagacccggaaaaccaccacaactccaggaaggaaaccaaggggcagacccaaaaaactggagaaggaggaagaggagggcatctcgcaggagtcctcggaggaggagcag

SEQ ID NO: 6916 - DNA, 1347 bp, Homo sapiens
  source 1..1347: mol_type = genomic DNA
atggagtttttcatcagtatgtctgaaaccattaaatataatgacgatgatcataaaactctgtttctgaaaacactaaatgaacaacgcctggaaggagaattttgtgatattgctattgtggttgaggatgtgaaattcagagcacacagatgtgttcttgctgcctgcagcacctactttaaaaagcttttcaagaagcttgaggttgatagttcttcggtcatagaaatagattttcttcgttctgatatatttgaagaggtcctgaactacatgtacacagcaaagatttccgtgaaaaaagaagatgttaacttaatgatgtcatcgggtcagattcttggtatccgatttttggataaactgtgttctcagaagcgtgatgtgtccagtcccgatgaaaacaatggtcagtccaaaagtaagtattgccttaaaataaatcgccccattggagatgctgctgacacccaggatgatgatgtagaggaaatcggggatcaggatgacagtccttctgatgacacagtagaaggcacacccccgagtcaggaggacggcaagtcgcccaccacaacgctcagggttcaggaagcgatcctgaaagagctggggagtgaggaagttcggaaggtcaattgctacggccaggaagtagaatccatggagaccccagaatcaaaagacttggggtcccagacccctcaagccttaacatttaatgatgggatgagtgaagtgaaagatgaacagacaccaggctggacaacagccgccagtgacatgaagtttgagtatttgctttatggtcaccatcgggagcagattgcctgccaggcgtgtgggaagacgttttctgatgaaggcagattgaggaagcatgagaaactccacacggcggacaggccatttgtttgtgaaatgtgcacaaaaggtttcaccacacaggcccacctgaaagaacacctaaaaatccacacaggatataagccctatagctgtgaggtgtgtggaaaatcatttatccgtgccccagacttaaagaagcatgagagagttcacagtaatgaaagaccgtttgcgtgccacatgtgtgacaaagccttcaaacacaagtctcacctcaaggatcatgaaagaagacacagaggggaaaagccttttgtgtgtggctcctgcaccaaggcatttgccaaggcatctgatctgaaaaggcacgagaacaatatgcacagtgaaaggaagcaggttacccccagtgccatccagagcgagacagaacagttgcaggcggcagcgatggctgcggaagcagaacagcagctggagacgatagcctgtagc

SEQ ID NO: 6917 - DNA, 2859 bp, Homo sapiens
  source 1..2859: mol_type = genomic DNA
atgactttgatatctcaaaggaataatatgcttcaaacaatggattatgagaaaagtgtatcttctttgtcagcaacatcagaattggttacagcatcagtgaatttgaccacaaaatttgaaacaagagataatgttgacttctggggaaatcatctcactcagagtcaccccgaggtattaggtaccaccattaaaagtccagataaagtcaactgtgttgccaaaccaaatgcatacaacagtggagatatgcataattattgcattaattatggcaactgtgagttacctgttgaatcctccaaccaaggatcattaccttttcataattactcaaaagtgaataattctaataaacgtcgtaggttttcaggaacagcagtgtatgaaaaccctcaaagagaatcttcatccagcaaaacagttgtccaacaaccaattagtgaatcatttttatcactagtgaggcaggagagctcaaaaccagatagcctattagcatctattagccttttaaatgataaagatggaactttaaaagcaaaatctgaaattgaagaacagtatgttttagaaaaaggacaaaacattgatggacaaaacctgtacagtaatgaaaatcaaaatttagagtgtgcgactgaaaaatctaaatgggaagacttttctaatgtcgattcacctatgatgcctagaatcacatctgttttctctctccagagccaacaggcatcagaatttctgccacctgaagtaaaccaattgcttcaggatgtattgaaaataaaacctgatgtaaaacaagactctagtaacactccaaataaaggcttgccacttcattgtgaccagtcatttcaaaaacacgagagagaaggcaaaattgttgaatcttcgaaagatttcaaagtgcaaggcatcttcccagttccacctggcagtgtgggtattaatgtgcctacaaatgatttgaatttgaaatttggaaaagaaaaacaagtgtcatcaataccacaagatgtgagagattcagagaagatgcctagaatttcaggttttggcacattacttaagactcagtcagatgcgataataacacagcagcttgtaaaagacaaactacgagccaccacacaaaatttaggttctttttatatgcagagtccacttttaaattcagaacaaaaaaaaactataattgttcagacttcaaaaggattcttaataccattgaacattactaacaagcctgggctaccagttattcctggaaatgcacttccattggttaattcacaaggtatccctgcttctctttttgtaaacaagaaacctgggatggttttaacacttaataatgggaaacttgaaggtgtttccgctgtcaaaaccgagggtgccccagctcgtggaactgtgactaaggagccttgcaaaacacctattttgaaggtagaaccaaacaataattgtcttacacctggactttgttccagcattggcagttgtttgagcatgaaaagtagctcagaaaatactttgccattaaaaggcccttacattttgaaaccaacgagttctgtgaaagctgttcttattcctaacatgctatctgagcaacagagcactaagttgaatatctccgattcagtaaaacagcagaatgagatttttccaaaaccacctctttataccttcttgcctgatggcaaacaagctgtttttttaaagtgtgtgatgccaaataaaactgagctgcttaagcccaaattagtccaaaatagtacttatcaaaatatacagccaaagaaacctgaaggaacaccacaaagaatattgctgaaaatttttaaccctgttttaaatgtgactgctgctaataatctgtcagtaagcaactctgcatcctcattgcaaaaagacaacgtaccatctaatcagattataggaggagagcagaaagagccagaatctagagatgccttacccttcttactagatgacttaatgccagcaaatgaaattgtgataacttctactgcaacatgcccagaatcttctgaggaaccaatatgtgtcagtgactgttcagagtccagggtattaaggtgtaaaacaaattgtagaattgagaggaacttcaatagaaaaaagacttccaaaaaaattttttcaaaaacaaaaactcatggaagtaaagactctgaaactgcctttgtatctagaaacagaaactgtaaacgaaagtgtagggatagttaccaagaacctccaagaagaaaagcaacattgcatagaaagtgtaaagaaaaggcaaaacctgaagatgtccgtgaaacatttggatttagcagacctaggctttcaaaagattccatcagaactttgcggcttttcccttttagttctaaacagcttgtgaaatgtcctaggagaaaccaaccagttgtagttttgaatcatcctgacgcagatgcaccagaagtagtaagtgtaatgaaaactattgctaaatttaatggacatgtacttaaggtttcattgtcaaaaagaactataaatgctttactgaaaccagtttgttataaccctcctaaaacaacttatgatgatttttccaagaggcacaaaacatttaaacctgttagttctgtgaaagaaagatttgtgctaaaattaacactcaaaaagacaagcaaaaacaattaccagattgtgaagactacctctgaaaatattttgaaggctaaatttaactgttggttttgtggtagagtatttgacaatcaggatacttgggctggtcatgggcagagacatttaatggaagctactcgggattggaacatgttagaa

SEQ ID NO: 6918 - DNA, 762 bp, Homo sapiens
  source 1..762: mol_type = genomic DNA
atggatcccgcggccagcagctgcatgaggagcctccagcccccagcccctgtctggggctgccttcgaaacccccactcggaaggcaatggggcctcagggctaccccactacccgcccaccccgttctccttccaccagaaaccagacttcctggcgacagcgacggcagcgtaccctgacttctcagcctcctgcctggcagccaccccacacagcctgccccaggaggagcacatcttcactgagcagcaccccgctttcccacagtcccccaactggcacttccctgtctcagacgcccggcgcaggcccaactcaggcccggcagggggttccaaggaaatggggaccagcagcctgggcctggtggacaccacaggaggcccaggcgatgactacggggtgcttgggagcactgccaatgagacagagaagaaatcatccaggcggagaaaggagagttcagacaaccaggagaacagagggaagccggagggcagcagcaaagcccgcaaggagaggacggccttcaccaaggagcagctgcgagagctggaggcagagtttgcccatcataactacctgactcggctccgcagatatgagattgcggtaaacctggacctctctgagcgccaggtcaaagtgtggttccagaaccgaaggatgaagtggaagcgtgtgaagggaggtcagcccatctcccccaatgggcaggaccctgaggatggggactccacagcctctccaagttcagag

SEQ ID NO: 6919 - DNA, 468 bp, Homo sapiens
  source 1..468: mol_type = genomic DNA
atgatggtgctggacaaggaggacggcgtgccgatgctctccgtccagcccaaagggaagcagaagggctgtgcgggctgtaaccgcaagatcaaggaccgctatctgctgaaggcattggacaagtactggcacgaagactgcctcaagtgtgcctgctgtgactgccgcctgggcgaggtgggctccaccctctacaccaaggccaacctcatcctgtgccgacgcgactacctgaggctctttggcaccacagggaactgtgctgcttgcagcaagctgatcccagccttcgagatggtgatgcgggcccgggacaacgtgtatcacctcgactgcttcgcctgccagctctgcaaccagagattttgtgtgggagacaaattcttcctgaagaacaacatgatcttgtgtcagatggactatgaggaagggcagctcaatggcacctttgaatcccaagttcag

SEQ ID NO: 6920 - DNA, 1281 bp, Homo sapiens
  source 1..1281: mol_type = genomic DNA
atggctcccaagaaacgcccagaaacccagaagacctccgagattgtattacgccccaggaacaagaggagcaggagtcccctggagctggagcccgaggccaagaagctctgtgcgaagggctccggtcctagcagaagatgtgactcagactgcctctgggtggggctggctggcccacagatcctgccaccatgccgcagcatcgtcaggaccctccaccagcataagctgggcagagcttcctggccatctgtccagcaggggctccagcagtcctttttgcacactctggattcttaccggatattacaaaaggctgccccctttgacaggagggctacatccttggcgtggcacccaactcaccccagcaccgtggctgtgggttccaaagggggagatatcatgctctggaattttggcatcaaggacaaacccaccttcatcaaagggattggagctggagggagcatcactgggctgaagtttaaccctctcaataccaaccagttttacgcctcctcaatggagggaacaactaggctgcaagactttaaaggcaacattctacgagtttttgccagctcagacaccatcaacatctggttttgtagcctggatgtgtctgctagtagccgaatggtggtcacaggagacaacgtggggaacgtgatcctgctgaacatggacggcaaagagctttggaatctcagaatgcacaaaaagaaagtgacgcatgtggccctgaacccatgctgtgattggttcctggccacagcctccgtagatcaaacagtgaaaatttgggacctgcgccaggttagagggaaagccagcttcctctactcgctgccgcacaggcatcctgtcaacgcagcttgtttcagtcccgatggagcccggctcctgaccacggaccagaagagcgagatccgagtttactctgcttcccagtgggactgccccctgggcctgatcccgcaccctcaccgtcacttccagcacctcacacctatcaaggcagcctggcatcctcgctacaacctcattgttgtgggccgatacccagatcctaatttcaaaagttgtaccccttatgaattgaggacgatcgacgtgttcgatggaaactcagggaagatgatgtgtcagctctatgacccagaatcttctggcatcagttcgcttaatgaattcaatcccatgggggacacgctggcctctgcaatgggttaccacattctcatctggagccaggaggaagccaggacacggaag

SEQ ID NO: 6921 - DNA, 1959 bp, Homo sapiens
  source 1..1959: mol_type = genomic DNA
atggcattcagggatgtggctgtggatttcacccaggatgagtggaggctgctgagccctgctcaaaggactctgtacagagaggtgatgctggagaactacagcaacctggtctcactgggaatttcattttctaaaccagaactcatcacccagctggagcaagggaaagagacctggagagaggaaaaaaaatgttcaccggcaacctgtccagatccagagccagagctctacctcgatcctttctgccctccgggtttctccagtcagaaattccccatgcagcatgtgctgtgtaatcatcccccctggatcttcacatgcttgtgtgcagaaggtaacatccagcctggggatccaggcccaggggaccaggagaagcagcaacaagcctctgaggggagaccctggagtgatcaagcagaaggtcctgagggagaaggtgccatgcctttgtttggaagaaccaagaaaaggactctgggagcgttctccaggccaccccagaggcagccagtcagctctcggaacggcctcagaggggtggagttagaagccagcccagctcagacagggaaccctgaggaaacagacaaattgttgaagaggatagaagtcttaggatttggaacagtcaactgtggagagtgtggactgagcttcagcaagatgacaaacctgctcagtcaccagcggatacactcaggggagaagccctacgtgtgtggggtatgtgagaagggcttcagcctaaagaagagcctcgccagacaccagaaggcacactcgggggagaagccaattgtgtgcagggagtgtggacgaggctttaaccggaagtcaacgctaatcatacacgaacggacacactccggtgagaaaccttacatgtgcagtgagtgtgggcgaggcttcagccagaagtcaaacctcatcatacaccagaggacacactcaggggaaaagccttatgtgtgccgggaatgtggcaaaggcttcagccagaagtcagctgtcgtgagacaccagaggacacacttggaggagaagaccatcgtgtgcagtgactgtggcctgggcttcagcgacaggtcaaacctcatctcccaccagaggacgcactctggggagaagccctacgcctgcaaggagtgtgggcgatgcttcaggcagaggaccacccttgtcaaccaccagaggacacactcaaaggagaagccctatgtgtgcggggtgtgtgggcacagcttcagccagaattcaaccctcatctctcacaggcggacacacactggggagaagccgtatgtttgtggggtgtgtgggcgaggctttagtctcaagtcacacctcaacagacaccagaacatacactcaggagagaagcccattgtgtgcaaggactgtggccggggcttcagccagcaatccaacctcatcagacaccagaggacgcactcaggcgagaagcccatggtgtgtggggagtgcgggcgaggcttcagccagaagtcaaaccttgttgcacaccagaggacgcactcaggggagaggccgtatgtgtgccgagagtgtgggcgaggctttagccaccaggccggtctcatcaggcacaagcggaagcactcgagggagaagccctacatgtgcaggcagtgtggactgggctttggcaataagtcagctctaatcacacacaagcgggctcactcggaagagaagccttgtgtgtgcagagagtgtggccaaggctttctccaaaagtcacacctcaccttacatcaaatgacacatacgggggagaagccatatgtgtgcaagacgtgtgggcggggcttcagcctcaagtctcacctcagcagacacaggaagaccacgtctgtccaccacagactgccagtgcagcccgaccctgagccgtgtgcagggcaaccttcggattccttatactctctc

SEQ ID NO: 6922 - DNA, 2097 bp, Homo sapiens
  source 1..2097: mol_type = genomic DNA
atggatttatctgctcttcgcgttgaagaagtacaaaatgtcattaatgctatgcagaaaatcttagagtgtcccatctgtctggagttgatcaaggaacctgtctccacaaagtgtgaccacatattttgcaaattttgcatgctgaaacttctcaaccagaagaaagggccttcacagtgtcctttatgtaagaatgatataaccaaaaggagcctacaagaaagtacgagatttagtcaacttgttgaagagctattgaaaatcatttgtgcttttcagcttgacacaggtttggagtatgcaaacagctataattttgcaaaaaaggaaaataactctcctgaacatctaaaagatgaagtttctatcatccaaagtatgggctacagaaaccgtgccaaaagacttctacagagtgaacccgaaaatccttccttgcaggaaaccagtctcagtgtccaactctctaaccttggaactgtgagaactctgaggacaaagcagcggatacaacctcaaaagacgtctgtctacattgaattgggatctgattcttctgaagataccgttaataaggcaacttattgcagtgtgggagatcaagaattgttacaaatcacccctcaaggaaccagggatgaaatcagtttggattctgcaaaaaaggctgcttgtgaattttctgagacggatgtaacaaatactgaacatcatcaacccagtaataatgatttgaacaccactgagaagcgtgcagctgagaggcatccagaaaagtatcagggtgaagcagcatctgggtgtgagagtgaaacaagcgtctctgaagactgctcagggctatcctctcagagtgacattttaaccactcagcagagggataccatgcaacataacctgataaagctccagcaggaaatggctgaactagaagctgtgttagaacagcatgggagccagccttctaacagctacccttccatcataagtgactcttctgcccttgaggacctgcgaaatccagaacaaagcacatcagaaaaagtattaacttcacagaaaagtagtgaataccctataagccagaatccagaaggcctttctgctgacaagtttgaggtgtctgcagatagttctaccagtaaaaataaagaaccaggagtggaaaggtcatccccttctaaatgcccatcattagatgataggtggtacatgcacagttgctctgggagtcttcagaatagaaactacccatctcaagaggagctcattaaggttgttgatgtggaggagcaacagctggaagagtctgggccacacgatttgacggaaacatcttacttgccaaggcaagatctagagggaaccccttacctggaatctggaatcagcctcttctctgatgaccctgaatctgatccttctgaagacagagccccagagtcagctcgtgttggcaacataccatcttcaacctctgcattgaaagttccccaattgaaagttgcagaatctgcccagagtccagctgctgctcatactactgatactgctgggtataatgcaatggaagaaagtgtgagcagggagaagccagaattgacagcttcaacagaaagggtcaacaaaagaatgtccatggtggtgtctggcctgaccccagaagaatttatgctcgtgtacaagtttgccagaaaacaccacatcactttaactaatctaattactgaagagactactcatgttgttatgaaaacagatgctgagtttgtgtgtgaacggacactgaaatattttctaggaattgcgggaggaaaatgggtagttagctatttctgggtgacccagtctattaaagaaagaaaaatgctgaatgagcatgattttgaagtcagaggagatgtggtcaatggaagaaaccaccaaggtccaaagcgagcaagagaatcccaggacagaaagatcttcagggggctagaaatctgttgctatgggcccttcaccaacatgcccacagggtgtccacccaattgtggttgtgcagccagatgcctggacagaggacaatggcttccatgcaattgggcagatgtg

SEQ ID NO: 6923 - DNA, 810 bp, Homo sapiens
  source 1..810: mol_type = genomic DNA
atgagctcttattttgtaaactcattttgcggtcgctatccaaatggcccggactaccagttgcataattatggagatcatagttccgtgagcgagcaattcagggactcggcgagcatgcactccggcaggtacggctacggctacaatggcatggatctcagcgtcggccgctcgggctccggccactttggctccggagagcgcgcccgcagctacgctgccagcgccagcgcggcgcccgccgagcccaggtacagccagccggccacgtccacgcactctcctcagcccgatccgctgccctgctccgccgtggccccctcgcccggcagcgacagccaccacggcgggaaaaactccctaagcaactccagcggcgcctcggccgacgccggcagcacccacatcagcagcagagagggggttggcacggcgtccggagccgaggaggacgcccctgccagcagcgagcaggcgagtgcgcagagcgagccgagcccggcgccgcccgcccaaccccagatctacccctggatgcgcaagctgcacataagtcatgacaacataggcggcccggaaggcaaaagggcccggacggcctacacgcgctaccagaccctggagctggagaaggagttccacttcaaccgttacctgacccgcagaaggaggattgaaatagcacatgctctttgcctctccgagagacaaattaaaatctggttccaaaaccggagaatgaagtggaaaaaagataataagctgaaaagcatgagcatggccgcggcaggaggggccttccgtccc

SEQ ID NO: 6924 - DNA, 822 bp, Homo sapiens
  source 1..822: mol_type = genomic DNA
atgaaccttctccgagaacagagtagaacacgtcccatttctccaaaagagattgaaagaatggtgggcatcatccatcgaaaatttagttccattcagatgcagctcaaacaaagcacttgtgaagcagttatgattttaagatcaaggttccttgatgccagacggaaaaggcgtaacttcagtaaacaggccacagaaatcttgaatgaatatttttactcacacctcagcaacccctaccccagtgaagaagccaaagaggagctggccaagaaatgcagcatcacagtgtcacagagtcttgtaaaggatccaaaagaaagagggagcaaaggttctgacatccagccaactagcgtggtatccaattggtttggcaacaaacgaatcaggtacaagaagaacattggcaagtttcaggaagaagccaacctctatgctgcaaagacggccgtgacagctgcacacgcagtagcagcagctgtgcagaacaaccagaccaattcgcccaccacaccaaattccggttcttctggttcttttaacctcccaaattctggggacatgttcatgaacatgcagagtctgaatggggattcttaccaagggtcccaagtcggagccaatgtgcaatcacaggtggataccctccgtcatgttatcaatcagacgggaggctacagtgatggccttggaggaaattcactgtacagtccacataatttaaatgctaatggaggctggcaggacgcaacaactccatcttctgtgacttctcctacagaaggcccaggaagtgtgcactcggatacctctaac

SEQ ID NO: 6925 - DNA, 1425 bp, Homo sapiens
  source 1..1425: mol_type = genomic DNA
atggacagtagctgccacaacgcgactaccaaaatgttagcgactgctccagctcggggcaacatgatgagcacgtccaaacccttggctttctccattgaacgaatcatggcgcgcaccccagagcccaaggccctgccagtcccccacttcctgcagggagccttacccaagggggaacccaagcactctctgcatctcaactcgtcgatcccctgcatgatccccttcgtgcctgtggcctacgacacgagccccaaggcaggagtgacgggctccgagccgcggaaggccagtctggaggccccggcggcgcccgcggcggtgccctcggctcccgcattcagctgcagcgacctgctcaactgcgcactgagtctcaagggcgacctggcccgcgacgcgctgccgctgcagcagtacaagctggtaaggccgcgtgtggtcaaccactcttcattccacgccatgggcgccttgtgctacctgaaccgaggtgacggcccatgccacccggcagccggcgtgaacatccacccggtggcctcctacttcctcagttcccctttgcacccgcagccaaaaacgtatttagccgaaaggaataaactggtggtcccggcggtggagaaatacccttctggagtagctttcaaagacctgtcccaggctcagctgcagcattacatgaaagaaagcgcccagcttctgtcggaaaaaatcgcgttcaaaacctcggatttcagccgaggctctcctaatgccaagcccaaagttttcacttgcgaagtgtgtggaaaggtctttaatgcgcactataacttaacccgtcacatgccagtgcacacaggagccagacccttcgtttgcaaagtgtgcggaaaaggtttcaggcaagcaagcaccctgtgcaggcacaagatcattcacacgcaggaaaaacctcacaaatgtaaccagtgtggcaaagcatttaatagaagttccactttaaacactcatacccgaatacacgcgggctacaaaccgtttgtgtgtgaattctgtggcaaagggtttcatcaaaaagggaattacaaaaaccacaagttgacccacagcggggagaagcagttcaagtgcaatatctgcaacaaggctttccaccaggtttacaacctcaccttccacatgcacacccacaacgacaagaagcctttcacctgccccacgtgcggcaagggtttctgcaggaactttgacctcaagaagcatgtccgcaagctgcacgacagcagcctggggctggcccgcacgccagctggcgaaccaggcactgaaccgccgcccccgctaccgcagcagccgccgatgacgctgcctcctctgcagccgccgctgccaaccccggggcccctgcagcccgggctccaccagggccaccag

SEQ ID NO: 6926 - DNA, 1212 bp, Homo sapiens
  source 1..1212: mol_type = genomic DNA
atggccatggtgaccggcggctggggcggccccggcggcgacacgaacggcgtggacaaggcgggcggctacccgcgcgcggccgaggacgactcggcctcgccccccggtgccgccagcgacgccgagccgggcgacgaggagcggccggggctgcaggtggactgcgtggtgtgcggggacaagtcgagcggcaagcattacggtgtcttcacctgcgagggctgcaagagctttttcaagcgaagcatccgccgcaacctcagctacacctgccggtccaaccgtgactgccagatcgaccagcaccaccggaatcagtgccagtactgccgtctcaagaagtgcttccgggtgggcatgaggaaggaggcggtgcagcgcggccgcatcccgcactcgctgcctggtgccgtggccgcctcctcgggcagccccccgggctcggcgctggcggcagtggcgagcggcggagacctcttcccggggcagccggtgtccgaactgatcgcgcagctgctgcgcgctgagccctaccctgcggcggccggacgcttcggcgcagggggcggcgcggcgggcgcagtgctgggcatcgacaacgtgtgcgagctggcggcgcggctgctcttcagcaccgtggagtgggcgcgccacgcgcccttcttccccgagctgccggtggccgaccaggtggcgctgctgcgcctgagctggagcgagctcttcgtgctgaacgcggcgcaggcggcgctgcccctgcacacggcgccgctactggccgccgccggcctccacgccgcgcctatggccgccgagcgcgccgtggctttcatggaccaggtgcgcgccttccaggagcaggtggacaagctgggccgcctgcaggtcgactcggccgagtatggctgcctcaaggccatcgcgctcttcacgcccgacgcctgtggcctctcagacccggcccacgttgagagcctgcaggagaaggcgcaggtggccctcaccgagtatgtgcgggcgcagtacccgtcccagccccagcgcttcgggcgcctgctgctgcggctccccgccctgcgcgcggtccctgcctccctcatctcccagctgttcttcatgcgcctggtggggaagacgcccattgagacactgatcagagacatgctgctgtcggggagtaccttcaactggccctacggctcgggccag

SEQ ID NO: 6927 - DNA, 1251 bp, Homo sapiens; identical to SEQ ID NO: 5335
  source 1..1251: mol_type = genomic DNA

SEQ ID NO: 6928 - DNA, 816 bp, Homo sapiens
  source 1..816: mol_type = genomic DNA
atggccaccactggggccctgggcaactactacgtggactcgttcctgctgggcgccgacgccgcggatgagctgagcgttggccgctatgcgccggggaccctgggccagcctccccggcaggcggcgacgctggccgagcaccccgacttcagcccgtgcagcttccagtccaaggcgacggtgtttggcgcctcgtggaacccagtgcacgcggcgggcgccaacgctgtacccgctgcggtgtaccaccaccatcaccaccacccctacgtgcacccccaggcgcccgtggcggcggcggcgccggacggcaggtacatgcgctcctggctggagcccacgcccggtgcgctctccttcgcgggcttgccctccagccggccttatggcattaaacctgaaccgctgtcggccagaaggggtgactgtcccacgcttgacactcacactttgtccctgactgactatgcttgtggttctcctccagttgatagagaaaaacaacccagcgaaggcgccttctctgaaaacaatgctgagaatgagagcggcggagacaagccccccatcgatcccaataacccagcagccaactggcttcatgcgcgctccactcggaaaaagcggtgcccctatacaaaacaccagaccctggaactggagaaagagtttctgttcaacatgtacctcaccagggaccgcaggtacgaggtggctcgactgctcaacctcaccgagaggcaggtcaagatctggttccagaaccgcaggatgaaaatgaagaaaatcaacaaagaccgagcaaaagacgag

SEQ ID NO: 6929 - DNA, 2172 bp, Homo sapiens
  source 1..2172: mol_type = genomic DNA
atggatggtgatcagattgttgtggaaatacaagaagcagtttttgtttctaatattgtggattctgacataactgtgcataactttgttcctgatgacccagactcagttgtaatccaagatgttgttgaagatgttgtcatagaggaggatgttcagtgctcagatatcttagaagaggcagatgtatctgaaaatgtcatcattcctgagcaagtgctggactcagatgtaactgaagaagtttctttaccacactgcacagtcccagatgatgttttagcttctgacattacttcaacctcaatgtctatgccagaacatgttttaacgagtgaatccatgcatgtgtgtgacattggacatgttgaacatatggtgcatgatagtgtagtggaagcagaaatcattactgatcctctgacgagtgacatagtttcagaagaagtattggtagcagactgtgcccctgaagcagtcatagatgccagcgggatctcagtggaccagcaagataatgacaaagccagctgtgaggactacctaatgatttcgttggatgatgctggcaaaatagaacatgatggttccactggagtgaccatcgatgcagaatcagaaatggatccttgtaaagtggatagcacttgtcctgaagtcatcaaggtgtacatttttaaagctgaccctggagaagatgacttaggtggaactgtagacattgtggagagtgaacctgaaaatgatcatggagttgaactacttgatcagaacagcagtattcgtgttcccagggaaaagatggtttatatgactgtcaatgactctcaacaagaagatgaagatttaagtaataattctgatggaattgaaaaccggaatggcactgcaagtgccctcttgcacatagatgagtctgctggccttggcagactggctaaacagaaaccaaagaaaaagagaagacctgattccaggcagtaccaaacagcaataattattggccctgatggtcatcctttgactgtctatccttgcatgatttgtgggaagaagtttaagtcgaggggttttttgaaaagacacatgaaaaaccatcctgaacaccttgccaagaagaagtaccactgtactgactgtgattacactaccaataagaagataagtttacataaccacctggagagccacaagctgaccagcaaggcagagaaggccattgaatgtgatgagtgtgggaagcatttttctcatgcaggggctttgtttactcacaaaatggtgcataaggaaaaaggggccaacaaaatgcacaagtgtaaattctgtgaatatgagacagctgaacaggggttattgaatcgccacctcttggcagtccacagcaagaactttcctcatatttgtgtggagtgtggtaaaggtttccgacacccgtcggaactgagaaagcacatgcgaatccataccggcgagaagccataccaatgccagtactgtgaatataggtctgcagactcttctaacttgaaaacacatataaaaacaaagcatagtaaagagatgccattcaagtgtgacatttgtcttctgactttctcagataccaaagaagtgcagcaacatactcttgtccaccaagaaagcaaaacacatcagtgtttgcattgcgaccacaagagttcaaactcaagtgatttgaaacgacatgtaatttcagttcatacgaaagactatcctcataagtgtgagatgtgcgagaaaggctttcacaggccttcagaacttaagaaacatgtggctgtccacaaaggtaaaaaaatgcaccaatgtagacattgtgactttaagattgcagacccatttgttctaagtcgccatattctctcagttcacacaaaggatcttccatttaggtgtaagagatgtagaaagggatttaggcaacaaaatgagcttaaaaagcatatgaagacacacagtggcaggaaagtatatcagtgtgagtactgtgagtatagcactacagatgcctcaggctttaaacggcacgttatttccattcatacaaaagactatcctcatcggtgtgagtactgcaagaaaggcttccgaagaccttcagaaaagaaccagcacataatgagacaccataaagaagttggtctgccc

SEQ ID NO: 6930 - DNA, 2181 bp, Homo sapiens
  source 1..2181: mol_type = genomic DNA
atggaaggtgatgcagtcgaagccattgtggaggagtccgaaacttttattaaaggaaaggagagaaagacttaccagagacgccgggaagggggccaggaagaagatgcctgccacttaccccagaaccagacggatgggggtgaggtggtccaggatgtcaacagcagtgtacagatggtgatgatggaacagctggaccccacccttcttcagatgaagactgaagtaatggagggcacagtggctccagaagcagaggctgctgtggacgatacccagattataactttacaggttgtaaatatggaggaacagcccataaacataggagaacttcagcttgttcaagtacctgttcctgtgactgtacctgttgctaccacttcagtagaagaacttcagggggcttatgaaaatgaagtgtctaaagagggccttgcggaaagtgaacccatgatatgccacaccctacctttgcctgaagggtttcaggtggttaaagtgggggccaatggagaggtggagacactagaacaaggggaacttccaccccaggaagatcctagttggcaaaaagacccagactatcagccaccagccaaaaaaacaaagaaaaccaaaaagagcaaactgcgttatacagaggagggcaaagatgtagatgtgtctgtctacgattttgaggaagaacagcaggagggtctgctatcagaggttaatgcagagaaagtggttggtaatatgaagcctccaaagccaacaaaaattaaaaagaaaggtgtaaagaagacattccagtgtgagctttgcagttacacgtgtccacggcgttcaaatttggatcgtcacatgaaaagccacactgatgagagaccacacaagtgccatctctgtggcagggcattcagaacagtcaccctcctgaggaatcaccttaacacacacacaggtactcgtcctcacaagtgcccagactgcgacatggcctttgtgaccagtggagaattggttcggcatcgtcgttacaaacacacccacgagaagccattcaagtgttccatgtgcgattacgccagtgtagaagtcagcaaattaaaacgtcacattcgctctcatactggagagcgtccgtttcagtgcagtttgtgcagttatgccagcagggacacatacaagctgaaaaggcacatgagaacccattcaggggaaaagccttatgaatgttatatttgtcatgctcggtttacccaaagtggtaccatgaagatgcacattttacagaagcacacagaaaatgtggccaaatttcactgtccccactgtgacacagtcatagcccgaaaaagtgatttgggtgtccacttgcgaaagcagcattcctatattgagcaaggcaagaaatgccgttactgtgatgctgtgtttcatgagcgctatgccctcatccagcatcagaagtcacacaagaatgagaagcgctttaagtgtgaccagtgtgattacgcttgtagacaggagaggcacatgatcatgcacaagcgcacccacaccggggagaagccttacgcctgcagccactgcgataagaccttccgccagaagcagcttctcgacatgcacttcaagcgctatcacgaccccaacttcgtccctgcggcttttgtctgttctaagtgtgggaaaacatttacacgtcggaataccatggcaagacatgctgataattgtgctggcccagatggcgtagagggggaaaatggaggagaaacgaagaagagtaaacgtggaagaaaaagaaagatgcgctctaagaaagaagattcctctgacagtgaaaatgctgaaccagatctggacgacaatgaggatgaggaggagcctgccgtagaaattgaacctgagccagagcctcagcctgtgaccccagccccaccacccgccaagaagcggagaggacgaccccctggcagaaccaaccagcccaaacagaaccagccaacagctatcattcaggttgaagaccagaatacaggtgcaattgagaacattatagttgaagtaaaaaaagagccagatgctgagcccgcagagggagaggaagaggaggcccagccagctgccacagatgcccccaacggagacctcacgcccgagatgatcctcagcatgatggaccgg

SEQ ID NO: 6931 - DNA, 1116 bp, Homo sapiens
  source 1..1116: mol_type = genomic DNA
atggcgaagcagtacgactcggtggagtgccctttttgtgatgaagtttccaaatacgagaagctcgccaagatcggccaaggcaccttcggggaggtgttcaaggccaggcaccgcaagaccggccagaaggtggctctgaagaaggtgctgatggaaaacgagaaggaggggttccccattacagccttgcgggagatcaagatccttcagcttctaaaacacgagaatgtggtcaacttgattgagatttgtcgaaccaaagcttccccctataaccgctgcaagggtagtatatacctggtgttcgacttctgcgagcatgaccttgctgggctgttgagcaatgttttggtcaagttcacgctgtctgagatcaagagggtgatgcagatgctgcttaacggcctctactacatccacagaaacaagatcctgcatagggacatgaaggctgctaatgtgcttatcactcgtgatggggtcctgaagctggcagactttgggctggcccgggccttcagcctggccaagaacagccagcccaaccgctacaccaaccgtgtggtgacactctggtaccggcccccggagctgttgctcggggagcgggactacggcccccccattgacctgtggggtgctgggtgcatcatggcagagatgtggacccgcagccccatcatgcagggcaacacggagcagcaccaactcgccctcatcagtcagctctgcggctccatcacccctgaggtgtggccaaacgtggacaactatgagctgtacgaaaagctggagctggtcaagggccagaagcggaaggtgaaggacaggctgaaggcctatgtgcgtgacccatacgcactggacctcatcgacaagctgctggtgctggaccctgcccagcgcatcgacagcgatgacgccctcaaccacgacttcttctggtccgaccccatgccctccgacctcaagggcatgctctccacccacctgacgtccatgttcgagtacttggcaccaccgcgccggaagggcagccagatcacccagcagtccaccaaccagagtcgcaatcccgccaccaccaaccagacggagtttgagcgcgtcttc

SEQ ID NO: 6932 - DNA, 618 bp, Homo sapiens
  source 1..618: mol_type = genomic DNA
atggaacccttggccagcaacatccaggtcctgctgcaggcggccgagttcctggagcgccgtgagagagaggccgagcatggttatgcgtccctgtgcccgcatcgcagtccaggccccatccacaggaggaagaagcgacccccccaggctcctggcgcgcaggacagcgggcggtcagtgcacaatgaactggagaagcgcaggagggcccagttgaagcggtgcctggagcggctgaagcagcagatgcccctgggggccgactgtgcccggtacaccacgctgagcctgctgcgccgtgccaggatgcacatccagaagctggaggatcaggagcagcgggcccgacagctcaaggagaggctgcgcagcaagcagcagagcctgcagcggcagctggagcagctccgggggctggcaggggcggccgagcgggagcggctgcgggcggacagtctggactcctcaggcctctcctctgagcgctcagactcagaccaagaggagctggaggtggatgtggagagcctggtgtttgggggtgaggccgagctgctgcggggcttcgtcgccggccaggagcacagctactcgcacggcggcggcgcctggcta

SEQ ID NO: 6933 - DNA, 981 bp, Homo sapiens
  source 1..981: mol_type = genomic DNA
atgcaaagaaatgcaatgtatttaaagaatgtggcagagactgcttgtaactttcaactaactcaatatcaaataagtcatgctaatcagaaaccctatgaatgtcagatatgtggaaagccctttagaaagcgtgcccaccttacccaacataatcgaattcacactggtgggaaaccatatgaatgcaaagaatgtgggaaagtgtttatctgttgttcaacattgattcaacataagagaactcacactagtgagaaaccctatgaatgtctggaatgtagaaagacgtttaggcggagtgcacatcttattcgacatcaaagaattcatactggtgagaaaccttataaatgtaagcaatgttggaaggcctttgcttctgtttctgatttaatagacatcggaaaattcacactgatgagagactttacgaatgtacagaatgtgggaaggcatttaacaatcgctcaactcttattcagcatcagagaattcacactggtgagaagtcctttgaatgtaaggaatgtggcaaagcattcaataattgctcaacacttactcaacaccagagaactcatactaatgagaaatcttatgaatgtcaggaatgtaaaaaggcttttaggcaaagtgcacatcttactcaacatcaaagaattcatactggtgagaaaccatatgagtgtaagtaatgtgggaaggctttcacttgtgtttctgattttaatagacatcagagaattcacactggtgaaaaaccctatgaatgtaaagaatgtggtagagcttttaacaattgttcagctcttattcaacaccagagaattcacactggtgagaaggcttatgaatataagcagtgtgggaaggtttttgtctcctgtccaacacttgttcaacatcagagaacacatactaatgaaaaaccttatgaatgtcagtaatgcaagaaggccttcaagcataatgcacatc

SEQ ID NO: 6934 - DNA, 969 bp, Homo sapiens
  source 1..969: mol_type = genomic DNA
atggccgctgcgcgcccagaggcccagagtcggagctcaccgactccggagtcgcgatcccaggagccactggacctggtcctggtgcctgatgactgccggcctggcacacccccgagtgacctcatcgagatccaggtggtgaaggtgacggacaccacgctggtccctgagcccccggagccaggttctttccactgtgccttgtgccctgctgccttccggctggtttccgagctgctgttccacgaacatggccacttggctggggccgagggaggcgggcagggtggggacccgagccggtgccacgtgtgcggccacagctgcccgggccccgccagcctgcgcgcgcactacagcttgcacacgggggagcggccctaccgctgcgcgctctgcccccgcgccttcaaggccttggcgcccctgctccggcaccagcaccggcacggggtggagccgggcacctctcggaggcctccggacacagcggccgttgcagaacagaggcccggggtggccccggagagggcggaggtggtgatggcggcggcggcggcgggcgcagcggtggggaagccttttgcctgcaggttctgcgccaagcccttccgccgctcctcagacatgcgagaccacgagcgcgtgcacactggcgagcggccataccattgcggcatctgcggcaagggcttcacccagtcctcggtgcttagcggccacgcccgcatccacactggcgagcgcccgttccgctgcacgctctgcgaccgcaccttcaacaactcctccaacttccgcaagcaccagcgcacccacttccacgggccggggccggggctgggagactctggaggccagctgggctcgtcggcggctgaggggtcggggagcgggtgtggggtaggggaccctgcggaggaggggcggggggagaccgcgaaggtgaaggtggaggccgaccag

SEQ ID NO: 6935 - DNA, 1005 bp, Homo sapiens
  source 1..1005: mol_type = genomic DNA
atgggcagcgccagcccgggtctgagcagcgtatcccccagccacctcctgctgccccccgacacggtgtcgcggacaggcttggagaaggcggcagcgggggcagtgggtctcgagagacgggactggagtcccagtccacccgccacgcccgagcagggcctgtccgccttctacctctcctactttgacatgctgtaccctgaggacagcagctgggcagccaaggcccctggggccagcagtcgggaggagccacctgaggagcctgagcagtgcccggtcattgacagccaagccccagcgggcagcctggacttggtgcccggcgggctgaccttggaggagcactcgctggagcaggtgcagtccatggtggtgggcgaagtgctcaaggacatcgagacggcctgcaagctgctcaacatcaccgcagatcccatggactggagccccagcaatgtgcagaagtggctcctgtggacagagcaccaataccggctgccccccatgggcaaggccttccaggagctggcgggcaaggagctgtgcgccatgtcggaggagcagttccgccagcgctcgcccctgggtggggatgtgctgcacgcccacctggacatctggaagtcagcggcctggatgaaagagcggacttcacctggggcgattcactactgtgcctcgaccagtgaggagagctggaccgacagcgaggtggactcatcatgctccgggcagcccatccacctgtggcagttcctcaaggagttgctactcaagccccacagctatggccgcttcattaggtggctcaacaaggagaagggcatcttcaaaattgaggactcagcccaggtggcccggctgtggggcatccgcaagaaccgtcccgccatgaactacgacaagctgagccgctccatccgccagtattacaagaagggcatcatccggaagccagacatctcccagcgcctcgtctaccagttcgtgcaccccatc

SEQ ID NO: 6936 - DNA, 2478 bp, Homo sapiens
  source 1..2478: mol_type = genomic DNA
atggagggcgctggcggcgcgaacgacaagaaaaagataagttctgaacgtcgaaaagaaaagtctcgagatgcagccagatctcggcgaagtaaagaatctgaagttttttatgagcttgctcatcagttgccacttccacataatgtgagttcgcatcttgataaggcctctgtgatgaggcttaccatcagctatttgcgtgtgaggaaacttctggatgctggtgatttggatattgaagatgacatgaaagcacagatgaattgcttttatttgaaagccttggatggttttgttatggttctcacagatgatggtgacatgatttacatttctgataatgtgaacaaatacatgggattaactcagtttgaactaactggacacagtgtgtttgattttactcatccatgtgaccatgaggaaatgagagaaatgcttacacacagaaatggccttgtgaaaaagggtaaagaacaaaacacacagcgaagcttttttctcagaatgaagtgtaccctaactagccgaggaagaactatgaacataaagtctgcaacatggaaggtattgcactgcacaggccacattcacgtatatgataccaacagtaaccaacctcagtgtgggtataagaaaccacctatgacctgcttggtgctgatttgtgaacccattcctcacccatcaaatattgaaattcctttagatagcaagactttcctcagtcgacacagcctggatatgaaattttcttattgtgatgaaagaattaccgaattgatgggatatgagccagaagaacttttaggccgctcaatttatgaatattatcatgctttggactctgatcatctgaccaaaactcatcatgatatgtttactaaaggacaagtcaccacaggacagtacaggatgcttgccaaaagaggtggatatgtctgggttgaaactcaagcaactgtcatatataacaccaagaattctcaaccacagtgcattgtatgtgtgaattacgttgtgagtggtattattcagcacgacttgattttctcccttcaacaaacagaatgtgtccttaaaccggttgaatcttcagatatgaaaatgactcagctattcaccaaagttgaatcagaagatacaagtagcctctttgacaaacttaagaaggaacctgatgctttaactttgctggccccagccgctggagacacaatcatatctttagattttggcagcaacgacacagaaactgatgaccagcaacttgaggaagtaccattatataatgatgtaatgctcccctcacccaacgaaaaattacagaatataaatttggcaatgtctccattacccaccgctgaaacgccaaagccacttcgaagtagtgctgaccctgcactcaatcaagaagttgcattaaaattagaaccaaatccagagtcactggaactttcttttaccatgccccagattcaggatcagacacctagtccttccgatggaagcactagacaaagttcacctgagcctaatagtcccagtgaatattgtttttatgtggatagtgatatggtcaatgaattcaagttggaattggtagaaaaactttttgctgaagacacagaagcaaagaacccattttctactcaggacacagatttagacttggagatgttagctccctatatcccaatggatgatgacttccagttacgttccttcgatcagttgtcaccattagaaagcagttccgcaagccctgaaagcgcaagtcctcaaagcacagttacagtattccagcagactcaaatacaagaacctactgctaatgccaccactaccactgccaccactgatgaattaaaaacagtgacaaaagaccgtatggaagacattaaaatattgattgcatctccatctcctacccacatacataaagaaactactagtgccacatcatcaccatatagagatactcaaagtcggacagcctcaccaaacagagcaggaaaaggagtcatagaacagacagaaaaatctcatccaagaagccctaacgtgttatctgtcgctttgagtcaaagaactacagttcctgaggaagaactaaatccaaagatactagctttgcagaatgctcagagaaagcgaaaaatggaacatgatggttcactttttcaagcagtaggaattggaacattattacagcagccagacgatcatgcagctactacatcactttcttggaaacgtgtaaaaggatgcaaatctagtgaacagaatggaatggagcaaaagacaattattttaataccctctgatttagcatgtagactgctggggcaatcaatggatgaaagtggattaccacagctgaccagttatgattgtgaagttaatgctcctatacaaggcagcagaaacctactgcagggtgaagaattactcagagctttggatcaagttaac

SEQ ID NO: 6937 - DNA, 2478 bp, Homo sapiens
  source 1..2478: mol_type = genomic DNA
atggagggcgccggcggcgcgaacgacaagaaaaagataagttctgaacgtcgaaaagaaaagtctcgagatgcagccagatctcggcgaagtaaagaatctgaagttttttatgagcttgctcatcagttgccacttccacataatgtgagttcgcatcttgataaggcctctgtgatgaggcttaccatcagctatttgcgtgtgaggaaacttctggatgctggtgatttggatattgaagatgacatgaaagcacagatgaattgcttttatttgaaagccttggatggttttgttatggttctcacagatgatggtgacatgatttacatttctgataatgtgaacaaatacatgggattaactcagtttgaactaactggacacagtgtgtttgattttactcatccatgtgaccatgaggaaatgagagaaatgcttacacacagaaatggccttgtgaaaaagggtaaagaacaaaacacacagcgaagcttttttctcagaatgaagtgtaccctaactagccgaggaagaactatgaacataaagtctgcaacatggaaggtattgcactgcacaggccacattcacgtatatgataccaacagtaaccaacctcagtgtgggtataagaaaccacctatgacctgcttggtgctgatttgtgaacccattcctcacccatcaaatattgaaattcctttagatagcaagactttcctcagtcgacacagcctggatatgaaattttcttattgtgatgaaagaattaccgaattgatgggatatgagccagaagaacttttaggccgctcaatttatgaatattatcatgctttggactctgatcatctgaccaaaactcatcatgatatgtttactaaaggacaagtcaccacaggacagtacaggatgcttgccaaaagaggtggatatgtctgggttgaaactcaagcaactgtcatatataacaccaagaattctcaaccacagtgcattgtatgtgtgaattacgttgtgagtggtattattcagcacgacttgattttctcccttcaacaaacagaatgtgtccttaaaccggttgaatcttcagatatgaaaatgactcagctattcaccaaagttgaatcagaagatacaagtagcctctttgacaaacttaagaaggaacctgatgctttaactttgctggccccagccgctggagacacaatcatatctttagattttggcagcaacgacacagaaactgatgaccagcaacttgaggaagtaccattatataatgatgtaatgctcccctcacccaacgaaaaattacagaatataaatttggcaatgtctccattacccaccgctgaaacgccaaagccacttcgaagtagtgctgaccctgcactcaatcaagaagttgcattaaaattagaaccaaatccagagtcactggaactttcttttaccatgccccagattcaggatcagacacctagtccttccgatggaagcactagacaaagttcacctgagcctaatagtcccagtgaatattgtttttatgtggatagtgatatggtcaatgaattcaagttggaattggtagaaaaactttttgctgaagacacagaagcaaagaacccattttctactcaggacacagatttagacttggagatgttagctccctatatcccaatggatgatgacttccagttacgttccttcgatcagttgtcaccattagaaagcagttccgcaagccctgaaagcgcaagtcctcaaagcacagttacagtattccagcagactcaaatacaagaacctactgctaatgccaccactaccactgccaccactgatgaattaaaaacagtgacaaaagaccgtatggaagacattaaaatattgattgcatctccatctcctacccacatacataaagaaactactagtgccacatcatcaccatatagagatactcaaagtcggacagcctcaccaaacagagcaggaaaaggagtcatagaacagacagaaaaatctcatccaagaagccctaacgtgttatctgtcgctttgagtcaaagaactacagttcctgaggaagaactaaatccaaagatactagctttgcagaatgctcagagaaagcgaaaaatggaacatgatggttcactttttcaagcagtaggaattggaacattattacagcagccagacgatcatgcagctactacatcactttcttggaaacgtgtaaaaggatgcaaatctagtgaacagaatggaatggagcaaaagacaattattttaataccctctgatttagcatgtagactgctggggcaatcaatggatgaaagtggattaccacagctgaccagttatgattgtgaagttaatgctcctatacaaggcagcagaaacctactgcagggtgaagaattactcagagctttggatcaagttaac

SEQ ID NO: 6938 - DNA, 2253 bp, Homo sapiens
  source 1..2253: mol_type = genomic DNA
atgggccagactgggaagaaatctgagaagggaccagtttgttggcggaagcgtgtaaaatcagagtacatgcgactgagacagctcaagaggttcagacgagctgatgaagtaaagagtatgtttagttccaatcgtcagaaaattttggaaagaacggaaatcttaaaccaagaatggaaacagcgaaggatacagcctgtgcacatcctgacttctgtgagctcattgcgcgggactagggagtgttcggtgaccagtgacttggattttccaacacaagtcatcccattaaagactctgaatgcagttgcttcagtacccataatgtattcttggtctcccctacagcagaattttatggtggaagatgaaactgttttacataacattccttatatgggagatgaagttttagatcaggatggtactttcattgaagaactaataaaaaattatgatgggaaagtacacggggatagagaatgtgggtttataaatgatgaaatttttgtggagttggtgaatgcccttggtcaatataatgatgatgacgatgatgatgatggagacgatcctgaagaaagagaagaaaagcagaaagatctggaggatcaccgagatgataaagaaagccgcccacctcggaaatttccttctgataaaatttttgaagccatttcctcaatgtttccagataagggcacagcagaagaactaaaggaaaaatataaagaactcaccgaacagcagctcccaggcgcacttcctcctgaatgtacccccaacatagatggaccaaatgctaaatctgttcagagagagcaaagcttacactcctttcatacgcttttctgtaggcgatgttttaaatatgactgcttcctacatcgtaagtgcaattattcttttcatgcaacacccaacacttataagcggaagaacacagaaacagctctagacaacaaaccttgtggaccacagtgttaccagcatttggagggagcaaaggagtttgctgctgctctcaccgctgagcggataaagaccccaccaaaacgtccaggaggccgcagaagaggacggcttcccaataacagtagcaggcccagcacccccaccattaatgtgctggaatcaaaggatacagacagtgatagggaagcagggactgaaacggggggagagaacaatgataaagaagaagaagagaagaaagatgaaacttcgagctcctctgaagcaaattctcggtgtcaaacaccaataaagatgaagccaaatattgaacctcctgagaatgtggagtggagtggtgctgaagcctcaatgtttagagtcctcattggcacttactatgacaatttctgtgccattgctaggttaattgggaccaaaacatgtagacaggtgtatgagtttagagtcaaagaatctagcatcatagctccagctcccgctgaggatgtggatactcctccaaggaaaaagaagaggaaacaccggttgtgggctgcacactgcagaaagatacagctgaaaaaggacggctcctctaaccatgtttacaactatcaaccctgtgatcatccacggcagccttgtgacagttcgtgcccttgtgtgatagcacaaaatttttgtgaaaagttttgtcaatgtagttcagagtgtcaaaaccgctttccgggatgccgctgcaaagcacagtgcaacaccaagcagtgcccgtgctacctggctgtccgagagtgtgaccctgacctctgtcttacttgtggagccgctgaccattgggacagtaaaaatgtgtcctgcaagaactgcagtattcagcggggctccaaaaagcatctattgctggcaccatctgacgtggcaggctgggggatttttatcaaagatcctgtgcagaaaaatgaattcatctcagaatactgtggagagattatttctcaagatgaagctgacagaagagggaaagtgtatgataaatacatgtgcagctttctgttcaacttgaacaatgattttgtggtggatgcaacccgcaagggtaacaaaattcgttttgcaaatcattcggtaaatccaaactgctatgcaaaagttatgatggttaacggtgatcacaggataggtatttttgccaagagagccatccagactggcgaagagctgttttttgattacagatacagccaggctgatgccctgaagtatgtcggcatcgaaagagaaatggaaatccct

SEQ ID NO: 6939 - DNA, 1410 bp, Homo sapiens
  source 1..1410: mol_type = genomic DNA
atggcgcaaaggtacgatgagctgccccattacggcgggatggacggagtaggggttcccgcttccatgtacggagaccctcacgcgccgcggccgatccccccggttcaccacctgaaccacgggccgccgctccacgccacacagcactacggcgcgcacgccccgcaccccaatgtcatgccggccagtatgggatccgctgtcaacgacgccttgaagcgggacaaggacgcgatctatgggcacccgttgtttcctctgttagctctggtctttgagaagtgcgagctggcgacctgcactccccgggaacctggagtggctggcggagacgtctgctcctccgactccttcaacgaggacatcgcggtcttcgccaagcaggttcgcgccgaaaagccacttttttcctcaaatccagagctggacaatttgatgatacaagcaatacaagtactaaggtttcatcttttggagttagaaaaggtccacgaactgtgcgataacttctgccaccgatacattagctgtttgaaggggaaaatgcccatcgacctcgtcattgatgaaagagacggcagctccaagtcagatcatgaagaactttcaggctcctccacaaatctcgctgaccataacccttcttcttggcgagaccacgatgatgcaacctcaacccactcagcaggcaccccagggccctccagtgggggccatgcttcccagagcggagacaacagcagtgagcaaggggatggtttagacaacagtgtagcttcacctggtacaggtgacgatgatgatccggataaggacaaaaaacgccagaagaaaagaggcattttccccaaagtagcaacaaatatcatgagagcatggctcttccagcatctcacacatccgtacccttccgaagagcagaagaaacagttagcgcaagacacaggacttacaattctccaagtaaacaactggtttattaatgccagaagaagaatagtacagcccatgattgaccagtcaaatcgagcagtgagccaaggagcagcatatagtccagagggtcagcccatggggagctttgtgttggatggtcagcaacacatggggatccggcctgcaggtttgcagagcatgccaggggactacgtttctcagggtggtcctatgggaatgagtatggcacagccaagttacactcctccccagatgaccccacaccctactcaattaagacatggacccccaatgcattcatatttgccaagccatccccaccacccagccatgatgatgcacggaggaccccctacccaccctggaatgactatgtcagcacagagccccacaatgttaaattctgtagatcccaatgttggcggacaggttatggacattcatgcccaa

SEQ ID NO: 6940 - DNA, 1143 bp, Homo sapiens
  source 1..1143: mol_type = genomic DNA
atggacggagtaggggttcccgcttccatgtacggagaccctcacgcgccgcggccgatccccccggttcaccacctgaaccacgggccgccgctccacgccacacagcactacggcgcgcacgccccgcaccccaatgtcatgccggccagtatgggatccgctgtcaacgacgccttgaagcgggacaaggacgcgatctatgggcacccgttgtttcctctgttagctctggtctttgagaagtgcgagctggcgacctgcactccccgggaacctggagtggctggcggagacgtctgctcctccgactccttcaacgaggacatcgcggtcttcgccaagcaggttcgcgccgaaaagccacttttttcctcaaatccagagctggacaatttgatgatacaagcaatacaagtactaaggtttcatcttttggagttagaaaaggtccacgaactgtgcgataacttctgccaccgatacattagctgtttgaaggggaaaatgcccatcgacctcgtcattgatgaaagagacggcagctccaagtcagatcatgaagaactttcaggctcctccacaaatctcgctgaccataacccttcttcttggcgagaccacgatgatgcaacctcaacccactcagcaggcaccccagggccctccagtgggggccatgcttcccagagcggagacaacagcagtgagcaaggggatggtttagacaacagtgtagcttcacctggtacaggtgacgatgatgatccggataaggacaaaaaacgccagaagaaaagaggcattttccccaaagtagcaacaaatatcatgagagcatggctcttccagcatctcacacatccgtacccttccgaagagcagaagaaacagttagcgcaagacacaggacttacaattctccaagtaaacaactggtttattaatgccagaagaagaatagtacagcccatgattgaccagtcaaatcgagcagtgagccaaggagcagcatatagtccagagggtcagcccatggggagctttgtgttggatggtcagcaacacatggggatccggcctgcaggacctatgagtggaatgggcatgaatatgggcatggatgggcaatggcactacatg

SEQ ID NO: 6941 - DNA, 816 bp, Homo sapiens
  source 1..816: mol_type = genomic DNA
atgaattctgattcgagctctgtctccagcagagcttcatctccggacatggatgagatgtacctgagggaccaccaccaccgccaccaccaccaccaggagagccgtctcaactcggtctcgtccacgcagggcgatatgatgcagaagatgcccggggaaagcctctcgcgggctggcgccaaggccgcgggagagagcagcaagtacaaaatcaagaagcagctgtcggagcaggacctacagcagttgaggctgaagatcaacggacgcgaacgcaagcggatgcacgacctgaacctagccatggacgggctgcgcgaagtcatgccctacgcgcatgggccgtcggtgcgcaagctctccaagatcgccacactcctgctcgccagaaactacatcctcatgctcaccagctccctggaggagatgaagaggctggttggcgagatctatgggggccaccactcggcctttcactgcgggaccgtgggccactcggccggccaccccgcgcacgcggccaactccgtgcacccggtgcaccccatcttgggcggcgcgctctcatctggcaacgcctcgtcaccgctgtccgccgcctcacttcccgccatcggcaccatccggcctccccactcgctactcaaggcgccctccacgccgcccgcgctgcagctgggcagcggcttccagcactgggctggtctgccctgcccctgcaccatctgccagatgccgccgccgccgcacctgtccgctctctccacagccaacatggcccggctgtcggccgagtccaaggacttgctcaag

SEQ ID NO: 6942 - DNA, 744 bp, Homo sapiens
  source 1..744: mol_type = genomic DNA
atgacgtgtgttgaacaagacaagctgggtcaagcatttgaagatgcttttgaggttctgaggcaacattcaactggagatcttcagtactcgccagattacagaaattacctggctttaatcaaccatcgtcctcatgtcaaaggaaattccagctgctatggagtgttgcctacagaggagcctgtctataattggagaacggtaattaacagtgctgcggacttctattttgaaggaaatattcatcaatctctgcagaacataactgaaaaccagctggtacaacccactcttctccagcaaaaggggggaaaaggcaggaagaagctccgactgtttgaataccttcacgaatccctgtataatccggagatggcatcttgtattcagtgggtagataaaaccaaaggcatctttcagtttgtatcaaaaaacaaagaaaaacttgccgagctttgggggaaaagaaaaggcaacaggaagaccatgacttaccagaaaatggccagggcactcagaaattacggaagaagtggggaaattaccaaaatccggaggaagctgacttaccagttcagtgaggccattctccaaagactctctccatcctatttcctggggaaagagatcttctattcacagtgtgttcaacctgatcaagaatatctcagtttaaataactggaatgcaaattataattatacatatgccaattaccatgagctaaatcaccatgattgc

SEQ ID NO: 6943 - DNA, 1239 bp, Homo sapiens
  source 1..1239: mol_type = genomic DNA
atgctggaaatgctagaatataatcactatcaggtgcagacccacctcgaaaaccccaccaagtaccacatacagcaagcccaacggcagcaggtaaagcagtacctttctaccactttagcaaataaacatgccaaccaagtcctgagcttgccatgtccaaaccagcctggcgatcatgtcatgccaccggtgccggggagcagcgcacccaacagccccatggctatgcttacgcttaactccaactgtgaaaaagagggattttataagtttgaagagcaaaacagggcagagagcgagtgcccaggcatgaacacacattcacgagcgtcctgtatgcagatggatgatgtaatcgatgacatcattagcctagaatcaagttataatgaggaaatcttgggcttgatggatcctgctttgcaaatggcaaatacgttgcctgtctcgggaaacttgattgatctttatggaaaccaaggtctgcccccaccaggcctcaccatcagcaactcctgtccagccaaccttcccaacataaaaagggagctcacagagtctgaagcaagagcactggccaaagagaggcagaaaaaggacaatcacaacctgattgaacgaagaagaagatttaacataaatgaccgcattaaagaactaggtactttgattcccaagtcaaatgatccagacatgcgctggaacaagggaaccatcttaaaagcatccgtggactatatccgaaagttgcaacgagaacagcaacgcgcaaaagaacttgaaaaccgacagaagaaactggagcacgccaaccggcatttgttgctcagaatacaggaacttgaaatgcaggctcgagctcatggactttcccttattccatccacgggtctctgctctccagatttggtgaatcggatcatcaagcaagaacccgttcttgagaactgcagccaagacctccttcagcatcatgcagacctaacctgtacaacaactctcgatctcacggatggcaccatcaccttcaacaacaacctcggaactgggactgaggccaaccaagcctatagtgtccccacaaaaatgggatccaaactggaagacatcctgatggacgacaccctttctcccgtcggtgtcactgatccactcctttcctcagtgtcccccggagcttccaaaacaagcagccggaggagcagtatgagcatggaagagacggagcacacttgt

SEQ ID NO: 6944 - DNA, 273 bp, Homo sapiens
  source 1..273: mol_type = genomic DNA
atgctggaaatgctagaatataatcactatcaggtgcagacccacctcgaaaaccccaccaagtaccacatacagcaagcccaacggcagcaggtaaagcagtacctttctaccactttagcaaataaacatgccaaccaagtcctgagcttgccatgtccaaaccagcctggcgatcatgtcatgccaccggtgccggggagcagcgcacccaacagccccatggctatgcttacgcttaactccaactgtgaaaaagagtttatgaaacag

SEQ ID NO: 6945 - DNA, 1785 bp, Homo sapiens
  source 1..1785: mol_type = genomic DNA
atgaccatgaccctccacaccaaagcatctgggatggccctactgcatcagatccaagggaacgagctggagcccctgaaccgtccgcagctcaagatccccctggagcggcccctgggcgaggtgtacctggacagcagcaagcccgccgtgtacaactaccccgagggcgccgcctacgagttcaacgccgcggccgccgccaacgcgcaggtctacggtcagaccggcctcccctacggccccgggtctgaggctgcggcgttcggctccaacggcctggggggtttccccccactcaacagcgtgtctccgagcccgctgatgctactgcacccgccgccgcagctgtcgcctttcctgcagccccacggccagcaggtgccctactacctggagaacgagcccagcggctacacggtgcgcgaggccggcccgccggcattctacaggccaaattcagataatcgacgccagggtggcagagaaagattggccagtaccaatgacaagggaagtatggctatggaatctgccaaggagactcgctactgtgcagtgtgcaatgactatgcttcaggctaccattatggagtctggtcctgtgagggctgcaaggccttcttcaagagaagtattcaaggacataacgactatatgtgtccagccaccaaccagtgcaccattgataaaaacaggaggaagagctgccaggcctgccggctccgcaaatgctacgaagtgggaatgatgaaaggtgggatacgaaaagaccgaagaggagggagaatgttgaaacacaagcgccagagagatgatggggagggcaggggtgaagtggggtctgctggagacatgagagctgccaacctttggccaagcccgctcatgatcaaacgctctaagaagaacagcctggccttgtccctgacggccgaccagatggtcagtgccttgttggatgctgagccccccatactctattccgagtatgatcctaccagacccttcagtgaagcttcgatgatgggcttactgaccaacctggcagacagggagctggttcacatgatcaactgggcgaagagggtgccaggctttgtggatttgaccctccatgatcaggtccaccttctagaatgtgcctggctagagatcctgatgattggtctcgtctggcgctccatggagcacccagggaagctactgtttgctcctaacttgctcttggacaggaaccagggaaaatgtgtagagggcatggtggagatcttcgacatgctgctggctacatcatctcggttccgcatgatgaatctgcagggagaggagtttgtgtgcctcaaatctattattttgcttaattctggagtgtacacatttctgtccagcaccctgaagtctctggaagagaaggaccatatccaccgagtcctggacaagatcacagacactttgatccacctgatggccaaggcaggcctgaccctgcagcagcagcaccagcggctggcccagctcctcctcatcctctcccacatcaggcacatgagtaacaaaggcatggagcatctgtacagcatgaagtgcaagaacgtggtgcccctctatgacctgctgctggagatgctggacgcccaccgcctacatgcgcccactagccgtggaggggcatccgtggaggagacggaccaaagccacttggccactgcgggctctacttcatcgcattccttgcaaaagtattacatcacgggggaggcagagggtttccctgccacggtc

SEQ ID NO: 6946 - DNA, 639 bp, Homo sapiens
  source 1..639: mol_type = genomic DNA
atggtgcagtcctgctccgcctacggctgcaagaaccgctacgacaaggacaagcccgtttctttccacaagtttcctcttactcgacccagtctttgtaaagaatgggaggcagctgtcagaagaaaaaactttaaacccaccaagtatagcagtatttgttcagagcactttactccagactgctttaagagagagtgcaacaacaagttactgaaagagaatgctgtgcccacaatatttctttgtactgagccacatgacaagaaagaagatcttctggagccacaggaacagcttcccccacctcctttaccgcctcctgtttcccaggttgatgctgctattggattactaatgccgcctcttcagacccctgttaatctctcagttttctgtgaccacaactatactgtggaggatacaatgcaccagcggaaaaggattcatcagctagaacagcaagttgaaaaactcagaaagaagctcaagaccgcacagcagcgatgcagaaggcaagaacggcagcttgaaaaattaaaggaggttgttcacttccagaaagagaaagacgacgtatcagaaagaggttatgtgattctaccaaatgactactttgaaatagttgaagtaccagca

SEQ ID NO: 6947 - DNA, 1428 bp, Homo sapiens
  source 1..1428: mol_type = genomic DNA
atggacgcagtggcctttgaggatgtggctgtgaacttcacccaggaggaatgggctttgctgggtccatcacagaagaatttatacagatatgtgatgcaagaaaccatcaggaacctggactgtataagaatgatatgggaagaacagaatactgaagatcagtacaaaaatcctaggagaaatctaagatgtcatatggtagagagattcagtgaaagtaaagacagtagtcagtgtggagaaacatttagcctcattcgagatagtattgtgaacaacagcatttgtcctggagaagatccatgtcaaagcgctgagtgtgaagaagtcataatgggtcatttatcccttaatagccacatcagagttgattctggacacaaaccacatgagtatcaggaatatggagagaagccacatacacataaacaacgtgggaaagccttcagttaccatcactcctttcagtcgcgtggaaggcctcacactggaaagaaacgctatgagtgtaaggaatgtggaaaaaccttcagttctcgtagaaaccttcgaagacacatggtagtgcaaggtggaaatagaccttataaatgtaagttgtgtgggaaagcttttttttggcccagtttattacgtatgcatgaaagaactcacactggagagaaaccgtatgaatgtaagcagtgttctaaagcctttcctttttacagttcctatcgaagacatgagagaatgcacactggggagaaaccgtatgaatgtaagcagtgttctaaagccttgcctgattccagttcctatataagacatgaaagaactcacactggagagaaaccatatacatgtaaacagtgtgggaaagccttcagtgtttccagttcccttcgaagacatgaaaccactcacagtgcagagaaaccctatgagtgtaagcaatgcgggaaaacatttcatcatcttggaagctttcagatacacatgaaaaggcacactggagatcgacctcataaatgtaagatatgtgggaaaggctttgatcgtcccagtttagttcgatatcatgaacgaattcacactggagagaaaccctatgaatgcaagcagtgtgggaaaacgttatctcatagctcaagctttcgaagacacatgataatgcacactggaggtggacctcataaatgcaagatatgtgggaaagcttttgtttatcctagtgtatgtcaaagacacgaaaagtctcacagtggagagaaaccctatgaatgcaagcagtgtgggaaagcgttatctcatagctcaagctttcgaagacatatggtaatgcatacgggagatgggccgaataaatgcaaggtatgtgggaaagcctttgtttatcccagtgtatgtcaaagacatgaaaagactcactggagagaaacaata

SEQ ID NO: 6948 - DNA, 1434 bp, Homo sapiens
  source 1..1434: mol_type = genomic DNA
atggcctgcctcaacccggtgcctaaactctacagatctgtaattgaagatgtaattgaaggagttcggaatctatttgctgaagaaggtatagaggaacaagttttaaaagacttgaagcagctctgggaaaccaaggttttgcagtctaaagcaacagaagacttcttcagaaatagcatccaatcacctctgtttactcttcagttgccgcacagcttgcaccaaacattgcaatcgtcaacagcatcattagttattcctgctggtagaactcttccaagttttaccacagcagaactgggcacttcaaactccagtgcaaactttacttttcctggttatcccattcatgtaccagcaggtgtgacactacagactgtatctggtcacctttataaagtcaatgtaccaattatggtgacagagacttctggaagagcaggtattcttcagcatccaattcagcaagtatttcaacagcttggccagccttcagtaatacaaactagtgttccacaattgaatccatggtctcttcaagcaactactgaaaaatcacagagaattgaaaccgtgctacagcaacccgcaattctaccttctgggccagtagataggaaacacttagaaaatgccaccagtgatatacttgtatctcctggaaatgagcataaaatcgtgcctgaagctttgttgtgtcatcaggaaagttctcactatatcagtcttccaggtgttgtattttctccacaggtctctcaaacaaattctaatgtggagtcagtgctcagtggttcagctagcatggctcaaaatctgcatgatgagtccctctccacaagccctcatggggctctccaccagcacgtgactgatattcagcttcatattcttaaaaataggatgtatggatgtgattctgtaaagcaaccaagaaatatagaggaacccagcaacatacctgtatcagagaaggattctaattctcaggtggatttaagcattcgggttactgatgatgatattggtgaaataattcaagtagatggaagcggtgatacatcttccaatgaagaaataggaagtacaagagatgcagatgagaatgaatttctagggaatattgacgggggagatctgaaggtacctgaagaagaagctgacagtatttcaaatgaggattcagccacaaacagtagtgataatgaagaccctcaagtaaacattgtagaagaggaccctttaaattctggagatgatgttagtgaacaggatgtgccagacctgtttgacacggataatgttattgtctgtcagtatgataagattcatcgaagcaagaacaaatggaaattctatttgaaagatggtgttatgtgttttggagggagagactatgtatttgcaaaagccattggtgatgcagagtgg

SEQ ID NO: 6949 - DNA, 1746 bp, Homo sapiens
  source 1..1746: mol_type = genomic DNA
atggaggcgctgagtcgagctgggcaggagatgagcctagcggccctgaagcaacacgacccctatatcaccagcatcgcagacctcacgggccaggtcgctctgtacaccttctgccccaaggccaaccagtgggagaagactgatatagaagggaccttattcgtatatcgaaggtcagcttccccttaccatggttttaccattgtgaatcgactaaatatgcacaatctagttgaaccagtgaataaagatttggaatttcagctccatgaaccatttcttctgtatagaaatgcaagcttgtcgatatatagtatctggttttatgacaagaatgactgtcaccgcatagcaaaactcatggctgatgtggtagaagaggagacacggcgatcccagcaagctgctcgggacaaacagagtcccagccaggccaatggctgcagcgaccacaggcccatcgacatcctggagatgctgagcagagccaaggatgagtatgagaggaatcagatgggtgactcaaatatctccagccctgggttacagccaagcactcagctctccaatctgggaagcaccgagactctagaagaaatgccctccgggtcacaggataagtctgctccatctggacacaagcatctgacggtagaagagttatttggaacctctttgccaaaggaacaaccagcagttgtgggtctggattcagaagaaatggagaggttgccaggagatgcctcccagaaagagcccaattcattcctaccatttccctttgagcagttaggaggagcccctcaatcagaaaccctgggtgtcccttctgctgcccaccattcagtccagcctgaaatcaccaccccggtgctaatcactccagcctccatcacacagtccaatgaaaagcatgctccaacctacacaatcccgttgagccctgttctcagtcccactctgccagctgaagctcctactgcacaggttccccccagcttacctcgaaacagcaccatgatgcaggcagtgaagaccacgcctagacagaggtctccactcctgaaccagccagtccctgagctaagccatgccagtctgattgccaaccagagccccttcagggccccattgaacgtgacgaacacagctggcacatccctcccaagcgttgatcttctccagaaactcaggttgaccccacagcatgaccaaatacagacacaaccacttgggaaaggtgcaatggtagccagcttttctccggcagctggtcagctagccacacctgagagcttcatagagcctccctctaagacagcagcagcaagagtggcggcctcagcctccctgagcaacatggtgcttgctccccttcagtctatgcagcagaaccaggatcctgaagtatttgtgcagcctaaggtgttatccagtgccatcccggttgcaggcgccccactggttactgcaacgaccactgcagtgtcttcagtcctgctggccccaagtgttttccagcagacagttacaagatcttcggaccttgagaggaaagccagctccccttctcctctaactattggaacgccagaaagtcagagaaagccttccattattctcagcaagtctcagctccaggatacattaatacatctaataaagaatgattccagcttcctcagtacacttcatgaagtctacttgcaggttctgaccaagaacaaagacaaccacaaccta

SEQ ID NO: 6950 - DNA, 1251 bp, Homo sapiens; identical to SEQ ID NO: 5053
  source 1..1251: mol_type = genomic DNA

SEQ ID NO: 6951 - DNA, 1113 bp, Homo sapiens
  source 1..1113: mol_type = genomic DNA
atggagctggaattggatgctggtgaccaagacctgctggccttcctgctagaggaaagtggagatttggggacggcacccgatgaggccgtgagggccccactggactgggcgctgccgctttctgaggtaccgagcgactgggaagtagatgatttgctgtgctccctgctgagtcccccagcgtcgttgaacattctcagctcctccaacccctgccttgtccaccatgaccacacctactccctcccacgggaaactgtctctatggatctagagagtgagagctgtagaaaagaggggacccagatgactccacagcatatggaggagctggcagagcaggagattgctaggctagtactgacagatgaggagaagagtctattggagaaggaggggcttattctgcctgagacacttcctctcactaagacagaggaacaaattctgaaacgtgtgcggaggaagattcgaaataaaagatctgctcaagagagccgcaggaaaaagaaggtgtatgttgggggtttagagagcagggtcttgaaatacacagcccagaatatggagcttcagaacaaagtacagcttctggaggaacagaatttgtcccttctagatcaactgaggaaactccaggccatggtgattgagatatcaaacaaaaccagcagcagcagcacctgcatcttggtcctactagtctccttctgcctcctccttgtacctgctatgtactcctctgacacaagggggagcctgccagctgagcatggagtgttgtcccgccagcttcgtgccctccccagtgaggacccttaccagctggagctgcctgccctgcagtcagaagtgccgaaagacagcacacaccagtggttggacggctcagactgtgtactccaggcccctggcaacacttcctgcctgctgcattacatgcctcaggctcccagtgcagagcctcccctggagtggccattccctgacctcttctcagagcctctctgccgaggtcccatcctccccctgcaggcaaatctcacaaggaagggaggatggcttcctactggtagcccctctgtcattttgcaggacagatactcaggc

SEQ ID NO: 6952 - DNA, 1215 bp, Homo sapiens
  source 1..1215: mol_type = genomic DNA
atggacagtgctatcaccctgtggcagttccttcttcagctcctgcagaagcctcagaacaagcacatgatctgttggacctctaatgatgggcagtttaagcttttgcaggcagaagaggtggctcgtctctgggggattcgcaagaacaagcctaacatgaattatgacaaactcagccgagccctcagatactattatgtaaagaatatcatcaaaaaagtgaatggtcagaagtttgtgtacaagtttgtctcttatccagagattttgaacatggatccaatgacagtgggcaggattgagggtgactgtgaaagtttaaacttcagtgaagtcagcagcagttccaaagatgtggagaatggagggaaagataaaccacctcagcctggtgccaagacctctagccgcaatgactacatacactctggcttatattcttcatttactctcaactctttgaactcctccaatgtaaagcttttcaaattgataaagactgagaatccagccgagaaactggcagagaaaaaatctcctcaggagcccacaccatctgtcatcaaatttgtcacgacaccttccaaaaagccaccggttgaacctgttgctgccaccatttcaattggcccaagtatttctccatcttcagaagaaactatccaagctttggagacattggtttccccaaaactgccttccctggaagccccaacctctgcctctaacgtaatgactgcttttgccaccacaccacccatttcgtccataccccctttgcaggaacctcccagaacaccttcaccaccactgagttctcacccagacatcgacacagacattgattcagtggcttctcagccaatggaacttccagagaatttgtcactggagcctaaagaccaggattcagtcttgctagaaaaggacaaagtaaataattcatcaagatccaagaaacccaaagggttagaactggcacccacccttgtgatcacgagcagtgatccaagcccactgggaatactgagcccatctctccctacagcttctcttacaccagcatttttttcacaggtagcttgctcgctctttatggtgtcaccattgctttcatttatttgcccttttaagcaaatccagaatttatacactcaagtttgctttctgttacttaggtttgtcttagaaaggttatgtgtgactgtcatg

SEQ ID NO: 6953 - DNA, 1305 bp, Homo sapiens
  source 1..1305: mol_type = genomic DNA
atggacactgccagccatagccttgttcttctccagcagctgaacatgcagcgagaatttggttttctgtgtgattgcacagttgcaattggagatgtttacttcaaagcccacagagcagtgcttgctgctttttctaactatttcaagatgatatttattcaccaaacaagtgaatgcataaaaatacaaccaactgacatccaacctgacatattcagctatttgttgcacattatgtacacggggaaagggccaaaacagattgtggatcatagtcgtttggaggaagggattcgatttcttcacgccgactacctttctcacattgcaactgaaatgaatcaagtgttctcaccagagactgtgcagtcctcaaatttatatggcattcagatctcaacaacccaaaaaacagttgtcaaacaaggactggaggtcaaagaagctccttccagtaacagtggaaacagagctgctgtccagggtgaccacccccagttgcagttgtctcttgctattggtctggatgatggcactgcagaccagcagagggcctgtcctgccacccaggccctggaggagcaccagaagcccccagtttccatcaagcaggagagatgtgacccagaatctgtgatctcccagagccacccctcaccctcatcagaggtgacaggccccacttttactgaaaacagtgtcaaaatacacttatgccattactgtggggaacgttttgattcccgtagtaacctaaggcaacatctccatacacatgtgtctggatccctgccattcggtgtccctgcttccattctggaaagtaatgaccttggtgaagtgcatccccttaatgaaaacagcgaggcccttgaatgccgcaggctcagctccttcattgttaaggagaatgaacagcagccagaccacaccaaccggggtaccacagagcctttgcagatcagtcaagtatctttgatctccaaagacacagagccagtagaattaaactgtaatttttctttttcaaggaaaagaaaaatgagctgtaccatctgtggtcataaattccctcgaaagagccaattgttggaacacatgtatacacacaaaggtaaatcttacagatataaccgatgccaaaggtttggtaatgcattggcccagagatttcagccatactgtgacagctggtctgatgtctccctgaaaagttctcgcttgtcacaagaacacttagacttgccttgtgccttagagtcagagctcacacaagaaaatgtggatactatcctagttgag

SEQ ID NO: 6954 - DNA, 1290 bp, Homo sapiens
  source 1..1290: mol_type = genomic DNA
atgcactccaccacccccatcagctccctcttctccttcaccagccccgcagtgaagagactgctaggctggaagcaaggagatgaagaggaaaagtgggcagagaaggcagtggactctctagtgaagaagttaaagaagaagaagggagccatggacgagctggagagggctctcagctgcccggggcagcccagcaaatgcgtcacgattccccgctccctggacgggcggctgcaggtgtcccaccgcaagggcctgccccatgtgatttactgtcgcgtgtggcgctggccggatctgcagtcccaccacgagctgaagccgctggagtgctgtgagttcccatttggctccaagcagaaagaagtgtgcattaacccttaccactaccgccgggtggagactccagtactgcctcctgtgctcgtgccaagacacagtgaatataacccccagctcagcctcctggccaagttccgcagcgcctccctgcacagtgagccactcatgccacacaacgccacctatcctgactctttccagcagcctccgtgctctgcactccctccctcacccagccacgcgttctcccagtccccgtgcacggccagctaccctcactccccaggaagtccttctgagccagagagtccctatcaacactcagactttcgaccagtttgttacgaggagccccagcactggtgctcggtcgcctactatgaactgaacaaccgagttggggagacattccaggcttcctcccgaagtgtgctcatagatgggttcaccgacccttcaaataacaggaacagattctgtcttggacttctttctaatgtaaacagaaactcaacgatagaaaataccaggagacatataggaaagggtgtgcacttgtactacgtcgggggagaggtgtatgccgagtgcgtgagtgacagcagcatctttgtgcagagccggaactgcaactatcaacacggcttccacccagctaccgtctgcaagatccccagcggctgcagcctcaaggtcttcaacaaccagctcttcgctcagctcctggcccagtcagttcaccacggctttgaagtcgtgtatgaactgaccaagatgtgtactatccggatgagttttgttaagggttggggtgctgagtatcatcgccaggatgtcaccagcaccccctgctggattgagattcatcttcatgggccactgcagtggctggacaaagttctgactcagatgggctctccacataaccccatttcttcagtgtct

SEQ ID NO: 6955 - DNA, 1989 bp, Homo sapiens
  source 1..1989: mol_type = genomic DNA
atggctattaccctacagcccagtgacctgatctttgagttcgcaagcaacgggatggatgatgatatccaccagctggaagacccctctgtgttcccagctgtgatcgtggagcaggtaccctaccctgatttactgcatctgtactcgggactggagttggacgacgttcacaatggcatcataacagacgggaccttgtgcatgacgcaggatcagatcctggaaggcagttttttgctgacagatgacaatgaggccacctcgcacaccatgtcaaccgcggaagtcttactcaatatggagtctcccagcgatatcctggatgagaagcagatcttcagtacctccgaaatgcttccagactcggaccctgcaccagctgtcactctgcccaactacctgtttcctgcctctgagcccgatgccctgaacagggcgggtgacactagtgaccaggaggggcattctctggaggagaaggcctccagagaggaaagtgccaagaagactgggaaatcaaagaagagaatccggaagaccaagggcaaccgaagtacctcacctgtcactgaccccagcatccccattaggaagaaatcaaaggatggcaaaggcagcaccatctatctgtgggagttcctcctggctcttctgcaagacagaaacacctgtcccaagtacatcaagtggacccagcgagagaaaggcatcttcaaactggtggactccaaagctgtgtccaagctgtgggggaagcagaaaaacaagcctgacatgaactatgagacaatggggcgggcactaagatactactaccaaagaggcatactggccaaagtggaagggcagaggctggtgtaccagtttaaggagatgcccaaggacctggtggtcattgaagatgaggatgagagcagcgaagccacagcagccccacctcaggcctccacggcctctgtggcctctgccagtaccacccggcgaaccagctccagggtctcatccagatctgccccccagggcaagggcagctcttcttgggagaagccaaaaattcagcatgtcggtctccagccatctgcgagtctggaattgggaccgtcgctagacgaggagatccccactacctccaccatgctcgtctctccagcagagggccaggtcaagctcaccaaagctgtgagtgcatcttcagtgcccagcaacatccacctaggagtggcccccgtggggtcgggctcggccctgaccctgcagacgatcccactgaccacggtgctgaccaatgggcctcctgccagtactactgctcccactcagctcgttctccagagtgttccagcggcctctactttcaaggacaccttcactttgcaggcctctttccccctgaacgccagtttccaagacagccaggtggcagccccaggggctccactgattctcagtggcctcccccaacttctggctggggccaaccgtccgaccaacccggcgccacccacggtcacaggggctggaccagcagggcccagctctcagccccctgggactgtcattgctgccttcatcaggacttctggcactacagcagcccctagggtcaaggaggggccactgaggtcctcctcctatgttcagggtatggtgacgggggcccccatggaggggctgctggttcctgaagagaccctgagggagctcctgagagatcaggctcatcttcagccacttccaacccaggtggtttccaggggttcccacaatccgagccttctgggcaaccagactttgtctcctcccagccgccccactgttgggctgaccccagtggctgaacttgagctctcctcaggctcagggtccctgctgatggctgagcctagtgtgaccacatctgggagccttctgacaagatcccccaccccagcccctttctccccattcaaccctacttccctcattaagatggagccccatgacata

SEQ ID NO: 6956 - DNA, 432 bp, Homo sapiens
  source 1..432: mol_type = genomic DNA
atggcggatcggctcacgcagcttcaggacgctgtgaattcgcttgcagatcagttttgtaatgccattggagtattgcagcaatgtggtcctcctgcctctttcaataatattcagacagcaattaacaaagaccagccagctaaccctacagaagagtatgcccagctttttgcagcactgattgcacgaacagcaaaagacattgatgttttgatagattccttacccagtgaagaatctacagctgctttacaggctgctagcttgtataagctagaagaagaaaaccatgaagctgctacatgtctggaggatgttgtttatcgaggagacatgcttctggagaagatacaaagcgcacttgctgatattgcacagtcacagctgaagacaagaagtggtacccatagccagtctcttccagactca

SEQ ID NO: 6957 - DNA, 888 bp, Homo sapiens
  source 1..888: mol_type = genomic DNA
atgtatttttcccaggaagaatgggagttattggatcccactcagaaggccctctacaatgatgtaatgcaggaaaactatgagactgtcatctctctagcattgtttgtgctccccaaacctaaagtgatctcctgtctagagcaaggggaagagccatgggttcaagtatccccggagtttaaggatagtgccggaaaatctcctacagggttaaagctcaaaaacgacactgaaaatcatcagcctgtgtctctttctgacttagaaatacaagcatcagcaggcgtcatatcaaaaaaggccaaagtaaaagttccccagaaaacagcaggcaaagaaaatcattttgatatgcacagagtgggaaaatggcaccaagattttccagtgaagaaaagaaagaaactttcaacctggaaacaagagctgctcaaacttatggatcgtcacaagaaagattgtgcaagagagaagccttttaaatgtcaggaatgtgggaaaaccttcagagttagctctgaccttattaagcaccaaagaattcacactgaagagaaaccctataaatgtcaacagtgtgataagaggtttagatggagttcagatcttaataagcacttaacaacacaccaaggaataaaaccatataaatgttcatggtgtgggaaaagcttcagtcaaaatacaaatttacatacacaccaaagaactcatacaggagaaaagcccttcacatgtcatgaatgtggaaaaaaattcagtcagaactcccaccttattaaacaccggagaacccacacaggtgagcagccatatacttgtagcatatgcaggagaaacttcagcaggcggtcaagccttcttagacaccagaaactccacctg

SEQ ID NO: 6958 - DNA, 1506 bp, Homo sapiens
  source 1..1506: mol_type = genomic DNA
atggcctgggctctgaagctgcctctggccgacgaagtgattgaatccgggttggtgcaggactttgatgctagcctgtccgggatcggccaggaactgggtgctggtgcctatagcatgagtgatgtccttgcattgcccatttttaagcaagaagagtcgagtttgcctcctgataatgagaataaaatcctgccttttcaatatgtgctttgtgctgctacctctccagcagtgaaactccatgatgaaaccctaacgtatctcaatcaaggacagtcttatgaaattcgaatgctagacaataggaaacttggagaacttccagaaattaatggcaaattggtgaagagtatattccgtgtggtgttccatgacagaaggcttcagtacactgagcatcagcagctagagggctggaggtggaaccgacctggagacagaattcttgacatagatatcccgatgtctgtgggtataatcgatcctagggctaatccaactcaactaaatacagtggagttcctgtgggaccctgcaaagaggacatctgtgtttattcaggtgcactgtattagcacagagttcactatgaggaaacatggtggagaaaagggggtgccattccgagtacaaatagataccttcaaggagaatgaaaacggggaatatactgagcacttacactcggccagctgccagatcaaagttttcaagcccaaaggtgcagacagaaagcaaaaaacggatagggaaaaaatggagaaacgaacacctcatgaaaaggagaaatatcagccttcctatgagacaaccatactcacagagtgttctccatggcccgagatcacgtatgtcaataactccccatcacctggcttcaacagttcccatagcagtttttctcttggggaaggaaatggttcaccaaaccaccagccagagccaccccctccagtcacagataacctcttaccaacaaccacacctcaggaagctcagcagtggttgcatcgaaatcgtttttctacattcacaaggcttttcacaaacttctcaggggcagatttattgaaattaactagagatgatgtgatccaaatctgtggccctgcagatggaatcagactttttaatgcattaaaaggccggatggtgcgtccaaggttaaccatttatgtttgtcaggaatcactgcagttgagggagcagcaacaacagcagcagcaacagcagcagaagcatgaggatggagactcaaatggtactttcttcgtttaccatgctatctatctagaagaactaacagctgttgaattgacagaaaaaattgctcagcttttcagcatttccccttgccagatcagccagatttacaagcaggggccaacaggaattcatgtgctcatcagtgatgagatgatacagaactttcaggaagaagcatgttttattctggacacaatgaaagcagaaaccaatgatagctatcatatcatactgaag

SEQ ID NO: 6959 - DNA, 1488 bp, Homo sapiens
  source 1..1488: mol_type = genomic DNA
atggctgcaaattgcacatcctcatggagtctaggagaatcctgcaacagacctgggttggagctgccacggtctatggcatcctcagaaactcaacttggaaatcacgacgtggaccctgagatttctcacgtgaacttcaggatgttcagctgcccgaaggagtcggaccccatccaggctctgaggaaactcactgagctgtgccatctgtggctgaggcccgacctccacaccaaagagcagatcctggacatgctggtgatggagcagttcatgatctccatgccccaggagctccaggtcttagtcatgatgaacggtgtgcagagctgcaaagacctggaggacctgctacgaaataacagaagacccaagaaatggtctgtggtcaccttccacggaaaggaatatattgtgcaggactcagatatcgagatggctgaagccccctccagtgtcagagatgatctgaaagacgtgtccagccaacgggcctcctcggtgaaccagatgcgtccaggggaaggccaggcccaccgagagctgcagatcctgcccagggtccctgcattgtccaggaggcagggagaggactttctgctacacaagagtattgacgtaacaggtgacccaaagtctctgagacccaagcagaccttggagaaggatctgaaggaaaacagggaagagaacccaggactgacatccccagagcctcagcttccaaagagtcccacagatctggtgagagcaaaggaggggaaggaccccccaaaaatagcctctgtggaaaatgtggatgctgacacaccttctgcctgcgttgtggagagagaagcttcgactcacagcgggaacagaggagacgctctgaatctgagcagtcccaaaagaagcaaaccagatgcctcctccatttcccaagaagagcctcaaggagaagccacacctgtgggcaacagagaatccccgggacaagctgggatgaattcaattcattccccaggccctgcgagcccagtcagtcacccggatggccaagaagccaaggcactgccgccctttgcatgtgacgtgtgcgagaagaggtttacgtgtaattccaagctagtcatccacaagagatcacacacaggcgagagactctttcaatgtaatctctgtgggaagcgcttcatgcagcttattagcctccaatttcaccagcgaacccacactggcgagaggccctacacgtgtgacgtctgccagaagcagttcacccagaagtcctacttgaagtgtcacaagagaagccacacaggggagaagcccttcgaatgtaaagactgcaagaaagttttcacctacagggggagcctgaaggagcaccagcgcatccactccggagagaaaccctacaaatgttccaagtgtccaagagccttcagtcggctgaaattgttaagacgccaccagaaaacacatccagaagctacttctcag

SEQ ID NO: 6960 - DNA, 2070 bp, Homo sapiens
  source 1..2070: mol_type = genomic DNA
atgaatctacgttctgtatttactgtagaacaacaaaggattttacagcgttattatgaaaatggaatgacaaatcaaagtaaaaattgctttcagctcatattacagtgtgcacaggagactaagctggacttcagtgtagtcaggacgtgggttggcaataagagaagaaagatgagtagtaagaactctgaatctggaacagcaacaacaggaacctctttgtcagctccagacatcacagtcagaaatgtggttaatattgctcgaccctcaagccagcagtcttcttggacatctgccaataatgatgtcattgtaactggtatatacagtccagccagttcatcaagtaggcaaggaacaaacaaacatacagacacacaaattacagaagcacataaaatccctattcagaaaacagccactaaaaatgatactgagtttcagttacacattcctgtccaaagacaagtagcacactgtaaaaatgcttccctactcctaggtgaaaaaacaattattttgtcaagacagacaagtgtgctaaatgctggaaactcagtattcaatcacgcaaagaaaaactatggaaactcttcagtacaagcttctgaaatgacagtacctcaaaagccttctgtgtgccaccgaccttgtaaaattgaaccagttgggattcaaaggtcatataagcctgaacacacaggcccagcattacataacttatgtgggcaaaagccaactattagagacccttactgtagaacacaaaacttggaaatccgtgaagtgttttcattggcagttagcgattacccccagagaattctgggaggaaatgccccacagaagcctagctcagcagaaggaaattgtttgtccattgcaatggagactggagatgctgaggatgaatatgccagagaggaagagctggcatcgatgagagcacagataccaagctattcgagattttatgaaagtggcagttcccttcgagctgagaaccaaagtacaaccttgcccggaccaggaagaaatatgccaaattcacaaatggtgaatattagagatatgtcagacaatgtactgtatcaaaacagaaactaccatttgacaccacggacctcattacatacagcatctagtacaatgtacagtaataccaatccattacggagtaatttttctcctcattttgcatcatcaaaccaattgagattatcacaaaaccaaaacaattaccagatttcaggaaaccttactgtgccttggattacagggtgttctagaaaaagagcactacaggaccgcactcagttcagtgaccgagacttagccacccttaagaagtattgggacaatggcatgaccagcctgggctctgtttgtagagagaaaattgaagctgtggcaactgaattaaatgttgactgtgaaatagttcggacttggattgggaatcgaagaaggaaatatcgtttaatggggattgaagttccacctccaagaggaggccctgctgatttctctgagcagcctgagtctggttctttatctgcactcacaccaggagaggaagctgggcctgaagtaggagaggataatgacagaaatgatgaagtatccatctgtttgtctgaaggaagctctcaagaagagcccaatgaagttgttccgaatgatgcaagggctcataaggaagaggaccaccatgcagtaaccacagataatgtgaaaatagaaattattgatgatgaagaaagtgacatgataagtaattctgaagtagaacaagtaaactctttcttggattataagaatgaagaagtcaaattcattgaaaatgagctcgagattcaaaagcaaaaatactttaaacttcagacttttgttagaagcttgatattagcaatgaaagctgatgataaggaacaacagcaggcactgctgtcagatttacctcctgaattagaggaaatggatttcaatcatgcctcactggagcctgatgatacctcattcagtgtatcttctttgtcagagaaaaatgtctcagaaagtttg

SEQ ID NO: 6961 - DNA, 1182 bp, Homo sapiens
  source 1..1182: mol_type = genomic DNA
atgtcgggcgaggacgagcaacaggagcaaactatcgctgaggacctggtcgtgaccaagtataagatggggggcgacatcgccaacagggtacttcggtccttggtggaagcatctagctcaggtgtgtcggtactgagcctgtgtgagaaaggtgatgccatgattatggaagaaacagggaaaatcttcaagaaagaaaaggaaatgaagaaaggtattgcttttcccaccagcatttcggtaaataactgtgtatgtcacttctcccctttgaagagcgaccaggattatattctcaaggaaggtgacttggtaaaaattgaccttggggtccatgtggatggcttcatcgctaatgtagctcacacttttgtggttgatgtagctcaggggacccaagtaacagggaggaaagcagatgttattaaggcagctcacctttgtgctgaagctgccctacgcctggtcaaacctggaaatcagaacacacaagtgacagaagcctggaacaaagttgcccactcatttaactgcacgccaatagaaggtatgctgtcacaccagttgaagcagcatgtcatcgatggagaaaaaaccattatccagaatcccacagaccagcagaagaaggaccatgaaaaagctgaatttgaggtacatgaagtatatgctgtggatgttctcgtcagctcaggagagggcaaggccaaggatgcaggacagagaaccactatttacaaacgagacccctctaaacagtatggactgaaaatgaaaacttcacgtgccttcttcagtgaggtggaaaggcgttttgatgccatgccgtttactttaagagcatttgaagatgagaagaaggctcggatgggtgtggtggagtgcgccaaacatgaactgctgcaaccatttaatgttctctatgagaaggagggtgaatttgttgcccagtttaaatttacagttctgctcatgcccaatggccccatgcggataaccagtggtcccttcgagcctgacctctacaagtctgagatggaggtccaggatgcagagctaaaggccctcctccagagttctgcaagtcgaaaaacccagaaaaagaaaaaaaagaaggcctccaagactgcagagaatgccaccagtggggaaacattagaagaaaatgaagctggggac

SEQ ID NO: 6962 - DNA, 1323 bp, Homo sapiens
  source 1..1323: mol_type = genomic DNA
atgtctgaaagatcagatctccttcacttcaagtttgaaaattatggagattcaatgttacaaaaaatgaacaaattaagagaagagaataaattttgtgatgttacagttctcatagatgatattgaggtacagggacataaaattgtgtttgctgcaggttcccccttcttaagagaccaatttttactgaatgattccagagaggtgaaaatctccatattacagagttccgaagtggggagacaattgctcttatcctgttatagtggtgtgctggaattccctgagatggaactggtaaattacttgactgctgcaagttttcttcagatgagccacattgtagaacggtgcacacaggccctgtggaagtttataaagccaaaacaaccaatggatagtaaagagggatgtgaaccacagagtgcttctccccagtcaaaagaacagcagggagatgccagaggctccccaaagcaggactcaccttgtattcatccatctgaagacagtatggatatggaggacagtgatattcagattgttaaggtagaatctattggggatgtatcagaggttagaagtaaaaaagatcagaaccagtttatttcttctgaacccactgctttacattcatcagagccccagcactccctgataaattcaactgtggaaaacagagtaagtgaaatagaacaaaaccatctccacaattatgccctttcttatacaggcagtgataacatcatcatggcctcaaaagatgtctttggccctaatattcgaggtgtagacaaaggcctacagtggcatcaccagtgcccaaagtgtaccagggtgtttcgtcacctggagaactacgccaaccatttaaaaatgcacaaactctttatgtgtctactctgcggcaagactttcactcagaaaggcaaccttcatcgacacatgcgtgtgcatgccggaattaaacctttccagtgtaaaatctgtgggaaaaccttttctcagaagtgttccttacaggatcatcttaaccttcacagtggagataagccccataaatgtaactattgtgatatggtttttgcacataaaccagttttgaggaaacaccttaaacagctgcatggcaaaaacagctttgataatgccaatgagagaaatgtacaagacctcacagtggattttgattcttttgcatgtacaacagtcacagactctaaagggtgtcagccacaacccgatgcaacacaggtcctggatgcaggtaaactggcccaagctgtcctgaacttaagaaatgatagtacttgtgtgaat

SEQ ID NO: 6963 - DNA, 276 bp, Homo sapiens
  source 1..276: mol_type = genomic DNA
atgggaccattgcaatttagagatgtggccatagaattctctctggaggagtggcattgcctggacactgcacagcggaatttatataggaatgtgatgttagagaactacagtaacctggtcttccttggtattactgtttctaagccagacctgatcacctgtctggagcaaggaagaaaacctttgaccatgaagagaaatgagatgatagccaaaccctcagtgagcttccttcaagttcacagtgagagccaaagtcctcttcatgacata

SEQ ID NO: 6964 - DNA, 1827 bp, Homo sapiens
  source 1..1827: mol_type = genomic DNA
atgtcaggctgggagtcatattacaaaaccgagggcgatgaagaagcagaggaagaacaagaagagaaccttgaagcaagtggagactataaatattcaggaagagatagtttgatttttttggttgatgcctccaaggctatgtttgaatctcagagtgaagatgagttgacaccttttgacatgagcatccagtgtatccaaagtgtgtacatcagtaagatcataagcagtgatcgagatctcttggctgtggtgttctatggtaccgagaaagacaaaaattcagtgaattttaaaaatatttacgtcttacaggagctggataatccaggtgcaaaacgaattctagagcttgaccagtttaaggggcagcagggacaaaaacgtttccaagacatgatgggccacggatctgactactcactcagtgaagtgctgtgggtctgtgccaacctctttagtgatgtccaattcaagatgagtcataagaggatcatgctgttcaccaatgaagacaacccccatggcaatgacagtgccaaagccagccgggccaggaccaaagccggtgatctccgagatacaggcatcttccttgacttgatgcacctgaagaaacctgggggctttgacatatccttgttctacagagatatcatcagcatagcagaggatgaggacctcagggttcactttgaggaatccagcaagctagaagacctgttgcggaaggttcgcgccaaggagaccaggaagcgagcactcagcaggttaaagctgaagctcaacaaagatatagtgatctctgtgggcatttataatctggtccagaaggctctcaagcctcctccaataaagctctatcgggaaacaaatgaaccagtgaaaaccaagacccggacctttaatacaagtacaggcggtttgcttctgcctagcgataccaagaggtctcagatctatgggagtcgtcagattatactggagaaagaggaaacagaagagctaaaacggtttgatgatccaggtttgatgctcatgggtttcaagccgttggtactgctgaagaaacaccattacctgaggccctccctgttcgtgtacccagaggagtcgctggtgattgggagctcaaccctgttcagtgctctgctcatcaagtgtctggagaaggaggttgcagcattgtgcagatacacaccccgcaggaacatccctccttattttgtggctttggtgccacaggaagaagagttggatgaccagaaaattcaggtgactcctccaggcttccagctggtctttttaccctttgctgatgataaaaggaagatgccctttactgaaaaaatcatggcaactccagagcaggtgggcaagatgaaggctatcgttgagaagcttcgcttcacatacagaagtgacagctttgagaaccccgtgctgcagcagcacttcaggaacctggaggccttggccttggatttgatggagccggaacaagcagtggacctgacattgcccaaggttgaagcaatgaataaaagactgggctccttggtggatgagtttaaggagcttgtttacccaccagattacaatcctgaagggaaagttaccaagagaaaacacgataatgaaggttctggaagcaaaaggcccaaggtggagtattcagaagaggagctgaagacccacatcagcaagggtacgctgggcaagttcactgtgcccatgctgaaagaggcctgccgggcttacgggctgaagagtggtctgaagaagcaggagctgctggaagccctcaccaagcacttccaggac

SEQ ID NO: 6965 - DNA, 861 bp, Homo sapiens
  source 1..861: mol_type = genomic DNA
atgagtggctccttcgatcgcaagctcagcagcatcctcaccgacatctccagctcccttagctgccatgcgggctccaaggactcgcctaccctgcccgagtcttctgtcactgacctgggctactacagcgctccccagcacgattactactcgggccagccctatggccagacggtgaacccctacacctaccaccaccaattcaatctcaatgggcttgcaggcacgggcgcttactcgcccaagtcggaatatacctacggagcctcctaccggcaatacggggcgtatcgggagcagccgctgccagcccaggacccagtgtcggtgaaggaggagccggaagcagaggtgcgcatggtgaatgggaagcccaagaaggtccgaaagccgcgtacaatctactccagctaccagctggccgccctgcagcgccgcttccagaaggcccagtacctggcgctgcccgagcgcgccgagctggccgcgcagctgggcctcacgcagacacaggtgaaaatctggttccagaaccgccgttccaagttcaagaaactctacaagaacggggaggtgccgctggagcacagtcccaataacagtgattccatggcctgcaactcaccaccatcacccgccctctgggacacctcttcccactccactccggcccctgcccgcagtcagctgcccccgccgctcccatacagtgcctcccccagctacctggacgaccccaccaactcctggtatcacgcacagaacctgagtggaccccacttacagcagcagccgcctcagccagccaccctgcaccatgcctctcccgggcccccgcccaaccctggggctgtgtac

SEQ ID NO: 6966 - DNA, 1470 bp, Homo sapiens
  source 1..1470: mol_type = genomic DNA
atgaagatgagaagaatcaagccagctgctacttctcatgtcgaagggtcaggtggagtatcagccaaggggaaaaggaaacccaggcaggaagaagatgaagactatcgagaatttcctcagaagaagcataagctttatgggaggaagcaacggcctaaaactcagcccaatcccaaatcccaggcccgtcgtattcggaaggaaccaccagtttatgcagcaggcagtttggaggagcaatggtacttagaaatcgttgataaaggcagtgtctcctgccctacctgccaggcagtggggaggaagaccatagagggtttaaagaaacacatggaaaactgcaagcaggaaatgtttacttgtcatcattgtgggaaacaacttcgttcactggcagggatgaagtatcatgtcatggcaaatcataatagtttgcccattttgaaagccggagatgaaatagatgagccaagtgagagggaaaggctccgaacagttctaaagagactgggaaagctcaggtgcatgcgtgagagttgctccagtagcttcaccagcatcatgggatatctctaccatgtcagaaaatgtggcaaaggggctgcagagctggaaaagatgaccctgaaatgtcaccactgtggaaaaccatataggtcgaaggctggacttgcatatcacctgaggtcagagcatgggcctatatccttctttccagagtcaggacagccagagtgcttaaaggagatgaacctagagtcaaagagtgggggccgagttcagagacgttctgccaagatagctgtataccacctacaggagctggcctctgctgaactggccaaggaatggcccaagaggaaggtgcttcaggacctggtacctgatgatcgaaagttaaaatatactcgtccagggctccctaccttcagccaggaagtactacataaatggaagacagatatcaagaaatatcatcgtattcagtgtcctaaccagggctgtgaggctgtctacagcagtgtatctggccttaaagctcacctgggctcttgtacattgggaaactttgtggctggaaaatacaaatgtcttctatgtcagaaagaatttgtgtcagagagtggtgtcaagtatcacatcaactccgtccatgctgaggactggttcgttgtaaacccaacaacaaccaaaagctttgaaaagctgatgaagataaagcagcggcagcaagaagaagaaaagcggaggcagcagcacaggagcagaaggtctctaagaaggcggcagcagcctggcattgagcttcccgagacagagctgagtcttagagtagggaaggatcagaggaggaataatgaggaactggtagtgtcagcctcctgtaaggaaccagagcaggagccagtgccagcacagttccagaaagtaaagcccccaaagactaatcataaacgaggaaggaaa

SEQ ID NO: 6967 - DNA, 1089 bp, Homo sapiens
  source 1..1089: mol_type = genomic DNA
atggcccagccagggtccggctgcaaagcgaccacccgctgtcttgaagggaccgcgccgcccgccatggctcagtctgacgccgaggccctggcaggagctctggacaaggacgagggtcaggcctccccatgtacgcccagcacgccatctgtctgctcaccgccctctgccgcctcctccgtgccgtctgcaggcaagaacatctgctccagctgcggcctcgagatcctggaccgatatctgctcaaggtcaacaacctcatctggcacgtgcggtgcctcgagtgctccgtgtgtcgcacgtcgctgaggcagcagaacagctgctacatcaagaacaaggagatcttctgcaagatggactacttcagccgattcgggaccaagtgtgcccggtgcggccgacagatctacgccagcgactgggtgcggagagctcgcggcaacgcctaccacctggcctgcttcgcctgcttctcgtgcaagcgccagctgtccactggtgaggagttcggcctggtcgaggagaaggtgctctgccgcatccactacgacaccatgattgagaacctcaagagggccgccgagaacgggaacggcctcacgttggagggggcagtgccctcggaacaggacagtcaacccaagccggccaagcgcgcgcggacgtccttcaccgcggaacagctgcaggttatgcaggcgcagttcgcgcaggacaacaaccccgacgctcagacgctgcagaagctggcggacatgacgggcctcagccggagagtcatccaggtgtggtttcaaaactgccgggcgcgtcataaaaagcacacgccgcaacacccagtgccgccctcgggggcgcccccgtcccgccttccctccgccctgtccgacgacatccactacaccccgttcagcagccccgagcgggcgcgcatggtcaccctgcacggctacattgagagtcaggtacagtgcgggcaggtgcactgccggctgccttacaccgcaccccccgtccacctcaaagccgatatggatgggccgctctccaaccggggtgagaaggtcatcctttttcagtac

SEQ ID NO: 6968 - DNA, 1044 bp, Homo sapiens
  source 1..1044: mol_type = genomic DNA
atgaccacagccctggaacctgaggaccaaaaaggacttctgataattaaggcagaggaccattactggggacaggattccagctcacaaaagtgcagtcctcacaggagggaactctatagacaacacttcaggaagctctgctatcaggatgcacctggaccccgtgaagctcttacccagctgtgggagctctgccgtcagtggctgaggccagaatgccacaccaaggagcagattttagacctgctggtgctagaacagttcctgagcattcttcctaaagacctgcaagcatgggtgcgtgcacaccatccagagactggagaggaggcagtgacggtactggaggatctggagagagagcttgatgaacctggaaagcaggtcccaggcaattcagaaagacgggacatactcatggacaagttggcccccttgggaaggccatatgaatcactgactgtccagctccatcccaaaaagacccagctggagcaggaagctgggaaaccacaaaggaatggtgataaaactaggactaagaatgaagagttgttccagaaggaagatatgcccaaagacaaggaattccttggggagataaatgacagactgaacaaagatactcctcagcatcctaagtccaaagatattattgaaaatgagggcagatcagaatggcaacagagggaaagaagacgatataaatgtgatgaatgtgggaaaagtttcagtcatagctcagaccttagtaaacacaggagaactcacacgggagagaagccctataaatgtgatgagtgtggaaaagccttcattcagcgctcacatctcattggacatcatagagtacacacgggagtaaaaccctataaatgtaaagaatgtgggaaagacttcagtgggcgcacaggtcttattcagcatcagagaatccacacaggtgaaaaaccctatgaatgtgatgagtgtggaaggcctttccgagtaagttcagctcttattagacatcaaagaattcataccgcaaataaactctac

SEQ ID NO: 6969 - DNA, 1014 bp, Homo sapiens
  source 1..1014: mol_type = genomic DNA
atggagtatttcatggtgcccactcagaaggtgccctctttgcaacatttcaggaaaacagagaaagaagtgataggagggctctgtagccttgccaacattccactaacccccgagactcagcgggaccaggagcggcggattcggcgggagatcgccaacagcaacgagcggagacgcatgcagagcatcaacgcgggattccagtccctcaagaccctcatcccccacacagacggagagaagctcagcaaggcagccattctccagcagacagccgagtacatcttctccctggagcaggagaagaccaggctcttgcagcagaacacacagctcaagcgcttcatccaggagctgagcggctcgtcccccaagcgacggcgggcagaggacaaggacgaaggcataggctccccggacatctgggaggacgagaaggcggaggacctgcggcgggagatgattgagctgcggcagcagctggacaaggagcgctcggtgcgcatgatgctggaggagcaggtgcgctcgctggaggcccacatgtacccggaaaagctcaaggtgattgcgcagcaggtgcagctgcagcagcagcaggaacaggtgaggctgctgcaccaggagaagctggagcgggaacagcagcagctgcggacccagcttctgccccctccggcccccacccaccaccccacggtgatcgtgccagcaccgcctcctcctccctcccaccacatcaatgtcgtcaccatgggcccctcctcggtcatcaactctgtttccacatcccggcaaaatctggacaccatcgtgcaggcaatccagcacatcgagggcacccaggaaaagcaggagctggaggaggagcagcggcgagctgtcatcgtgaagcctgtccgcagctgcccggaggcccccacctctgacaccgcctccgactccgaggcctcagacagtgacgccatggaccagagccgggaggagccgtcgggggacggggagcttccc

SEQ ID NO: 6970 - DNA, 891 bp, Homo sapiens
  source 1..891: mol_type = genomic DNA
atggagttcacggcgtcccccaagccccaactctcctcccgggccaacgccttctccattgccgcgctcatgtcgagcggcggctctaaggagaaggaggcgacggagaacacaatcaaacccctggagcaatttgtggagaagtcgtcctgtgcccagcccctgggtgagctgaccagcctggatgctcatggggagtttggtggaggcagtggcagcagcccgtcctcctcctctctgtgcactgagccactgatccccaccacccccatcatccccagtgaggaaatggccaaaattgcctgcagcctggagaccaaggagctttgggacaaattccatgagctgggcaccgagatgatcatcaccaagtcgggcaggaggatgtttccaaccatccgggtgtccttttcgggggtggatcctgaggccaagtacatagtcctgatggacatcgtccctgtggacaacaagaggtaccgctacgcctaccaccggtcctcctggctggtggctggcaaggccgacccgccgttgccagccaggctctatgtgcatccagattctccttttaccggtgagcaactactcaaacagatggtgtcttttgaaaaggtgaaactcaccaacaatgaactggatcaacatggccatataattttgaactcaatgcataagtaccagccaagggtgcacatcattaagaagaaagaccacacagcctcattgctcaacctgaagtctgaagaatttagaactttcatctttccagaaacagtttttacggcagtcactgcctaccagaatcaactgataacgaagctgaaaatagatagcaatccttttgccaaaggattccgggattcctccaggctcactgacattgagagg

SEQ ID NO: 6971 - DNA, 1626 bp, Homo sapiens
  source 1..1626: mol_type = genomic DNA
atggcgacggcgaccatagctctccaggtcaatggccagcaaggaggggggtccgagccggcggcggcggcggcagtggtggcagcgggagacaaatggaaacctccacagggcacagactccatcaagatggagaacgggcagagcacagccgccaagctggggctgcctcccctgacgcccgagcagcaggaggcccttcagaaggccaagaagtacgccatggagcagagcatcaagagtgtgctggtgaagcagaccatcgcgcaccagcagcagcagctcaccaacctgcagatggcggctcagcggcagcgggcgctggccatcatgtgccgcgtctacgtgggctctatctactatgagctgggggaggacaccatccgccaggcctttgccccctttggccccatcaagagcatcgacatgtcctgggactccgtcaccatgaagcacaagggctttgccttcgtggagtatgaggtccccgaagctgcacagctggccttggagcagatgaactcggtgatgctggggggcaggaacatcaaggtgggcagacccagcaacatagggcaggcccagcccatcatagaccagttggctgaggaggcacgggccttcaaccgcatctacgtggcctctgtgcaccaggacctctcagacgatgacatcaagagcgtgtttgaggcctttggcaagatcaagtcctgcacactggcccgggaccccacaactggcaagcacaagggctacggcttcattgagtacgagaaggcccagtcgtcccaagatgctgtgtcttccatgaacctctttgacctgggtggccagtacttgcgggtgggcaaggctgtcacaccgcccatgcccctactcacaccagccacgcctggaggcctcccacctgccgctgctgtggcagctgctgcagccactgccaagatcacagctcaggaagcagtggccggagcagcggtgctgggtaccctgggcacacctggactggtgtccccagcactgaccctggcccagcccctgggcactttgccccaggctgtcatggctgcccaggcacctggagtcatcacaggtgtgaccccagcccgtcctcctatcccggtcaccatcccctcggtgggagtggtgaaccccatcctggccagccctccaacgctgggtctcctggagcccaagaaggagaaggaagaagaggagctgtttcccgagtcagagcggccagagatgctgagcgagcaggagcacatgagcatctcgggcagtagcgcccgacacatggtgatgcagaagctgctccgcaagcaggagtctacagtgatggttctgcgcaacatggtggaccccaaggacatcgatgatgacctggaaggggaggtgacagaggagtgtggcaagttcggggccgtgaaccgcgtcatcatctaccaagagaaacaaggcgaggaggaggatgcagaaatcattgtcaagatctttgtggagttttccatagcctctgagactcataaggccatccaggccctcaatggccgctggtttgctggccgcaaggtggtggctgaagtgtacgaccaggagcgttttgataacagtgacctctctgcg

SEQ ID NO: 6972 - DNA, 1548 bp, Homo sapiens
  source 1..1548: mol_type = genomic DNA
atggagaacgggcagagcacagccgccaagctggggctgcctcccctgacgcccgagcagcaggaggcccttcagaaggccaagaagtacgccatggagcagagcatcaagagtgtgctggtgaagcagaccatcgcgcaccagcagcagcagctcaccaacctgcagatggcagcagtgacaatgggctttggagatcctctctcacctttgcaatcgatggcggctcagcggcagcgggcgctggccatcatgtgccgcgtctacgtgggctctatctactatgagctgggggaggacaccatccgccaggcctttgccccctttggccccatcaagagcatcgacatgtcctgggactccgtcaccatgaagcacaagggctttgccttcgtggagtatgaggtccccgaagctgcacagctggccttggagcagatgaactcggtgatgctggggggcaggaacatcaaggtgggcagacccagcaacatagggcaggcccagcccatcatagaccagttggctgaggaggcacgggccttcaaccgcatctacgtggcctctgtgcaccaggacctctcagacgatgacatcaagagcgtgtttgaggcctttggcaagatcaagtcctgcacactggcccgggaccccacaactggcaagcacaagggctacggcttcattgagtacgagaaggcccagtcgtcccaagatgctgtgtcttccatgaacctctttgacctgggtggccagtacttgcgggtgggcaaggctgtcacaccgcccatgcccctactcacaccagccacgcctggaggcctcccacctgccgctgctgtggcagctgctgcagccactgccaagatcacagctcaggaagcagtggccggagcagcggtgctgggtaccctgggcacacctggactggtgtccccagcactgaccctggcccagcccctgggcactttgccccaggctgtcatggctgcccaggcacctggagtcatcacaggtgtgaccccagcccgtcctcctatcccggtcaccatcccctcggtgggagtggtgaaccccatcctggccagccctccaacgctgggtctcctggagcccaagaaggagaaggaagaagaggagctgtttcccgagtcagagcggccagagatgctgagcgagcaggagcacatgagcatctcgggcagtagcgcccgacacatggtgatgcagaagctgctccgcaagcaggagtctacagtgatggttctgcgcaacatggtggaccccaaggacatcgatgatgacctggaaggggaggtgacagaggagtgtggcaagttcggggccgtgaaccgcgtcatcatctaccaagagaaacaaggcgaggaggaggatgcagaaatcattgtcaagatctttgtggagttttccatagcctctgagactcataaggccatccaggccctcaatggccgctggtttgctggccgcaaggtggtggctgaagtgtacgaccaggagcgttttgataacagtgacctctctgcg

SEQ ID NO: 6973 - DNA, 1497 bp, Homo sapiens
  source 1..1497: mol_type = genomic DNA
atggagaacgggcagagcacagccgccaagctggggctgcctcccctgacgcccgagcagcaggaggcccttcagaaggccaagaagtacgccatggagcagagcatcaagagtgtgctggtgaagcagaccatcgcgcaccagcagcagcagctcaccaacctgcagatggcggctcagcggcagcgggcgctggccatcatgtgccgcgtctacgtgggctctatctactatgagctgggggaggacaccatccgccaggcctttgccccctttggccccatcaagagcatcgacatgtcctgggactccgtcaccatgaagcacaagggctttgccttcgtggagtatgaggtccccgaagctgcacagctggccttggagcagatgaactcggtgatgctggggggcaggaacatcaaggtgggcagacccagcaacatagggcaggcccagcccatcatagaccagttggctgaggaggcacgggccttcaaccgcatctacgtggcctctgtgcaccaggacctctcagacgatgacatcaagagcgtgtttgaggcctttggcaagatcaagtcctgcacactggcccgggaccccacaactggcaagcacaagggctacggcttcattgagtacgagaaggcccagtcgtcccaagatgctgtgtcttccatgaacctctttgacctgggtggccagtacttgcgggtgggcaaggctgtcacaccgcccatgcccctactcacaccagccacgcctggaggcctcccacctgccgctgctgtggcagctgctgcagccactgccaagatcacagctcaggaagcagtggccggagcagcggtgctgggtaccctgggcacacctggactggtgtccccagcactgaccctggcccagcccctgggcactttgccccaggctgtcatggctgcccaggcacctggagtcatcacaggtgtgaccccagcccgtcctcctatcccggtcaccatcccctcggtgggagtggtgaaccccatcctggccagccctccaacgctgggtctcctggagcccaagaaggagaaggaagaagaggagctgtttcccgagtcagagcggccagagatgctgagcgagcaggagcacatgagcatctcgggcagtagcgcccgacacatggtgatgcagaagctgctccgcaagcaggagtctacagtgatggttctgcgcaacatggtggaccccaaggacatcgatgatgacctggaaggggaggtgacagaggagtgtggcaagttcggggccgtgaaccgcgtcatcatctaccaagagaaacaaggcgaggaggaggatgcagaaatcattgtcaagatctttgtggagttttccatagcctctgagactcataaggccatccaggccctcaatggccgctggtttgctggccgcaaggtggtggctgaagtgtacgaccaggagcgttttgataacagtgacctctctgcg

SEQ ID NO: 6974 - DNA, 1440 bp, Homo sapiens
  source 1..1440: mol_type = genomic DNA
atggcaggtgggggcggcgacctgagcaccaggaggctgaatgaatgtatttcaccagtagcaaatgagatgaaccatcttcctgcacacagccacgatttgcaaaggatgttcacggaagaccagggtgtagatgacaggctgctctatgacattgtattcaagcacttcaaaagaaataaggtggagatttcaaatgcaataaaaaagacatttccattcctcgagggcctccgtgatcgtgatctcatcacaaataaaatgtttgaagattctcaagattcttgtagaaacctggtccctgtacagagagtggtgtacaatgttcttagtgaactggagaagacatttaacctgccagttctggaagcactgttcagcgatgtcaacatgcaggaataccccgatttaattcacatttataaaggctttgaaaatgtaatccatgacaaattgcctctccaagaaagtgaagaagaagagagggaggagaggtctggcctccaactaagtcttgaacaaggaactggtgaaaactcttttcgaagcctgacttggccaccttcgggttccccatctcatgctggtacaaccccacctgaaaatggactctcagagcacccctgtgaaacagaacagataaatgcaaagagaaaagatacaaccagtgacaaagatgattcgctaggaagccaacaaacaaatgaacaatgtgctcaaaaggctgagccaacagagtcctgcgaacaaattgctgtccaagtgaataatggggatgctggaagggagatgccctgcccgttgccctgtgatgaagaaagcccagaggcagagctacacaaccatggaatccaaattaattcctgttctgtgcgactggtggatataaaaaaggaaaagccattttctaattcaaaagttgagtgccaagcccaagcaagaactcatcataaccaggcatctgacataatagtcatcagcagtgaggactctgaaggatccactgacgttgatgagcccttagaagtcttcatctcagcaccgagaagtgagcctgtgatcaataatgacaaccctttagaatcaaatgatgaaaaggagggccaagaagccacttgctcacgaccccagattgtaccagagcccatggatttcagaaaattatctacattcagagaaagttttaagaaaagagtgataggacaagaccacgacttttcagaatccagtgaggaggaggcgcccgcagaagcctcaagcggggcactgagaagcaagcatggtgagaaggctcctatgacttctagaagtacatctacttggagaatacccagcaggaagagacgtttcagcagtagtgacttttcagacctgagtaatggagaagagcttcaggaaacctgcagctcatccctaagaagagggtcaggtaaagaagat

SEQ ID NO: 6975 - DNA, 1272 bp, Homo sapiens
  source 1..1272: mol_type = genomic DNA
atggctgctgagtctgatgttctgcatttccagtttgaacagcaaggagatgtggtcttgcagaaaatgaatcttttgagacagcagaatttattttgtgatgtatcaatttacattaatgacactgagttccaggggcacaaggtgattttggctgcttgctccacttttatgagagatcagtttttactcacacagtcaaaacatgtcagaatcaccatcttacagagtgcagaagttggcagaaaattgttactgtcttgctatactggagcacttgaagttaaaaggaaagagcttttgaaatacttgactgctgccagttaccttcagatggttcacattgtggaaaagtgcacagaagctttgtcaaagtatctggaaattgatctttctatgaaaaacaacaaccaacacactgacctgtgtcagtcttctgatcctgatgttaagaatgaagatgaaaattctgataaagactgtgagataattgaaatttcagaagatagtcctgtaaacatagatttccatgttaaagaagaggaaagcaatgctttgcagtctacagtagagagtctgacatcagagagaaaggaaatgaagtcaccagagctgtctacagtagacataggttttaaagacaatgaaatttgtatccttcatgtagaatccatcagtacagctggtgtcgaaaatgggcagttttcacagccttgtacctcttcaaaagcaagcatgtatttctctgaaacacagcattcattgatcaattctacagttgagagcagagtggctgaagttcctgggaatcaagatcagggcttattttgtgagaatactgaaggaagttatggtacagtgagtgagattcagaatctggaggaaggttattcactgaggcaccagtgccccaggtgtcctcgaggctttcttcatgttgaaaactatctgcgccaccttaaaatgcataaactattcttatgcttacagtgcggaaaaacatttacacagaagaaaaatctcaaccgacacatccgaggacacatgggcatacggccctttcagtgtactgtgtgcttgaagacatttactgccaaaagcacacttcaggaccacttgaacatacacagtggggatcggccatacaaatgccactgttgtgatatggatttcaagcacaagtctgctctcaaaaagcacttaacctctgtccatggcagaagcagtggtgaaaaactatctaggcctgatctcaaaaggcaaagtctacta

SEQ ID NO: 6976 - DNA, 1083 bp, Homo sapiens
  source 1..1083: mol_type = genomic DNA
atggagaaaggtgggaacatacaattggagattcctgacttcagcaactctgtcctgagccatctaaaccagttgcgcatgcagggccgtctctgtgatattgtggtcaatgtgcaaggacaagcttttcgggctcacaaagtggtgctggctgccagctccccctatttccgggatcacatgtccttgaatgagatgagtacagtctccatttcagtcatcaagaaccctactgtttttgaacagctcctttctttctgttacacagggcggatatgcctgcaactggcagatatcatcagctacctaacagctgccagttttctgcaaatgcagcatattatagacaaatgtacacagatcctggagggcattcatttcaaaattaatgtggctgaggttgaagcagaattaagtcaaacaaggacaaagcatcaagagagacctccagagtctcacagggttacaccaaatctcaaccgctcccttagcccacgacataataccccaaagggaaaccggcgaggtcaggttagtgctgtgctggatatcagagagctaagtcctcctgaggagtccaccagccctcagatcattgaaccaagttctgatgtagagagccgggagcccattcttcggatcaaccgagcaggacagtggtatgtggagacaggagtggcggaccgtgggggtcggagtgatgatgaagttagagttcttggagcagtacacatcaaaactgaaaatctggaggagtggcttgggcctgagaatcagccttctggagaagatgggagtagtgcagaggaagtaacagccatggtgattgataccacaggccatggttctgtaggacaggaaaattatactttagggtcttcaggagccaaggtggctcggccaacaagcagtgaagttgacagatttagcccctccggcagtgttgttcccttgacagagagacacagagccagaagtgagtctcctgggagaatggatgagcctaagcaacccagctcccaggtatggagttgtggatttagaactgctttggtggttggaggaattgctactgtgtatgaa

SEQ ID NO: 6977 - DNA, 1446 bp, Homo sapiens
  source 1..1446: mol_type = genomic DNA
atggcgcagacgcagggcacccggaggaaagtctgttactactacgacggggatgttggaaattactattatggacaaggccacccaatgaagcctcaccgaatccgcatgactcataatttgctgctcaactatggtctctaccgaaaaatggaaatctatcgccctcacaaagccaatgctgaggagatgaccaagtaccacagcgatgactacattaaattcttgcgctccatccgtccagataacatgtcggagtacagcaagcagatgcagagattcaacgttggtgaggactgtccagtattcgatggcctgtttgagttctgtcagttgtctactggtggttctgtggcaagtgctgtgaaacttaataagcagcagacggacatcgctgtgaattgggctgggggcctgcaccatgcaaagaagtccgaggcatctggcttctgttacgtcaatgatatcgtcttggccatcctggaactgctaaagtatcaccagagggtgctgtacattgacattgatattcaccatggtgacggcgtggaagaggccttctacaccacggaccgggtcatgactgtgtcctttcataagtatggagagtacttcccaggaactggggacctacgggatatcggggctggcaaaggcaagtattatgctgttaactacccgctccgagacgggattgatgacgagtcctatgaggccattttcaagccggtcatgtccaaagtaatggagatgttccagcctagtgcggtggtcttacagtgtggctcagactccctatctggggatcggttaggttgcttcaatctaactatcaaaggacacgccaagtgtgtggaatttgtcaagagctttaacctgcctatgctgatgctgggaggcggtggttacaccattcgtaacgttgcccggtgctggacatatgagacagctgtggccctggatacggagatccctaatgagcttccatacaatgactactttgaatactttggaccagatttcaagctccacatcagtccttccaatatgactaaccagaacacgaatgagtacctggagaagatcaaacagcgactgtttgagaaccttagaatgctgccgcacgcacctggggtccaaatgcaggcgattcctgaggacgccatccctgaggagagtggcgatgaggacgaagacgaccctgacaagcgcatctcgatctgctcctctgacaaacgaattgcctgtgaggaagagttctccgattctgaagaggagggagaggggggccgcaagaactcttccaacttcaaaaaagccaagagagtcaaaacagaggatgaaaaagagaaagacccagaggagaagaaagaagtcaccgaagaggagaaaaccaaggaggagaagccagaagccaaaggggtcaaggaggaggtcaagttggcc

SEQ ID NO: 6978 - DNA, 1446 bp, Homo sapiens; identical to SEQ ID NO: 6977
  source 1..1446: mol_type = genomic DNA

SEQ ID NO: 6979 - DNA, 1284 bp, Homo sapiens
  source 1..1284: mol_type = genomic DNA
atggccaagaccgtggcctatttctacgaccccgacgtgggcaacttccactacggagctggacaccctatgaagccccatcgcctggcattgacccatagcctggtcctgcattacggtctctataagaagatgatcgtcttcaagccataccaggcctcccagcatgacatgtgccgcttccactccgaggactacattgacttcctgcagagagtcagccccaccaatatgcaaggcttcaccaagagtcttaatgccttcaacgtaggcgatgactgcccagtgtttcccgggctctttgagttctgctcgcgttacacaggcgcatctctgcaaggagcaacccagctgaacaacaagatctgtgatattgccattaactgggctggtggtctgcaccatgccaagaagtttgaggcctctggcttctgctatgtcaacgacattgtgattggcatcctggagctgctcaagtaccaccctcgggtgctctacattgacattgacatccaccatggtgacggggttcaagaagctttctacctcactgaccgggtcatgacggtgtccttccacaaatacggaaattacttcttccctggcacaggtgacatgtatgaagtcggggcagagagtggccgctactactgtctgaacgtgcccctgcgggatggcattgatgaccagagttacaagcaccttttccagccggttatcaaccaggtagtggacttctaccaacccacgtgcattgtgctccagtgtggagctgactctctgggctgtgatcgattgggctgctttaacctcagcatccgagggcatggggaatgcgttgaatatgtcaagagcttcaatatccctctactcgtgctgggtggtggtggttatactgtccgaaatgttgcccgctgctggacatatgagacatcgctgctggtagaagaggccattagtgaggagcttccctatagtgaatacttcgagtactttgccccagacttcacacttcatccagatgtcagcacccgcatcgagaatcagaactcacgccagtatctggaccagatccgccagacaatctttgaaaacctgaagatgctgaaccatgcacctagtgtccagattcatgacgtgcctgcagacctcctgacctatgacaggactgatgaggctgatgcagaggagaggggtcctgaggagaactatagcaggccagaggcacccaatgagttctatgatggagaccatgacaatgacaaggaaagcgatgtggagatt

SEQ ID NO: 6980 - DNA, 1284 bp, Homo sapiens; identical to SEQ ID NO: 6979
  source 1..1284: mol_type = genomic DNA

SEQ ID NO: 6981 - DNA, 819 bp, Homo sapiens
  source 1..819: mol_type = genomic DNA
atgggcagcaaagaagatgcgggcaaggggtgtccggcggccggtggcgtctccagcttcaccatccagtccatcctgggcgggggcccctcggaggcaccgcgggagcccgtcggctggccagccaggaagcgcagcctgtccgtgtcctcggaggaggaggagccggacgacggctggaaggcgcccgcctgcttctgcccagaccagcacggccctaaggagcagggccccaagcaccatccccccatcccttttccttgcctgggtacccccaagggcagcggaggctcgggcccgggcggcttggagcgcacgcctttcctctctccttcgcactcggactttaaagaagagaaagagaggctcctgcccgcgggctcgccctcgccggggtccgagcggccgcgggacggcggcgctgagcggcaggccggcgcggccaagaagaagacgcgcaccgtcttttcgcgcagccaggtgtaccagctcgagtccaccttcgacatgaagcgctacctgagcagctcggagcgcgcctgcctcgcctccagcctgcagctcacggagacccaggtaaagacttggttccagaaccgccgcaacaagtggaagcggcagctctcggctgagctggaggcggccaacatggcgcacgcgtcggcgcagactctggtgagcatgccgctggtgttccgggacagttcgctgctgcgcgtgccggtgccgcgctcgctcgcctttcccgcgccgctctactacccgggaagcaacctctcggccttacctctctacaacctatacaacaagctcgactac

SEQ ID NO: 6982 - DNA, 3015 bp, Homo sapiens
  source 1..3015: mol_type = genomic DNA
atggatctgactcttgctgaacttcaggaaatggcatctcgccagcagcaacagattgaagcccagcaacaattgctggcaactaaggaacagcgcttaaagtttttgaaacaacaagatcagcgacaacagcaacaagttgctgagcaggagaaacttaaaaggctaaaagaaatagctgagaatcaggaagctaagctaaaaaaagtgagagcacttaaaggccacgtggaacagaagagactaagcaatgggaaacttgtggaggaaattgaacagatgaataatttgttccagcaaaaacagagggagctcgtcctggctgtgtcaaaagtagaagaactgaccaggcagctagagatgctcaagaacggcaggatcgacagccaccatgacaatcagtctgcagtggctgagcttgatcgcctctataaggagctgcagctaagaaacaaattgaatcaagagcagaatgccaagctacaacaacagagggagtgtttgaataagcgtaattcagaagtggcagtcatggataagcgtgttaatgagctgagggaccggctgtggaagaagaaggcagctctacagcaaaaagaaaatctaccagtttcatctgatggaaatcttccccagcaagccgcgtcagccccaagccgtgtggctgcagtaggtccctatatccagtcgtctactatgcctcggatgccctcaaggcctgaattgctggtgaagccagccctgccggatggttccttggtcattcaggcttcagaggggccgatgaaaatacagacactgcccaacatgagatctggggctgcttcacaaactaaaggctctaaaatccatccagttggccctgattggagtccttcaaatgcagatcttttcccaagccaaggctctgcttctgtacctcaaagcactgggaatgctctggatcaagttgatgatggagaggttccgctgagggagaaagagaagaaagtgcgtccgttctcaatgtttgatgcagtagaccagtccaatgccccaccttcctttggtactctgaggaagaaccagagcagtgaagatatcttgcgggatgctcaggttgcaaataaaaatgtggctaaagtaccacctcctgttcctacaaaaccaaaacagattaatttgccttattttggacaaactaatcagccaccttcagacattaagccagacggaagttctcagcagttgtcaacagttgttccgtccatgggaactaaaccaaaaccagcagggcagcagccgagagtgctgctatctcccagcataccttcggttggccaagaccagaccctttctccaggttctaagcaagaaagtccacctgctgctgccgtccggccctttactccccagccttccaaagacaccttacttccacccttcagaaaaccccagaccgtggcagcaagttcaatatattccatgtatacgcaacagcaggcgccaggaaaaaacttccagcaggctgtgcagagcgcgttgaccaagactcataccagagggccacacttttcaagtgtatatggtaagcctgtaattgctgctgcccagaatcaacagcagcacccagagaacatttattccaatagccagggcaagcctggcagtccagaacctgaaacagagcctgtttcttcagttcaggagaaccatgaaaacgaaagaattcctcggccactcagcccaactaaattactgcctttcttatctaatccttaccgaaaccagagtgatgctgacctagaagccttacgaaagaaactgtctaacgcaccaaggcctctaaagaaacgtagttctattacagagccagagggtcctaatgggccaaatattcagaagcttttatatcagaggaccaccatagcggccatggagaccatctctgtcccatcatacccatccaagtcagcttctgtgactgccagctcagaaagcccagtagaaatccagaatccatatttacatgtggagcccgaaaaggaggtggtctctctggttcctgaatcattgtccccagaggatgtggggaatgccagtacagagaacagtgacatgccagctccttctccaggccttgattatgagcctgagggagtcccagacaacagcccaaatctccagaataacccagaagaaccaaatccagaggctccacatgtgcttgatgtgtacctggaggagtaccctccatacccacccccaccatacccatctggggagcctgaagggcccggagaagactcggtgagcatgcgcccgcctgaaatcaccgggcaggtctctctgcctcctggtaaaaggacaaacttgcgtaaaactggctcagagcgtatcgctcatggaatgagggtgaaattcaacccccttgctttactgctagattcgtctttggagggagaatttgaccttgtacagagaattatttatgaggttgatgacccaagcctccccaatgatgaaggcatcacggctcttcacaatgctgtgtgtgcaggccacacagaaatcgttaagttcctggtacagtttggtgtaaatgtaaatgctgctgatagtgatggatggactccattacattgtgctgcctcatgtaacaacgtccaagtgtgtaagtttttggtggagtcaggagccgctgtgtttgccatgacctacagtgacatgcagactgctgcagataagtgcgaggaaatggaggaaggctacactcagtgctcccaatttctttatggagttcaggagaagatgggcataatgaataaaggagtcatttatgcgctttgggattatgaacctcagaatgatgatgagctgcccatgaaagaaggagactgcatgacaatcatccacagggaagacgaagatgaaatcgaatggtggtgggcgcgccttaatgataaggagggatatgttccacgtaacttgctgggactgtacccaagaattaaaccaagacaaaggagcttggcc

SEQ ID NO: 6983 - DNA, 1344 bp, Homo sapiens
  source 1..1344: mol_type = genomic DNA
atgtttgactgtatggatgttctgtcagtgagtcctgggcaaatcctggatttctacactgcgagtccgtcttcctgcatgctccaggagaaagctctcaaagcatgcttcagtggattgacccaaaccgaatggcagcatcggcacactgctcaatcaattgaaacacagagcaccagctctgaggaactcgtcccaagccccccatctccacttcctccccctcgagtgtacaaaccctgcttcgtctgccaggacaaatcatcagggtaccactatggggtcagcgcctgtgagggatgtaagggctttttccgcagaagtattcagaagaatatgatttacacttgtcaccgagataagaactgtgttattaataaagtcaccaggaatcgatgccaatactgtcgactccagaagtgctttgaagtgggaatgtccaaagaatctgtcaggaatgacaggaacaagaaaaagaaggagacttcgaagcaagaatgcacagagagctatgaaatgacagctgagttggacgatctcacagagaagatccgaaaagctcaccaggaaactttcccttcactctgccagctgggtaaatacaccacgaattccagtgctgaccatcgagtccgactggacctgggcctctgggacaaattcagtgaactggccaccaagtgcattattaagatcgtggagtttgctaaacgtctgcctggtttcactggcttgaccatcgcagaccaaattaccctgctgaaggccgcctgcctggacatcctgattcttagaatttgcaccaggtataccccagaacaagacaccatgactttctcagacggccttaccctaaatcgaactcagatgcacaatgctggatttggtcctctgactgaccttgtgttcacctttgccaaccagctcctgcctttggaaatggatgacacagaaacaggccttctcagtgccatctgcttaatctgtggagaccgccaggaccttgaggaaccgacaaaagtagataagctacaagaaccattgctggaagcactaaaaatttatatcagaaaaagacgacccagcaagcctcacatgtttccaaagatcttaatgaaaatcacagatctccgtagcatcagtgctaaaggtgcagagcgtgtaattaccttgaaaatggaaattcctggatcaatgccacctctcattcaagaaatgctggagaattctgaaggacatgaacccttgaccccaagttcaagtgggaacacagcagagcacagtcctagcatctcacccagctcagtggaaaacagtggggtcagtcagtcaccactcgtgcaa

SEQ ID NO: 6984 - DNA, 1626 bp, Homo sapiens
  source 1..1626: mol_type = genomic DNA
atgggagatatctttttgtgtaagaaagtggaatcaccaaagaagaatttgagagaatccaaacaaagggaggaggatgatgaagatccagatctgatctatgttggggtggagcatgtacatagagatgctgaagttctctttgtcgggatgatttcaaattcaaaaccagtcgtttcaaacattttgaacagagtcaccccaggctcaaattcaagaagaaagaaaggccacttccgtcaatatcctgctcacgtgtcgcagcctgcaaatcatgtgacctctatggcaaaagccatcatgccggtttctctgtctgaggggcgatcgacagatagtcctgtcactatgaagtcttcatctgaacctggttataaaatgagctcaccacaagttgtttctcccagttcctcagactcgctccccccagggactcagtgtctagttggagctatggtctctggaggaggcagaaatgagagttctcctgattcaaagcgactttccacttcagatataaacagcagagattccaaaagggttaaactcagggatggaatcccaggggtaccttctttagctgtggtcccttcagatatgtcttctacaataagcacaaatacaccctcacaggggatctgcaactcatcaaaccatgttcagaatggagtaacatttccttggcctgatgctaatggaaaggcacatttcaatcttacagatccagagagagcaagtgagtctgccctggcaatgacagacatttcaagtctagcaagtcaaaacaagacctttgatcccaagaaagaaaatcccatcgtgttacttagcgacttttactatggacagcataaaggagatgggcagccggaacagaagactcacaccacctttaaatgcctcagctgcgtgaaagttctaaaaaatattaagtttatgaatcacatgaagcatcatttggaatttgagaagcagaggaacgacagctgggaagaccacaccacctgccagcactgccaccggcagtttcccactcccttccagctacagtgtcacattgatagtgtacacatcgccatggggccctctgctgtctgtaaaatctgtgaattgtcatttgaaacagatcaggtcctcttacaacacatgaaggaccatcataagcctggcgaaatgccttatgtgtgccaggtttgccattacagatcgtcggtctttgctgatgtggaaacacattttagaacgtgccatgaaaacacaaagaatttgctttgtctgttttgtctcaaacttttcaaaactgcaataccatacatgaatcattgttggaggcacagcagaaggagggtccttcagtgttccaagtgccggctacagtttttgacgttgaaggaggaaatagagcacaaaaccaaggaccatcaaacatttaaaaagccggagcaactgcaagggttgcctagtgaaacaaaagttattattcaaacttcagttcagccaggatcaagtggtatggcttccgttattgttagcaacactgaccctcagtcttctcctgtaaaaactaaaaagaagacggctatgaacactagagattccagactcccttgcagcaaggattctagc

SEQ ID NO: 6985 - DNA, 435 bp, Homo sapiens
  source 1..435: mol_type = genomic DNA
atgctctcagtccagccagacaccaagccgaaaggttgtgctggctgcaaccgaaagatcaaggaccggtatcttctaaaggcactggacaaatactggcatgaagactgcctgaagtgtgcctgctgtgactgtcgcttgggagaggtgggctccaccctgtacactaaagctaatcttatcctttgtcgcagagactatctgaggctctttggtgtaacgggaaactgcgctgcctgtagtaagctcatccctgcctttgagatggtgatgcgtgccaaggacaatgtttaccacctggactgctttgcatgtcagctttgtaatcagagattttgtgttggagacaaatttttcctaaagaataacatgatcctttgccagacggactacgaggaaggtttaatgaaagaaggttatgcaccccaggttcgc

SEQ ID NO: 6986 - DNA, 459 bp, Homo sapiens
  source 1..459: mol_type = genomic DNA
atgaccaaaataaaggcagatcccgacgggcccgaggctcaggcggaggcgtgttccggggagcgcacctaccaggagctgctggtcaaccagaaccccatcgcgcagcccctggcttctcgccgcctcacgcggaagctctacaaatgcatcaagaaagcggtgaagcagaagcagattcggcgcggggtgaaagaggttcagaaatttgtcaacaaaggagaaaaagggatcatggttttggcaggagacacactgcccattgaggtatactgccatctcccagtcatgtgtgaggaccgaaatttgccctatgtctatatcccctctaagacggacctgggtgcagccgcaggctccaagcgccccacctgtgtgataatggtcaagccccatgaggagtaccaggaggcttacgatgagtgcctggaggaggtgcagtcactgcccctaccccta

SEQ ID NO: 6987 - DNA, 942 bp, Homo sapiens
  source 1..942: mol_type = genomic DNA
atggacgccttcaaggggggcatgagcctggagcggctgccggaggggctccggccgccgccgccgccaccccatgacatggggcccgccttccacctggcccggcccgccgacccccgcgagccgctcgagaactccgccagcgagtcgtctgacacggagctgccagagaaggagcgcggcggggaacccaaggggcccgaggacagtggtgcgggaggcacgggctgcggcggcgcagacgacccagccaagaagaagaagcagcggcggcaacgtacgcacttcacaagccagcagttgcaagagctagaggccacgttccagaggaaccgctaccccgacatgagcatgagggaggagatcgccgtgtggaccaacctcaccgagccgcgcgtgcgggtctggttcaagaaccggcgagccaagtggcgtaagcgcgagcgtaaccagcagctggacctgtgcaagggtggctacgtgccgcagttcagcggcctagtgcagccctacgaggacgtgtacgccgccggctactcctacaacaactgggccgccaagagcctggcgccagcgccgctctccaccaagagcttcaccttcttcaactccatgagcccgctgtcgtcgcagtccatgttctcagcacccagctccatctcctccatgaccatgccgtccagcatgggcccaggcgccgtgcctggcatgcccaactcgggcctcaacaacatcaacaacctcaccggctcctcgctcaactcggccatgtcgccgggcgcttgcccgtacggcactcccgcctcgccctacagcgtctaccgggacacgtgcaactcgagcctagccagcctgcggctcaagtccaaacagcactcgtcgtttggctacggcggcctgcagggcccggcctcgggcctcaacgcgtgccagtacaacagc

SEQ ID NO: 6988 - DNA, 972 bp, Homo sapiens
  source 1..972: mol_type = genomic DNA
atgaactgcatgaaaggcccgcttcacttggagcaccgagcagcggggaccaagctgtcggccgtctcctcatcttcctgtcaccatccccagccgttagccatggcttcggttctggctcccggtcagccccggtcgctggactcctccaagcacaggctggaggtgcacaccatctccgacacctccagcccggaggccgcagagaaagataaaagccagcaggggaagaatgaggacgtgggcgccgaggacccgtctaagaagaagcggcaaaggcggcagcggactcactttaccagccagcagctccaggagctggaggccactttccagaggaaccgctacccggacatgtccacacgcgaagaaatcgctgtgtggaccaaccttacggaagcccgagtccgggtttggttcaagaatcgtcgggccaaatggagaaagagggagcgcaaccagcaggccgagctatgcaagaatggcttcgggccgcagttcaatgggctcatgcagccctacgacgacatgtacccaggctattcctacaacaactgggccgccaagggccttacatccgcctccctatccaccaagagcttccccttcttcaactctatgaacgtcaaccccctgtcatcacagagcatgttttccccacccaactctatctcgtccatgagcatgtcgtccagcatggtgccctcagcagtgacaggcgtcccgggctccagtctcaacagcctgaataacttgaacaacctgagtagcccgtcgctgaattccgcggtgccgacgcctgcctgtccttacgcgccgccgactcctccgtatgtttatagggacacgtgtaactcgagcctggccagcctgagactgaaagcaaagcagcactccagcttcggctacgccagcgtgcagaacccggcctccaacctgagtgcttgccagtatgcagtggaccggcccgtg

SEQ ID NO: 6989 - DNA, 615 bp, Homo sapiens
  source 1..615: mol_type = genomic DNA
atgctggggtttttgtccgcacgccaaacgggtttggaggaccctcttcgccttcggagagcagagtcaacacggagagttttgggactggaattaaataaagacagagatgttgaaagaatccacggcggtggaattaacacccttgacattgaacctgttgaagggagatacatgttatcaggtggttcagatggtgtgattgtactttatgaccttgagaactccagcagacaatcttattacacatgtaaagcagtgtgttccattggcagagatcatcctgatgttcacagatacagtgtggagactgtacagtggtatcctcatgacactggcatgttcacatcaagctcatttgataaaactctgaaagtatgggatacaaatacattacaaactgcagatgtatttaattttgaggaaacagtttacagtcatcatatgtctccagtctccaccaagcactgtttggtagcagttggtactagaggacccaaagtacaactttgtgacttgaagtctggatcctgttctcacattctacagggtatttttattttatttcaaacggcaactactttgagtaaacgattcaataaaaagaaacgttac

SEQ ID NO: 6990 - DNA, 1488 bp, Homo sapiens
  source 1..1488: mol_type = genomic DNA
atgtcttccatggaggagattcaggtggagctgcaatgtgctgacctctggaagcggttccatgatattggaactgaaatgatcatcaccaaagcaggcaggaggatgtttcctgccatgagagtgaaaatcactggcctagatccacatcagcagtactacatagcaatggacattgtgcctgtggacaataaaagatacagatatgtgtatcatagctccaagtggatggtggctggcaatgctgattcccctgtgcccccaagagtttatatacaccctgattctctagcttctggagacacctggatgagacaggtggtcagttttgacaaactcaagcttaccaacaatgagttggatgatcaaggacatatcattctgcactctatgcacaaataccagcctcgagttcatgtgattcgcaaagacttcagcagtgacctttcacccactaagcctgttcctgttggggatggggtgaaaacgttcaactttcctgagactgtgttcaccacagttacggcctatcagaatcagcagattaccagattaaaaattgaccgaaacccttttgctaaaggattcagagattctgggagaaacagaactggacttgaagccatcatggagacatatgcattctggagacctcctgtgcgcacactcaccttcgaagacttcaccaccatgcagaagcagcaaggaggcagcacaggcacttccccaaccacctccagcactgggacaccatccccttcggcttcttctcatcttttatctccatcctgttctcctccaacttttcatctggcccccaacactttcaatgtgggctgccgagaaagccagctgtgtaatctaaacctctctgattatccaccatgtgcccgaagcaacatggctgccttgcagagctacccagggctgagtgacagtggctacaacaggcttcagagtggcaccacttcagccactcagccctctgaaaccttcatgcctcagaggactccatccctgatctcaggaataccaactcctccctcgttgcctggcaacagcaagatggaagcctacggtggccagctggggtcctttcccacttcccagtttcagtatgtcatgcaggcaggcaatgctgcctccagctcctcatcaccacacatgttcgggggcagccacatgcagcagagctcctacaatgccttctcccttcacaacccttacaacctgtatggatacaatttccccacttcccctaggctagctgcaagcccggaaaaactgagcgcctctcaaagcactttactctgttcttctccttccaacggggcctttggagagaggcagtacctgccgtcagggatggagcacagcatgcacatgattagtccttcacccaataaccaacaggcaaccaacacttgtgatggccggcagtatggggcagttccaggctcctcctcccagatgtccgtgcacatggtt

SEQ ID NO: 6991 - DNA, 1875 bp, Homo sapiens
  source 1..1875: mol_type = genomic DNA
atggcagaccagagaatggacatttcttcaaccatcagtgatttcatgtccccgggccccaccgacctgctttccagctctcttggtaccagtggtgtggattgcaaccgcaaacggaaaggcagctccactgactaccaagaaagcatggacacagacaaagatgaccctcatggaaggttagaatatacagaacaccaaggaaggataaaaaatgcaagggaagctcacagtcagattgaaaagcggcgtcgggataaaatgaacagttttatagatgaattggcttctttggtaccaacatgcaacgcaatgtccaggaaattagataaacttactgtgctaaggatggctgttcagcacatgaaaacattaagaggtgccaccaatccatacacagaagcaaactacaaaccaacttttctatcagacgatgaattgaaacacctcattctcagggcagcagatggatttttgtttgtcgtaggatgtgaccgagggaagatactctttgtctcagagtctgtcttcaagatcctcaactacagccagaatgatctgattggtcagagtttgtttgactacctgcatcctaaagatattgccaaagtcaaggagcagctctcctcctctgacaccgcaccccgggagcggctcatagatgcaaaaactggacttccagttaaaacagatataacccctgggccatctcgattatgttctggagcacgacgttctttcttctgtaggatgaagtgtaacaggccttcagtaaaggttgaagacaaggacttcccctctacctgctcaaagaaaaaagatcgaaaaagcttctgcacaatccacagcacaggctatttgaaaagctggccacccacaaagatggggctggatgaagacaacgaaccagacaatgaggggtgtaacctcagctgcctcgtcgcaattggacgactgcattctcatgtagttccacaaccagtgaacggggaaatcagggtgaaatctatggaatatgtttctcggcacgcgatagatggaaagtttgtttttgtagaccagagggcaacagctattttggcatatttaccacaagaacttctaggcacatcgtgttatgaatattttcaccaagatgacataggacatcttgcagaatgtcataggcaagttttacagacgagagaaaaaattacaactaattgctataaatttaaaatcaaagatggttcttttatcacactacggagtcgatggttcagtttcatgaacccttggaccaaggaagtagaatatattgtctcaactaacactgttgttttagccaacgtcctggaaggcggggacccaaccttcccacagctcacagcatccccccacagcatggacagcatgctgccctctggagaaggtggcccaaagaggacccaccccactgttccagggattccagggggaacccgggctggggcaggaaaaataggccgaatgattgctgaggaaatcatggaaatccacaggataagagggtcatcgccttctagctgtggctccagcccattgaacatcacgagtacgcctccccctgatgcctcttctccaggaggcaagaagattttaaatggagggactccagacattccttccagtggcctactatcaggccaggctcaggagaacccaggttatccatattctgatagttcttctattcttggtgagaacccccacataggtatagacatgattgacaacgaccaaggatcaagtagtcccagtaatgatgaggcagcaatggctgtcatcatgagcctcttggaagcagatgctggactgggtggccctgttgactttagtgacttgccatggccgctg

SEQ ID NO: 6992 - DNA, 555 bp, Homo sapiens
  source 1..555: mol_type = genomic DNA
atgtctcccagccttcaggaaggcgctcagctcggggaaaacaaaccctcaacttgctccttttcaattgagagaatcttaggactggaccagaagaaagactgtgttccattaatgaaaccccacaggccctgggcagacacctgcagctcatcagggaaagatggtaacttatgtctacatgtcccaaatcctcccagtgggatttcattccctagcgtggtggatcacccaatgccagaagaaagagcttcgaaatatgaaaattacttttcagcctcagaaagactgtctttgaaaagagagttgagttggtatagaggccgaagaccaagaactgcttttactcaaaaccagattgaagtgttagaaaatgtctttagagtaaactgctatcctggtatcgatattagagaagacttagctcaaaaattgaatctagaggaagacagaatccagatttggtttcaaaatcggcgtgcaaaactgaaaaggtcccatagagaatcacagtttctaatggcgaaaaaaaatttcaacacaaatctgctggaa

SEQ ID NO: 6993 - DNA, 819 bp, Homo sapiens
  source 1..819: mol_type = genomic DNA
atgtttggatttccaacagctaccctgctggactgtcatggaagatatgcccagaatgtagcgttcttcaatgtgatgactgaagcccaccacaaatatgaccactctgaggctacaggatcctcaagctgggatatccaaaattctttcagaagagagaagctggaacaaaaatccccagattcgaagacactacaggaagattcacctggagtgagacaaagggtctatgagtgccaggagtgtggaaaatccttccggcaaaaaggtagtctaacgttacatgagagaatccacactggtcaaaagccttttgagtgcacccactgtggaaaaagcttcagggccaaaggcaatcttgttacacatcaacggatacacacgggagagaagccttatcagtgcaaggagtgtgggaaaagcttcagtcaacgaggtagtctcgctgtccacgagagactccacactggacagaaaccctacgagtgtgctatttgtcagagaagcttcaggaatcagagtaaccttgctgttcacaggagagttcacagtggtgagaagccctatagatgtgatcagtgtggaaaagccttcagtcagaaaggaagcttaattgttcacatcagagtccacacaggcctgaagccctatgcctgtacccagtgcaggaagagtttccacaccagggggaattgtattctgcatggcaaaatccacacaggagagacaccctatctgtgcggccagtgtggaaaaagcttcacccagagagggagtctggctgtgcaccagcgaagctgctcacagaggctcaccctt

SEQ ID NO: 6994 - DNA, 663 bp, Homo sapiens
  source 1..663: mol_type = genomic DNA
atggcggcggcggttcggatgaacatccagatgctgctggaggcggccgactatctggagcggcgggagagagaagctgaacatggttatgcctccatgttaccatacaataacaaggacagagatgccttaaaacggaggaacaaatccaaaaagaataacagcagtagcagatcaactcacaatgaaatggagaagaatagacgggctcatcttcgcttgtgcctggagaagttgaaggggctggtgccactgggacccgaatcaagtcgacacactacgttgagtttattaacaaaagccaaattgcacataaagaaacttgaagattgtgacagaaaagccgttcaccaaatcgaccagcttcagcgagagcagcgacacctgaagaggcagctggagaagctgggcattgagaggatccggatggacagcatcggctccaccgtctcctcggagcgctccgactccgacagggaagaaatcgacgttgacgtggagagcacggactatctcacaggtgatctggactggagcagcagcagtgtgagcgactctgacgagcggggcagcatgcagagcctcggcagtgatgagggctattccagcaccagcatcaagagaataaagctgcaggacagtcacaaggcgtgtcttggtctc

SEQ ID NO: 6995 - DNA, 1293 bp, Homo sapiens
  source 1..1293: mol_type = genomic DNA
atgggtccagtaattggaatgactccagataagagagctgaaaccccaggagctgaaaagattgcaggattaagccagatttacaaaatgggaagcttgcctgaagctgttgatgctgccaggccgaaggccactctagtggacagtgagtcagcagatgatgaactcacaaacttgaactggcttcatgaaagcactaatcttctaacaaacttcagcctcggaagtgagggtcttccaattgttagtccattgtatgacatagagggagatgatgtgccatcctttggaccagcttgctaccagaacccagaaaaaaaatcagcgacttcaaagcccccatactcctttagtcttctcatttatatggccattgagcactctccaaataaatgtttgcctgtcaaagaaatttatagctggattctggaccattttccatattttgctactgcaccaacaggctggaagaattctgttcgacataatctgtccctgaataaatgttttcagaaagtggaaagaagccatggcaaggttaatggaaaaggttccttatggtgtgttgatccggaatataaacccaatcttatccaggcactgaagaagcaacctttttcttcagcatcttcacaaaatggttctttatcacctcactatttaagctctgtaatcaagcagaaccaggtgcgaaacctcaaagaatctgatattgatgctgctgctgcaatgatgcttttaaatacttctatagaacaaggaattttagaatgtgagaagcctcttcctcttaaaacagcattgcaaaaaaagaggagttacggcaatgcatttcatcatcccagtgctgtacgattacaagagagtgattctttagccaccagcattgatccaaaagaagatcacaattacagtgcaagtagcatggcagcacagcgttgtgcatccaggtctagcgtgtcttctctgtcttctgtggatgaggtatatgaatttatcccaaagaatagtcacgtgggaagtgatggcagtgaaggatttcacagtgaagaagatacagacgttgattatgaagatgatcctcttggagacagtggctatgcatcacagccttgtgcaaaaatctctgaaaaagggcagtcaggcaaaaagatgcgaaaacagacatgtcaagaaattgatgaggagctcaaagaggcagctggatctctgctccaccttgctggaattcgtacatgtttaggttccctaataagtactgcaaagacacaaaatcaaaagcaacggaaaaaa

SEQ ID NO: 6996 - DNA, 1566 bp, Homo sapiens
  source 1..1566: mol_type = genomic DNA
atggaggaacacggagtgacccaaaccgaacatatggctaccatagaagcacatgcagtggcccagcaagtgcagcaggtccatgtggctacttacaccgagcatagtatgctgagtgctgatgaagactcgccttcttctcccgaggacacctcttacgatgactcagatatactcaactccacagcagctgatgaggtgacagctcatctggcagctgcaggtcctgtgggaatggccgctgctgctgctgtggcaacaggaaagaaacggaaacggcctcatgtatttgagtctaatccatctatccggaagaggcaacaaacacgtttgcttcggaaacttcgagccacgttagatgaatatactactcgtgtgggacagcaagctattgtcctctgtatctcaccctccaaacctaaccctgtctttaaagtgtttggtgcagcacctttggagaatgtggtgcgtaagtacaagagcatgatcctggaagacctggagtctgctctggcagaacacgcccctgcgccacaggaggttaactcagaactgccgcctctcaccatcgacggaattccagtctctgtggacaaaatgacccaggcccagcttcgggcatttatcccagagatgctcaagtactctacaggtcggggaaaaccaggctgggggaaagaaagctgcaagcccatctggtggcctgaagatatcccctgggcaaatgtccggagtgatgtccgcacagaagagcaaaagcagagggtttcatggacccaggcactacggaccatagttaaaaactgttataaacagcatgggcgggaagaccttttgtatgcctttgaagatcagcaaacgcaaacacaggccacagccacacatagtatagctcatcttgtaccatcacagactgtagtccagacttttagtaaccctgatggcactgtctcacttatccaggttggtacgggggcaacagtagccacattggctgatgcttcagaattgccaaccacggtcaccgttgcccaagtgaattattctgccgtggctgatggagaggtggaacaaaattgggccacgttacagggaggtgagatgaccatccagacgacgcaagcatcagaggccacccaggcggtggcatcgttggcagaggccgcagtggcagcttctcaggagatgcagcagggagctacagtcactatggcgcttaacagcgaagctgccgcccatgctgtcgccaccctggctgaggccaccttacaaggtgggggacagatcgtcttgtctggggaaaccgcagcagccgtcggagcacttactggagtccaagatgctaatggcctctttatggcagatcgtgcaggtcgcaagtggatcctgactgacaaagccacaggcctggtccagatccctgtgagcatgtaccagactgtggtgaccagcctcgcccagggcaacggaccagtgcaggtggccatggcccctgtgaccaccaggatatcagacagcgcagtcaccatggacggccaagctgtggaggtggtgacattggaacag

SEQ ID NO: 6997 - DNA, 1530 bp, Homo sapiens
  source 1..1530: mol_type = genomic DNA
atggcctttcgccatttaattgagttcacatatacagcaaaattaatgatacaaggagaagaagaagccaatgatgtatggaaagcagcagagtttctacaaatgctagaagctatcaaagcccttgaagtcaggaacaaagaaaactcagctcccttagaggaaaataccacaggaaaaaatgaggccaaaaaaaggaagattgcagaaacttcaaatgttatcactgagtcattgccatctgcagaatcagaacctgttgaaattgaggtagagattgccgaaggcaccattgaagtggaagatgaaggcatcgaaacattagaggaagtggcttctgccaagcagtccgtaaagtacatacagagcacaggttcctctgatgattctgctctagcactgttggcagatattaccagcaagtaccgtcaaggtgacagaaaagggcagattaaagaagatggctgtccatctgaccccacgagcaaacaggagcacatgaaatcacactccactgagagtttcaagtgtgaaatatgcaataaacgatatcttcgagagagcgcatggaaacagcacctaaattgttaccaccttgaagaaggtggagtcagtaagaagcaaagaactgggaaaaaaattcatgtatgtcagtactgtgagaaacagtttgaccattttggacattttaaagaacatcttcgaaaacatacaggtgaaaaaccttttgaatgtccaaattgtcatgaacgatttgctagaaatagcactctgaaatgtcacctcactgcatgccaaactggagtaggggcaaaaaaaggaaggaagaagctctacgaatgccaggtctgcaacagtgtgtttaacagctgggaccagttcaaagatcacttggtaatacacactggagataaacccaaccattgtactttatgtgatttgtggtttatgcaaggaaatgaattaaggaggcatctcagtgatgctcacaatatttcagagcgtctagtaacggaagaagttctttcagtagaaacacgtgtgcaaactgaacctgtaacatcaatgactattatagaacaagttgggaaggtgcatgtgctaccattgcttcaggttcaggtggattcagcacaagtgactgtggaacaagtccatccagatctgctccaggacagccaggtgcacgattcacacatgagtgagcttccagagcaggtccaagtgagttatctagaagtgggccgaattcagactgaagaaggtactgaagtacatgtagaggagctgcatgttgaacgggtcaatcaaatgccagtggaagtacaaactgaacttctagaagcagatttggaccacgtgaccccagaaatcatgaaccaagaggagagagagtctagccaagcagatgctgctgaggctgccagggaagatcacgaagatgctgaggatttagagaccaagccaacagtggattctgaagcagaaaaggcagagaatgaggacagaacagctctgccagttttagaa

SEQ ID NO: 6998 - DNA, 2310 bp, Homo sapiens
  source 1..2310: mol_type = genomic DNA
atggcccaatggaatcagctacagcagcttgacacacggtacctggagcagctccatcagctctacagtgacagcttcccaatggagctgcggcagtttctggccccttggattgagagtcaagattgggcatatgcggccagcaaagaatcacatgccactttggtgtttcataatctcctgggagagattgaccagcagtatagccgcttcctgcaagagtcgaatgttctctatcagcacaatctacgaagaatcaagcagtttcttcagagcaggtatcttgagaagccaatggagattgcccggattgtggcccggtgcctgtgggaagaatcacgccttctacagactgcagccactgcggcccagcaagggggccaggccaaccaccccacagcagccgtggtgacggagaagcagcagatgctggagcagcaccttcaggatgtccggaagagagtgcaggatctagaacagaaaatgaaagtggtagagaatctccaggatgactttgatttcaactataaaaccctcaagagtcaaggagacatgcaagatctgaatggaaacaaccagtcagtgaccaggcagaagatgcagcagctggaacagatgctcactgcgctggaccagatgcggagaagcatcgtgagtgagctggcggggcttttgtcagcgatggagtacgtgcagaaaactctcacggacgaggagctggctgactggaagaggcggcaacagattgcctgcattggaggcccgcccaacatctgcctagatcggctagaaaactggataacgtcattagcagaatctcaacttcagacccgtcaacaaattaagaaactggaggagttgcagcaaaaagtttcctacaaaggggaccccattgtacagcaccggccgatgctggaggagagaatcgtggagctgtttagaaacttaatgaaaagtgcctttgtggtggagcggcagccctgcatgcccatgcatcctgaccggcccctcgtcatcaagaccggcgtccagttcactactaaagtcaggttgctggtcaaattccctgagttgaattatcagcttaaaattaaagtgtgcattgacaaagactctggggacgttgcagctctcagaggatcccggaaatttaacattctgggcacaaacacaaaagtgatgaacatggaagaatccaacaacggcagcctctctgcagaattcaaacacttgaccctgagggagcagagatgtgggaatgggggccgagccaattgtgatgcttccctgattgtgactgaggagctgcacctgatcacctttgagaccgaggtgtatcaccaaggcctcaagattgacctagagacccactccttgccagttgtggtgatctccaacatctgtcagatgccaaatgcctgggcgtccatcctgtggtacaacatgctgaccaacaatcccaagaatgtaaacttttttaccaagcccccaattggaacctgggatcaagtggccgaggtcctgagctggcagttctcctccaccaccaagcgaggactgagcatcgagcagctgactacactggcagagaaactcttgggacctggtgtgaattattcagggtgtcagatcacatgggctaaattttgcaaagaaaacatggctggcaagggcttctccttctgggtctggctggacaatatcattgaccttgtgaaaaagtacatcctggccctttggaacgaagggtacatcatgggctttatcagtaaggagcgggagcgggccatcttgagcactaagcctccaggcaccttcctgctaagattcagtgaaagcagcaaagaaggaggcgtcactttcacttgggtggagaaggacatcagcggtaagacccagatccagtccgtggaaccatacacaaagcagcagctgaacaacatgtcatttgctgaaatcatcatgggctataagatcatggatgctaccaatatcctggtgtctccactggtctatctctatcctgacattcccaaggaggaggcattcggaaagtattgtcggccagagagccaggagcatcctgaagctgacccaggtagcgctgccccatacctgaagaccaagtttatctgtgtgacaccaacgacctgcagcaataccattgacctgccgatgtccccccgcactttagattcattgatgcagtttggaaataatggtgaaggtgctgaaccctcagcaggagggcagtttgagtccctcacctttgacatggagttgacctcggagtgcgctacctcccccatg

SEQ ID NO: 6999 - DNA, 2049 bp, Homo sapiens
  source 1..2049: mol_type = genomic DNA
atggcgtcgggcccgggctcccaggaacgggaagggctcctgatagtgaagctggaggaggactgcgcctggagccaggagctgcccccacctgacccaggaccgagccccgaggcctcccacttgcgcttcagacggttccgcttccaagaggcagctggtccccgggaagccctcagccggctccaagagctttgccatgggtggcttcggcctgagatgcgcacgaaggagcagatcttggagctgctggtgttagagcagttcctgaccatcctgccccaggagatccagagcagggtgcaggagctgcatccggagagcggcgaagaagcggtgacccttgtggaggatatgcagagagagcttgggagactgagacaacaggtcacaaaccatgggcggggaacagaagtgcttttggaggagcctttgcctctggaaacagcacgagagtcaccgagcttcaagctggagccaatggagactgagcgaagccctggccccaggctgcaggagctgctaggccccagcccccaaagggacccccaggctgtaaaggagagggcattatctgctccctggctttctctttttcctcctgaagggaacatggaagacaaggagatgactgggccccagttgcctgagagcttagaggacgtggcaatgtacatctcccaggaggagtgggggcatcaggatcctagtaagagggccctctccagggacacggtgcaggagagttatgagaatgtggactcactggagtctcacattcccagtcaggaggtcccaggcacccaggtgggacaaggaggaaagctatgggatcccagtgtccagagctgcaaggagggcctgagccccagaggcccagctccaggagaagagaaatttgagaacctggaaggtgttccgtctgtatgctctgagaacatccaccctcaggtgctgcttcctgaccaggcccgaggggaggtgccctggagtcctgagctgggaagacctcatgaccggtcgcaaggggattgggcgcctcccccagagggtggaatggagcaggccttggcaggagcctcaagtggcagagaactggggcgaccgaaggaactgcagccaaagaaactccatttatgtcccttgtgtggcaaaaatttctctaacaactcaaacctaattaggcaccagagaatacatgcagctgaaagactgtgtatgggtgtggactgcactgaaatctttggtgggaacccacgtttcctgtcactacacagagcacacctgggagaggaggcccacaagtgccttgaatgtgggaaatgcttcagtcagaacacccatctgactcgccaccaacgcacccacacgggtgagaagccctatcagtgcaacatttgcggaaaatgtttctcctgcaactccaacctccacaggcaccagagaacgcacactggggagaagccctacaagtgccctgagtgtggggagatctttgctcacagttccaacctccttcggcaccagagaattcacactggagagcgaccttataagtgtcccgagtgtgggaaaagtttctctcggagttcacacctcgtcattcacgaaagaactcatgagagagagagactttaccccttctctgagtgtggggaagctgtgagtgacagcaccccctttcttacaaaccatggagcccataaggcagagaagaagctctttgaatgtttgacttgtgggaaaagcttccggcagggcatgcacctcaccagacatcagagaacacacacaggagagaaaccgtataaatgtaccctttgtggggaaaacttctctcatagatccaatttaatcaggcaccagagaatccacacaggagaaaaaccctatacctgtcatgagtgcggagacagcttctctcacagctccaatcggattcgccacctgagaacgcatacgggagagagaccctataaatgttctgaatgtggagaaagcttctctcggagttcccgtcttatgagtcatcagagaactcacacaggt

SEQ ID NO: 7000 - DNA, 852 bp, Homo sapiens
  source 1..852: mol_type = genomic DNA
atggagcccggcaattatgccaccttggatggagccaaggatatcgaaggcttgctgggagcgggaggggggcggaatctggtcgcccactcccctctgaccagccacccagcggcgcctacgctgatgcctgctgtcaactatgcccccttggatctgccaggctcggcggagccgccaaagcaatgccacccatgccctggggtgccccaggggacgtccccagctcccgtgccttatggttactttggaggcgggtactactcctgccgagtgtcccggagctcgctgaaaccctgtgcccaggcagccaccctggccgcgtaccccgcggagactcccacggccggggaagagtaccccagccgccccactgagtttgccttctatccgggatatccgggaacctaccagcctatggccagttacctggacgtgtctgtggtgcagactctgggtgctcctggagaaccgcgacatgactccctgttgcctgtggacagttaccagtcttgggctctcgctggtggctggaacagccagatgtgttgccagggagaacagaacccaccaggtcccttttggaaggcagcatttgcagactccagcgggcagcaccctcctgacgcctgcgcctttcgtcgcggccgcaagaaacgcattccgtacagcaaggggcagttgcgggagctggagcgggagtatgcggctaacaagttcatcaccaaggacaagaggcgcaagatctcggcagccaccagcctctcggagcgccagattaccatctggtttcagaaccgccgggtcaaagagaagaaggttctcgccaaggtgaagaacagcgctacccct

SEQ ID NO: 7001 - DNA, 618 bp, Homo sapiens
  source 1..618: mol_type = genomic DNA
atgtccacgggctcggtgagtgatccggaggagatggagcttcgggggctgcagcgggagtacccggtccccgcctccaagaggccgcccctccgcggcgtagagcgcagctacgcctcgcccagtgacaactcgtcggcagaggaggaggaccccgacggcgaggaggagcgctgcgctctgggcacagccggcagcgcggaaggctgcaagaggaagcggccccgtgtggctgggggcggcggcgcaggtggtagcgcgggcggtggtggcaagaagcccctcccggccaagggctcagccgcagagtgcaagcagtcgcagcggaacgcggccaacgcccgtgagcgtgcccggatgcgcgtgctgagcaaagccttctccaggctcaagaccagcctgccctgggtgccccccgacactaagctctccaagctggacacgctccggctggcttccagttacatcgctcacctgcggcagctgttgcaggaggaccgctatgagaacggctacgtgcacccagtgaacctgacatggccattcgtggtctcgggaagaccggactctgacaccaaagaagtttccgcagccaacagactatgtggaaccaccgct

SEQ ID NO: 7002 - DNA, 672 bp, Homo sapiens
  source 1..672: mol_type = genomic DNA
atggagctgtatgagacatccccctacttctaccaggaaccccgcttctatgatggggaaaactacctgcctgtccacctccagggcttcgaaccaccaggctacgagcggacggagctcaccctgagccccgaggccccagggccccttgaggacaaggggctggggacccccgagcactgtccaggccagtgcctgccgtgggcgtgtaaggtgtgtaagaggaagtcggtgtccgtggaccggcggcgggcggccacactgagggagaagcgcaggctcaagaaggtgaatgaggccttcgaggccctgaagagaagcaccctgctcaaccccaaccagcggctgcccaaggtggagatcctgcgcagtgccatccagtacatcgagcgcctccaggccctgctcagctccctcaaccaggaggagcgtgacctccgctaccggggcgggggcgggccccagccaggggtgcccagcgaatgcagctctcacagcgcctcctgcagtccagagtggggcagtgcactggagttcagcgccaacccaggggatcatctgctcacggctgaccctacagatgcccacaacctgcactccctcacctccatcgtggacagcatcacagtggaagatgtgtctgtggccttcccagatgaaaccatgcccaac

SEQ ID NO: 7003 - DNA, 1383 bp, Homo sapiens
  source 1..1383: mol_type = genomic DNA
atggactattcgtacgacgaggacctggacgagctgtgccccgtgtgcggggacaaggtgtccggctaccactacggactgctcacgtgtgagagctgcaagggcttcttcaagcgcacggtgcagaacaacaagcactacacgtgcaccgagagccagagctgcaagatcgacaagacgcagcgcaagcgctgtcccttctgccgcttccagaaatgcctgacggtggggatgcgcctggaagccgtgcgcgctgaccgtatgaggggtggccggaacaagtttgggccgatgtacaagcgggaccgggccctgaaacagcagaagaaggcacagattcgggccaatggcttcaagctggagacagggcccccgatgggggtgcccccgccgccccctcccgcaccggactacgtgctgcctcccagcctgcatgggcctgagcccaagggcctggccgccggtccacctgctgggccactgggcgactttggggccccagcactgcccatggccgtgcccggtgcccacgggccactggctggctacctctaccctgcctttcctggccgtgccatcaagtctgagtacccggagccttatgccagccccccacagcctgggctgccgtacggctacccagagcccttctctggagggcccaacgtgcctgagctcatcctgcagctgctgcagctggagccggatgaggaccaggtgcgggcccgcatcttgggctgcctgcaggagcccaccaaaagccgccccgaccagccggcggccttcggcctcctgtgcagaatggccgaccagaccttcatctccatcgtggactgggcacgcaggtgcatggtcttcaaggagctggaggtggccgaccagatgacgctgctgcagaactgctggagcgagctgctggtgttcgaccacatctaccgccaggtccagcacggcaaggagggcagcatcctgctggtcaccgggcaggaggtggagctgaccacagtggccacccaggcgggctcgctgctgcacagcctggtgttgcgggcgcaggagctggtgctgcagctgcttgcgctgcagctggaccggcaggagtttgtctgcctcaagttcatcatcctcttcagcctggatttgaagttcctgaataaccacatcctggtgaaagacgctcaggagaaggccaacgccgccctgcttgactacaccctgtgccactacccgcactgcggggacaaattccagcagctgctgctgtgcctggtggaggtgcgggccctgagcatgcaggccaaggagtacctgtaccacaagcacctgggcaacgagatgccccgcaacaacctgctcatcgaaatgctgcaagccaagcagact

SEQ ID NO: 7004 - DNA, 1251 bp, Homo sapiens
  source 1..1251: mol_type = genomic DNA
atggctgtatcactaacagcagctgaaactctggcccttcagggtacacagggacaagagaagatgatgatgatgggaccaaaggaagaggaacagtcttgtgagtatgagaccaggctacctgggaaccactctaccagtcaagagatcttccgccaacgcttcaggcatctccgctaccaggagactcctggtccccgggaggccttgagccaactacgagtactctgctgtgagtggctgaggccagagaaacacacgaaggagcagatcctggagttcctggtgctggaacaattcttgaccatcctgcctgaggagctccaatcctgggtgcggggacatcaccctaagagtggagaggaggctgtgactgtgctggaggatttagagaaaggacttgaaccagagccgcaggtcccaggccctgcacatggacctgcacaggaagagccatgggagaagaaggaatctctgggagcagcccaggaagcactgagcatccagctccagcctaaggagacccagcctttcccaaagagtgaacaggtatatttacattttctgtcagttgttacagaagatggcccagagcccaaggacaaaggatcattgccacaaccacccattactgaagtggaatcacaggtgttctcagaaaaacttgctactgacacctctacatttgaagctacctctgagggtaccttagaactgcagcagagaaatcccaaagcggagagactgaggtggtcccctgcccaggaggaaagtttcaggcagatggttgtcatccataaggaaattcccacagggaagaaagaccatgaatgtagtgaatgtggtaaaaccttcatttataactcacatcttgttgtccaccagagagttcattctggagagaaaccctataagtgtagtgactgtgggaaaactttcaaacagagctcaaacctcggtcagcatcagagaattcatacaggagagaaacccttcgaatgtaatgaatgtgggaaggccttcagatggggtgctcatcttgttcagcatcagaggattcactcaggagagaagccctatgagtgtaatgagtgtgggaaggcctttagtcaaagctcatatctaagtcagcatcggagaattcacagtggagagaaaccttttatatgtaaagaatgtgggaaagcttatggatggtgctcagagctcattagacatcggagagttcatgccagaaaagagccttcccat

SEQ ID NO: 7005 - DNA, 1416 bp, Homo sapiens
  source 1..1416: mol_type = genomic DNA
atgttaggaactgtgaagatggaagggcatgaaaccagcgactggaacagctactacgcagacacgcaggaggcctactcctccgtcccggtcagcaacatgaactcaggcctgggctccatgaactccatgaacacctacatgaccatgaacaccatgactacgagcggcaacatgaccccggcgtccttcaacatgtcctatgccaacccgggcctaggggccggcctgagtcccggcgcagtagccggcatgccggggggctcggcgggcgccatgaacagcatgactgcggccggcgtgacggccatgggtacggcgctgagcccgagcggcatgggcgccatgggtgcgcagcaggcggcctccatgaatggcctgggcccctacgcggccgccatgaacccgtgcatgagccccatggcgtacgcgccgtccaacctgggccgcagccgcgcgggcggcggcggcgacgccaagacgttcaagcgcagctacccgcacgccaagccgccctactcgtacatctcgctcatcaccatggccatccagcaggcgcccagcaagatgctcacgctgagcgagatctaccagtggatcatggacctcttcccctattaccggcagaaccagcagcgctggcagaactccatccgccactcgctgtccttcaatgactgcttcgtcaaggtggcacgctccccggacaagccgggcaagggctcctactggacgctgcacccggactccggcaacatgttcgagaacggctgctacttgcgccgccagaagcgcttcaagtgcgagaagcagccgggggccggcggcgggggcgggagcggaagcgggggcagcggcgccaagggcggccctgagagccgcaaggacccctctggcgcctctaaccccagcgccgactcgcccctccatcggggtgtgcacgggaagaccggccagctagagggcgcgccggcccccgggcccgccgccagcccccagactctggaccacagtggggcgacggcgacagggggcgcctcggagttgaagactccagcctcctcaactgcgccccccataagctccgggcccggggcgctggcctctgtgcccgcctctcacccggcacacggcttggcaccccacgagtcccagctgcacctgaaaggggacccccactactccttcaaccacccgttctccatcaacaacctcatgtcctcctcggagcagcagcataagctggacttcaaggcatacgaacaggcactgcaatactcgccttacggctctacgttgcccgccagcctgcctctaggcagcgcctcggtgaccaccaggagccccatcgagccctcagccctggagccggcgtactaccaaggtgtgtattccagacccgtcctaaacacttcc

SEQ ID NO: 7006 - DNA, 1050 bp, Homo sapiens
  source 1..1050: mol_type = genomic DNA
atgctgggctcagtgaagatggaggcccatgacctggccgagtggagctactacccggaggcgggcgaggtctactcgccggtgaccccagtgcccaccatggcccccctcaactcctacatgaccctgaatcctctaagctctccctatccccctggggggctccctgcctccccactgccctcaggacccctggcacccccagcacctgcagcccccctggggcccactttcccaggcctgggtgtcagcggtggcagcagcagctccgggtacggggccccgggtcctgggctggtgcacgggaaggagatgccgaaggggtatcggcggcccctggcacacgccaagccaccgtattcctatatctcactcatcaccatggccatccagcaggcgccgggcaagatgctgaccttgagtgaaatctaccagtggatcatggacctcttcccttactaccgggagaatcagcagcgctggcagaactccattcgccactcgctgtctttcaacgactgcttcgtcaaggtggcgcgttccccagacaagcctggcaagggctcctactgggccctacaccccagctcagggaacatgtttgagaatggctgctacctgcgccgccagaaacgcttcaagctggaggagaaggtgaaaaaagggggcagcggggctgccaccaccaccaggaacgggacagggtctgctgcctcgaccaccacccccgcggccacagtcacctccccgccccagcccccgcctccagcccctgagcctgaggcccagggcggggaagatgtgggggctctggactgtggctcacccgcttcctccacaccctatttcactggcctggagctcccaggggagctgaagctggacgcgccctacaacttcaaccaccctttctccatcaacaacctaatgtcagaacagacaccagcacctcccaaactggacgtggggtttgggggctacggggctgaaggtggggagcctggagtctactaccagggcctctattcccgctctttgcttaatgcatcc

SEQ ID NO: 7007 - DNA, 2685 bp, Homo sapiens
  source 1..2685: mol_type = genomic DNA
atgaaaatcggcagtgggttcctgagtggcggcggaggtaccggcagtagcggtggtagcggctccggcggcggtggtagtggcggcggcggcggcggcggcagcagcggcaggagggcagagatggaacccacctttccccagggtatggttatgttcaaccaccgtcttcccccggtcaccagcttcacccggccggcggggtcggccgcccctcccccgcaatgcgtgttatcctcctctacctccgcagccccggccgctgagcccccccctccgccagccccggacatgactttcaagaaggagccggcggcgtcagccgcggccttcccctcgcagaggacctcctgggggttcttgcagtctttggttagcatcaaacaggagaaacccgcggatcctgaggagcagcagtcccaccaccaccatcaccaccaccactatggggggctgttcgctggagctgaagagaggtctccaggcctaggaggcggtgaaggggggagtcacggcgtcatccaggacctcagtattctccaccagcatgtccagcagcaaccagcccagcaccaccgtgacgtattactcagcagcagtagcaggactgatgaccaccatggcactgaggagccaaagcaggacactaatgtcaaaaaggcaaaaaggccaaagccagaatctcagggaatcaaagccaagaggaagccaagtgcatcttccaaaccttctttggttggagatggagaaggtgccatcctctccccaagtcagaaacctcatatctgtgatcactgtagtgctgctttccgaagctcctatcacctgcggagacatgtcctcattcatacaggagaaagacctttccagtgcagccagtgtagtatgggtttcattcagaaatacctactacagagacatgagaaaattcatagtagagagaagccatttggatgtgatcagtgcagcatgaagtttattcagaagtaccatatggagagacacaagaggacacatagtggagaaaagccatataagtgtgacacttgccaacagtatttttcaaggactgatagattgttgaagcacaggcgcacatgtggtgaagtcatagttaaaggagccactagtgcagaacctgggtcatcaaaccataccaatatgggtaatctggctgtgttgtctcagggaaatacaagttcttcaaggagaaaaacaaagtcaaaaagcatagctattgaaaataaggaacagaagaccggtaaaacaaatgaatcacaaatttcaaataatataaacatgcagagttactcagtagaaatgcctaccgtgtcttccagtggaggcataattggcactggaatagatgaactgcagaagagggtgccaaaattgatctttaagaaaggaagcagaaagaatacagataaaaactaccttaactttgtgtcaccattaccagacatagtaggacagaaatccttgtctggaaaaccaagtggctcacttggcatagtatcaaataatagtgtggagaccattggtcttctccaaagtacaagtggcaaacaaggtcagataagtagtaattatgatgatgccatgcagttttcaaagaaaagaagatatttaccaactgccagcagcaacagtgccttttctataaacgtaggacacatggtctcccaacagtctgtcattcagtctgcaggtgtcagtgttttggacaatgaggcaccattgtcacttattgactcctcagctctaaatgctgaaattaaatcttgtcatgacaagtctggaattcctgatgaggttttacaaagtattttggatcaatactccaacaaatcagaaagccagaaagaggatcctttcaatattgcagaaccacgagtggatttacacacctcaggagaacactcagaattggttcaagaagaaaatttgagcccaggcacccaaacaccttcaaatgataaagcaagtatgttgcaagaatactccaaatacctccaacaggcttttgaaaaatccactaatgcaagttttactcttggacacggtttccaatttgtcagtttgtcttcacctctccacaaccacactttgtttccagaaaaacaaatatacactacgtctcctttggagtgtggtttcggccaatctgttacctcagtgttgccatcttcattgccaaagcctccttttgggatgttgtttggatctcagccaggtctttatttgtctgctttggatgctacacatcagcagttgacaccttcccaggagctggatgatctgatagattctcagaagaacttagagacttcatcagccttccagtcctcatctcagaaattgactagccagaaggaacagaaaaacttagagtcttcaacaggctttcagattccatctcaggagttagctagccagatagatcctcagaaagacatagagcctagaacaacgtatcagattgagaactttgcacaagcgtttggttctcagtttaagtcgggcagcagggtgccaatgacctttatcactaactctaatggagaagtggaccatagagtaaggacttcagtgtcagatttctcagggtatacaaatatgatgtctgatgtaagtgagccatgtagtacaagagtaaagacacccaccagccagagttacagg

SEQ ID NO: 7008 - DNA, 876 bp, Homo sapiens
  source 1..876: mol_type = genomic DNA
atggggaacgagctctttctggccttcaccacatctcacctccccttagcggagcagaaacttgccaggtataaactccgaattgttaagccaccaaaattacccctagagaaaaaacccaaccctgataaggatggtccagattatgagcccaacctctggatgtgggtaaatcccaacattgtgtatccccctggaaagctggaggtctcaggacgtaggaagagggaggacctgacaagcacactcccctcctctcagccaccccagaaggaggaagatgccagctgctcagaggccgcaggggtggaatcactgtcccagtcctccagcaagcggtctccccctcggaagcggtttgccttttcccccagcacctgggagctcacagaagaggaggaggctgaggaccaggaagacagctcctctatggctctcccatcccctcacaaaagggcccccctccagagtcggaggcttcggcaagccagcagccaggcggggaggctctggtcccggccccctctcaattacttccacctaattgccctggcattaagaaacagttccccctgtggcctcaacgtgcaacagatctacagtttcactcgaaagcacttcccctttttccggacggccccggaaggctggaagaatactgtccgtcacaatctctgttttcgagacagctttgagaaagtgcctgtcagcatgcagggcggggccagcacacggcctcgatcttgcctctggaagttgaccgaggagggacaccgccgctttgcggaggaggcccgcgccttggcttccactcggctagaaagtatccaacagtgcatgagccagccagatgtgatgcccttcctctttgatctt

SEQ ID NO: 7009 - DNA, 1200 bp, Homo sapiens
  source 1..1200: mol_type = genomic DNA
atgactactaaaaatttagaaaccaaagtcaccgttacttcatccccaatccgaggagcaggagatggaatggaaactgaggaaccacctaaatctgttgaagttacctccggagtccaatctagaaagcatcatagtcttcagagtccatggaagaaagcagttccatcagagagcccaggagttcttcagctagggaaaatgctcactgaaaaagcaatggaagttaaagctgtaagaatattagttcccaaagctgctataactcatgatatccccaacaaaaatacaaaggttaagtctctgggacatcataaaggagaattccttggtcagtcagagggagttatagaacctaataaggaactctcagaggtaaagaatgtattggaaaagctcaagaattctgaaagaaggttactacaggacaaagaaggtctttcaaaccagctccgtgtacagacagaggtaaatcgtgagttaaaaaagttactggtggcttctgttggggatgatcttcagtatcactttgaacgtctagcccgtgagaaaaatcagcttattttagaaaatgaagccctaggtcgaaacacagctcagctttctgaacagttagaacgtatgtcaatacagtgtgatgtatggcgaagtaaattccttgcaagcagggtaatggcagatgagttaaccaactcaagagcagctttacagcgtcaaaaccgtgatgcacacggggctatacaagatctcctaagtgaacgggaacagtttcgtcaagaaatgatagctacccagaaattattggaggagctcttagtttccttgcaatggggaagagagcaaacttactcccctagtgtacaaccccacagcacagcagagctagcattaacaaatcacaagttggcaaaagcagtaaattctcatcttctgggaaatgttggcattaacaatcaaaaaaagattccatcaacagttgaattctgcagcaccccagctgagaaaatggctgaaacggttctaagaattttagatccagttacctgcaaagagagttcacctgataatccattttttgagtcttcaccaaccaccttacttgctacaaagaaaaatattggacgatttcatccctatactagatatgaaaatataactttcaattgctgcaatcactgccggggagaactgattgccctt

SEQ ID NO: 7010 - DNA, 2076 bp, Homo sapiens
  source 1..2076: mol_type = genomic DNA
atggcgaagaggtcgcgcagtgaggatgaggatgatgaccttcagtatgccgatcatgattatgaagtaccacaacaaaaaggactgaagaaactctggaacagagtaaaatggacaagggacgaggatgataaattaaagaagttggttgaacaacatggaactgatgattggactctaattgctagtcatcttcaaaatcgctctgattttcagtgccagcatcgatggcagaaagttttaaatcctgaattgataaagggtccttggactaaagaagaagatcagagggttattgaattagttcagaaatatgggccaaaaagatggtctttaattgcaaaacatttaaaaggaagaataggcaagcagtgtagagaaagatggcataatcatctgaatcctgaggtaaagaaatcttcctggacagaagaggaggacaggatcatctatgaagcacataagcggttgggaaatcgttgggcagaaattgccaaactacttccaggaaggactgataattctatcaaaaatcattggaattctactatgcgaagaaaagtggaacaggagggctatttacaagatggaataaaatcagaacgatcttcatctaaacttcaacacaaaccttgtgcagctatggatcatatgcaaacccagaatcagttttacatacctgttcagatccctgggtatcagtatgtgtcacctgaaggcaattgtatagaacatgttcagcctacttctgcctttattcagcaacccttcattgatgaagatcctgataaggaaaagaaaataaaggaacttgagatgcttcttatgtcagctgagaatgaagttagaagaaagcgaattccatcacagcctggaagtttttctagctggtctggtagtttcctcatggatgataacatgtctaatactctaaatagccttgacgagcacactagtgagttttacagtatggatgaaaatcagcctgtgtctgctcagcagaattcacccacaaagttcctggccgtggaggcaaacgctgtgttatcctctttgcagaccatcccagaatttgcagagactctagaacttattgaatctgatcctgtagcatggagtgacgttaccagttttgatatttctgatgctgctgcttctcctatcaaatccaccccagttaaattaatgagaattcagcacaatgaaggagccatggaatgccaatttaacgtcagtcttgtacttgaagggaaaaaaaacacttgtaatggtggcaacagtgaagctgttcctttaacatccccaaatatagccaagtttagcactccaccagccatcctcagaaagaagagaaaaatgcgagtgggtcattccccaggcagcgaacttagggatggctcattgaacgatggtggtaatatggcgctaaaacatacaccactgaaaacactaccattttctccttcacagtttttcaacacatgtcctggtaatgaacaacttaatatagaaaatccttcatttacatcaacccctatttgtgggcagaaagctctcattacaactcctcttcataaggaaacaactcccaaagatcaaaaggaaaatgtagggtttagaacacctactattagaagatctatactgggtaccacaccaagaactcctactccttttaagaatgcgcttgctgctcaggagaaaaaatatggacctcttaaaattgtgtcccagccacttgctttcttggaagaagatattcgggaagttttaaaagaagaaactggaacagacctattcctcaaagaggaagatgaacctgcttacaaaagctgcaaacaagagaataccgcttctgggaagaaagtcagaaaatcactagtcttagataattgggaaaaagaagaatcaggcactcaactgttgactgaagacatttcagacatgcagtcaaattgtgaatgggaaacagtggtttatgggaagacagaagaccaacttattatgactgaacaagcaagaagatatctgagtacttacacagctaccagtagtacttcaagagctctcatactg

SEQ ID NO: 7011 - DNA, 2073 bp, Homo sapiens
  source 1..2073: mol_type = genomic DNA
atggcgaagaggtcgcgcagtgaggatgaggatgatgaccttcagtatgccgatcatgattatgaagtaccacaacaaaaaggactgaagaaactctggaacagagtaaaatggacaagggacgaggatgataaattaaagaagttggttgaacaacatggaactgatgattggactctaattgctagtcatcttcaaaatcgctctgattttcagtgccagcatcgatggcagaaagttttaaatcctgaattgataaagggtccttggactaaagaagaagatcagagggttattgaattagttcagaaatatgggccaaaaagatggtctttaattgcaaaacatttaaaaggaagaataggcaagcagtgtagagaaagatggcataatcatctgaatcctgaggtaaagaaatcttcctggacagaagaggaggacaggatcatctatgaagcacataagcggttgggaaatcgttgggcagaaattgccaaactacttccaggaaggactgataattctatcaaaaatcattggaattctactatgcgaagaaaagtggaacaggagggctatttacaagatggaataaaatcagaacgatcttcatctaaacttcaacacaaaccttgtgcagctatggatcatatgcaaacccagaatcagttttacatacctgttcagatccctgggtatcagtatgtgtcacctgaaggcaattgtatagaacatgttcagcctacttctgcctttattcagcaacccttcattgatgaagatcctgataaggaaaagaaaataaaggaacttgagatgcttcttatgtcagctgagaatgaagttagaagaaagcgaattccatcacctggaagtttttctagctggtctggtagtttcctcatggatgataacatgtctaatactctaaatagccttgacgagcacactagtgagttttacagtatggatgaaaatcagcctgtgtctgctcagcagaattcacccacaaagttcctggccgtggaggcaaacgctgtgttatcctctttgcagaccatcccagaatttgcagagactctagaacttattgaatctgatcctgtagcatggagtgacgttaccagttttgatatttctgatgctgctgcttctcctatcaaatccaccccagttaaattaatgagaattcagcacaatgaaggagccatggaatgccaatttaacgtcagtcttgtacttgaagggaaaaaaaacacttgtaatggtggcaacagtgaagctgttcctttaacatccccaaatatagccaagtttagcactccaccagccatcctcagaaagaagagaaaaatgcgagtgggtcattccccaggcagcgaacttagggatggctcattgaacgatggtggtaatatggcgctaaaacatacaccactgaaaacactaccattttctccttcacagtttttcaacacatgtcctggtaatgaacaacttaatatagaaaatccttcatttacatcaacccctatttgtgggcagaaagctctcattacaactcctcttcataaggaaacaactcccaaagatcaaaaggaaaatgtagggtttagaacacctactattagaagatctatactgggtaccacaccaagaactcctactccttttaagaatgcgcttgctgctcaggagaaaaaatatggacctcttaaaattgtgtcccagccacttgctttcttggaagaagatattcgggaagttttaaaagaagaaactggaacagacctattcctcaaagaggaagatgaacctgcttacaaaagctgcaaacaagagaataccgcttctgggaagaaagtcagaaaatcactagtcttagataattgggaaaaagaagaatcaggcactcaactgttgactgaagacatttcagacatgcagtcaaattgtgaatgggaaacagtggtttatgggaagacagaagaccaacttattatgactgaacaagcaagaagatatctgagtacttacacagctaccagtagtacttcaagagctctcatactg

SEQ ID NO: 7012 - DNA, 2220 bp, Homo sapiens
  source 1..2220: mol_type = genomic DNA
atggccaccgctaacagcatcatcgtgctggatgatgatgacgaagatgaagcagctgctcagccagggccctcccacccactccccaatgcggcctcacctggggcagaagcccctagctcctctgagcctcatggggccagaggaagcagtagttcgggcggcaagaaatgctacaagctggagaatgagaagctgttcgaagagttccttgaactttgtaagatgcagacagcagaccaccctgaggtggtcccattcctctataaccggcagcaacgtgcccactctctgtttttggcctcggcggagttctgcaacatcctctctagggtcctgtctcgggcccggagccggccagccaagctctatgtctacatcaatgagctctgcactgttctcaaggcccactcagccaaaaagaagctgaacttggcccctgccgccaccacctccaatgagccctctgggaataaccctcccacacacctctccttggaccccacaaatgctgaaaacactgcctctcagtctccaaggacccgtggttcccggcggcagatccagcgtttggagcagctgctggcgctctatgtggcagagatccggcggctgcaggaaaaggagttggatctctcagaattggatgacccagactccgcatacctgcaggaggcacggttgaagcgtaagctgatccgcctctttgggcgactatgtgagctgaaagactgctcttcactgaccggccgtgtcatagagcagcgcatcccctaccgtggcacccgctacccagaggttaacaggcgcattgagcggctcatcaacaagccagggcctgataccttccctgactatggggatgtgcttcgggctgtagagaaggcagctgcccgacacagccttggcctcccccgacagcagctccagctcatggctcaggatgccttccgagatgtgggcatcaggttacaggagcgacgtcacctcgatctcatctacaactttggctgccacctcacagatgactataggccaggcgttgaccctgcactatcagatcctgtgttggcccggcgccttcgggaaaaccggagtttggccatgagtcggctggatgaggtcatctccaaatatgcaatgttgcaagacaaaagtgaggagggcgagagaaaaaagagaagagctcggctccaaggcacctcttcccactctgcagacacccccgaagcctccttggattctggtgagggccctagtggaatggcatcccaggggtgcccttctgcctccagagctgagacagatgacgaagacgatgaggagagtgatgaggaagaggaggaggaggaggaagaagaagaggaggaggccacagattctgaagaggaggaggatctggaacagatgcaggagggtcaggaggatgatgaagaggaggacgaagaggaagaagcagcagcaggtaaagatggagacaagagccccatgtcctcactacagatctccaatgaaaagaacctggaacctggcaaacagatcagcagatcttcaggggagcagcaaaacaaaggacgcatagtgtcaccatcgttactgtcagaagaacccctggccccctccagcatagatgctgaaagcaatggagaacagcctgaggagctgaccctggaggaagaaagccctgtgtctcagctctttgagctagagattgaagctttgcccctggataccccttcctctgtggagacggacatttcctcttccaggaagcaatcagaggagcccttcaccactgtcttagagaatggagcaggcatggtctcttctacttccttcaatggaggcgtctctcctcacaactggggagattctggtcccccctgcaaaaaatctcggaaggagaagaagcaaacaggatcagggccattaggaaacagctatgtggaaaggcaaaggtcagtgcatgagaagaatgggaaaaagatatgtaccctgcccagcccaccttcccccttggcttccttggccccagttgctgattcctccacgagggtggactctcccagccatggcctggtgaccagctccctctgcatcccttctccagcccggctgtcccaaaccccccattcacagcctcctcggcctggtacttgcaagacaagtgtggccacacaatgcgatccagaagagatcatcgtgctctcagactctgat

SEQ ID NO: 7013 - DNA, 948 bp, Homo sapiens
  source 1..948: mol_type = genomic DNA
atgagagctcatgctggacacaaacgatctgagtgtggtggggaatggagagagacgccccgtaaacagaaacaacatgggaaagcctccatttcccccagtagtggtgcacggcgcacagtaacaccaactcgaaagagaccttatgaatgcaaggtgtgcgggaaagcctttaattctcccaatttatttcaaatccatcaaagaactcacactggaaagaggtcctataaatgtagggaaatagtgagagccttcacagtttccagtttctttcgaaaacatggaaaaatgcatactggagaaaaacgctatgaatgtaaatactgtggaaaacctatcgattatcccagtttatttcaaattcatgttagaactcacactggagaaaaaccttacaaatgtaaacaatgtggtaaagccttcatttccgcaggttaccttcggacacatgaaatcagatctcacgcgctggagaaatcccaccaatgtcaggaatgtgggaaaaaactcagttgttccagttcccttcacagacatgaaagaactcatagtggaggaaaactctacgaatgtcaaaaatgtgccaaagtctttagatgtcccacgtcccttcaagcacatgaaagagctcacactggagaaagaccttatgaatgtaataaatgtggtaaaaccttcaattatcccagttgttttcgaagacataaaaaaactcatagtggagaaaagccatatgaatgtacaaggtgtggtaaagcctttgggtggtgcagttccctccgaagacatgaaatgactcacactggagaaaaaccctttgattgtaaacagtgtggtaaagtctttactttttcaaattaccttagacttcatgaaagaactcatttggccgggcgtagccagtgctttggcaggaggcagggggatcacctgagcccaggagtt

SEQ ID NO: 7014 - DNA, 870 bp, Homo sapiens
  source 1..870: mol_type = genomic DNA
atgggcgatgggggcgccgagcgcgaccggggccccgcgcgccgggcggagtctggtggcggcggtgggcgctgcggagaccgcagcggagcgggggacttgcgagctgatggcggtggccacagcccaacggaggtggccgggacctcagcctccagtcccgcaggctccagggagagtggagccgacagcgacgggcagcccgggcccggcgaggcagaccactgccgccgcatactggtgcgagatgccaaagggacaattcgggaaattgtcctgcctaagggcctggacctggaccggcccaagcggacacgtacatccttcactgccgagcagctgtaccgcctggagatggagttccagcgctgccagtatgtggtgggccgcgagcgcactgagctggcccgccagctgaacctctccgagacccaggtgaaggtctggttccagaaccgccgcaccaagcagaagaaagaccagagcagagacctggagaagcgggcgtcctcctcagcctccgaggcctttgccacctccaacattctgcggctgctggagcagggccggctgctctctgtgcccagggcccctagcctcctggcgctgacccctagcctgccaggcctacctgccagccacaggggcacctccttaggtgaccccaggaactcctccccacgcctcaacccgctgtcctcggcctcagcgtcccccccactgccgccccctctgccagctgtctgcttttcctcggccccgctcctggatctgcctgccggctacgaactgggttcctcggccttcgagccatacagctggctagaacggaaagtgggcagcgccagcagctgcaagaaagctaacact

SEQ ID NO: 7015 - DNA, 711 bp, Homo sapiens
  source 1..711: mol_type = genomic DNA
atgtcggacagtgatctaggtgaggacgaaggcctcctctccctggcgggcaaaaggaagcgcagggggaacctgcccaaggagtcggtgaagatcctccgggactggctgtacttgcaccgctacaacgcctacccctcagagcaggagaagctgagcctttctggacagaccaacctgtcagtgctgcaaatatgtaactggttcatcaatgcccggcggcggcttctcccagacatgcttcggaaggatggcaaagaccctaatcagtttaccatttcccgccgcgggggtaaggcctcagatgtggccctcccccgtggcagcagcccctcagtgctggctgtgtctgtcccagcccccaccaatgtgctctccctgtctgtgtgctccatgccgcttcactcaggccagggggaaaagccagcagcccctttcccacgtggggagctggagtctcccaagcccctggtgacccctggtagcacacttactctgctgaccagggctgaggctggaagccccacaggtggactcttcaacacgccaccacccacacccccagagcaggacaaagaggacttcagcagcttccagctgctggtggaggtggcgctacagagggctgctgagatggagcttcagaagcagcaggacccatcactcccattactgcacactcccatccctttagtctctgaaaatccccag

SEQ ID NO: 7016 - DNA, 1578 bp, Homo sapiens
  source 1..1578: mol_type = genomic DNA
atggacgtaagattttatccacctccagcccagcccgccgctgcgcccgacgctccctgtctgggaccttctccctgcctggacccctactattgcaacaagtttgacggtgagaacatgtatatgagcatgacagagccgagccaggactatgtgccagccagccagtcctaccctggtccaagcctggaaagtgaagacttcaacattccaccaattactcctccttccctcccagaccactcgctggtgcacctgaatgaagttgagtctggttaccattctctgtgtcaccccatgaaccataatggcctgctaccatttcatccacaaaacatggacctccctgaaatcacagtctccaatatgctgggccaggatggaacactgctttctaattccatttctgtgatgccagatatacgaaacccagaaggaactcagtacagttcccatcctcagatggcagccatgagaccaaggggccagcctgcagacatcaggcagcagccaggaatgatgccacatggccagctgactaccattaaccagtcacagctaagtgctcaacttggtttgaatatgggaggaagcaatgttccccacaactcaccatctccacctggaagcaagtctgcaactccttcaccatccagttcagtgcatgaagatgaaggcgatgatacctctaagatcaatggtggagagaagcggcctgcctctgatatggggaaaaaaccaaaaactcccaaaaagaagaagaagaaggatcccaatgagccccagaagcctgtgtctgcctatgcgttattctttcgtgatactcaggccgccatcaagggccaaaatccaaacgctacctttggcgaagtctctaaaattgtggcttcaatgtgggacggtttaggagaagagcaaaaacaggtctataaaaagaaaaccgaggctgcgaagaaggagtacctgaagcaactcgcagcatacagagccagccttgtatccaagagctacagtgaacctgttgacgtgaagacatctcaacctcctcagctgatcaattcgaagccgtcggtgttccatgggcccagccaggcccactcggccctgtacctaagttcccactatcaccaacaaccgggaatgaatcctcacctaactgccatgcatcctagtctccccaggaacatagcccccaagccgaataaccaaatgccagtgactgtctctatagcaaacatggctgtgtcccctcctcctcccctccagatcagcccgcctcttcaccagcatctcaacatgcagcagcaccagccgctcaccatgcagcagccccttgggaaccagctccccatgcaggtccagtctgccttacactcacccaccatgcagcaaggatttactcttcaacccgactatcagactattatcaatcctacatctacagctgcacaagttgtcacccaggcaatggagtatgtgcgttcggggtgcagaaatcctcccccacaaccggtggactggaataacgactactgcagtagtgggggcatgcagagggacaaagcactgtaccttact

SEQ ID NO: 7017 - DNA, 2136 bp, Homo sapiens
  source 1..2136: mol_type = genomic DNA
atgggcatgaggatcaaactgcaaagcaccaaccaccccaacaacctgctgaaggaactcaacaagtgccggctctcagagaccatgtgcgacgtcaccattgtggtggggagccgctccttcccggcccacaaggctgtgctggcctgtgcagctggctacttccagaacctcttcctgaatactgggcttgatgctgccaggacctatgtggtggacttcatcacccctgccaactttgagaaggttctgagctttgtctacacttcagaactcttcacagacctgatcaatgttggggtcatctacgaggtagctgagcgtctgggtatggaggacctcctccaggcctgtcactctacctttcctgatctggagagcactgccagggccaagcccctgaccagcaccagtgagagccactctggtaccctgagttgtccttcggcagaacctgcccatccccttggagaactccgaggtggtggggactaccttggtgctgatagaaactatgtgttgcccagtgatgctggagggagctataaagaggaagagaagaatgttgccagtgacgctaaccatagcctgcatctgccgcaaccgcccccaccaccgccaaagacagaagaccatgacacccctgctcccttcacgtccattcctagcatgatgacccagccactcctaggcactgtcagcacgggcatccagaccagcacgagctcctgccagccatacaaagttcaaagcaatggagacttcagtaaaaacagcttcctcacccctgacaatgcagtagacattaccactgggaccaactcctgtctgagcaatagtgagcactccaaagatcctggctttgggcagatggatgagctccagctcgaggacctgggggatgatgacttgcagtttgaagaccctgctgaggatataggcacaactgaggaggtgattgagctgagtgatgacagtgaggatgagttggcttttggagagaatgacaatcgggagaataaggccatgccctgccaggtgtgcaagaaagttctagagcccaacattcaactgatccggcagcatgctcgggaccatgtggacctgctgacgggcaactgcaaggtctgcgagacccacttccaggaccgaaactcccgggtaactcatgtcctgtcccacattggtattttccttttctcctgcgacatgtgtgaaactaagttctttacccagtggcagctgacccttcaccgacgggatggaatatttgagaacaacatcattgtccaccccaacgatcccctgccagggaagctgggtctcttttcaggggcagcctccccagagctgaaatgcgctgcctgtgggaaagtattggccaaagatttccatgtggtccggggccacatccttgaccatctaaacttgaagggccaggcctgcagtgtctgcgaccagcgtcaccttaacctctgcagcctcatgtggcacacgctgtcccatctcggcatctcagtcttctcctgttctgtctgtgcgaacagctttgtggactggcatcttctagagaagcacatggctgtgcaccaaagtctggaagacgccctcttccactgccgcttgtgcagccagagcttcaagtcagaggctgcctatcgctaccacgtcagccagcacaaatgcaacagtggccttgatgcacggcctggttttgggctgcagcacccagctctccagaagcggaagctgccagcagaggagtttctgggtgaagagctggcgctgcagggccaacctgggaacagcaagtatagctgcaaggtctgtggcaaaagatttgcccacacaagcgaattcaactaccaccggcggatccacacgggggagaagccataccaatgtaaggtgtgccacaagttctttcgaggccgctcgaccatcaagtgccacctaaagacacactcgggggccctcatgtaccgctgcacagtctgtgggcactacagttccacccttaacctcatgagcaaacatgttggtgtgcacaaaggcagcctcccccctgacttcaccatcgagcagaccttcatgtacatcatccattccaaagaggcggataagaacccggacagt

SEQ ID NO: 7018 - DNA, 1419 bp, Homo sapiens
  source 1..1419: mol_type = genomic DNA
atgatgaccaaggtactaggcatggccccagttctgggccctaggcctccacaggagcaggtggggcctctgatggtaaaagtcgaggagaaagaagagaaaggcaagtaccttcctagcctggagatgttccgccagcgcttcaggcagtttgggtaccatgatacccctggaccccgagaggccctgagccaactccgggtgctctgctgtgagtggctgaggcccgagatccacaccaaggagcagatcctggagctactggtgctggagcagttcctgaccatcctgccccaggagctccaggcctgggtgcaggagcattgcccggagagcgctgaagaggctgtcactctcctcgaagatctggagcgggaactggatgagccaggacaccaggtctcaactcctccaaacgaacagaaaccggtgtgggagaagatatcctcctcaggaactgcaaaggaatccccgagcagcatgcagccacagcccttggagaccagtcacaaatacgagtcttgggggcccctgtacatccaagagtctggtgaggagcaggagttcgctcaagatccaagaaaggtccgagattgcagattgagtacccagcacgaggaatcagcagatgagcagaaaggttctgaagcagaggggctcaaaggggatataatttctgtgattatcgccaataaacctgaggccagcttagagaggcagtgcgtaaaccttgaaaatgaaaaaggaacaaaaccccctcttcaagaggcaggctccaagaaaggtagagaatcagttcctactaaacctaccccaggagagagacgttatatatgtgctgaatgtggcaaagcctttagtaatagctcaaatctcaccaaacacaggagaacacacactggggagaaaccttacgtgtgcaccaagtgtgggaaagctttcagccacagctcaaacctcaccctccactacagaacacacttggtggaccggccctatgactgtaagtgtggaaaagcttttgggcagagctcagaccttcttaaacatcagagaatgcacacagaagaggcgccatatcagtgcaaagattgtggcaaggctttcagcgggaaaggcagcctcattcgtcactatcggatccacactggggagaagccttatcagtgtaacgaatgtgggaagagcttcagtcagcatgcgggcctcagctcccaccagagactccacaccggagagaagccatataagtgtaaggagtgtgggaaagccttcaaccacagctccaacttcaataaacaccacagaatccacaccggggaaaagccctactggtgtcatcactgtggaaagaccttctgtagcaagtccaatctttccaaacatcagcgagtccacactggagagggagaagcaccg

SEQ ID NO: 7019 - DNA, 1287 bp, Homo sapiens
  source 1..1287: mol_type = genomic DNA
atgagcggcggcgtgtacgggggagatgaagttggagcccttgtttttgacattggatcctatactgtgagagctggttatgctggtgaggactgccccaaggtggattttcctacagctattggtatggtggtagaaagagatgacggaagcacattaatggaaatagatggcgataaaggcaaacaaggcggtcccacctactacatagatactaatgctctgcgtgttccgagggagaatatggaggccatttcacctctaaaaaatgggatggttgaagactgggatagtttccaagctattttggatcatacctacaaaatgcatgtcaaatcagaagccagtctccatcctgttctcatgtcagaggcaccgtggaatactagagcaaagagagagaaactgacagagttaatgtttgaacactacaacatccctgccttcttcctttgcaaaactgcagttttgacagcatttgctaatggtcgttctactgggctgattttggacagtggagccactcataccactgcaattccagtccacgatggctatgtccttcaacaaggcattgtgaaatcccctcttgctggagactttattactatgcagtgcagagaactcttccaagaaatgaatattgaattggttcctccatatatgattgcatcaaaagaagctgttcgtgaaggatctccagcaaactggaaaagaaaagagaagttgcctcaggttacgaggtcttggcacaattatatgtgtaattgtgttatccaggattttcaagcttcggtacttcaagtgtcagattcaacttatgatgaacaagtggctgcacagatgccaactgttcattatgaattccccaatggctacaattgtgattttggtgcagagcggctaaagattccagaaggattatttgacccttccaatgtaaaggggttatcaggaaacacaatgttaggagtcagtcatgttgtcaccacaagtgttgggatgtgtgatattgatatcagaccaggtctctatggcagtgtaatagtggcaggaggaaacacactaatacagagttttactgacaggttgaatagagagctgtctcagaaaactcctccaagtatgcggttgaaattgattgcaaataatacaacagtggaacggaggtttagctcatggattggcggctccattctagcctctttgggtacctttcaacagatgtggatttccaagcaagaatatgaagaaggagggaagcagtgtgtagaaagaaaatgccct

SEQ ID NO: 7020 - DNA, 1230 bp, Homo sapiens
  source 1..1230: mol_type = genomic DNA
atgttggcggctgcgctcctaaaggccaagtcccaggagctggtaacctttgaggatgtagctgtgtacttcatccggaaggagtggaagcgtttggaacctgctcagagggacctctatagagatgtgatgctggagaattacgggaatgtgttctcactggatcgtgagaccaggactgaaaatgatcaagaaatttctgaagacacaagatcacatggggtcctactgggaagatttcaaaaggatatttctcagggtctcaagtttaaagaagcctatgaacgagaagtcagtctgaaaaggccgctggggaactcccctggagaaagactgaacaggaaaatgccagattttggtcaagtgacagttgaggagaagctaacccccaggggagagagaagcgagaaatataatgattttgggaacagcttcactgtgaattccaaccttatctcacatcagagactccccgtgggagacagaccccataagtgtgatgaatgtagcaagagctttaatcgaacttcagaccttattcaacatcagagaatccacactggggaaaagccctatgaatgtaatgagtgtgggaaggccttcagccagagctcacaccttattcagcatcagagaatccacactggggaaaaaccttatgaatgtagtgattgtgggaaaaccttcagctgtagctctgccctcattctgcatcggaggatccacacgggggagaaaccctatgaatgtaatgagtgtgggaagaccttcagctggagctccaccctcacccaccatcagagaatccacactggtgagaaaccctacgcctgcaatgaatgtgggaaggccttcagcaggagctcaacccttattcaccatcagagaatccacactggagaaaaaccctatgaatgtaatgaatgtgggaaagccttcagccagagctcacacctctatcagcaccagagaatccacactggagagaagccctacgaatgtatggaatgtggaggaaagtttacctacagttcaggccttattcagcatcaaagaatccacaccggggagaacccctatgaatgtagtgagtgtgggaaagccttcaggtacagctcggctcttgttcgccatcagagaattcacactggagagaagcctttgaatgggatcggcatgagcaaaagctccctcagagttacgaccgagttaaatatcagagagtccacg

SEQ ID NO: 7021 - DNA, 1392 bp, Homo sapiens
  source 1..1392: mol_type = genomic DNA
atggaaactgaacagccagaagaaaccttccctaacactgaaaccaatggtgaatttggtaaacgccctgcagaagatatggaagaggaacaagcatttaaaagatctagaaacactgatgagatggttgaattacgcattctgcttcagagcaagaatgctggggcagtgattggaaaaggaggcaagaatattaaggctctccgtacagactacaatgccagtgtttcagtcccagacagcagtggccccgagcgcatattgagtatcagtgctgatattgaaacaattggagaaattctgaagaaaatcatccctaccttggaagagggcctgcagttgccatcacccactgcaaccagccagctcccgctcgaatctgatgctgtggaatgcttaaattaccaacactataaaggaagtgactttgactgcgagttgaggctgttgattcatcagagtctagcaggaggaattattggggtcaaaggtgctaaaatcaaagaacttcgagagaacactcaaaccaccatcaagcttttccaggaatgctgtcctcattccactgacagagttgttcttattggaggaaaacccgatagggttgtagagtgcataaagatcatccttgatcttatatctgagtctcccatcaaaggacgtgcacagccttatgatcccaatttttacgatgaaacctatgattatggtggttttacaatgatgtttgatgaccgtcgcggacgcccagtgggatttcccatgcggggaagaggtggttttgacagaatgcctcctggtcggggtgggcgtcccatgcctccatctagaagagattatgatgatatgagccctcgtcgaggaccacctccccctcctcccggacgaggcggccggggtggtagcagagctcggaatcttcctcttcctccaccaccaccacctagagggggagacctcatggcctatgacagaagagggagacctggagaccgttacgacggcatggttggtttcagtgctgatgaaacttgggactctgcaatagatacatggagcccatcagaatggcagatggcttatgaaccacagggtggctccggatatgattattcctatgcagggggtcgtggctcatatggtgatcttggtggacctattattactacacaagtaactattcccaaagatttggctggatctattattggcaaaggtggtcagcggattaaacaaatccgtcatgagtcgggagcttcgatcaaaattgatgagcctttagaaggatccgaagatcggatcattaccattacaggaacacaggaccagatacagaatgcacagtatttgctgcagaacagtgtgaagcagtatgcagatgttgaaggattc

SEQ ID NO: 7022 - DNA, 1371 bp, Homo sapiens
  source 1..1371: mol_type = genomic DNA
atgtctcaggggtcagtgacattcagagatgtggccatagacttctcccaggaggagtggaaatggcttcagcctgctcaaagagatttgtacagatgtgtaatgttggagaactatggccatctggtctcactgggtctttccatttctaagccagatgtggtttccttattggagcaagggaaagaaccctggctggggaaaagggaagtgaaaagagatctgttttcagtttcagagtcaagtggtgagatcaaagacttttcaccaaaaaatgtcatttatgatgactcatcccagtatttgatcatggaaagaattctaagtcaaggccctgtgtattccagttttaaaggaggctggaaatgcaaggatcatactgagatgctgcaagaaaatcagggatgtattaggaaagtaacagtctctcatcaagaagccctggctcaacatatgaatatcagtactgtggagaggccctatggatgccatgaatgtggaaaaacttttggtcgacgcttttccctggtgttacaccagaggactcatactggagagaaaccatatgcatgtaaggaatgtggcaaaacctttagccagatttcaaaccttgtgaaacaccaaatgatacatactggaaagaaaccccatgagtgtaaggactgtaataaaacattcagttacctttcatttcttattgaacaccagagaacgcacactggggagaaaccttatgaatgtactgagtgtggaaaggcctttagccgtgcctccaacctcactcgacatcaaagaattcacataggaaagaaacaatatatatgtaggaaatgtggtaaagcatttagcagtggctcagaactcattcgccaccagattacacatactggagagaaaccttatgaatgcattgaatgtgggaaggcatttcgccgtttctcacaccttactcgacatcagagcatccatacaaccaaaaccccgtatgaatgtaatgaatgtaggaaagctttccgttgtcactcattccttattaaacatcagagaattcatgctggagaaaagctctatgaatgtgatgaatgtggtaaagttttcacttggcatgcatcccttattcaacatacgaagagtcacactggagagaaaccctatgcgtgtgctgaatgtgataaagccttcagccggagcttttccctcattctacatcagagaactcatactggagagaaaccctatgtatgtaaggtatgcaacaaatccttcagctggagctcaaaccttgctaaacatcagaggacacacactcttgacaacccctatgaatatgaaaattcatttaattaccactcattccttactgaacaccag

SEQ ID NO: 7023 - DNA, 939 bp, Homo sapiens
  source 1..939: mol_type = genomic DNA
atggaggctggaccctggagagtttctgcacccccttcaggacccccacagttccccgctgtggtccctggaccatcgctggaggtggcccgagctcacatgctggctttggggccacagcagctgctggcccaggatgaggagggggacacgctccttcacctgtttgcggctcgggggctgcgctgggcggcatatgctgcggctgaggtgctccaggtgtaccggcgtcttgacattcgtgagcataagggcaagacccctctcctggtggcggctgctgccaaccagcccctgattgtggaggatctgttgaacctgggagcagagcccaatgccgctgaccatcagggacgttcggtcttgcacgtggccgctacctacgggctcccaggagttctcttggctgtgcttaactctggggtccaggttgacctggaagccagagacttcgagggcctcaccccgctccacacggccatcctggcccttaacgttgctatgcgcccttccgacctctgtccccgggtgctgagcacacaggcccgagacaggctggattgtgtccacatgttgctgcaaatgggtgctaatcacaccagccaggagatcaagagcaacaagacagttctgcacttggccgtgcaggctgccaaccccactctggttcagctgctgctggagctgccccggggagacctgcggacctttgtcaacatgaaggcccacgggaacacagccctccacatggcggctgccctgccccctgggccggcccaggaggccatcgtgcggcacctgttggcagctggggcggaccccacactgcgcaacctggagaatgagcagcccgttcacctgctgcggcccgggccgggccctgaggggctccggcagctgttgaagaggagccgtgtggcgccgccaggcctgtcctct

SEQ ID NO: 7024 - DNA, 1026 bp, Homo sapiens
  source 1..1026: mol_type = genomic DNA
atgacatgccctcgcaatgtaactccgaactcgtacgcggagcccttggctgcgcccggcggaggagagcgctatagccggagcgcaggcatgtatatgcagtctgggagtgacttcaattgcggggtgatgaggggctgcgggctcgcgccctcgctctccaagagggacgagggcagcagccccagcctcgccctcaacacctatccgtcctacctctcgcagctggactcctggggcgaccccaaagccgcctatcgcctggaacaacctgttggcaggccgctgtcctcctgctcctacccacctagtgtcaaggaggagaatgtctgctgcatgtacagcgcagagaagcgggcgaaaagtggccccgaggcagctctctactcccaccccttgccggagtcctgccttggggagcacgaggtacccgtgcccagctactaccgcgccagcccgagctactccgcgctggacaagacgccccactgttctggggccaacgacttcgaagcccctttcgagcagcgggccagtctcaacccgcgcgccgaacatctggaatcgcctcagctggggggcaaagtgagtttccctgagacccccaagtccgacagccagacccccagccccaatgaaatcaagacggagcagagcctggcgggccctaaagggagcccctcggagagcgaaaaggagagggccaaagctgccgactccagcccagacacctcggataacgaagcgaaagaggagataaaggcagaaaacaccacaggaaattggctgacagcaaagagcggaaggaagaagaggtgcccctatactaaacaccagacgctggaattggagaaagaatttctgttcaatatgtatttgacgcgagagcgccgcctggagattagcaagaccattaaccttacagacagacaagtcaaaatctggtttcaaaatcgcagaatgaaactcaagaaaatgaaccgagagaatcggatccgggaactgacctccaattttaatttcacc

SEQ ID NO: 7025 - DNA, 1401 bp, Homo sapiens
  source 1..1401: mol_type = genomic DNA
atgacgatgctcctggacggaggcccgcagttccctgggctgggagtgggcagcttcggcgcgccgcgccaccacgagatgcccaaccgtgagccggcaggcatggggctgaatcccttcggggactcaacccacgccgccgccgccgccgccgccgccgctgccttcaagctgagccctgccgcggcgcacgatctatcttcaggccagagctcggctttcacgccgcagggttcgggctacgccaacgccctgggccaccatcaccaccaccatcaccatcatcaccacaccagccaggtgcccagctacggtggcgctgcctctgccgccttcaactcaacgcgcgagtttctgttccgccagcgcagctccgggctcagtgaggcggcctcgggtggcgggcagcacgggctcttcgccggctcggcgagcagcctgcatgctccagctggcatccccgagccccctagctacttgctgtttcccgggctgcatgagcagggcgctgggcacccgtcgcccacagggcacgtggacaacaaccaggtccacctggggctgcgtggggagctgttcggccgtgctgacccataccgcccagtggccagcccgcgcacggacccctacgcggccggcgctcagtttcctaactacagccccatgaacatgaacatgggagtgaacgtggcggcccaccacgggcccggcgccttcttccgttatatgcggcagcctatcaagcaggagctgtcgtgcaagtggatcgacgaggctcagctgagccggcccaagaagagctgcgaccggaccttcagcaccatgcatgagctggtgacacatgtcaccatggagcatgtggggggcccggagcagaacaaccacgtctgctactgggaggagtgcccccgggagggcaagtctttcaaggcgaagtacaaactggtcaaccacatccgagtgcacacgggcgagaagcccttcccatgccccttcccgggctgcgggaagatctttgcccgttctgagaacctcaagatccacaagaggacccacacaggtgagaaacctttcaaatgtgaatttgaaggctgtgacagacgctttgccaacagcagcgaccgtaagaagcacatgcatgtgcatacctcggacaagccctatatctgcaaagtgtgcgacaagtcctacacgcacccgagctccctgcgcaaacacatgaaggttcatgaatctcaagggtcagattcctcccctgctgccagttcaggctatgaatcttccactccacccgctatagcttctgcaaacagtaaagataccactaaaaccccttctgcagttcaaactagcaccagccacaaccctggacttcctcctaattttaacgaatggtacgtc

SEQ ID NO: 7026 - DNA, 1353 bp, Homo sapiens
  source 1..1353: mol_type = genomic DNA
atgaacctggagggcggcggccgaggcggagagttcggcatgagcgcggtgagctgcggcaacgggaagctccgccagtggctgatcgaccagatcgacagcggcaagtaccccgggctggtgtgggagaacgaggagaagagcatcttccgcatcccctggaagcacgcgggcaagcaggactacaaccgcgaggaggacgccgcgctcttcaaggcttgggcactgtttaaaggaaagttccgagaaggcatcgacaagccggaccctcccacctggaagacgcgcctgcggtgcgctttgaacaagagcaatgactttgaggaactggttgagcggagccagctggacatctcagacccgtacaaagtgtacaggattgttcctgagggagccaaaaaaggagccaagcagctcaccttggaggacccgcagatgtccatgagccacccctacaccatgacaacgccttacccttcgctcccagcccagcaggttcacaactacatgatgccacccctcgaccgaagctggagggactacgtcccggatcagccacacccggaaatcccgtaccaatgtcccatgacgtttggaccccgcggccaccactggcaaggcccagcttgtgaaaatggttgccaggtgacaggaaccttttatgcttgtgccccacctgagtcccaggctcccggagtccccacagagccaagcataaggtctgccgaagccttggcgttctcagactgccggctgcacatctgcctgtactaccgggaaatcctcgtgaaggagctgaccacgtccagccccgagggctgccggatctcccatggacatacgtatgacgccagcaacctggaccaggtcctgttcccctacccagaggacaatggccagaggaaaaacattgagaagctgctgagccacctggagaggggcgtggtcctctggatggcccccgacgggctctatgcgaaaagactgtgccagagcaggatctactgggacgggcccctggcgctgtgcaacgaccggcccaacaaactggagagagaccagacctgcaagctctttgacacacagcagttcttgtcagagctgcaagcgtttgctcaccacggccgctccctgccaagattccaggtgactctatgctttggagaggagtttccagaccctcagaggcaaagaaagctcatcacagctcacgtagaacctctgctagccagacaactatattattttgctcaacaaaacagtggacatttcctgaggggctacgatttaccagaacacatcagcaatccagaagattaccacagatctatccgccattcctctattcaagaa

SEQ ID NO: 7027 - DNA, 630 bp, Homo sapiens
  source 1..630: mol_type = genomic DNA
atggcggcagcagccgctctgagggcgcctgctcaggttgttggcatggaggggaagatgaggcagcaccttctaagcagagcacgtgtatacatatatacaaagaccagggaggtcatagtggagaaaggccttatgagtgtggggaatataggaaattatttaagaacaagtcctgcctcactgaacccagaagagatcacaaacacaggaatgttcgcactggagaaaggccttatgagtgcagcaaatatgggaaattatttcaccaaaagcctacactccatattcatgagagatttcatactgggcaaaagacctatgagtgcagtgagtgtggaaaatcatttcaccaaagctcttcactcttgcagcgtcagacacttcacactagagaaaggccttatgagtgtattgaatgtgggaaagcctttgctgaaaagtccagtctcattaaccacaggaaagttcactctggagcaaagcgttatgaatgcaatgaatgtgggaagtcctttgcttatacatctagtctcattaaacacaggaggattcacactggagagaggccttatgagtgcagtgaatgtgggagatcctttgctgaaaactccagtcttattaaacact

SEQ ID NO: 7028 - DNA, 681 bp, Homo sapiens
  source 1..681: mol_type = genomic DNA
atgttcaagagaatggccgaatttgggcctgactccggcgggagagtaaagggtgttactatcgttaaaccaatagtttacggtaatgttgctcggtattttggaaagaaaagagaagaagatgggcacactcatcagtggacagtatatgtgaaaccatatagaaatgaggatatgtcagcatatgtgaagaaaatccagtttaaattacatgaaagctatggcaatcctttaagagttgttactaaacctccatatgaaattactgaaacaggatggggtgaattcgaaataatcatcaaaatatttttcattgaccctaatgaaagacctgtaaccctgtatcatttgctaaagctgtttcaatcagacaccaatgcaatgctggggaaaaagacagtggtttcagagttctatgatgaaatgatatttcaagacccaacagcaatgatgcaacaattattgacaacatctcgtcagctaacattaggagcctataagcatgaaacagaatttgcagagcttgaagtgaaaaccagagaaaaattagaagctgctaagaaaaaaacaagctttgagattgcagagcttaaggagagattaaaagcaagtcgtgaaactataaattgtttaaaaaatgaaatcagaaaacttgaagaagatgaccaagcaaaagacata

SEQ ID NO: 7029 - DNA, 516 bp, Homo sapiens
  source 1..516: mol_type = genomic DNA
atgctgctgctgccgccgcggccaccccaccctcggtcctcctctccggaggccatggacccaccgccccccaaggctccccctttccccaaggcggaaggcccctcctccactccttcctcggcggcggggccccgacccccgcggctgggccgccacctcctcatcgacgccaatggggtcccctacacatacacggtgcagctggaggaggagccccggggcccgccccagcgcgaggcgcccccaggagagcccggccctcgcaagggctacagctgcccggagtgcgcccgtgtctttgccagccctctgcggctgcagagccaccgcgtgtcgcactcggacctcaagcccttcacgtgcggcgcctgcggcaaggccttcaagcgctccagccacctgtcgcggcatcgcgccacgcaccgcgcccgcgccgggccgccgcacacctgcccgctctgtccacgccgcttccaggacgccgcggagctggcgcagcacgtgcgcctccac

SEQ ID NO: 7030 - DNA, 1395 bp, Homo sapiens
  source 1..1395: mol_type = genomic DNA
atgacgtcaatggccagcttgttttcttttactagtccagcagtaaagcgattgttgggctggaaacaaggtgatgaggaggagaaatgggcagaaaaggcagttgatgctttggtgaagaaactaaaaaagaaaaagggtgccatggaggaactggagaaagccttgagcagtccaggacagccgagtaaatgtgtcactattcccagatctttagatggacgcctgcaggtttctcacagaaaaggcttaccccatgttatatattgtcgtgtttggcgctggccggatttgcagagtcatcatgagctaaagccgttggatatttgtgaatttccttttggatctaagcaaaaagaagtttgtatcaacccataccactataagagagtggagagtccagtcttacctccagtattagtgcctcgtcataatgaattcaatccacaacacagccttctggttcagtttaggaacctgagccacaatgaaccacacatgccacaaaatgccacgtttccagattctttccaccagcccaacaacactccttttcccttatctccaaacagcccttatcccccttctcctgctagcagcacatatcccaactccccagcaagttctggaccaggaagtccatttcagctcccagctgatacgcctcctcctgcctatatgccacctgatgatcagatgggtcaagataattcccagcctatggatacaagcaataatatgattcctcagattatgcccagtatatccagcagggatgttcagcctgttgcctatgaagagcctaaacattggtgttcaatagtctactatgaattaaacaatcgtgttggagaagcttttcatgcatcttctactagtgtgttagtagatggattcacagatccttcaaataacaaaagtagattctgcttgggtttgttgtcaaatgttaatcgtaattcgacaattgaaaacactaggcgacatattggaaaaggtgttcatctgtactatgttggtggagaggtgtatgcggaatgcctcagtgacagcagcatatttgtacagagtaggaactgcaactttcatcatggctttcatcccaccactgtctgtaagattcccagcagctgcagcctcaaaatttttaacaatcaggagtttgctcagcttctggctcaatctgtcaaccatgggtttgaggcagtatatgagctcaccaaaatgtgtaccattcggatgagttttgtcaagggttggggagcagaatatcaccggcaggatgtaaccagcaccccatgttggattgagattcatcttcatgggcctcttcagtggctggataaagtccttactcagatgggctcccctctgaaccccatatcttctgtttca

SEQ ID NO: 7031 - DNA, 510 bp, Homo sapiens
  source 1..510: mol_type = genomic DNA
atgagcagcaatgagtgcttcaagtgtggacgatctggccactgggcccgggaatgtcctactggtggaggccgtggtcgtggaatgagaagccgtggcagaggtttccagtttgtttcctcgtctcttccagacatttgttatcgctgtggtgagtctggtcatcttgccaaggattgtgatcttcaggaggatgcctgctataactgcggtagaggtggccacattgccaaggactgcaaggagcccaagagagagcgagagcaatgctgctacaactgtggcaaaccaggccatctggctcgtgactgcgaccatgcagatgagcagaaatgctattcttgtggagaattcggacacattcaaaaagactgcaccaaagtgaagtgctataggtgtggtgaaactggtcatgtagccatcaactgcagcaagacaagtgaagtcaactgttaccgctgtggcgagtcagggcaccttgcacgggaatgcacaattgaggctacagcc

SEQ ID NO: 7032 - DNA, 510 bp, Homo sapiens
  source 1..510: mol_type = genomic DNA
atgagcagcaatgagtgcttcaagtgtggacgatctggccactgggcccgggaatgtcctactggtggaggccgtggtcgtggaatgagaagccgtggcagaggtttccagtttgtttcctcgtctcttccagatatttgttatcgctgtggtgagtctggtcatcttgccaaggattgtgatcttcaggaggatgcctgctataactgcggtagaggtggccacattgccaaggactgcaaggagcccaagagagagcgagagcaatgctgctacaactgtggcaaaccaggccatctggctcgtgactgcgaccatgcagatgagcagaaatgctattcttgtggagaattcggacacattcaaaaagactgcaccaaagtgaagtgctataggtgtggtgaaactggtcatgtagccatcaactgcagcaagacaagtgaagtcaactgttaccgctgtggcgagtcagggcaccttgcacgggaatgcacaattgaggctacagcc

SEQ ID NO: 7033 - DNA, 999 bp, Homo sapiens
  source 1..999: mol_type = genomic DNA
atggcagaaacatcgccagagccttctgggcagcttgttgtacactcagacgctcacagtgacactgtgctggccagttttgaggatcagaggaagaaaggcttcctctgtgacattactttaatcgtggagaatgtacatttccgggcccacaaagccttacttgctgccagtagtgaatacttctcaatgatgtttgcagaagagggggaaatcggccaatccatttatatgctggaaggcatggttgcagacacctttggtatcctgctggaatttatctacacaggttatctccatgccagtgagaaaagtacagaacaaatcctggctactgctcagttcttaaaagtctatgacctggtaaaggcttacacagacttccaaaataatcatagctccccaaagccaacaactttgaacactgctggtgccccagtggttgttatctctaataagaaaaacgatcctccaaagcggaaacggggaagaccaaaaaaagtcaatacattgcaggaggagaaatcagaactggctgcagaggaagaaatacagttaagagtgaacaattcagttcagaatagacaaaactttgtggttaaaggagacagtggtgtactgaatgagcaaattgcagcaaaagaaaaggaagaatcggagcctacttgtgagccaagtagagaggaggaaatgccagttgaaaaagatgagaactatgatcccaagaccgaggatggccaggcaagccagagtcgatacagcaagcggaggatttggagatccgtcaaacttaaagattacaaacttgttggggatcaagaggaccatggttcagccaagaggatctgtggaaggagaaagcgccctggaggccctgaggcccgctgtaaagactgtggcaaggtctttaagtacaatcactttttagcaatccaccagaggagccacacaggtaatgatgttttcaaagctgattgcagtgtgttgcagaattgggag

SEQ ID NO: 7034 - DNA, 2091 bp, Homo sapiens
  source 1..2091: mol_type = genomic DNA
atggcagaaacatcgccagagccttctgggcagcttgttgtacactcagacgctcacagtgacactgtgctggccagttttgaggatcagaggaagaaaggcttcctctgtgacattactttaatcgtggagaatgtacatttccgggcccacaaagccttacttgctgccagtagtgaatacttctcaatgatgtttgcagaagagggggaaatcggccaatccatttatatgctggaaggcatggttgcagacacctttggtatcctgctggaatttatctacacaggttatctccatgccagtgagaaaagtacagaacaaatcctggctactgctcagttcttaaaagtctatgacctggtaaaggcttacacagacttccaaaataatcatagctccccaaagccaacaactttgaacactgctggtgccccagtggttgttatctctaataagaaaaacgatcctccaaagcggaaacggggaagaccaaaaaaagtcaatacattgcaggaggagaaatcagaactggctgcagaggaagaaatacagttaagagtgaacaattcagttcagaatagacaaaactttgtggttaaaggagacagtggtgtactgaatgagcaaattgcagcaaaagaaaaggaagaatcggagcctacttgtgagccaagtagagaggaggaaatgccagttgaaaaagatgagaactatgatcccaagaccgaggatggccaggcaagccagagtcgatacagcaagcggaggatttggagatccgtcaaacttaaagattacaaacttgttggggatcaagaggaccatggttcagccaagaggatctgtggaaggagaaagcgccctggaggccctgaggcccgctgtaaagactgtggcaaggtctttaagtacaatcactttttagcaatccaccagaggagccacacaggggagcgacctttcaaatgtaatgagtgtggaaaaggctttgcccagaagcactcgctacaggtccacaccaggatgcacacaggcgagcggccgtacacctgcaccgtgtgcagcaaggctctgaccaccaagcactcactgctggagcacatgagcctgcactcaggacagaagtcttttacctgtgatcaatgcggaaaatatttcagccagaacagacagctaaagagccattaccgagttcatacaggccactcattaccggaatgcaaagactgccatcgcaaattcatggatgtgtctcagctaaagaaacatctgcgaacacacacaggtgagaagccatttacttgtgaaatctgtggcaaatctttcacagcaaagagttctcttcagacccacatcagaatccatcgaggagaaaagccatactcctgtggcatttgtggcaaatccttctctgactccagtgccaaaaggagacactgcattctacacactggcaagaagcctttctcctgccctgagtgtaacttacagtttgctcgcttagacaacttgaaggctcacttgaaaattcatagcaaggagaagcatgcttcagatgccagcagcatttctggcagtagtaatacagaagaggtcaggaatattcttcagctacagccatatcaactctctacctcgggagagcaggaaattcagcttctcgtaaccgattctgtacataacatcaatttcatgcccggtcctagccagggaatcagcattgtgactgcagagagttcccaaaacatgactgcagaccaggctgctaatcttaccctgctcacgcagcagccagagcaactgcagaatttaattctttcagctcaacaggagcaaacagaacacattcagagcctcaatatgattgaaagccagatggggccctcacaaacagagccagtgcacgtgatcactctgtccaaggaaacactggaacatcttcatgcccatcaagagcaaacagaggagctccatttagctacaagtacttcagatccagctcagcacctgcagctgacacaggagcctggtccgccaccacccactcaccacgtgccccagccaacgccacttggccaggagcagagc

SEQ ID NO: 7035 - DNA, 1560 bp, Homo sapiens
  source 1..1560: mol_type = genomic DNA
atggctctgagctctcgggcgcgtgccttctccgtggaagccttggtggggagacccagcaaaagaaaactccaagacccaatacaggcggagcagcctgagctgcgggagaaaaagggcggagaggaagaggaggagagaaggagcagcgctgcagggaagagcgagccgcttgaaaaacaacctaagacagagccctcaacatctgcttcctctggctgcggcagcgacagcggctacggcaacagctctgaaagtctggaagagaaagatattcaaatggagcttcaaggatctgaactgtggaaaagattccatgacatcgggactgagatgatcattactaaagcgggcaggcggatgttcccctctgttcgggtcaaggtgaaagggttggatccagggaagcagtaccatgtggccatcgatgtggtgccggtggattccaaacgctataggtacgtctatcacagctcacagtggatggtagctgggaatacagaccatttgtgcatcattcctagattctatgttcacccggactcaccctgctcgggagagacctggatgcggcagatcatcagctttgatcgcatgaaactcaccaacaatgagatggatgacaaaggccacatcattctgcaatccatgcataagtacaaaccccgagtgcacgtgatagagcaaggcagcagtgttgacctgtcccagattcagtccttgcccactgaaggtgttaaaacattctcctttaaagaaactgagttcaccacagtaacggcttaccaaaaccaacagattacgaaactaaaaatagaaagaaatccttttgctaaaggatttagagatactggaagaaacaggggtgtattggatgggcttttagagacctacccatggaggccttctttcactctcgattttaaaacctttggcgcagacacacaaagtggaagcagtggctcatctccagtgacctctagtggaggggccccctctcctttgaactccttactttctccactttgcttttcacctatgtttcatttacctacaagctcccttggaatgccctgtccagaggcatacctgcccaatgtcaacctgcctctatgctacaagatttgtccaactaatttttggcaacagcaacctcttgttttaccggctcctgaaagactagcaagcagcaacagttctcagtctttagccccactcatgatggaagtgcctatgttatcttccctgggggtcaccaattcaaaaagcggttcatctgaagactccagtgatcagtatctacaagcacctaattctaccaatcaaatgttatatggattacagtcacctggaaatatttttctgccaaactccatcaccccagaagcacttagttgctcctttcatccttcctatgacttttatagatacaatttctctatgccatctagactgataagtggttccaaccatcttaaagtgaatgacgacagtcaagtttcttttggagaaggcaaatgtaatcatgttcattggtatccagcaattaaccattacctt

SEQ ID NO: 7036 - DNA, 1098 bp, Homo sapiens
  source 1..1098: mol_type = genomic DNA
atgagtgaagaggagcaaggctccggcactaccacgggctgcgggctgcctagtatagagcaaatgctggccgccaacccaggcaagaccccgatcagccttctgcaggagtatgggaccagaatagggaagacgcctgtgtacgaccttctcaaagccgagggccaagcccaccagcctaatttcaccttccgggtcaccgttggcgacaccagctgcactggtcagggccccagcaagaaggcagccaagcacaaggcagctgaggtggccctcaaacacctcaaaggggggagcatgctggagccggccctggaggacagcagttctttttctcccctagactcttcactgcctgaggacattccggtttttactgctgcagcagctgctaccccagttccatctgtagtcctaaccaggagcccccccatggaactgcagccccctgtctcccctcagcagtctgagtgcaaccccgttggtgctctgcaggagctggtggtgcagaaaggctggcggttgccggagtacacagtgacccaggagtctgggccagcccaccgcaaagaattcaccatgacctgtcgagtggagcgtttcattgagattgggagtggcacttccaaaaaattggcaaagcggaatgcggcggccaaaatgctgcttcgagtgcacacggtgcctctggatgcccgggatggcaatgaggtggagcctgatgatgaccacttctccattggtgtgggctcccgcctggatggtcttcgaaaccggggcccaggttgcacctgggattctctacgaaattcagtaggagagaagatcctgtccctccgcagttgctccctgggctccctgggtgccctgggccctgcctgctgccgtgtcctcagtgagctctctgaggagcaggcctttcacgtcagctacctggatattgaggagctgagcctgagtggactctgccagtgcctggtggaactgtccacccagccggccactgtgtgtcatggctctgcaaccaccagggaggcagcccgtggtgaggctgcccgccgtgccctgcagtacctcaagatcatggcaggcagcaag

SEQ ID NO: 7037 - DNA, 1152 bp, Homo sapiens
  source 1..1152: mol_type = genomic DNA
atgtgtgtcccagtcctgaaagatattttgcatctagctgatctccctgggcagaaaccatacttggttggagaatgtacaaaccatcaccagcaccagaagcatcacagtgcaaagaaatccttgaagagggacatggacagagcctcatatgtgaagtgctgcctattctgtatgtcattgaagccctttcgcaaatgggaggttggaaaggaccttccagccatgttgcggcttctgaggtccctggtctttcctggaggcaagaaacccggcacaattactgaatgtggggaggacattcgcagtcaaaaaagtcattacaagtcaggtgaatgtgggaaggcttccaggcacaaacacactcctgtttaccatccaagagtctacactggaaaaaagctttatgagtgtagcaaatgtgggaaagccttccgtggcaagtactcacttgttcagcaccagagagtccatactggagaaaggccttgggagtgcaatgaatgtggaaaattctttagccaaacctcccacctgaatgatcatcggagaatccacaccggagaaaggccttatgagtgcagcgaatgtggaaaattatttagacaaaactccagccttgttgaccaccagaaaatacacactggagcaaggccttatgagtgtagccagtgtgggaaatcctttagccaaaaagccacccttgttaaacaccaaagagttcacactggagaaaggccttataagtgtggtgaatgtgggaattcctttagtcaaagtgccattcttaatcaacaccgaagaattcacactggagcaaagccttatgagtgtggccagtgtgggaaatcctttagtcaaaaagctaccctcattaaacaccagagagttcacactggagaaaggccttataagtgtggtgactgtgggaaatcctttagtcaaagctccatccttattcaacaccggagaattcatactggagcaaggccttatgagtgtggccagtgtggaaagtcctttagccaaaagtctggtctcattcaacaccaagtggttcacactggagaaaggccttatgagtgcaacaaatgtgggaattcctttagccaatgctccagcctcatacatcaccaaaaatgtcataacaca

SEQ ID NO: 7038 - DNA, 885 bp, Homo sapiens
  source 1..885: mol_type = genomic DNA
atggagaaaatgtcccgaccgctccccctgaatcccacctttatcccgcctccctacggcgtgctcaggtccctgctggagaacccgctgaagctcccccttcaccacgaagacgcatttagtaaagataaagacaaggaaaagaagctggatgatgagagtaacagcccgacggtcccccagtcggcattcctggggcctaccttatgggacaaaacccttccctatgacggagatactttccagttggaatacatggacctggaggagtttttgtcagaaaatggcattccccccagcccatctcagcatgaccacagccctcaccctcctgggctgcagccagcttcctcggctgccccctcggtcatggacctcagcagccgggcctctgcaccccttcaccctggcatcccatctccgaactgtatgcagagccccatcagaccaggtcagctgttgccagcaaaccgcaatacaccaagtcccattgatcctgacaccatccaggtcccagtgggttatgagccagacccagcagatcttgccctttccagcatccctggccaggaaatgtttgaccctcgcaaacgcaagttctctgaggaagaactgaagccacagcccatgatcaagaaagctcgcaaagtcttcatccctgatgacctgaaggatgacaagtactgggcaaggcgcagaaagaacaacatggcagccaagcgctcccgcgacgcccggaggctgaaagagaaccagatcgccatccgggcctcgttcctggagaaggagaactcggccctccgccaggaggtggctgacttgaggaaggagctgggcaaatgcaagaacatacttgccaagtatgaggccaggcacgggcccctg

SEQ ID NO: 7039 - DNA, 1200 bp, Homo sapiens
  source 1..1200: mol_type = genomic DNA
atggttcactccagcatgggggctccagaaataagaatgtctaagcccctggaggccgagaagcaaggtctggactccccatcagagcacacagacaccgaaagaaatggaccagacactaatcatcagaacccccaaaataagacctccccattctccgtgtccccaactggccccagtacaaagatcaaggctgaagaccccagtggcgattcagccccagcagcacccctgccccctcagccggcccagcctcatctgccccaggcccaactcatgttgacgggcagccagctagctggggacatacagcagctcctccagctccagcagctggtgcttgtgccaggccaccacctccagccacctgctcagttcctgctaccgcaggcccagcagagccagccaggcctgctaccgacaccaaatctattccagctacctcagcaaacccagggagctcttctgacctcccagccccgggccgggcttcccacacagccccccaaatgcttggagccaccatcccaccccgaggagcccagtgatctggaggagctggagcaattcgcccgcaccttcaagcaacgccgcatcaagctgggcttcacgcagggtgatgtgggcctggccatgggcaagctctacggcaacgacttcagccagacgaccatttcccgcttcgaggccctcaacctgagcttcaagaacatgtgcaaactcaagcccctcctggagaagtggctcaacgatgcagagactatgtctgtggactcaagcctgcccagccccaaccagctgagcagccccagcctgggtttcgacggcctgcccggccggagacgcaagaagaggaccagcatcgagacaaacgtccgcttcgccttagagaagagttttctagcgaaccagaagcctacctcagaggagatcctgctgatcgccgagcagctgcacatggagaaggaagtgatccgcgtctggttctgcaaccggcgccagaaggagaaacgcatcaacccctgcagtgcggcccccatgctgcccagcccagggaagccggccagctacagcccccatatggtcacaccccaagggggcgcggggaccttaccgttgtcccaagcttccagcagtctgagcacaacagcacaaaccccagccctcaaggcagccactcggctatcggcttgtcaggcc

SEQ ID NO: 7040 - DNA, 1689 bp, Homo sapiens
  source 1..1689: mol_type = genomic DNA
atggctaatgcagaagtgagtgtcccagtgggggatgtggttgtggtacctactgaaggaaatgaaggggagaatcctgaagacactaaaacccaagtgattttgcagttacagcctgtgcaacaagggatttatgaagctgggtcggagaacaacacggcagttgtagcagtagaaactcacacgatacacaaaattgaagaagggattgatacaggcactatagaagcaaatgaggatatggaaattgcttaccccataacttgtggggagagcaaagccatcctcctctggaagaagtttgtatgtccaggaataaacgtgaagtgtgtcaagttcaatgatcagttgatcagccccaagcactttgttcatctggctggcaagtccactctgaaggactggaagagagctattcgtctgggtgggatcatgctcaggaaaatgatggactccggacagattgatttttaccaacatgacaaagtttgctccaatacctgcagaagcaccaaatttgatcttctgatcagcagtgcaagagctccagtgccaggacagcagacaagtgtggtgcagacacccacttcggctgatggtagcatcacgcagattgccatctcagaagagagcatggaagaggcagggctggaatggaactcagctctcaccgctgctgtcaccatggccacggaggagggtgtaaagaaagactcagaggaaatttcagaggacactttgatgttctggaaaggaatagctgatgtagggctgatggaagaggttgtctgcaatatacagaaggaaatagaggagctactcaggggagttcagcagcggctcatccaggctcccttccaagtcacagatgctgctgttctcaacaatgtagcacacacatttggcctaatggacacagtcaagaaggttttagacaacagaaggaaccaagtagagcagggagaagaacagtttctctatactctgacagacttggaacgccagttggaggagcagaagaagcaaggccaggatcacaggctgaaatctcagacagttcaaaatgtggtactgatgcctgtgagcactcctaagcctccaaaaaggccccggctccagcggccagcctccaccactgtcttgagcccttctcctcctgtccagcagcctcagttcacagtcatctcacccatcaccatcaccccagtgggtcagtcattttccatgggcaatattccagtggccaccctcagccagggctccagtcctgtgactgtccacacactgccttctggccctcagctcttccgctatgccacagtggtctcctctgccaagagcagctcaccagacacagtgaccatccacccttcatctagcttggcgctgctgagctctactgccatgcaggatgggagtacactgggcaacatgaccaccatggttagccctgtggaattggtggccatggagtccggcctaacctcggcaattcaggctgttgaaagcacctcagaggatgggcagaccatcattgagattgatccagccccggacccagaagctgaagatactgagggcaaagcagtcatcttggagacagagctgaggactgaggagaaagttgtggctgagatggaagaacaccagcatcaagttcacaatgtggagattgtggtcttagaggat

SEQ ID NO: 7041 - DNA, 948 bp, Homo sapiens
  source 1..948: mol_type = genomic DNA
atggcgtctaccagccgtttggatgctcttccaagagtcacatgtccaaaccatccagatgcgattttagtggaggactacagagccggtgatatgatctgtcctgaatgtggcttggttgtaggtgaccgggttattgatgtgggatctgaatggcgaactttcagcaatgacaaagcaacaaaagatccatctcgagttggagattctcagaatcctcttctgagtgatggagatttgtctaccatgattggcaagggcacaggagctgcaagttttgacgaatttggcaattctaagtaccagaatcggagaacaatgagcagttctgatcgggcaatgatgaatgcattcaaagaaatcactaccatggcagacagaatcaatctacctcgaaatatagttgatcgaacaaataatttattcaagcaagtatatgaacagaagagcctgaagggaagagctaatgatgctatagcttctgcttgtctctatattgcctgtagacaagaaggggttcctaggacatttaaagaaatatgtgccgtatcacgaatttctaagaaagaaattggtcggtgttttaaacttattttgaaagcgctagaaaccagtgtggatttgattacaactggggacttcatgtccaggttctgttccaacctttgtcttcctaaacaagtacagatggcagctacacatatagcccgtaaagctgtggaattggacttggttcctgggaggagccccatctctgtggcagcggcagctatttacatggcctcacaggcatcagctgaaaagaggacccaaaaagaaattggagatattgctggtgttgctgatgttacaatcagacagtcctatagactgatctatcctcgagccccagatctgtttcctacagacttcaaatttgacaccccagtggacaaactaccacagcta

SEQ ID NO: 7042 - DNA, 642 bp, Homo sapiens
  source 1..642: mol_type = genomic DNA
atggcacatgtttcttcagaaactcaagatgtttcccccaaagatgaattaactgcttcagaagcctccactaggtctccattgtgtgaacacaccttccctggggactcagacttacggtcaatgattgaagaacatgcttttcaggttttgtcacaaggatccttgttagaaagtccaagttacacagtttgtgtctctgagccagataaagatgatgattttctttctctgaactttcccaggaaactttggaaaatagtggaaagtgaccaattcaagtctatttcatgggatgagaatggaacttgcatagtgattaatgaagaactcttcaagaaagaaattttggaaacaaaggctccttacagaatatttcaaactgatgctatcaaaagttttgttcgacagctcaacctttatggatttagtaaaattcaacagaattttcaaagatctgcctttctagccacctttctgtcagaagagaaagaatcgtctgtcttaagcaagcttcatgtctttgtgtttcaccacagtctatttggagcaacattcggagaacatcactttcagccatgccctttaccatctggtaacaaggctcccatttctacttggagtggagattcctggttgctg

SEQ ID NO: 7043 - DNA, 1020 bp, Homo sapiens; identical to SEQ ID NO: 4374
  source 1..1020: mol_type = genomic DNA

SEQ ID NO: 7044 - DNA, 756 bp, Homo sapiens
  source 1..756: mol_type = genomic DNA
atgcagttgccccccgcgctgtgcgcccgcctcgctgcggggcccggggcggcggagccactgcctgtagagcgggatcccgcggctggggccgcgccctttcgcttcgttgcgcgccccgtgcgcttcccgcgggagcaccagttcttcgaggatggggacgtgcagcgccacctctacctccaggacgtgatcatgcaggtggccgacgtgcctgagaagcccagggtgcccgcgtttgcctgccaggtggccggctgctgccaggtgttcgatgccctggacgactacgagcaccactaccacacgctgcacggaaatgtttgctccttttgcaagcgggccttcccttccggacacctgctggacgcccacatcctggagtggcacgattcgctcttccagatcctgtctgagaggcaggacatgtatcagtgcttggtagaaggctgcacagagaagttcaagaccagcagagaccggaaggatcacatggtgaggatgcacctgtaccccgcggacttccggtttgataagccaaagaaaagcagaagcccagcctcagcagaagccccaggggacagtggagagcggtcagaaggggaggccatggaaatctgctctgagcctgtggcagcctcccctgcaccggcaggtgagaggcggatctacagacatagaataccctctaccatctgctttggtcagggtgccgctcgaggatttaaaagcaacaagaagaaaaccaaacaatgc

SEQ ID NO: 7045 - DNA, 750 bp, Homo sapiens
  source 1..750: mol_type = genomic DNA
atgaatgtgcggagggtggaaagcatttcggctcagctggaggaggccagctctacaggcggtttcctgtacgctcagaacagcaccaagcgcagcattaaagagcggctcatgaagctcttgccctgctcagctgccaaaacgtcgtctcctgctattcaaaacagcgtggaagatgaactggagatggccaccgtcaggcatcggcccgaagcccttgagcttctggaagcccagagcaaatttaccaagaaagagcttcagatcctttacagaggatttaagaacgaatgccccagtggtgttgttaatgaagaaaccttcaaagagatttactcgcagttctttccacagggagactctacaacatatgcacattttctgttcaatgcatttgatacagaccacaatggagctgtgagtttcgaggatttcatcaaaggtctttccattttgctccgggggacagtacaagaaaaactcaattgggcatttaatctgtatgacataaataaagatggctacatcactaaagaggaaatgcttgatataatgaaagcaatatacgatatgatgggtaaatgtacatatcctgtcctcaaagaagatgctcccagacaacacgttgaaacattttttcagaaaatggacaaaaataaagatggggttgttaccatagatgagttcattgaaagctgccaaaaagatgaaaacataatgcgctccatgcagctctttgaaaatgtgatt

SEQ ID NO: 7046 - DNA, 249 bp, Homo sapiens
  source 1..249: mol_type = genomic DNA
atggggcgcagaaagtcaaaacgaaagccgcctcccaagaagaagatgacaggcaccctcgagacccagttcacctgccccttctgcaaccacgagaaatcctgtgatgtgaaaatggaccgtgcccgcaacaccggagtcatctcttgtaccgtgtgcctagaggaattccagacgcccataacgtatctgtcagaacccgtggatgtgtacagtgattggatagacgcctgcgaggcggccaatcag

SEQ ID NO: 7047 - DNA, 825 bp, Homo sapiens
  source 1..825: mol_type = genomic DNA
atggctgtggaatctggagtgatttcaaccctgatacctcaggatcctccggaacaagaactaatactagtgaaagtagaagataacttttcctgggatgagaaatttaagcagaatgggagtactcaatcctgccaagaattgtttcgtcagcaattcagaaaattttgctaccaggagacacctgggccccgggaggctctgagccgactccaggaactttgctatcagtggctaatgccagagttgcacacaaaggagcagatcttagaactgctggtactggagcagttcctgagcattctgcctgaggagctgcagatctgggttcagcaacataatccagaaagcggcgaggaagctgtgaccctgttggaggatttagagagggagtttgatgacccagggcagcaggtcccagctagtccacagggaccagcagtgccatggaaggatttaacatgtctcagagcatcccaagagtcaacagacatccacctccagcccttaaagacacagctgaaatcctggaaaccatgcctttcccctaaaagtgattgtgagaacagtgaaacagcaacaaaagagggcatctcagaagaaaaatcacagggactccctcaggaaccttcatttcgaggaattaagttgtccagacctcccaaagcttcttcagctatccgttgggaatgtgtttctccaggaagttttcccggcgatatcatagctgctgaggctacacattcaacaatttcttgctttgccatcaacactttgccagccaccatcctgccatctaaaaatgtgaatagaaagtatttttcc

SEQ ID NO: 7048 - DNA, 1227 bp, Homo sapiens
  source 1..1227: mol_type = genomic DNA
atggagactagaccacagagcaaggattcaacttcagtgcaagatttttccaaagcagaatcatgcaaagttgcaataatagacagactgacacggaatagtgtctatgactctaacttggaagcagcccttgaatgtgaaaattggttagagaatcagcaaggaaatcaggagagacatttgagagaaatgttcactcacatgaattcactctctgaggaaacagaccataagcatgatgtatactggaaaagcttcaatcagaaatctgtccttatcactgaagacagagttcccaaaggatcttatgccttccatacacttgaaaaaagcttgaaacaaaaatcaaacttaatgaaaaagcagagaacttataaagagaaaaaacctcataaatgtaatgattgtggtgaactcttcacctaccattcagtgcttattcgacaccagagagtccatactggagagaaaccctatacctgcaatgaatgtgggaaatcttttagccacagagctaatttaactaaacaccagagaactcatactagaattctctttgaatgcagtgaatgcaagaaaaccttcacagaaagctcatcccttgcaacacatcagagaattcacgttggagagagaccttatgaatgcaatgaatgtgggaaaggttttaatcgaagtacacatcttgtgcagcatcagttgattcatactggagtgaagccttatgaatgtaatgaatgtgataaagcttttattcattcatcagcactcattaaacatcaaagaactcatactggagagaaaccttataaatgtcaagaatgtgggaaagcctttagccattgctcatccctaactaagcatcagagagttcatactggagaaaagccatatgaatgcagtgaatgtggaaaaacttttagtcagagcacacatcttgttcaacatcagagaattcacactggagagaaaccctatgagtgtaatgaatgtgggaaaaccttcagccggagctccaattttgctaaacatcaaagaattcatattggaaagaaaccgtacaaatgtagcgagtgtggaaaagccttcattcattcatcagctctcattcaacatcagagaactcataccggagagaaaccctttagatgtaatgagtgtgggaaaagctttaagtgcagttcatctctcatcagacatcaaagagttcacactgaagagcaaccc

SEQ ID NO: 7049 - DNA, 1317 bp, Homo sapiens
  source 1..1317: mol_type = genomic DNA
atgctccaaacaacttggcctcaggagtcagtgacctttgaggatgtggctgtttacttcacccagaatcaatgggccagcctcgaccctgcgcagagggccctgtacggggaggtgatgctggagaattatgcaaatgtggcttctctggtagcgtttccattccccaaacctgctctgatctcccacctggagagaggggaagcaccatggggcccagatccctgggacaccgagattctgagaggcatcagtcaaggtggtgagtcctggatcaaaaatgaagggctagttataaagcaggaagcctctgaagaaacagagttgcacagaatgccagtaggaggacttctcaggaacgtttctcagcactttgattttaaaaggaaggcactgaagcagactttcaatctaaatccaaatctgatacttcgaggtggaatgaagttctatgaatgtaaagaatgtgggaaaatcttccgatataactcaaagcttattcggcatcagatgagtcatactggggaaaagccctttaagtgtaaggagtgtggcaaagctttcaagtccagctatgattgtattgtacatgagaaaaaccacattggagaagggccctatgaatgtaaggagtgtggcaaaggtttgagttccaacacagccttgactcaacatcagaggatccacactggagagaaaccctatgaatgtaaagagtgtggaaaggctttccgtaggagtgcggcatacctgcagcatcagagattacacacgggagagaaactctataaatgtaaggaatgttggaaagctttcggttgtaggtcactttttattgtccatcagagaattcatactggggagaaaccttatcaatgtaaggagtgtggcaaagccttcacccagaaaatagcctccattcagcatcagagagttcacactggggagaagccttatgaatgtaaggtgtgtgggaaagccttcaaatggtatggaagttttgttcagcatcagaaattgcaccctgtggagaagaagccagtcaaggtccttgggccatccctggtcagtccccagtgctcctctccagccatacctcctgttcttctccagggatcctgttctgcttcagccgtagctgtgccttcactgacctttccacatgctgtgctcattcctacctctgggaattttttcatgctgctgcctacatctggaataccttcttcatctgcccaaatagtgcgtgtcttccagggtcttactcccactgtgaaaccttccccagttattctcaccccttcttctcactcctca

SEQ ID NO: 7050 - DNA, 1635 bp, Homo sapiens
  source 1..1635: mol_type = genomic DNA
atggctagagaaccgagaaaaaacgcagccctggacgcccagtctgcagaagaccagacggggctcctgaccgtgaaggtggagaaggaggaagcctccgccttgacggcggaggtgagagcaccctgcagccctgctcggggccccgaacgctcccgccagcgcttccgaggcttccgctacccggaggctgcgggcccccgcgaggcgttgagccggctccgagaactctgcggacaatggctgcagcctgagatgcacagcaaggagcagatcctggagctgctggtgctggagcagttcctgaccatcctgccggggaatctgcagagctgggtgcgggagcagcatccagagagcggggaggaggtggtggtgctattggagtatttggagaggcagctggatgagccggcgccgcaggttcccgttggtgaccaggggcaagaactgctctgttgcaagatggcactattgacacaaactcaagggtctcaaagtagccagtgccagccaatgaaggctctgttcaagcatgaatctctgggatcccagcccttacacgatagagttctccaggttcctgggcttgcccagggagggtgctgcagagaagatgcaatggtagcttccaggctcactccagggtcccagggtttgctgaaaatggaagatgtggccctgaccctcactcctgggtggacacagctggattcatctcaggtgaacctctacagagatgaaaagcaggagaaccatagcagcctggtctcccttggtggtgaaatacagactaagagcagggacttgcctccagtcaagaagcttccagaaaaggagcatgggaagatatgccacctgagggaagacattgcccagattcctacacatgcagaagctggtgaacaggagggcaggttacaaagaaagcagaaaaatgccatagggagtaggcgacattattgccatgaatgtggaaagagttttgctcaaagttcaggcctgactaaacacaggagaatccacactggtgagaaaccctatgaatgtgaagactgtggaaagaccttcattgggagctctgcccttgtcattcatcagagagtccacactggtgagaagccatatgagtgtgaagaatgtggtaaggtcttcagtcacagctcaaaccttatcaaacaccagagaacccacactggggagaagccctatgagtgtgatgactgtgggaagaccttcagccagagctgcagcctccttgaacatcacaaaattcatactggggagaagccataccagtgcaatatgtgtggcaaagcctttaggcggaattcacatctcctgagacatcagaggattcatggtgataaaaatgttcagaatcctgagcacggggagtcctgggaaagtcagggtaggacggaaagccagtgggaaaatactgaggctcccgtgtcttataaatgtaatgagtgtgagagaagtttcacacggaatagaagtcttattgaacatcagaaaatccacactggtgagaaaccctatcagtgtgacacatgtggaaaaggtttcactcgaacttcataccttgttcaacatcagagaagccatgtagggaaaaaaactctttcacag

SEQ ID NO: 7051 - DNA, 2079 bp, Homo sapiens
  source 1..2079: mol_type = genomic DNA
atggcgacgtcgggggcgaacgggcctggttcggccacggcctcggcttccaatccgcgcaaatttagtgagaagattgcgctgcagaagcagcgtcaggccgaggagacggcggccttcgaggaggtgatgatggacatcggctccacccggttacaggcccaaaaactgcgactggcatacacaaggagctctcattatggtgggtctctgcccaatgttaaccagattggctctggcctggccgagttccagagccccctccactcacctttggattcatctcggagcactcggcaccatgggctggtggaacgggtgcagcgagatcctcgaagaatggtgtccccacttcgccgatacacccgccacattgacagctctccctatagtcctgcctacttatctcctcccccagagtctagctggcgaaggacgatggcctggggcaatttccctgcagagaaggggcagttgtttcgactaccatctgcacttaacaggacaagctctgactctgcccttcatacaagtgtgatgaaccccagtccccaggatacctacccaggccccacacctcccagcatcctgcccagccgacgtgggggtattctggatggtgaaatggaccccaaagtacctgctattgaggagaacttgctagatgacaagcatttgctgaagccatgggatgctaagaagctatcctcatcctcttcccgacctcggtcctgtgaagtccctggaattaacatctttccatctcctgaccagcctgccaatgtgcctgtcctcccacctgccatgaacacggggggctccctacctgacctcaccaacctgcactttcccccaccactgcccacccccctggaccctgaagagacagcctaccctagcctgagtgggggcaacagtacctccaatttgacccacaccatgactcacctgggcatcagcaggggcatgggcctgggcccaggctatgatgcaccaggacttcattcacctctcagccacccatccctgcagtcctccctaagcaatcccaacctccaggcttccctgagcagtcctcagccccagcttcagggctcccacagccacccctctctgcctgcctcctccttggcccgccatgtactgcccaccacctccctgggccacccctcactcagtgctccggctctttcctcctcctcttcctcctcctccacttcatctcctgttttgggcgccccctcttaccctgcttctacccctggggcctccccccaccaccgccgtgtgcccctcagccccctgagtttgctcgcgggcccagccgacgccagaaggtcccaacagcagctgcccaaacagttttcgccaacaatgtcacccaccttgtcttccatcactcagggcgtccccctggataccagtaaactgtccactgaccagcggttacccccatacccatacagctccccaagtctggttctgcctacccagccccacaccccaaagtctctacagcagccagggctgccctctcagtcttgttcagtgcagtcctcaggtgggcagcccccaggcaggcagtctcattatgggacaccgtacccacctgggcccagtgggcatgggcaacagtcttaccaccggccaatgagtgacttcaacctggggaatctggagcagttcagcatggagagcccatcagccagcctggtgctggatccccctggcttttctgaagggcctggatttttagggggtgaggggccaatgggtggcccccaggatccccacaccttcaaccaccagaacttgacccactgttcccgccatggctcagggcctaacatcatcctcacaggggactcctctccaggtttctctaaggagattgcagcagccctggccggagtgcctggctttgaggtgtcagcagctggattggagctagggcttgggctagaagatgagctgcgcatggagccactgggcctggaagggctaaacatgctgagtgacccctgtgccctgctgcctgatcctgctgtggaggagtcattccgcagtgaccggctccaa

SEQ ID NO: 7052 - DNA, 1629 bp, Homo sapiens
  source 1..1629: mol_type = genomic DNA
atggccgcggccaaggccgagatgcagctgatgtccccgctgcagatctctgacccgttcggatcctttcctcactcgcccaccatggacaactaccctaagctggaggagatgatgctgctgagcaacggggctccccagttcctcggcgccgccggggccccagagggcagcggcagcaacagcagcagcagcagcagcgggggcggtggaggcggcgggggcggcagcaacagcagcagcagcagcagcaccttcaaccctcaggcggacacgggcgagcagccctacgagcacctgaccgcagagtcttttcctgacatctctctgaacaacgagaaggtgctggtggagaccagttaccccagccaaaccactcgactgccccccatcacctatactggccgcttttccctggagcctgcacccaacagtggcaacaccttgtggcccgagcccctcttcagcttggtcagtggcctagtgagcatgaccaacccaccggcctcctcgtcctcagcaccatctccagcggcctcctccgcctccgcctcccagagcccacccctgagctgcgcagtgccatccaacgacagcagtcccatttactcagcggcacccaccttccccacgccgaacactgacattttccctgagccacaaagccaggccttcccgggctcggcagggacagcgctccagtacccgcctcctgcctaccctgccgccaagggtggcttccaggttcccatgatccccgactacctgtttccacagcagcagggggatctgggcctgggcaccccagaccagaagcccttccagggcctggagagccgcacccagcagccttcgctaacccctctgtctactattaaggcctttgccactcagtcgggctcccaggacctgaaggccctcaataccagctaccagtcccagctcatcaaacccagccgcatgcgcaagtaccccaaccggcccagcaagacgcccccccacgaacgcccttacgcttgcccagtggagtcctgtgatcgccgcttctcccgctccgacgagctcacccgccacatccgcatccacacaggccagaagcccttccagtgccgcatctgcatgcgcaacttcagccgcagcgaccacctcaccacccacatccgcacccacacaggcgaaaagcccttcgcctgcgacatctgtggaagaaagtttgccaggagcgatgaacgcaagaggcataccaagatccacttgcggcagaaggacaagaaagcagacaaaagtgttgtggcctcttcggccacctcctctctctcttcctacccgtccccggttgctacctcttacccgtccccggttactacctcttatccatccccggccaccacctcatacccatcccctgtgcccacctccttctcctctcccggctcctcgacctacccatcccctgtgcacagtggcttcccctccccgtcggtggccaccacgtactcctctgttccccctgctttcccggcccaggtcagcagcttcccttcctcagctgtcaccaactccttcagcgcctccacagggctttcggacatgacagcaaccttttctcccaggacaattgaaatttgc

SEQ ID NO: 7053 - DNA, 1596 bp, Homo sapiens
  source 1..1596: mol_type = genomic DNA
atggcccttcgatcagtgatgttcagtgatgtatccatagacttctctccagaagagtgggaatacctggacttggaacaaaaggacttgtacagagatgtcatgttggagaactacagcaacttggtctcactgggatgcttcatttctaaaccagatgtgatttcctcattggagcaaggaaaagagccttggaaagttgtgaggaaaggaagaagacaatatccagatttggagaccaagtatgagaccaagaagttatctttagaaaatgacatttatgaaataaatttatcccagtggaagataatggaaagaattgaaaaccatggccttaagggtctcattttaaaaaatgattgggaatccacaggaaaaattgaaggacaggagagacctcaagaaggatacttcagtagtgtgaaaatgccatctgaaaaggtgtcctcttaccagaaacgcacatctgttactccacatcagagacttcattttgttgataaaccctatgaatgtaaggaatgtgggaaggcgttcagagtgcgccaacagcttacttttcatcacagaattcatactggtgaaaaaccgtatgaatgtaaggaatgtgggatggccttcagacagactgcacaccttactcgacatcagagacttcattctggtgaaaaactctatgaatgtaaggaatgtggggaagctttcatatgtggtgcagatcttagagtacatcagaaaatgcatattggtgagaagccctatgaatgtaaagaatgtgggaaggcttttagggtacgaggacaacttactctgcatcagaggattcatactggtgagaaaccctatgtgtgtaaagagtgtggaaaagcctttagacagtacgcacacctgactcggcatcagaagcttaatagtgctgacaggctctatgaatgcaaagaatgtgggaaggcctttttgtgtggctctggtcttagagtacatcacaaacttcatactggtgagaaaccctatgaatgtaaggaatgcgggaaggcctttagagtgcgacaacaactaacactccatcagagaattcatactggtgagaaaccctatgaatgtaaggaatgtggaaagacctttagccgtggctatcatcttattctccatcacagaattcatactggtgaaaaaccttacgaatgtaaggaatgctggaaagcctttagtcgctactcacaacttatttcacatcagagtattcatattggtgttaagccctatgactgtaaggaatgcgggaaggccttcagactactttcacaactcacacagcatcagagtattcatattggtgagaaaccttataaatgtaaggaatgtggcaaggcctttagattgcgccaaaaacttactctacatcagagcattcatactggcgaaaaaccctttgagtgtaaggaatgtaggaaggcctttagacttaattcatcccttattcaacatctgagaattcattctggtgagaaaccctatgaatgtaaggaatgtaagaaggcctttaggcaacattcacaccttactcatcatctgaaaattcataatgtaaaaatc

SEQ ID NO: 7054 - DNA, 711 bp, Homo sapiens
  source 1..711: mol_type = genomic DNA
atgccagcccgccttgagacctgcatctccgacctcgactgcgccagcagcagcggcagtgacctatccggcttcctcaccgacgaggaagactgtgccagactccaacaggcagcctccgcttcggggccgcccgcgccggcccgcaggggcgcgcccaatatctcccgggcgtctgaggttccaggggcacaggacgacgagcaggagaggcggcggcgccgcggccggacgcgggtccgctccgaggcgctgctgcactcgctgcgcaggagccggcgcgtcaaggccaacgatcgcgagcgcaaccgcatgcacaacttgaacgcggccctggacgcactgcgcagcgtgctgccctcgttccccgacgacaccaagctcaccaaaatcgagacgctgcgcttcgcctacaactacatctgggctctggccgagacactgcgcctggcggatcaagggctgcccggaggcggtgcccgggagcgcctcctgccgccgcagtgcgtcccctgcctgcccggtcccccaagccccgccagcgacgcggagtcctggggctcaggtgccgccgccgcctccccgctctctgaccccagtagcccagccgcctccgaagacttcacctaccgccccggcgaccctgttttctccttcccaagcctgcccaaagacttgctccacacaacgccctgtttcattccttaccac

SEQ ID NO: 7055 - DNA, 2070 bp, Homo sapiens
  source 1..2070: mol_type = genomic DNA
atggaaaaaattctccaaatggctgaaggtattgatattggggagatgccttcatatgatctggtgctgtccaaaccttccaaaggtcaaaaacgccacctctcaacatgtgatggtcaaaatcctcctaaaaagcaagccggttccaaattccatgcgagacctcgttttgagcctgtacattttgtagctagtagttcaaaagatgaaagacaggaagatccttatggccctcaaacaaaagaggtaaatgaacaaacacattttgccagcatgccaagagacatctaccaagattatactcaagactctttcagtatacaagatgggaattctcagtattgtgattcatcaggattcattctcacaaaagaccagcctgtaacagccaacatgtattttgacagtgggaaccctgccccaagcaccacatcacagcaggcaaactctcagtcaactcctgagccttcaccatcacagacatttcccgagtctgtggtagccgagaagcagtattttattgaaaaattaacggcgacaatctggaagaacctttctaatccagaaatgacttctggatctgataaaattaattatacatatatgttaactcgttgtattcaggcgtgtaagacaaatcctgagtatatatatgctcctttaaaggaaattcctcctgccgacatccccaaaaataaaaaacttctaactgatggctatgcttgtgaagttagatgccaaaatatctacttaactacaggttatgctggcagcaagaatgggtccagggatcgagctacagagctagctgtaaaactcttgcagaaacgtattgaagttagagttgtccggcggaaattcaagcatacatttggagaggacctcgtggtgtgtcagattggcatgtcctcctatgaatttcctccagctctgaagccaccagaagacctggtggtgctgggtaaagatgcttccgggcagccaatttttaatgcttctgccaaacactggaccaattttgtcattacagaaaatgcaaatgatgcaattggtatccttaacaattctgcctcattcaacaagatgtcaattgaatacaaatatgagatgatgccaaatcgcacatggcgttgtcgagtgtttttacaagatcactgcttagctgaaggttatggaaccaagaaaacaagtaaacatgcagctgccgacgaggctttgaaaattcttcaaaaaacacagcccacttatccatctgtcaaaagttcacaatgccatacaggctcttcacccagaggatctggaaagaagaaagatataaaggatcttgtagtttatgagaattcttcaaatcccgtgtgcacgctgaacgacacagctcagtttaaccgaatgacagttgagtatgtctatgaaaggatgacaggcctccgctggaaatgcaaagtgattctagagagtgaagtaattgcagaagcagttggggtgaagaaaactgtcaaatatgaagctgctggggaagctgtgaaaaccctcaaaaagacccagccaactgtcattaacaacttgaagaaaggagctgttgaagatgtgatttcaagaaatgaaattcagggccgctcagcagaggaggcttacaaacagcaaatcaaagaagataatattggaaatcagctgctgagaaagatgggttggactggtggtggtttaggtaaatctggtgagggcatacgggagcctatctcagtgaaagagcagcataagcgggaagggcttggtctggatgtagagagggtgaataaaattgccaagagagatattgaacagatcatcagaaactacgcccgctccgagagccacacagatttgactttctctagagagctgactaatgatgaacggaagcaaatacatcagattgcccagaagtatggtcttaagagtaagtctcatggggtgggccatgataggtacctagtggtaggtagaaaaagacggaaggaagacctactagatcagctcaaacaggaaggccaagtgggccattacgagcttgttatgcctcaagcaaat

SEQ ID NO: 7056 - DNA, 1293 bp, Homo sapiens
  source 1..1293: mol_type = genomic DNA
atgttatcagatgagttagaatccaaaccagagctcctggtacagtttgttcagaatacgtccatcccattgggacaggggcttgtagaatcagaagctaaagatattacttgcttgtccctccttcccgtgactgaagcctcagaatgcagtcggctaatgttaccagatgatactacaaatcattctaactcctccaaggaggtcccttcctcagctgttttgagaagccttcgggtgaatgtgggtccagacggagaggagacgagagctcagactgtacagaaatccccggagtttttgtccacttcagagtcttctagcttgttgcaagatctacagccaagtgatagcacttcttttattcttcttaacctaacaagagcaggtctgggctcttcagctgagcacttagtgtttgtacaggatgaggcagaagattcagggaatgatttcctctccagtgagagcacagacagtagcattccatggttcctccgggttcaggagttggcccatgacagtttgattgctgctactcgtgcacaactggcaaagaatgcaaaaaccagcagcaatggagaaaatgtccaccttggttctggtgatgggcagtcaaaagattctgggccccttcctcaagtggaaaagaagctcaagtgtacagttgaaggttgtgaccggacatttgtatggccagctcactttaaataccacctcaagactcatcgaaatgaccgctccttcatctgtcctgcagaaggttgtgggaaaagcttctatgtgctgcagaggctgaaggtgcacatgaggacccacaatggagagaagccctttatgtgccatgagtctggctgtggtaagcagtttactacagctggaaacctgaagaaccaccggcgcatccacacaggagagaaacctttcctttgtgaagcccaaggatgtggccgttcctttgctgagtattctagcctccgaaaacatctggtggttcactcaggagagaagcctcatcagtgccaagtctgtgggaagaccttctctcagagtggaagcaggaatgtgcatatgagaaagcatcacctgcagctgggagcagctgggagtcaagagcaggagcaaactgaggtgcttgctgaaggatccccacgttccctgtcttcagtgcctgatgtgacacatcacctggtgaccatgcagtcagggaggcaatcatatgaagtttctgtcttaactgcagtaaatccacaagagttactaaaccaaggagatttaactgaaagacggaca

SEQ ID NO: 7057 - DNA, 1365 bp, Homo sapiens
  source 1..1365: mol_type = genomic DNA
atgccgcagctgaacggcggtggaggggatgacctaggcgccaacgacgaactgatttccttcaaagacgagggcgaacaggaggagaagagctccgaaaactcctcggcagagagggatttagctgatgtcaaatcgtctctagtcaatgaatcagaaacgaatcaaaacagctcctccgattccgaggcggaaagacggcctccgcctcgctccgaaagtttccgagacaaatcccgggaaagtttggaagaagcggccaagaggcaagatggagggctctttaaggggccaccgtatcccggctaccccttcatcatgatccccgacctgacgagcccctacctccccaacggatcgctctcgcccaccgcccgaacctatctccagatgaaatggccactgcttgatgtccaggcagggagcctccagagtagacaagccctcaaggatgcccggtccccatcaccggcacacattgtctctaacaaagtgccagtggtgcagcaccctcaccatgtccaccccctcacgcctcttatcacgtacagcaatgaacacttcacgccgggaaacccacctccacacttaccagccgacgtagaccccaaaacaggaatcccacggcctccgcaccctccagatatatccccgtattacccactatcgcctggcaccgtaggacaaatcccccatccgctaggatggcaaggtcaaccagtgtacccaatcacgacaggaggattcagacacccctaccccacagctctgaccgtcaatgcttccatgtccaggttccctccccatatggtcccaccacatcatacgctacacacgacgggcattccgcatccggccatagtcacaccaacagtcaaacaggaatcgtcccagagtgatgtcggctcactccatagttcaaagcatcaggactccaaaaaggaagaagaaaagaagaagccccacataaagaaacctcttaatgcattcatgttgtatatgaaggaaatgagagcaaaggtcgtagctgagtgcacgttgaaagaaagcgcggccatcaaccagatccttgggcggaggtggcatgcactgtccagagaagagcaagcgaaatactacgagctggcccggaaggagcgacagcttcatatgcaactgtaccccggctggtccgcgcgggataactatggaaagaagaagaagaggaaaagggacaagcagccgggagagaccaatgaacacagcgaatgtttcctaaatccttgcctttcacttcctccgattacaggagaaaaaaaaagtgcgttcgctacatacaaggtgaaggcagctgcctcagcccatcctcttcagatggaagcttac

SEQ ID NO: 7058 - DNA, 1815 bp, Homo sapiens
  source 1..1815: mol_type = genomic DNA
atgatggacttggagctgccgccgccgggactcccgtcccagcaggacatggatttgattgacatactttggaggcaagatatagatcttggagtaagtcgagaagtatttgacttcagtcagcgacggaaagagtatgagctggaaaaacagaaaaaacttgaaaaggaaagacaagaacaactccaaaaggagcaagagaaagcctttttcgctcagttacaactagatgaagagacaggtgaatttctcccaattcagccagcccagcacatccagtcagaaaccagtggatctgccaactactcccaggttgcccacattcccaaatcagatgctttgtactttgatgactgcatgcagcttttggcgcagacattcccgtttgtagatgacaatgaggtttcttcggctacgtttcagtcacttgttcctgatattcccggtcacatcgagagcccagtcttcattgctactaatcaggctcagtcacctgaaacttctgttgctcaggtagcccctgttgatttagacggtatgcaacaggacattgagcaagtttgggaggagctattatccattcctgagttacagtgtcttaatattgaaaatgacaagctggttgagactaccatggttccaagtccagaagccaaactgacagaagttgacaattatcatttttactcatctataccctcaatggaaaaagaagtaggtaactgtagtccacattttcttaatgcttttgaggattccttcagcagcatcctctccacagaagaccccaaccagttgacagtgaactcattaaattcagatgccacagtcaacacagattttggtgatgaattttattctgctttcatagctgagcccagtatcagcaacagcatgccctcacctgctactttaagccattcactctctgaacttctaaatgggcccattgatgtttctgatctatcactttgcaaagctttcaaccaaaaccaccctgaaagcacagcagaattcaatgattctgactccggcatttcactaaacacaagtcccagtgtggcatcaccagaacactcagtggaatcttccagctatggagacacactacttggcctcagtgattctgaagtggaagagctagatagtgcccctggaagtgtcaaacagaatggtcctaaaacaccagtacattcttctggggatatggtacaacccttgtcaccatctcaggggcagagcactcacgtgcatgatgcccaatgtgagaacacaccagagaaagaattgcctgtaagtcctggtcatcggaaaaccccattcacaaaagacaaacattcaagccgcttggaggctcatctcacaagagatgaacttagggcaaaagctctccatatcccattccctgtagaaaaaatcattaacctccctgttgttgacttcaacgaaatgatgtccaaagagcagttcaatgaagctcaacttgcattaattcgggatatacgtaggaggggtaagaataaagtggctgctcagaattgcagaaaaagaaaactggaaaatatagtagaactagagcaagatttagatcatttgaaagatgaaaaagaaaaattgctcaaagaaaaaggagaaaatgacaaaagccttcacctactgaaaaaacaactcagcaccttatatctcgaagttttcagcatgctacgtgatgaagatggaaaaccttattctcctagtgaatactccctgcagcaaacaagagatggcaatgttttccttgttcccaaaagtaagaagccagatgttaagaaaaac

SEQ ID NO: 7059 - DNA, 1278 bp, Homo sapiens
  source 1..1278: mol_type = genomic DNA
atgtcagcctttgatatgtcccatgggttttttcccagggaaccaatctgtccttttgaagaaaagacaaagataggaacgatggtagaggaccaccggtcaaattcttaccaggattcagtgacgtttgatgatgtggctgtggagttcaccccagaggagtgggctttactggacacaactcagaaatacctctacagagatgtgatgctggagaactacatgaacctggcctctgtggatttctttttctgcttaacttcagaatgggaaatacaacctagaaccaaacggtcatcacttcagcagggttttttgaagaatcaaatattcactgggatacaaatgcagacaagaagctacagtggatggaaactctgtgagaattgtggagaggtcttcagtgaacagttttgccttaagacacacatgagagctcagaatggagggaacacttttgagggtaattgttatggaaaagacagcatcagtgtgcacaaggaagcctctattggacaagaactttccaaatttaatccatgtggaaaagtcttcaccttaactccaggccttgctgtgcatcttgaaattctcaatggaagacaaccctacaaatgtaaggaatgtggaaaaggctttaagtattttgcaagccttgataatcacatgggaatccacattggagagaaactctgtgaatttcaggaatgtgagagagccatcacaacttcctcacacttaaagcagtgtgtagcagttcatactggaaagaaatccgaaaagactaagaactgtgggaaatccttcactaatttttctcaactttctgcacatgcaaaaactcataaaggagagaagtcctttgaatgtaaagaatgtggaagatcctttagaaattcctcatcctttaatgttcacattcaaattcacactggaataaaaccacacaaatgtacggaatgtgggaaagccttcactagatcaactcaccttactcaacatgtaagaactcacactggaataaaaccctatgaatgtaaggaatgtggccaagccttcactcagtacacgggccttgctatacacatacgaaatcacactggagagaaaccctatcagtgtaaggaatgtgggaaagccttcaatagatcttcaacgcttactcaacatagaagaattcacacaggagagaagccttatgaatgtgttgaatgtgggaagaccttcattacttcttcccatcgtagtaaacatttgaaaactcacagtggagaaagg

SEQ ID NO: 7060 - DNA, 1104 bp, Homo sapiens
  source 1..1104: mol_type = genomic DNA
atggggactcctcccggcctgcagaccgactgcgaggcgctgctcagccgcttccaggagacggacagtgtacgcttcgaggacttcacggagctctggagaaacatgaagttcgggactatcttctgtggcagaatgagaaatttagaaaagaacatgtttacaaaagaagctttagctttggcttggcgatattttttacctccatacaccttccagatcagagttggtgctttgtatctgctatatggattatataatacccaactgtgtcaaccaaaacaaaagatcagagttgccctgaaggattgggatgaagttttaaaatttcagcaagatttagtaaatgcacagcattttgatgcagcttatatttttaggaagctacgactagacagagcatttcactttacagcaatgcccaaattgctgtcatataggatgaagaaaaaaattcaccgagctgaagttacagaagaatttaaggacccaagtgatcgtgtgatgaaacttatcacttctgatgtattagaggaaatgctgaatgttcatgatcattatcagaacatgaaacatgtaatttcagttgataagtccaagccagataaagccctcagcttgataaaggatgatttttttgacaatattaagaacatagttttggagcatcagcagtggcacaaagacagaaagaatccatccttaaagtcaaaaactaatgatggagaagaaaaaatggaaggaaattcacaagaaacggagagatgtgaaagggcagaatcattagcgaaaataaaatcaaaggccttttcagttgtcatacaggcatccaaatcaagaaggcatcgtcaagtcaaactcgactcttctgactctgattctgcatctggtcaagggcaagtcaaagcaactaggaaaaaagagaagaaagaaagattgaaaccagcaggaaggaagatgtctctcagaaacaaaggcaatgtgcagaatatacacaaggaagataaacctttaagtctgagtatgcctgtaattacagaagaagaagagaatgaaagtttgagtggaacagagttcactgcatccaagaagaggagaaaacac

SEQ ID NO: 7061 - DNA, 1092 bp, Homo sapiens
  source 1..1092: mol_type = genomic DNA
atgagcgaggtggaggcggcagcgggggctacagcggtccccgcggcgacggtgcccgcgacggcggcaggggtggtagcggtggtggtaccggtgcccgcaggggagccgcagaaaggcggcggggcgggcggcgggggcggagccgcctcgggccccgctgctgggaccccctcggcgccgggctcccgcacccctggcaatccggcgacggcggtctcgggaacccccgcccccccggcccggagtcaggcggacaagccggtgctggcaatccaagtcctgggcactgtcaaatggttcaacgtccggaatggttacggattcatcaacaggaatgacaccaaggaagatgtctttgttcaccagacagctattaaaagaaacaaccccaggaagtttctgcgcagcgttggagatggggagactgtggaatttgatgtcgtggaaggagagaagggcgcagaagccactaatgtaactgggcctgggggagtacccgtgaagggcagccgttatgcccccaaccgacgtaagtcccgccgattcatcccccggcctccctcagttgccccaccacccatggtggcagagatcccctcggcggggacaggacctggcagtaaaggggagcgggctgaagactctgggcaacggccccgacgatggtgccccccacccttcttctaccgacggcggtttgtgcgaggcccccggcctcccaaccagcagcagcctatagagggcactgacagggtagaacccaaagagacagccccattggaggggcaccaacagcagggagatgagcgagtccccccgcccagattccggcccaggtaccgaaggcctttccgccccaggccacgccagcagcctaccacagaaggtggggatggtgagaccaagcccagccaaggtcccgctgatggttcccggcctgagccccagcgcccacgaaaccgcccctacttccagcggagacggcagcaggcccctggcccccagcaggcccctggcccccggcagcccgcagcccctgagacctcagcccctgtcaacagtggggaccccaccaccaccatcctggag

SEQ ID NO: 7062 - DNA, 672 bp, Homo sapiens
  source 1..672: mol_type = genomic DNA
atggcgccacccgcggcgcctggccgggaccgtgtgggccgtgaggatgaggacggctgggagacgcgaggggaccgcaaggcccggaagcccctggtggagaagaagcggcgcgcgcggatcaacgagagcctgcaggagctgcggctgctgctggcgggcgccgaggtgcaggccaagctggagaacgccgaagtgctggagctgacggtgcggcgggtccagggtgtgctgcggggccgggcgcgcgagcgcgagcagctgcaggcggaagcgagcgagcgcttcgctgccggctacatccagtgcatgcacgaggtgcacacgttcgtgtccacgtgccaggccatcgacgctaccgtcgctgccgagctcctgaaccatctgctcgagtccatgccgctgcgtgagggcagcagcttccaggatctgctgggggacgccctggcggggccacctagagcccctggacggagtggctggcctgcggggggcgctccgggatccccaatacccagccccccgggtcctggggacgacctgtgctccgacctggaggaggcccctgaggctgaactgagtcaggctcctgctgaggggcccgacttggtgcccgcagccctgggcagcctgaccacagcccaaattgcccggagtgtctggaggccttgg

SEQ ID NO: 7063 - DNA, 1464 bp, Homo sapiens
  source 1..1464: mol_type = genomic DNA
atggaaaaccttacaaaacacagcattgagtgttcaagtttcagaggtgattgggaatgtaaaaaccagtttgagagaaaacagggatctcaggaaggacatttcagtgaaatgatatttactcctgaagacatgcccactttcagtatccagcatcagagaattcatactgatgagaaactccttgaatgtaaggaatgtgggaaggattttagttttgtatcagtccttgttcgacatcagcgaattcatactggtgagaaaccttatgaatgcaaagaatgtggcaaggcctttggtagtggtgcaaaccttgcttaccatcaaagaattcatactggtgagaagccttttgaatgtaaagaatgtgggaaggcctttggtagtggctcaaaccttactcaccatcagagaattcatactggtgagaaaccctatgagtgtaaggaatgtgggaaagcctttagttttggatcaggccttattcgacatcagatcattcacagtggtgagaagccttatgagtgtaaggaatgtgggaagtcctttagttttgaatcagcccttattcggcatcacagaattcacacaggtgagaaaccttatgaatgtatagattgtggtaaagcctttggcagtggttcaaaccttactcaacatcggcggattcatactggtgagaaaccttatgaatgcaaagcatgtggaatggcctttagcagtggttcggctcttactcggcatcagagaattcataccggtgagaaaccatatatatgtaatgaatgtggtaaggcctttagttttggatcagcccttactcgacatcaaagaattcatactggtgagaaaccttatgtatgtaaggaatgtgggaaggcttttaatagtggctcagatctcactcagcatcagagaattcacactggtgagaaaccctatgagtgtaaggagtgtgagaaagcctttagaagtggttcaaaacttattcagcatcaaagaatgcatactggagagaaaccttatgaatgtaaggaatgtgggaagacctttagtagtggttcagaccttactcaacatcacagaattcatactggtgagaaaccctatgaatgtaaggaatgtgggaaggcctttggtagtggctcaaaacttatccaacaccagctaatccatactggtgaaagaccctatgaatgtaaagaatgtggaaagtcctttagtagtggttcagctcttaatcggcaccagagaatacacactggtgagaaaccctatgaatgtaaggagtgtgggaaggctttttatagtggctcaagccttactcagcatcagagaattcatacaggtgagaaactttatgaatgtaagaactgtgggaaggcttatgggagggattcagagtttcagcaacataagaaaagtcataatggtaagaaactctgcgaattggaaactataaat

SEQ ID NO: 7064 - DNA, 1665 bp, Homo sapiens
  source 1..1665: mol_type = genomic DNA
atggactcagtggtctttgaggatgtggctgtggacttcaccctggaggagtgggctttgctggattctgctcagagggacctctacagagatgtgatgctggagaccttccggaacctggcctcagtagatgatgggactcaatttaaagccaatgggtcagtttctctgcaggatatgtacgggcaagaaaaatctaaggaacagacaataccaaacttcacaggaaataattcctgtgcctacactttagaaaaaaattgtgaaggctatggcactgaagaccaccacaaaaatctgagaaatcatatggtggacagattctgtacacataatgaaggtaatcaatatggagaagccatccatcaaatgccagatcttaccctgcacaagaaagtttctgctggagaaaaaccatatgaatgcaccaagtgcaggacagtcttcacgcatctttcttctcttaaaaggcacgtcaagtctcactgtggacgaaaagcacctccaggtgaggaatgtaagcaggcctgcatttgtccctcacacctacacagtcacggaagaaccgacactgaggagaagccgtataagtgtcaagcatgtgggcaaactttccaacatcctcgttacctctcccaccacgtaaagactcacacagcagagaaaacctacaaatgcgagcagtgtcggatggcgtttaatgggttcgcaagcttcactagacatgtgagaactcacacaaaagacaggccatataaatgtcaggaatgtgggagagccttcatttatccctcgacatttcaaagacacatgacaacacacactggagagaagccctataaatgtcagcactgtgggaaagccttcacttacccccaggcttttcaaagacatgagaagacgcacacgggagagaagccctatgaatgcaagcagtgtgggaaaacattcagttggtctgaaaccttgcgagtccacatgaggatccacaccggggacaaactctataaatgtgaacactgtgggaaggcttttacctcttccagatcattccaaggtcatttgaggacgcacactggagagaaaccttatgagtgtaaacaatgtgggaaagccttcacttggtcctcaacgtttagagaacatgtgagaattcacacgcaagagcagctctataaatgtgaacaatgtgggaaggcttttacctcttccagatcattccgaggtcatttgaggacgcacactggagagaagccttatgagtgtaaacaatgtggaaaaaccttcacttggtcctcaacgtttagagaacatgtgagaattcacacgcaagagcagctccataaatgtgaacactgtgggaaggcctttacctcttccagagcattccaaggtcatttgaggatgcacactggagagaagccttatgagtgtaaacaatgtggaaaaaccttcacttggtcctcaaccttacataatcatgtgaggatgcacactggagagaaacctcacaaatgtaaacaatgtgggatgtccttcaagtggcactcctccttccggaaccatctgaggatgcacacaggacagaaatcccacgaatgtcagtcatactcaaaagccttcagttgccaagtcattctttctaaaaccagtgagagcacacac

SEQ ID NO: 7065 - DNA, 1614 bp, Homo sapiens
  source 1..1614: mol_type = genomic DNA
atggtggctgggtggttgacaaattactctcaggactcagtgacctttgaggatgtggctgtggacttcacccaggaggagtggactttgctggatcaaactcagagaaacttatacagagatgtgatgctggagaactataagaatctagttgcagtagattgggagagtcatattaataccaaatggtcagcacctcagcagaattttttgcaggggaaaacatccagtgtggtggaaatggagagaaaccattttggagaggaactgtttgactttaaccaatgtgaaaaagccttgagtgaacactcatgccttaagactcacaggagaacttactttagaaagaaaacctgtgagtgtaatcaatgtgaaaaagccttcagaaaaccctctatctttactttacacaagaaaactgatatcggagaggaacttcctaactgtaatcaatgtgaaacagccttcagccaacatctacatcttgtttgcaagaaaactagccaaaatctacatcttgtttgcaagaaaactcacactcaagagaaaccatataaatgcagtgactgtgaaaaaggcttaccttcctcctcacacctcagagaatgtgtaagaatttatggtggagagagaccatatactcataaggagtatgtcgaaaccttttctcattctacagccctttttgtacacatgcaaactcaagatggagaaaaattctatgaatgtaaagcatgtgggaaacccttcactgagtcgtcatatcttactcaacatttaagaactcatagtagagtgttacctatagaacataagaaatttggcaaagcctttgctttttccccagatcttgctaaacatataagacttagaactagaggaaaacactatgtttgtaatgaatgtggcaaagaatttacttgtttctcaaaactcaacattcacataagggttcacactggagaaaaaccgtatgagtgcaacaaatgtgggaaagccttcactgattcatcaggtcttataaaacacaggcgaactcacactggagaaaagccttatgaatgtaaggaatgtgggaaagcttttgctaactcttcacatcttactgtacatatgagaactcacactggtgagaagccttatcaatgtaaggaatgtggaaaagcctttattaattcctcttcctttaaaagtcacatgcagactcatcctggtgtaaaaccctatgactgtcaacagtgtgggaaagccttcattcgatcctcatttcttattcgacatttgagaagtcacagtgcagaaaggccttttgaatgtgaggaatgtgggaaagcctttagatactcctcgcaccttagtcaacataaaagaatacatacaggggagaggccatataaatgtcaaaagtgtgggcaagccttcagtatctcatcaggccttacagtacacatgagaactcacactggtgaacggccctttgaatgtcaggaatgtgggaaagcctttactcggtccacatatcttattcgacatctaagaagtcatagtgtggagaaaccatataaggaatgtgggcaaacctttagtaattcctcatgccttactgaatgtgtg

SEQ ID NO: 7066 - DNA, 1596 bp, Homo sapiens
  source 1..1596: mol_type = genomic DNA
atgatccaggcccaggaatccataacactggaggatgtggctgtggacttcacttgggaggagtggcaactcctgggcgctgctcagaaggacctgtaccgggacgtgatgttggagaactacagcaacctggtggcagtggggtatcaagccagcaaaccggatgcactcttcaagttggaacaaggagaacaactgtggacaattgaagatggaatccacagtggagcctgttcagacatatggaaagttgatcatgtgctggagcgcttgcagagtgaaagcctggtgaacagaaggaaaccatgtcatgaacatgatgcatttgaaaatattgttcattgcagcaaaagtcagtttctgttagggcaaaatcatgatatatttgacttacgtggaaaaagtttgaaatccaatttaactttagttaaccagagcaaaggctatgaaataaagaactctgttgagtttactggaaatggggactcctttcttcatgctaaccatgaacgacttcatactgcaattaaattccctgcaagtcaaaaactcatcagcactaagtcccaattcatcagtcccaagcatcagaaaacacgaaaattagagaagcatcatgtgtgcagtgaatgtgggaaagccttcatcaagaagtcttggctaactgatcaccaggtaatgcatacaggagagaaaccccacagatgtagtctatgtgagaaagccttctccagaaagttcatgcttactgaacatcagcgaactcatacaggagaaaaaccttatgaatgccctgaatgtggcaaagcctttctcaagaaatcacggctcaacatacatcagaaaacacataccggagagaaaccctatatatgcagtgaatgtggaaaaggcttcatccagaaaggaaatctcattgtacaccagcgaattcatacaggtgagaaaccttatatatgcaatgaatgtggaaaaggcttcattcagaagacgtgtctcatagcacatcagagatttcacacaggaaagacgccctttgtgtgcagtgaatgtggaaaatcctgttctcagaaatcaggtctcattaaacatcaaagaattcacacaggagagaaaccctttgaatgtagtgaatgtgggaaagcctttagcacaaagcaaaagctcattgtccatcaaaggactcatacaggagagagaccctatggctgtaacgagtgtgggaaagcgtttgcgtatatgtcgtgtctggttaagcataagagaatacacacaagggagaaacaagaggcagccaaggtggaaaatcctcctgcagagaggcacagctcattacacaccagtgatgtcatgcaggagaaaaactctgctaacggggcgactacacaagtgccttctgtggcccctcagacatcattaaacatcagcggcctcctcgcaaacaggaacgtagtccttgtgggacagccagtggtcagatgtgcagcctcaggagataacagaggatttgcacaggacagaaaccttgtgaatgcagtgaatgtggttgtgccttccgtgatcaattatgtcttattttatgttacagaaaaccca

SEQ ID NO: 7067 - DNA, 1260 bp, Homo sapiens
  source 1..1260: mol_type = genomic DNA
atgatgtattctcccatctgtctcactcaggatgaatttcacccattcatcgaggcacttcttccacatgtccgtgcaattgcctatacttggttcaacctgcaggctcgaaaacgcaagtactttaaaaagcatgagaagcgaatgtcaaaggatgaagaaagagcagtcaaagatgagcttctcagtgaaaagcctgaaatcaaacagaagtgggcatccaggctccttgccaaactgcgcaaagatattcgccaggagtatcgagaggactttgtgctcaccgtgactggcaagaagcacccgtgctgtgtcttatccaatcccgaccagaagggtaagattaggagaatcgactgcctgcgacaggcagacaaagtctggcgtctggatctagtcatggtgatcctgttcaaaggcatccccttggaaagtaccgatggagagcggctcatgaaatccccacattgcacaaacccagcactttgtgtccagccacatcatatcacagtatcagttaaggagcttgatttgtttttggcatactacgtgcaggagcaagattctggacaatcaggaagtccaagccacaatgatcctgccaagaatcctccaggttaccttgaggatagttttgtaaaatctggagtcttcaatgtatcagaacttgtaagagtatccagaacgcccataacccagggaactggagtcaacttcccaattggagaaatcccaagccaaccatactatcatgacatgaactcgggggtcaatcttcagaggtctctgtcttctccaccaagcagcaaaagacccaaaactatatccatagatgaaaatatggaaccaagtcctacaggagacttttacccctctccaagttcaccagctgctggaagtcgaacatggcacgaaagagatcaagatatgtcttctccgactactatgaagaagcctgaaaagccattgttcagctctgcatctccacaggattcttccccaagactgagcactttcccccagcaccaccatcccggaatacctggagttgcacacagtgtcatctcaactcgaactccacctccaccttcaccgttgccatttccaacacaagctatccttcctccagccccatcgagctacttttctcatccaacaatcagatatcctccccacctgaatcctcaggatactctgaagaactatgtaccttcttatgacccatccagtccacaaaccagccagtcctggtacctgggc

SEQ ID NO: 7068 - DNA, 1539 bp, Homo sapiens
  source 1..1539: mol_type = genomic DNA
atggcctccgggagtgtggccgagtgcctgcagcaggagaccacctgccccgtgtgcctgcagtacttcgcagagcccatgatgctcgactgcggccataacatctgttgcgcgtgcctcgcccgctgctggggcacggcagagactaacgtgtcgtgcccgcagtgccgggagaccttcccgcagaggcacatgcggcccaaccggcacctggccaacgtgacccaactggtaaagcagctgcgcaccgagcggccgtcggggcccggcggcgagatgggcgtgtgcgagaagcaccgcgagcccctgaagctgtactgcgaggaggaccagatgcccatctgcgtggtgtgcgaccgctcccgcgagcaccgcggccacagcgtgctgccgctcgaggaggcggtggagggcttcaaggagcaaatccagaaccagctcgaccatttaaaaagagtgaaagatttaaagaagagacgtcgggcccagggggaacaggcacgagctgaactcttgagcctaacccagatggagagggagaagattgtttgggagtttgagcagctgtatcactccttaaaggagcatgagtatcgcctcctggcccgccttgaggagctagacttggccatctacaatagcatcaatggtgccatcacccagttctcttgcaacatctcccacctcagcagcctgatcgctcagctagaagagaagcagcagcagcccaccagggagctcctgcaggacattggggacacattgagcagggctgaaagaatcaggattcctgaaccttggatcacacctccagatttgcaagagaaaatccacatttttgcccaaaaatgtctattcttgacggagagtctaaagcagttcacagaaaaaatgcagtcagatatggagaaaatccaagaattaagagaggctcagttatactcagtggacgtgactctggacccagacacggcctaccccagcctgatcctctctgataatctgcggcaagtgcggtacagttacctccaacaggacctgcctgacaaccccgagaggttcaatctgtttccctgtgtcttgggctctccatgcttcatcgccgggagacattattgggaggtagaggtgggagataaagccaagtggaccataggtgtctgtgaagactcagtgtgcagaaaaggtggagtaacctcagccccccagaatggattctgggcagtgtctttgtggtatgggaaagaatattgggctcttacctccccaatgactgccctacccctgcggaccccgctccagcgggtggggattttcttggactatgatgctggtgaggtctccttctacaacgtgacagagaggtgtcacaccttcactttctctcatgctaccttttgtgggcctgtccggccctacttcagtctgagttactcgggagggaaaagtgcagctcctctgatcatctgccccatgagtgggatagatgggttttctggccatgttgggaatcatggtcattccatggagacctcccct

SEQ ID NO: 7069 - DNA, 1197 bp, Homo sapiens
  source 1..1197: mol_type = genomic DNA
atgtctcaggtgacatttagtgatgtggctatagacttctctcatgaagagtgggcatgcctagattctgctcagagggacttatacaaggatgtgatggtccagaattatgagaacctggtctctgtaggtctttccgtaactaagccatatgtgatcatgttattggaggatggaaaagagccctggatgatggagaaaaaactgtcaaaagattgggaatcaagatgggaaaacaaggaattatcaacaaagaaggatatttatgatgaagattcaccccaaccagtaacaatggaaaaagttgtaaaacaaagttatgaattttcaaattctaataagaatttggaatatacagaatgcgacacatttagaagcacctttcattcaaagtctactctttctgaaccacaaaacaattctgctgaagggaattcacacaaatatgatatattaaagaagaatttatcaaaaaagtcagttataaaaagtgagagaataaatggtggaaagaaacttttaaattctaataaaagtggggcagccttcaaccagagcaaatctcttacccttccccagacttgtaatagagagaaaatctatacatgcagtgaatgtgggaaagcctttggcaaacagtcaatcctcagtcgccactggagaattcatacaggagagaagccctatgaatgtcgtgaatgtgggaagacttttagccatggttcatcccttacacgacatcagataagccatagtggagagaaaccttacaaatgcattgaatgtgggaaggcctttagccatggctcatcacttactaaccatcagagcactcacacgggagagaaaccgtatgaatgtatgaactgtggaaagtcttttagtcgtgtgtcccttctcattcagcatctaagaattcatacgcaagaaaaacgctatgagtgtcgtatatgtggaaaggccttcattcatagttcgtctctcattcaccatcagaaaagccatactggagagaagccttatgaatgtagagaatgtgggaaagctttctgctgtagctcacaccttactcaacatcaaagaattcacagtatgaagaaaaaatatgaatgcaacaaatgtctcaaggtctttagtagcttctcatttcttgttcaacatcagagtattcatactgaagaaaaaccgtttgaagtt

SEQ ID NO: 7070 - DNA, 630 bp, Homo sapiens
  source 1..630: mol_type = genomic DNA
atgtggactctcgggcgccgcgcagtagccggcctcctggcgtcacccagcccggcccaggcccagaccctcacccgggtcccgcggccggcagagttggccccactctgcggccgccgtggcctgcgcaccgacatcgatgcgacctgcacgccccgccgcgcaagttcgaaccaacgtggcctcaaccagatttggaatgtcaaaaagcagagtgtctatttgatgaatttgaggaaatctggaactttgggccacccaggctctctagatgagaccacctatgaaagactagcagaggaaacgctggactctttagcagagttttttgaagaccttgcagacaagccatacacgtttgaggactatgatgtctcctttgggagtggtgtcttaactgtcaaactgggtggagatctaggaacctatgtgatcaacaagcagacgccaaacaagcaaatctggctatcttctccatccagtggacctaagcgttatgactggactgggaaaaactgggtgtactcccacgacggcgtgtccctccatgagctgctggccgcagagctcactaaagccttaaaaaccaaactggacttgtcttccttggcctattccggaaaagatgct

SEQ ID NO: 7071 - DNA, 2952 bp, Homo sapiens
  source 1..2952: mol_type = genomic DNA
atggagaccaaaggctaccacagtctccctgaaggtctagatatggaaagacggtggggtcaagtttctcaggctgtggagcgttcttccctgggacctacagagaggaccgatgagaataactacatggagattgtcaacgtaagctgtgtttccggtgctattccaaacaacagtactcaaggaagcagcaaagaaaaacaagaactactcccttgccttcagcaagacaataatcggcctgggattttaacatctgatattaaaactgagctggaatctaaggaactttcagcaactgtagctgagtccatgggtttatatatggattctgtaagagatgctgactattcctatgagcagcagaaccaacaaggaagcatgagtccagctaagatttatcagaatgttgaacagctggtgaaattttacaaaggaaatggccatcgtccttccactctaagttgtgtgaacacgcccttgagatcatttatgtctgactctgggagctccgtgaatggtggcgtcatgcgcgccgttgttaaaagccctatcatgtgtcatgagaaaagcccgtctgtttgcagccctctgaacatgacatcttcggtttgcagccctgctggaatcaactctgtgtcctccaccacagccagctttggcagttttccagtgcacagcccaatcacccagggaactcctctgacatgctcccctaatgttgaaaatcgaggctccaggtcgcacagccctgcacatgctagcaatgtgggctctcctctctcaagtccgttaagtagcatgaaatcctcaatttccagccctccaagtcactgcagtgtaaaatctccagtctccagtcccaataatgtcactctgagatcctctgtgtctagccctgcaaatattaacaactcaaggtgctctgtttccagcccttcgaacactaataacagatccacgctttccagtccggcagccagtactgtgggatctatctgtagccctgtaaacaatgccttcagctacactgcttctggcacctctgctggatccagtacattgcgggatgtggttcccagtccagacacgcaggagaaaggtgctcaagaggtcccttttcctaagactgaggaagtagagagtgccatctcaaatggtgtgactggccagcttaatattgtccagtacataaaaccagaaccagatggagcttttagcagctcatgtctaggaggaaatagcaaaataaattcggattcttcattctcagtaccaataaagcaagaatcaaccaagcattcatgttcaggcacctcttttaaagggaatccaacagtaaacccgtttccatttatggatggctcgtatttttcctttatggatgataaagactattattccctatcaggaattttaggaccacctgtgcccggctttgatggtaactgtgaaggcagcggattcccagtgggtattaaacaagaaccagatgatgggagctattacccagaggccagcatcccttcctctgctattgttggggtgaattcaggtggacagtccttccactacaggattggtgctcaaggtacaatatctttatcacgatcggctagagaccaatctttccaacacctgagttcctttcctcctgtcaatactttagtggagtcatggaaatcacacggcgacctgtcgtctagaagaagtgatgggtatccggtcttagaatacattccagaaaatgtatcaagctctactttacgaagtgtttctactggatcttcaagaccttcaaaaatatgtttggtgtgtggggatgaggcttcaggatgccattatggggtagtcacctgtggcagctgcaaagttttcttcaaaagagcagtggaagggcaacacaactatttatgtgctggaagaaatgattgcatcattgataagattcgacgaaagaattgtcctgcttgcagacttcagaaatgtcttcaagctggaatgaatttaggagcacgaaagtcaaagaagttgggaaagttaaaagggattcacgaggagcagccacagcagcagcagcccccacccccacccccacccccgcaaagcccagaggaagggacaacgtacatcgctcctgcaaaagaaccctcggtcaacacagcactggttcctcagctctccacaatctcacgagcgctcacaccttcccccgttatggtccttgaaaacattgaacctgaaattgtatatgcaggctatgacagctcaaaaccagatacagccgaaaatctgctctccacgctcaaccgcttagcaggcaaacagatgatccaagtcgtgaagtgggcaaaggtacttccaggatttaaaaacttgcctcttgaggaccaaattaccctaatccagtattcttggatgtgtctatcatcatttgccttgagctggagatcgtacaaacatacgaacagccaatttctctattttgcaccagacctagtctttaatgaagagaagatgcatcagtctgccatgtatgaactatgccaggggatgcaccaaatcagccttcagttcgttcgactgcagctcacctttgaagaatacaccatcatgaaagttttgctgctactaagcacaattccaaaggatggcctcaaaagccaggctgcatttgaagaaatgaggacaaattacatcaaagaactgaggaagatggtaactaagtgtcccaacaattctgggcagagctggcagaggttctaccaactgaccaagctgctggactccatgcatgacctggtgagcgacctgctggaattctgcttctacaccttccgagagtcccatgcgctgaaggtagagttccccgcaatgctggtggagatcatcagcgaccagctgcccaaggtggagtcggggaacgccaagccgctctacttccaccggaag

SEQ ID NO: 7072 - DNA, 2331 bp, Homo sapiens
  source 1..2331: mol_type = genomic DNA
atggactccaaagaatcattaactcctggtagagaagaaaaccccagcagtgtgcttgctcaggagaggggagatgtgatggacttctataaaaccctaagaggaggagctactgtgaaggtttctgcgtcttcaccctcactggctgtcgcttctcaatcagactccaagcagcgaagacttttggttgattttccaaaaggctcagtaagcaatgcgcagcagccagatctgtccaaagcagtttcactctcaatgggactgtatatgggagagacagaaacaaaagtgatgggaaatgacctgggattcccacagcagggccaaatcagcctttcctcgggggaaacagacttaaagcttttggaagaaagcattgcaaacctcaataggtcgaccagtgttccagagaaccccaagagttcagcatccactgctgtgtctgctgcccccacagagaaggagtttccaaaaactcactctgatgtatcttcagaacagcaacatttgaagggccagactggcaccaacggtggcaatgtgaaattgtataccacagaccaaagcacctttgacattttgcaggatttggagttttcttctgggtccccaggtaaagagacgaatgagagtccttggagatcagacctgttgatagatgaaaactgtttgctttctcctctggcgggagaagacgattcattccttttggaaggaaactcgaatgaggactgcaagcctctcattttaccggacactaaacccaaaattaaggataatggagatctggttttgtcaagccccagtaatgtaacactgccccaagtgaaaacagaaaaagaagatttcatcgaactctgcacccctggggtaattaagcaagagaaactgggcacagtttactgtcaggcaagctttcctggagcaaatataattggtaataaaatgtctgccatttctgttcatggtgtgagtacctctggaggacagatgtaccactatgacatgaatacagcatccctttctcaacagcaggatcagaagcctatttttaatgtcattccaccaattcccgttggttccgaaaattggaataggtgccaaggatctggagatgacaacttgacttctctggggactctgaacttccctggtcgaacagttttttctaatggctattcaagccccagcatgagaccagatgtaagctctcctccatccagctcctcaacagcaacaacaggaccacctcccaaactctgcctggtgtgctctgatgaagcttcaggatgtcattatggagtcttaacttgtggaagctgtaaagttttcttcaaaagagcagtggaaggacagcacaattacctatgtgctggaaggaatgattgcatcatcgataaaattcgaagaaaaaactgcccagcatgccgctatcgaaaatgtcttcaggctggaatgaacctggaagctcgaaaaacaaagaaaaaaataaaaggaattcagcaggccactacaggagtctcacaagaaacctctgaaaatcctggtaacaaaacaatagttcctgcaacgttaccacaactcacccctaccctggtgtcactgttggaggttattgaacctgaagtgttatatgcaggatatgatagctctgttccagactcaacttggaggatcatgactacgctcaacatgttaggagggcggcaagtgattgcagcagtgaaatgggcaaaggcaataccaggtttcaggaacttacacctggatgaccaaatgaccctactgcagtactcctggatgtttcttatggcatttgctctggggtggagatcatatagacaatcaagtgcaaacctgctgtgttttgctcctgatctgattattaatgagcagagaatgactctaccctgcatgtacgaccaatgtaaacacatgctgtatgtttcctctgagttacacaggcttcaggtatcttatgaagagtatctctgtatgaaaaccttactgcttctctcttcagttcctaaggacggtctgaagagccaagagctatttgatgaaattagaatgacctacatcaaagagctaggaaaagccattgtcaagagggaaggaaactccagccagaactggcagcggttttatcaactgacaaaactcttggattctatgcatgaagtggttgaaaatctccttaactattgcttccaaacatttttggataagaccatgagtattgaattccccgagatgttagctgaaatcatcaccaatcagataccaaaatattcaaatggaaatatcaaaaaacttctgtttcatcaaaag

SEQ ID NO: 7073 - DNA, 1125 bp, Homo sapiens
  source 1..1125: mol_type = genomic DNA
atgtccgcctcggcccctgctgcggagggggagggaacccccacccagcccgcgtccgagaaagaacccgaaatgcccggtcccagagaggagagcgaggaggaagaggacgaggacgacgaggaggaggaggaggaggaaaaagaaaagagtctcatcgtggaaggcaagagggaaaagaaaaaagtagagaggttgacaatgcaagtctcttccttacagagagagccatttacaattgcacaaggaaaggggcagaaactttgtgaaattgagaggatacatttttttctaagtaagaagaaaaccgatgaacttagaaatctacacaaactgctttacaacaggccaggcactgtgtcctcattaaagaagaatgtgggtcagttcagtggctttccatttgaaaaaggaagtgtccaatataaaaagaaggaagaaatgttgaaaaaatttagaaatgccatgttaaagagcatctgtgaggttcttgatttggagagatcaggtgtaaatagtgaactagtgaagaggatcttgaatttcttaatgcatccaaagccttctggcaaaccattgccgaaatctaaaaaaacttgtagcaaaggcagtaaaaaggaacggaacagttctggaatggcaaggaaggctaagcgaaccaaatgtcctgaaattctgtcagatgaatctagtagtgatgaagatgaaaagaaaaacaaggaagagtcttcagatgatgaagataaagaaagtgaagaggagccaccaaaaaagacagccaaaagagaaaaacctaaacagaaagctacttctaaaagtaaaaaatctgtgaaaagtgccaatgttaagaaagcagatagcagcaccaccaagaagaatcaaaacagttccaaaaaagaaagtgagtctgaggatagttcagatgatgaacctttaattaaaaagttgaagaaaccccctacagatgaagagttaaaggaaacaataaagaaattactggccagtgctaacttggaagaagtcacaatgaaacagatttgcaaaaaggtctatgaaaattatcctacttatgatttaactgaaagaaaagatttcataaaaacaactgtaaaagagctaatttcg

SEQ ID NO: 7074 - DNA, 1683 bp, Homo sapiens
  source 1..1683: mol_type = genomic DNA
atgatcacatcccagggatcagtgtcgtttagggatgtgactgtgggcttcactcaagaggagtggcagcatctggaccctgctcagaggaccctgtacagggatgtgatgctggagaactacagccaccttgtctcagtagggtattgcattcctaaaccagaagtgattctcaagttggagaaaggcgaggagccatggatattagaggaaaaatttccaagccagagtcatctggaattaattaataccagtagaaactattcaataatgaagttcaatgagtttaacaaaggtggaaaatgtttctgtgatgaaaagcatgaaataattcattctgaagaggaaccttctgaatataataaaaatgggaacagcttctggctgaatgaagacctcatttggcatcagaaaattaaaaattgggaacaatcttttgaatacaatgaatgtgggaaagctttccctgagaattcactcttccttgtacataagagaggttacacaggacagaaaacctgcaaatatactgaacatgggaaaacctgtgatatgtcatttttcatcactcatcagcaaacacatccaagagaaaaccactatggtaatgaatgtggagaaaatatctttgaggaatccattctccttgaacatcagagtgtttacccattcagccagaagttaaatctcactccaattcagagaacccactcaattaacaatattattgaatataatgagtgtggaacatttttcagtgaaaaattagtccttcatttacaacagagaacacatacaggagaaaaaccttatgaatgtcatgaatgtggaaaaaccttcacccagaagtcagcccacacaagacatcagagaacacacacagggggaaaaccctatgaatgtcatgaatgtgggaagaccttctataagaattcagacctcattaaacatcaaagaattcatacaggggagagaccttatggatgtcatgaatgtgggaaatccttcagtgaaaagtcaacccttactcaacatcaaagaacgcacacaggggagaaaccatatgaatgtcatgaatgtgggaaaaccttctcatttaagtcagtccttactgtgcatcagaaaacacacacaggggagaagccctatgaatgctatgcatgtgggaaagcctttctcagaaaatcagacctcattaaacatcaaagaatacacacaggtgaaaaaccttatgaatgtaatgaatgtgggaagtcattctctgagaagtcaacccttactaaacatctaagaactcacacaggtgagaaaccttatgaatgtattcagtgtggaaaatttttctgctactactccggtttcacagaacatctgagaagacacacaggggagaaaccttttggatgtaatgaatgtgggaaaaccttccgtcagaagtcggccctaattgttcaccagagaactcatataagacagaaaccctatggatgtaatcaatgtggaaaatcattctgtgtgaagtcaaaactcattgcacatcatagaacacacacaggggagaaaccctatgaatgtaatgtttgtggaaaatcattctatgttaagtcaaaactaactgtacatcagagaatacacttggggagaaaccctataaatgtagtaaacgagggaaattactctggg

SEQ ID NO: 7075 - DNA, 3261 bp, Homo sapiens
  source 1..3261: mol_type = genomic DNA
atgtcggacagcgaggacagcaacttttccgaggaggaggacagcgagcgcagcagtgacggcgaggaggccgaggtagacgaagagcggcggagtgcagcgggcagtgagaaagaagaagagcctgaggacgaagaggaggaggaagaggaggaggaatatgatgaggaagaggaagaagaagatgatgaccgaccccccaagaaaccccgccatggaggcttcattctggacgaggctgatgttgacgatgagtatgaggacgaggaccagtgggaggatggagcagaggacattctagagaaagaagagattgaagcctccaatatcgataatgttgtcctggatgaagatcgttctggggctcgccgcctgcaaaacctctggagggaccagcgagaagaagaactgggcgagtattacatgaagaaatacgccaagtcatctgtgggagagacggtgtatggaggatctgatgagctctcagacgacatcacccagcagcagctgctcccaggagtcaaggatcccaatctgtggactgtcaaatgtaagattggggaggaacgggccacggccatttccttgatgcgcaagttcattgcctaccagttcacagacacgcccctgcagatcaagtcagtagtggcaccagagcatgtgaagggctacatctacgtggaggcctacaagcagacccacgtgaagcaggccattgagggggtgggcaacctgcggcttggctactggaaccagcagatggtgcccatcaaggagatgacagacgtgctcaaagtggtgaaggaggtggccaacctgaaaccaaagtcctgggtccgcctcaagcggggcatctacaaggatgacattgctcaggtggactacgtggagcccagccagaacaccatctccctgaagatgatcccacgcatcgactacgatcgcatcaaggcccgcatgagcttgaaagactggtttgccaaaaggaagaagtttaagcggcctccacagaggctgtttgatgctgagaagatcaggtccctggggggtgatgttgcctctgatggtgacttcctcatctttgaggggaaccgttacagccggaagggctttctgttcaagagcttcgccatgtctgctgtgatcacggagggtgtgaagccaacactctctgagctggaaaagtttgaggaccagccagagggcattgacctggaggtggtgactgagagcacagggaaggagcgggagcacaacttccaacctggggacaacgtggaggtctgtgagggtgagctcatcaacctgcagggcaagatcctcagcgtggatggcaacaagatcaccatcatgcccaagcatgaggacctcaaggacatgttggagttcccagcccaggaacttagaaaatacttcaagatgggggaccacgtgaaggtgattgctggccgattcgagggcgacacaggcctcattgtgcgggtggaggagaatttcgttatcctgttctctgacctcaccatgcatgagctgaaggtgctcccccgggacctgcagctctgctcagagacagcatcaggtgtggatgttgggggccagcatgaatggggcgagctggtgcagctggatccccagactgtgggtgtcatcgtgcgactagaacgggagaccttccaggtgctgaacatgtacgggaaggtggtgactgtcagacatcaggctgtgacccggaagaaggacaaccgctttgctgtggccttggactcagagcagaacaacatccatgtgaaagacatcgttaaggtcattgatggcccccactcaggccgagaaggggagattcgccatctcttccgaagcttcgccttcctacattgcaagaaactggtggagaacgggggcatgtttgtctgcaagacccgccacctggtgctggctgggggctcaaagccccgtgatgtgaccaacttcaccgtgggtggctttgcgcctatgagtccccggatcagcagccccatgcaccccagtgctggaggtcagcgtggcggctttggtagcccaggtggcggcagtggtggcatgagcaggggccggggccggagggacaacgaactcatcggccagaccgtgcgcatctcccaggggccctacaaaggctacatcggtgtggtgaaagatgccacagagtccacggcccgtgtggagctgcactccacctgccagaccatctctgtggaccgtcagcggctcaccacggtgggctcacggcgcccgggcggcatgacctcgacctatgggaggacgcccatgtatggctcccagacgcccatgtatggctctggctcccgaacacccatgtacggctcacagacacccctccaggatggtagccgcaccccacactacggctcacagacgcccctgcatgatggcagccgcactcctgcccagagtggggcctgggaccccaacaaccccaacacgccgtcacgggctgaggaagaatatgagtatgctttcgatgatgagcccaccccgtccccgcaggcctatgggggaacccccaatccccaaacacctggctacccagacccctcgtccccacaggtcaacccacaatacaacccgcagacgccagggacgccggccatgtacaacacagaccagttctctccctatgctgccccctccccacaaggttcctaccagcccagccccagcccccagagctaccaccaggtggcgccaagcccagcaggctaccagaatacccactccccagccagctaccaccctacaccgtcgcccatggcctatcaggctagccccagcccgagccccgttggctacagtcctatgacacctggagctccctcccctggtggctacaacccacacacgccaggctcaggcatcgagcagaactccagcgactgggtaaccactgacattcaggtgaaggtgcgggacacctacctggatacacaggtggtgggacagacaggtgtcatccgcagtgtcacggggggcatgtgctctgtgtacctgaaggacagtgagaaggttgtcagcatttccagtgagcacctggagcctatcacccccaccaagaacaacaaggtgaaagtgatcctgggcgaggatcgggaagccacgggcgtcctactgagcattgatggtgaggatggcattgtccgtatggaccttgatgagcagctcaagatcctcaacctccgcttcctggggaagctcctggaagcc

SEQ ID NO: 7076 - DNA, 1863 bp, Homo sapiens
  source 1..1863: mol_type = genomic DNA
atggagtttcccggaggaaatgacaattacctgacgatcacagggccttcgcaccccttcctgtcaggggccgagacattccatacaccaagcttgggtgatgaggaatttgaaatcccacctatctccttggattctgatccctcattggctgtctcagatgtggttggccactttgatgacctggcagacccttcctcttcacaggatggcagtttttcagcccagtatggggtccagacattggacatgcctgtgggcatgacccatggcttgatggagcagggcggggggctcctgagtgggggcttgaccatggacttggaccactctataggaactcagtatagtgccaacccacctgttacaattgatgtaccaatgacagacatgacatctggcttgatggggcatagccagttgaccaccattgatcagtcagaactgagttcccagctgggtttgagcctagggggtggcaccatcctgccacctgcccagtcacctgaagatcgtctttcaaccaccccttcacctactagttcacttcacgaggatggtgttgaggatttccggaggcaacttcccagccagaagacagtcgtggtggaagcagggaaaaagcagaaggccccaaagaagagaaaaaagaaagatcctaatgaacctcagaaaccagtttcagcatatgctttattctttcgtgatacacaggctgccatcaagggacagaatcctaatgccacttttggtgaggtttcaaaaattgtggcctccatgtgggatagtcttggagaggagcaaaaacaggtatataagaggaaaactgaggctgccaagaaagagtatctgaaggcactggctgcttacaaagacaaccaggagtgtcaggccactgtggaaacagtggaattggatccagcaccaccatcacaaactccttctccacctcctatggctactgttgacccagcatctccagcaccagcttcaatagagccccctgccctgtccccatccattgttgttaactccaccctctcatcctatgtggcaaaccaggcatcttctggagctgggggtcagcccaatatcaccaagttgattattaccaaacaaatgttgccctcttctattactatgtctcaaggagggatggttactgttatcccagccacagtggtgacctcccgagggctccaactaggccaaaccagtacagctactatccagcccagtcaacaagcccagattgtcactcggtcagtgttgcaggcagcagcagctgctgctgctgctgcttctatgcaactgcctccaccccgactacagccccctccattacaacagatgccacagcccccgactcagcagcaagttaccattctgcagcagcctcctccactccaggccatgcaacagcctccacctcagaaagttcgaatcaatttacagcaacagcctcctcctctgcagatcaagagtgtgcctctacccactttgaaaatgcagactaccttagtcccaccaactgtggaaagtagtcctgagcggcctatgaacaacagccctgaggcccatacagtggaggcaccttctcctgagactatctgtgagatgatcacagatgtagttcctgaggttgagtctccttctcagatggatgttgaattggtgagtgggtctcctgtggcactctcaccccagcctcgatgtgtgaggtctggttgtgagaaccctcccattgtgagtaaggactgggacaatgaatactgcagcaatgagtgtgtggtgaagcactgcagggatgtattcttggcctgggtagcctctagaaattcaaacacagtggtgtttgtgaaa

SEQ ID NO: 7077 - DNA, 2142 bp, Homo sapiens
  source 1..2142: mol_type = genomic DNA
atgaacacattgcaggggccagtgtcattcaaagatgtggctgtggatttcacccaggaggagtggcagcagctggaccctgatgagaagataacttacagggatgtgatgttggagaactatagccatctagtttctgtgggatatgataccaccaagccaaacgtcatcattaagttggagcagggagaggagccgtggataatgggaggtgaatttccatgtcaacatagtccagaagcctggagagttgatgacctgatagagagaatccaagaaaacgaagacaaacattcaaggcaagctgcttgtatcaatagcaaaaccctgactgaagagaaagagaatacatttagtcaaatttacatggaaacaagccttgttccttcaagcataatagctcataattgtgtctcatgtggaaagaatttagaatctatttcgcaattaattagtagtgatggaagctatgctaggacaaaacctgatgagtgtaatgaatgtgggaaaacatatcatggagagaaaatgtgtgaatttaatcaaaatggggatacctattctcacaatgaagaaaatattcttcagaaaattagtattttggagaaaccctttgaatataatgaatgcatggaagccttagacaatgaggctgtttttattgctcataagagagcttacataggggagaagccctatgagtggaatgattctggaccagacttcatacagatgtcaaattttaatgcatatcagagatcacaaatggaaatgaagccctttgaatgcagtgaatgtggaaaatccttctgtaaaaagtcaaaattcatcatccaccagagggctcacacaggagagaaaccttatgaatgtaatgtatgtgggaaatccttcagccaaaagggaaccctcactgtacatcggagatcacacttagaggagaagccctataaatgtaatgaatgtgggaaaaccttttgtcagaagttacacctcactcaacacctaagaactcattcaggagagaaaccctacgaatgtagcgaatgtgggaaaaccttctgccaaaagacacatctcaccctgcaccagaggaatcattcaggagagaggccctatccatgtaacgaatgtgggaaatccttctcccgcaagtctgctctcagtgaccatcagagaactcacacaggagagaagctttataaatgtaatgaatgtgggaaatcctactaccgaaagtctactctgattacacatcagagaacacacacaggagagaagccctatcagtgtagcgagtgtgggaaattcttttctcgggtgtcatacctcactatacattatagaagtcatttagaagagaaaccctatgaatgtaatgaatgtggcaaaaccttcaatttaaattcagccttcattagacatcggaaagtacacacagaagagaaatcccatgaatgtagtgaatgtggaaagttctctcagttgtatctcaccgaccatcatacagctcatttagaagagaaaccctatgaatgtaatgaatgtgggaaaaccttccttgtaaattcagccttcgatgggcaccagccacttccaaaaggggagaaatcctatgaatgtaatgtatgtggaaagttattcaatgagttgtcatactatactgaacattatagaagtcattcagaagagaaaccttatggatgtagcgaatgtgggaaaaccttttcccataattcatccctcttcagacatcaaagagtacacacaggcgagaaaccctatgaatgttacgaatgtggaaaattcttctctcagaaatcatatctcactatacatcatcgaattcattcaggagagaaaccctatgaatgtagtaaatgtggaaaagtcttctctcggatgtcaaacctcactgtccactacagaagccattcaggagagaaaccctatgaatgtaatgaatgtgggaaagtcttttctcagaagtcatacctcactgtacactatagaactcattcaggagagaaaccctatgaatgtaatgagtgtgggaaaaaattccaccacagatcagccttcaatagccatcagagaattcatagaagaggaaatatgaatgtacttgatgtggaaaatctc

SEQ ID NO: 7078 - DNA, 1308 bp, Homo sapiens
  source 1..1308: mol_type = genomic DNA
atggaacctgacgactttgattctgaagacaaagagatattaagctgggatattaatgatgtgaaactgccacagaacgtgaaaaaaaccgactggttccaggagtggccagattcctatgccaaacacatctacagctcggaggacaagaatgcgcagcggcacctgagcagctgggccatgcgcaataccaacaaccacaactcccgcatcctcaagaagtcctgcctgggtgtggtggtgtgcggccgcgactgtctcgcagaggaggggcgcaagatctacctgagacctgccatctgtgacaaggcccggcagaagcagcagcggaaacgctgtcccaactgtgacgggcctctgaagctcatcccttgccgaggtcatgggggcttcccggtcaccaacttctggaggcacgacggacgctttatatttttccagtcaaagggagagcatgatcatccaaaaccagaaaccaagttagaagctgaggcaagaagagccatgaagaaagtgaacacagcaccttcctccgtctcattgagcctgaaggggagcacagagaccaggtctcttccaggtgaaacacaaagtcaggggagtttacctttaacttggtctttccaggaaggcgtccaattgcctggtagttacagtggacatttaatagctaacactcctcagcagaactcactaaatgattgcttttccttctccaagagttatggtctgggaggaatcacagatctgactgaccagacttccactgtggaccccatgaagctctatgaaaagcgcaaattgtccagtagcagaacctacagtagtggagacctgcttcctccttctgcctccggagtctactctgatcatggcgatctacaagcgtggagtaaaaatgctgctttggggagaaatcatcttgctgacaactgttattccaattatccttttcctctgaccagctggccttgcagcttctctccttcccaaaactcttcagaacccttttaccagcagcttccattggagccacctgcagccaaaactggctgtcccccattatggccaaatccagcgggtaatctttatgaagagaaagtacatgtggattttaacagctacgtccagtctcctgcataccattcacctcaagaagacccctttctcttcacctacgcctctcatcctcatcagcaatattcactgccaagcaagagcagcaaatgggattttgaggaagaaatgacatacttgggtttggatcactgcaacaatgatatgcttctgaacctgtgtcctttgaga

SEQ ID NO: 7079 - DNA, 849 bp, Homo sapiens
  source 1..849: mol_type = genomic DNA
atgagctccttcgacctgccggcgccctccccacctcgctgcagcccccagttccccagcatcggccaggagccccccgagatgaacctctactatgagaacttcttccacccacagggcgtgcccagccctcagcggccctccttcgaggggggcggcgagtatggggccacccccaacccctacctctggttcaacgggcccaccatgaccccgccaccctacctgcccggccccaacgccagccccttcctgccccaggcctatggagtgcagaggccgctgctgcccagcgtgtcggggcttggggggagcgacctgggctggctgcccatcccctcgcaggaggagctgatgaagctggtgcggccaccctattcctactcggctctcatcgccatggccatccacggggcacccgacaagcgcctcactctcagccagatctaccagtacgtggccgacaacttccccttctacaacaagagcaaggccggctggcagaactccatccgccacaacctgtcgctcaacgactgcttcaagaaggtgccccgcgacgaggacgacccggcctatgtgagcggggggagccccacgagccaccccttggtcacaccaggactgagccctgagcccagtgacaagacggggcagaactcactgaccttcaactccttctccccgctcaccaacctcagcaaccacagcggtgggggtgactgggcgaaccccatgcccaccaacatgctcagctacggaggatctgtgctcagccaattcagccctcacttctacaacagtgtcaacaccagtggtgtcctctaccccagggagggcaccgaggtc

SEQ ID NO: 7080 - DNA, 837 bp, Homo sapiens
  source 1..837: mol_type = genomic DNA
atgttgagtcctgccaacggggagcagctccacctggtgaactatgtggaggactacctggactccatcgagtccctgcctttcgacttgcagagaaatgtctcgctgatgcgggagatcgacgcgaaataccaagagatcctgaaggagctagacgagtgctacgagcgcttcagtcgcgagacagacggggcgcagaagcggcggatgctgcactgtgtgcagcgcgcgctgatccgcagccaggagctgggcgacgagaagatccagatcgtgagccagatggtggagctggtggagaaccgcacgcggcaggtggacagccacgtggagctgttcgaggcgcagcaggagctgggcgacacagcgggcaacagcggcaaggctggcgcggacaggcccaaaggcgaggcggcagcgcaggctgacaagcccaacagcaagcgctcacggcggcagcgcaacaacgagaaccgtgagaacgcgtccagcaaccacgaccacgacgacggcgcctcgggcacacccaaggagaagaaggccaagacctccaagaagaagaagcgctccaaggccaaggcggagcgagaggcgtcccctgccgacctccccatcgaccccaacgaacccacgtactgtctgtgcaaccaggtctcctatggggagatgatcggctgcgacaacgacgagtgccccatcgagtggttccacttctcgtgcgtggggctcaatcataaacccaagggcaagtggtactgtcccaagtgccggggggagaacgagaagaccatggacaaagccctggagaaatccaaaaaagagagggcttacaacagg

SEQ ID NO: 7081 - DNA, 927 bp, Homo sapiens
  source 1..927: mol_type = genomic DNA
atggacgatcagggttgccctcggtgtaagaccaccaaatatcggaacccctccttgaagctgatggtgaatgtgtgcggacacactctctgtgaaagttgtgtagatttactgtttgtgagaggagctggaaactgccctgagtgtggtactccactcagaaagagcaacttcagggtacaactctttgaagatcccactgttgacaaggaggttgagatcaggaaaaaagtgctaaagatatacaataaaagggaagaagattttcctagtctaagagaatacaatgatttcttggaagaagtggaagaaattgttttcaacttgaccaacaatgtggatttggacaacaccaaaaagaaaatggagatataccaaaaggaaaacaaagatgttattcagaaaaataaattaaagctgactcgagaacaggaagaactggaagaagctttagaagtggaacgacaggaaaatgaacaaagaagattatttatacaaaaagaagaacaactgcagcagattctaaaaaggaagaataagcaggcttttttagatgagctggagagttctgatctccctgttgctctgcttttggctcagcataaagatagatctacccaattagaaatgcaacttgagaaacccaaacctgtaaaaccagtgacgttttccacaggcatcaaaatgggtcaacatatttcactggcacctattcacaagcttgaagaagctctgtatgaataccagccactgcagatagagacatatggaccacatgttcctgagcttgagatgctaggaagacttgggtatttaaaccatgtcagagctgcctcaccacaggaccttgctggaggctatacttcttctcttgcttgtcacagagcactacaggatgcattcagtgggcttttctggcagcccagt

SEQ ID NO: 7082 - DNA, 963 bp, Homo sapiens
  source 1..963: mol_type = genomic DNA
atggctgcagggtggctgacaacctggtcacagaactcagtaaccttccaggaagtggcagtggacttttcccaggaggagtgggcattgctggaccctgctcaaaaaaatctatacaaagatgtgatgctggagaactttaggaacctggcctcagtagggtatcagctctgcagacacagtctgatctccaaggtggatcaagaacagctgaagacagatgaaagaggaattttacaaggtgactgtgcagactgggaaactcaacttaaaccaaaagatacaattgctatgcagaacattcctgggggaaaaacatccaatggcataaacacgaactgtgtcagaactcactctggagagatgccctatgaatgcagtgactgtgggaaagccttcatttttcagtcttcccttaagaaacacatgagatctcatactggagagaagccttatgagtgtgatcactgtggaaaatcctttagccagagctctcatctgaatgtgcacaaaagaactcacactggagagaaaccctatgactgtaaggaatgtgggaaggctttcactgttccttcatcccttcagaaacatgtgagaacccacactggagagaaaccctatgaatgcagtgactgtggaaaagccttcatcgatcagtcatcccttaagaaacacacacgctctcacactggagagaagccttatgagtgtaaccagtgtggaaagtccttcagcacaggctcttaccttattgtgcacaagagaactcacactggtgagaaaacctatgagtgtaaagaatgtgggaaggcctttaggaattcctcttgcctgagggtacacgtgagaactcacactggagagaagccttataaatgtattcagtgtgaaaaagcctttagcacaagcactaaccttataatgcacaagcgaatccacaatggccagaaactccatgaa

SEQ ID NO: 7083 - DNA, 2352 bp, Homo sapiens
  source 1..2352: mol_type = genomic DNA
atgagcgatcagaagaaggaggaggaggaggaggcggcagcggcagcggcgatggctacagaaggagggaaaacctctgagccagagaataacaataaaaaacccaaaacctcaggctcccaggactctcagccctctcctctggctttactggcagctacttgcagcaaaatagggactcctggtgaaaatcaagcaactggacaacaacaaattattatagatccaagtcaaggattggtgcaacttcaaaatcaaccacaacagctagaactggtaacaacgcaacttgctggaaacgcttggcaacttgttgcctccactcctcctgcttcaaaagagaataacgtttctcaaccagcctctagttcgtctagttcttccagcagtaataacgggagtgcatctcctacaaaaactaaatcaggtaattcttccacccctggtcaatttcaagtcatacaagtacaaaatccaagtggtagtgtacagtaccaagtaattccacaacttcagacagtggaaggtcaacaaattcaaatcaatccaactagtagttcatctctacaggatttgcagggtcaaattcagctcatttctgcaggtaataatcaagctatactcacagctgctaacaggacagcttctgggaatattcttgctcaaaacctggcaaatcagacagttccggtccaaattagacctggtgtttcaataccactgcagttacagactcttcctggtactcaggctcaagttgtaacaaccctaccaattaacattggaggagtgactctagctttgccagtgataaacaacgtggctgccggaggagggactgggcaggttggccagcctgctgctactgctgatagtgggacttccaatgggaatcaattagtttccacacccaccaacaccactacttctgccagtactatgccagaatctccctcctcctccactacctgcacaaccactgcttcaacgtctttgacaagcagtgacacattagtgagctcagcagatactggccagtatgcaagcacatcagccagtagttctgaacgcaccattgaagaatctcaaacacctgctgctactgagtctgaagcccagagctccagtcagcttcagcctaatggaatgcagaatgcacaggatcaatcaaattctcttcagcaggtgcaaattgtaggccaacctatcttacagcagatccagatccaacagcctcagcaacagatcattcaggctattccaccacagtcgtttcaactccagtcagggcagacgattcagaccatccagcagcagcctttacagaatgttcaacttcaagcagtaaatccgactcaggtgcttatcagggctccaactttaacaccttcagggcaaatcagttggcaaactgtacaggttcagaatattcagagtctttcaaatttgcaagttcagaatgctgggttatcccaacaattaaccatcaccccagtgtcttcaagtggtggcacaactcttgctcagattgctcctgtggctgttgctggtgccccaataactttgaatactgcccagcttgcatcagtgcctaaccttcagacagtgagcgttgccaacctgggtgctgcaggtgttcaagtgcagggagttcccgttacaatcactagtgttgcaggtcagcagcaaggacaagatggagtaaaagtccagcaagctactatagctcctgtaactgtagcagttggaggaattgctaatgccacgataggtgctgttagtcctgaccaactcacacaagtgcatttgcagcaaggccagcagacttctgatcaagaggtacaacctggcaagaggcttcgaagagttgcctgttcctgtcctaattgtagggaaggagaaggaagaggcagtaatgaaccaggaaaaaagaagcagcatatctgtcatattgaaggatgtggtaaagtttatggcaaaacatctcatttacgagcacatcttcgctggcatactggagaaagaccttttatatgcaactggatgttttgtggcaaaagattcacacggagtgatgagctccagagacatagaagaacccatacaggtgaaaagagatttgaatgcccggaatgttctaaaaggtttatgcggagtgatcatctctccaaacatgtcaaaacgcaccagaataaaaaaggtggtgggacagctcttgccattgttacctcgggagaactggactcatctgttacagaggtgcttggctccccaagaattgtcacagttgcagccatttctcaagattcgaatccagcaactcccaatgtttcaaccaacatggaagaattc

SEQ ID NO: 7084 - DNA, 756 bp, Homo sapiens
  source 1..756: mol_type = genomic DNA
atgcggggccagggccgcaaggagagtttgtccgattcccgagacctggacggctcctacgaccagctcacgggccaccctccagggcccactaaaaaagcgctgaagcagcgattcctcaagctgctgccgtgctgcgggccccaagccctgccctcagtcagtgaaaacagcgtggacgatgaatttgaattgtccaccgtgtgtcaccggcctgagggtctggagcagctgcaggagcaaaccaaattcacgcgcaaggagttgcaggtcctgtaccggggcttcaagaacgaatgtcccagcggaattgtcaatgaggagaacttcaagcagatttactcccagttctttcctcaaggagactccagcacctatgccacttttctcttcaatgcctttgacaccaaccatgatggctcggtcagttttgaggactttgtggctggtttgtccgtgattcttcggggaactgtagatgacaggcttaattgggccttcaacctgtatgaccttaacaaggacggctgcatcaccaaggaggaaatgcttgacatcatgaagtccatctatgacatgatgggcaagtacacgtaccctgcactccgggaggaggccccaagggaacacgtggagagcttcttccagaagatggacagaaacaaggatggtgtggtgaccattgaggaattcattgagtcttgtcaaaaggatgagaacatcatgaggtccatgcagctctttgacaatgtcatc

SEQ ID NO: 7085 - DNA, 606 bp, Homo sapiens
  source 1..606: mol_type = genomic DNA
atggctactctgatctatgttgataaggaaaatggagaaccaggcacccgtgtggttgctaaggatgggctgaagctggggtctggaccttcaatcaaagccttagatgggagatctcaagtttcaacaccacgttttggcaaaacgttcgatgccccaccagccttacctaaagctactagaaaggctttgggaactgtcaacagagctacagaaaagtctgtaaagaccaagggacccctcaaacaaaaacagccaagcttttctgccaaaaagatgactgagaagactgttaaagcaaaaagctctgttcctgcctcagatgatgcctatccagaaatagaaaaattctttcccttcaatcctctagactttgagagttttgacctgcctgaagagcaccagattgcgcacctccccttgagtggagtgcctctcatgatccttgacgaggagagagagcttgaaaagctgtttcagctgggccccccttcacctgtgaagatgccctctccaccatgggaatccaatctgttgcagtctccttcaagcattctgtcgaccctggatgttgaattgccacctgtttgctgtgacatagatatt

SEQ ID NO: 7086 - DNA, 2346 bp, Homo sapiens
  source 1..2346: mol_type = genomic DNA
atggcggagccgcctcggctacctctgacttttgaggatgttgctatttatttctccgagcaagaatggcaggatctagaggcatggcagaaggaactttacaagcatgtgatgagaagcaattatgagactctcgtctctctagatgatggacttccaaaaccagaactaatatcctggattgaacacgggggagagcccttcaggaaatggagagaatcacagaaatcaggaaacataatttgctcctctgttgatatgcattttgatccaggttttgaggaacagctgttttggggaagccagcaggctatgaattcaggaaaaactaaaagccatttccaattagatcctgaaagccagtgttcctttggatcctttgtttccttcaggcctgaccaaggcatcaccctcgggagcccacagagacacgacgccagggctcctccaccactagcctgcggccccagtgaatctaccctaaaagaaggaatcccaggtcccagaaatctggatcttcctggtttgtgggacgtccccgcctgggagagcacccagcacccttggcctgtctgcggggaaagctgttgggagaacaaccatttagtaatgcaccagagaggccactcaaaggaccggacacgtagggcctgggagaaattcaacaagagggcggagacgcagatgccgtggagcagccctcgggtacagaggcacttccggtgtggcgtgtgcggtaagagcttccgccggaagctgtgtctgctgcgccatctggcggcccacacggggaggggccccttccggaacgctgacggtgaaatgtgcttccgacacgagctgacccatcccagccaccgcctcccgcagcagggggagaagcctgcccagtgcaccccatgcggcaagcgctccctcccagtggacagcacgcaggctcgccggtgccagcacagccgggaggggccggcctcttggagagaaggccgcggggcctccagcagtgtgcactcgggacagaaaccaggctcgcgcctgccccaggaggggaacagccaccaggaaggggacacggaggcgctgcagcatggcgcagaggggccctgctcctgctcggagtgtggcgagcgctcccctatgagcgccaggctcgccagcccctgcagggcgcatactggagaaaagcccttccagtgtgcgcattgcaccaagcgcttccgcctgcgccgcctgctgcaggtccaccagcacgcgcacggtggggagagaccgttctcctgcaggaagtgtggcaagggcttcgccaagcagtgtaaactcacggagcacattcgagtccacagcggagagaagcctttccggtgtgccaagtgtggcaggaacttccgtcagaggggacagctgctgcggcaccagcggctgcacacggacgagaagccctttcagtgcccagagtgtgggctgagcttccgcctggagagcatgctgagagcccaccggctccggcacggtggggagaggccgttctcctgtagcgagtgtggcagaggcttcacccaccagtgcaagctccgtgagcacctgagagtgcacagcggggagaggcccttccagtgcctgaagtgcgacaagcgcttccgcctgaagggcatcctgaaggcccaccagcacacgcacagcaaggagaggccgttctcgtgcggggagtgtggcaagggcttcaccagacaatccaagctcacggagcacttgcgcgtgcacagcggggagagacccttccagtgcccagagtgcaacaggagcttccgcctgaaggggcagctgctcagccatcagcgcctgcacacgggagagaggcccttccagtgtccggagtgcgacaagcgctatcgcgtgaaggccgacatgaaggcccaccagctgctgcacagcggggagatgcctttctcctgtgagtgcggcaagggctttgtgaaacactcaaagctcatcgagcacatcagaacgcacacgggagagaagccttttcagtgtcccaagtgtgacaagagtttccgcctgaaggcgcagctgctcagccatcagggcctgcacacaggggagaggccttttcactgccctgagtgtgacaagaacttccgggaaaggggacacatgctgaggcaccagcgcatccacaggcccgagaggccctttgcctgtggcgattgtgggaagggcttcatttacaagtctaagcttgcggagcacatcagagtacacacaaaatcctgtcctgctccaaatgaactggacattaagaaaaggctcagccaactgtttgcaatgatagaggccgattggagt

SEQ ID NO: 7087 - DNA, 309 bp, Homo sapiens
  source 1..309: mol_type = genomic DNA
atggcccattacaaagccgccgactcgaagcgtgagcagttccggaggtacttggagaagtcgggggtgctggacacgctgaccaaggtgttggtagccttatatgaagaaccagagaaacctaacagtgctttggattttttaaagcatcacttaggagctgctactccagaaaatccagaaatagagctgcttcgcctagaactggccgaaatgaaagagaagtatgaagctattgtagaagaaaataaaaaactgaaagcaaagcttgctcagtatgaaccacctcaggaggagaagcgtgctgaa

SEQ ID NO: 7088 - DNA, 2040 bp, Homo sapiens
  source 1..2040: mol_type = genomic DNA
atgaattttgaaacttcacggtgtgccaccctacagtactgccctgacccttacatccagcgtttcgtagaaaccccagctcatttctcttggaaagaaagttattaccgatccaccatgtcccagagcacacagacaaatgaattcctcagtccagaggttttccagcatatctgggattttctggaacagcctatatgttcagttcagcccattgacttgaactttgtggatgaaccatcagaagatggtgcgacaaacaagattgagattagcatggactgtatccgcatgcaggactcggacctgagtgaccccatgtggccacagtacacgaacctggggctcctgaacagcatggaccagcagattcagaacggctcctcgtccaccagtccctataacacagaccacgcgcagaacagcgtcacggcgccctcgccctacgcacagcccagctccaccttcgatgctctctctccatcacccgccatcccctccaacaccgactacccaggcccgcacagtttcgacgtgtccttccagcagtcgagcaccgccaagtcggccacctggacgtattccactgaactgaagaaactctactgccaaattgcaaagacatgccccatccagatcaaggtgatgaccccacctcctcagggagctgttatccgcgccatgcctgtctacaaaaaagctgagcacgtcacggaggtggtgaagcggtgccccaaccatgagctgagccgtgaattcaacgagggacagattgcccctcctagtcatttgattcgagtagaggggaacagccatgcccagtatgtagaagatcccatcacaggaagacagagtgtgctggtaccttatgagccaccccaggttggcactgaattcacgacagtcttgtacaatttcatgtgtaacagcagttgtgttggagggatgaaccgccgtccaattttaatcattgttactctggaaaccagagatgggcaagtcctgggccgacgctgctttgaggcccggatctgtgcttgcccaggaagagacaggaaggcggatgaagatagcatcagaaagcagcaagtttcggacagtacaaagaacggtgatggtacgaagcgcccgtttcgtcagaacacacatggtatccagatgacatccatcaagaaacgaagatccccagatgatgaactgttatacttaccagtgaggggccgtgagacttatgaaatgctgttgaagatcaaagagtccctggaactcatgcagtaccttcctcagcacacaattgaaacgtacaggcaacagcaacagcagcagcaccagcacttacttcagaaacagacctcaatacagtctccatcttcatatggtaacagctccccacctctgaacaaaatgaacagcatgaacaagctgccttctgtgagccagcttatcaaccctcagcagcgcaacgccctcactcctacaaccattcctgatggcatgggagccaacattcccatgatgggcacccacatgccaatggctggagacatgaatggactcagccccacccaggcactccctcccccactctccatgccatccacctcccactgcacacccccacctccgtatcccacagattgcagcattgtcagtttcttagcgaggttgggctgttcatcatgtctggactatttcacgacccaggggctgaccaccatctatcagattgagcattactccatggatgatctggcaagtctgaaaatccctgagcaatttcgacatgcgatctggaagggcatcctggaccaccggcagctccacgaattctcctccccttctcatctcctgcggaccccaagcagtgcctctacagtcagtgtgggctccagtgagacccggggtgagcgtgttattgatgctgtgcgattcaccctccgccagaccatctctttcccaccccgagatgagtggaatgacttcaactttgacatggatgctcgccgcaataagcaacagcgcatcaaagaggagggggag

SEQ ID NO: 7089 - DNA, 1119 bp, Homo sapiens
  source 1..1119: mol_type = genomic DNA
atgcccaacgacgaggcattcagcaagccctctacaccgtcggaagcccctcacgcccccggggtaccgccgcagggcagagccgggggctttggcaaagcgtctggggcgctagtgggggcggccagcggctcgagcgccgggggcagcagcagaggaggcggctccggctccggggcgtcggacctgggtgccgggagcaagaagtccccgcggctgcccaagtgcgcacgctgcaggaaccacggctacgcctcgccgctcaagggccacaagcgcttctgcatgtggcgcgactgccagtgcaagaagtgcaacctgatcgccgagaggcagcgcgtgatggccgcgcaggtggccctgagaaggcagcaggcccaggaggaggaattgggtatcagccaccccatcccactgcccagtgcggccgagctgcttgtcaaaagagagaacaatggcagtaacccgtgcctcatgactgagtgcagtggcacctctcagccaccgccggccagtgtccccaccactgcagcttcagagggacgtatggtcatccaggatattcctgctgtcaccagcagagggcatgtggagaacacacctgacctggtttcagactccacctactacagcagcttctaccagccgtctctgtttccttattacaacaatctatacaactgcccgcagtactccatggccttggctgctgattctgcttctggggaggtgggaaatcccctcgggggatcccctgtgaagaacagccttcggggcctccccggaccttatgtgcctggtcagacaggaaaccagtggcagatgaagaacatggagaaccgccatgcaatgagctcccagtacaggatgcattcttactacccgcctccctcttacctgggccagagcgtgccccagttcttcacttttgaggatgctccctcttacccggaagccagggcgagcgtattctcgccgcccagcagtcaagattctggcttggtttccctctcgagcagctctcctattagtaacaagagcacaaaggcagtgcttgaatgtgagcctgcgtcggagcccagcagcttcacagtcactcccgtcatcgaggaggacgag

SEQ ID NO: 7090 - DNA, 1284 bp, Homo sapiens
  source 1..1284: mol_type = genomic DNA
atggacccatctgtgacgctgtggcagtttctgctgcagctgctgagagagcaaggcaatggccacatcatctcctggacttcacgggatggtggtgaattcaagctggtggatgcagaggaggtggcccggctgtgggggctacgcaagaacaagaccaacatgaattacgacaagctcagccgggccttgcggtactactatgacaagaacatcatccgcaaggtgagcggccagaagttcgtctacaagtttgtgtcctaccctgaggtcgcagggtgctccactgaggactgcccgccccagccagaggtgtctgttacctccaccatgccaaatgtggcccctgctgctatacatgccgccccaggggacactgtctctggaaagccaggcacacccaagggtgcaggaatggcaggcccaggcggtttggcacgcagcagccggaacgagtacatgcgctcgggcctctattccaccttcaccatccagtctctgcagccgcagccaccccctcatcctcggcctgctgtggtgctccccagtgcagctcctgcaggggcagcagcgcccccctcggggagcaggagcaccagtccaagccccttggaggcctgtctggaggctgaagaggccggcttgcctctgcaggtcatcctgaccccgcccgaggccccaaacctgaaatcggaagagcttaatgtggagccgggtttgggccgggctttgcccccagaagtgaaagtagaagggcccaaggaagagttggaagttgcgggggagagagggtttgtgccagaaaccaccaaggccgagccagaagtccctccacaggagggcgtgccagcccggctgcccgcggttgttatggacaccgcagggcaggcgggcggccatgcggcttccagccctgagatctcccagccgcagaagggccggaagccccgggacctagagcttccactcagcccgagcctgctaggtgggccgggacccgaacggaccccaggatcgggaagtggctccggcctccaggctccggggccggcgctgaccccatccctgcttcctacgcatacattgaccccggtgctgctgacacccagctcgctgcctcctagcattcacttctggagcaccctgagtcccattgcgccccgtagcccggccaagctctccttccagtttccatccagtggcagcgcccaggtgcacatcccttctatcagcgtggatggcctctcgacccccgtggtgctctccccagggccccagaagcca

SEQ ID NO: 7091 - DNA, 2232 bp, Homo sapiens
  source 1..2232: mol_type = genomic DNA
atgcagaaggaaatgaagatgatcaaagacgaggatgtgcatttcgacttggctgtgaagaagaccccctcctttccccactgcctgcagccagtggcttctcggggaaaggctccccaaagacaccccttcccggaagctctccgagggccattttcccagtttcggtatgaacctcccccaggagacctagatgggttccccggggtcttcgaaggagcagggtctaggaaacggaagagcatgcccacaaagatgccctataaccaccctgcagaagaagtcaccctcgccctccactcagaggagaacaaaaaccacggccttcccaacctccctttgctgttcccgcagcccccgcgccccaagtatgactctcagatgatcgacctgtgcaacgtgggcttccaattctaccgcagcctggaacactttgggggcaagcccgtcaagcaggaacccattaagcccagcgccgtgtggccccagccaacgcccactccattcctgcccacgccctacccctactaccccaaagtccacccgggcctcatgttccccttcttcgtgccctcgtcctcgcccttccccttcagccggcacaccttcctgcccaagcagcccccggaacctctgctgccccggaaagccgagccccaggagagcgaggagaccaagcagaaggtggagagggtggacgtgaacgtgcagatcgatgacagctactacgtggacgtgggcggctcgcagaagcgctggcagtgccccacctgcgagaagtcctacacctccaagtacaacctggtcacccacatcctgggccacagtgggatcaagccgcacgcgtgcacgcactgcgggaagctcttcaagcagctcagccacctgcatacccacatgctgacccaccagggcacgcggccccacaagtgccaggtgtgccacaaggccttcacccagaccagccacctgaagcgccacatgatgcagcacagcgaggtgaagccgcacaactgccgcgtgtgcggccgcggctttgcctaccccagcgagctcaaggcccacgaagccaagcacgccagtgggcgcgagaacatctgtgtggagtgcggcctcgacttccccaccttggcccagctgaagagacacctcaccacgcaccggggccccatccagtacaactgctccgagtgcgacaagaccttccagtacccgagccagctgcagaaccacatgatgaagcacaaggacatccggccctacatctgctcagagtgtggcatggagtttgtgcagccgcaccacctcaagcagcactccctcacccacaagggtgtgaaggagcataagtgtgggatttgtgggcgggagttcaccctgctggccaacatgaagcgacacgtgctgatccacaccaacatccgcgcctaccagtgtcacctctgctacaagagcttcgtgcagaagcagaccctcaaggcacacatgatcgtccactctgacgtgaagcctttcaaatgcaagctttgtgggaaggaattcaaccggatgcacaacctgatgggccacatgcacctgcactcagacagcaaacccttcaagtgcctctattgcccaagcaaattcaccctgaaggggaacctgacacgccacatgaaagtcaagcatggagtcatggagcggggccttcattcccaaggtctgggaagggggagaatcgccctggcacagacagccggtgtcctgaggagtctggagcaggaggagccctttgacctctctcagaagcgccgggccaaggtgccggtgttccagtcagacggggagagtgcccagggcagccactgccacgaggaggaagaggaggataactgctacgaggtggagccctacagccctggcctggccccccagagccagcagctctgcacacccgaggatctgtccaccaagtcggagcacgcccccgaggtgctggaggaagcctgcaaggaggagaaggaggatgcatccaagggagaatgggagaagaggagcaagggtgaccttggggcagagggcggccaggagagagactgtgccggcagagatgagtgtctcagtctcagggcttttcagagtacccggcggggcccctctttttctgattacttatacttcaagcacagagatgagagtttgaaagaattactggagaggaaaatggaaaaacaagcagtgcttttaggtatc

SEQ ID NO: 7092 - DNA, 1686 bp, Homo sapiens
  source 1..1686: mol_type = genomic DNA
atggcggcggcgtggatggctccggcgcaggagtctgtgaccttcgaggatgtggctgtgacatttacccaggaggagtgggggcagttggacgtgacccagagggccttgtacgtggaggtgatgctggagacctgtgggcttctggtcgcactgggtgacagcacaaaacctgagaccgtagagcctatcccttctcatctggccttgcctgaggaagtctcactccaggaacagctggcacagggagtcccaagatactcctatttggggcaggccatggatcaagatgggccatctgaaatgcaggaatactttttgagaccagggacagacccacagagtgagaaactccatgggaaaatgagccttgaacacgaaggtttggcgacagctgatggtatttgttcaatgatgatacagaaccaagtctcaccagaagatgctctctatggatttgactcatatggaccagttacagattccttgattcatgaaggggaaaattcctataaattcgaggaaatgtttaatgagaattgcttccttgttcagcatgagcagattctccctcgtgtgaagccctatgattgcccagaatgtgggaaagccttcggcaagagcaaacacctccttcagcatcacatcatccatactggggagaagccctataaatgcctggagtgtgggaaagacttcaaccgcaggtcacacctcacacggcaccagcggactcacaatggagataagccctttgtgtgcagtgaatgtggaaggaccttcaatcgcgggtcgcaccttacacggcaccagcgggttcacagtggagagaagccttttgtgtgcaatgaatgtggaaaggcctttacctaccgctccaattttgtcttgcataacaagagccacaatgagaagaaacccttcgcatgcagcgaatgtggaaaaggcttttatgagagtacagccctcattcaacacttcattatccatactggggagaggccctttaagtgccttgagtgtgggaaggccttcaactgcaggtcacacctcaagcagcatgagcggattcacactggtgagaagccctttgtgtgcagtcaatgtggaaaggccttcactcactattccacctatgtcctgcatgaaagagcccacactggagaaaagccttttgagtgcaaagaatgtgggaaagcctttagcattcgaaaagacctcattcgacacttcaacatccacactggagagaagccctatgagtgtttacagtgtggaaaggcttttacccgcatgtcagggctcacaaggcaccagtggattcatactggagagaagccgtatgtatgcatccaatgtgggaaagccttttgtcggaccacaaacctgattcgacactttagcatccacactggagagaagccctatgaatgcgtggagtgcgggaaggccttcaaccgcaggtcacccctcacaaggcaccagcggattcacactgcagagaagtcccacgaacccatccagagtgggaacgtttcttgtgagagcacagatctcattcaacactccatcatccacactgagagtagcccagtgagtgcagtgaatatggaaacgccttcaattgccgctcattcctcctcactcgacatcaacggattcatagtggaagaaaccctaccattg

SEQ ID NO: 7093 - DNA, 1251 bp, Homo sapiens
  source 1..1251: mol_type = genomic DNA
atgggccggcgccgggcgccagagctgtaccgggctccgttcccgttgtacgcgcttcaggtcgaccccagcactgggctgctcatcgctgcgggcggaggaggcgccgccaagacaggcataaagaatggcgtgcactttctgcagctagagctgattaatgggcgcttgagtgcctccttgctgcactcccatgacacagagacacgggccaccatgaacttggcactggctggtgacatccttgctgcagggcaggatgcccactgtcagctcctgcgcttccaggcacatcaacagcagggcaacaaggcagagaaggccggttccaaggagcaggggcctcgacaaaggaagggagcagccccagcagagaagaaatgtggagcggaaacccagcacgaggggctagaactcagggtagagaatttgcaggcggtgcagacagactttagctccgatccactgcagaaagttgtgtgcttcaaccacgataataccctgcttgccactggaggaacagatggctacgtccgtgtctggaaggtgcccagcctggagaaggttctggagttcaaagcccacgaaggggagattgaagacctggctttagggcctgatggcaagttggtaaccgtgggccgggaccttaaggcctctgtgtggcagaaggatcagctggtgacacagctgcactggcaagaaaatggacccaccttttccagcacaccttaccgctaccaggcctgcaggtttgggcaggttccagaccagcctgctggcctgcgactcttcacagtgcaaattccccacaagcgcctgcgccagccccctccctgctacctcacagcctgggatggctccaacttcttgccccttcggaccaagtcctgtggccatgaagtcgtctcctgcctcgatgtcagtgaatccggcaccttcctaggcctgggcacagtcactggctctgttgccatctacatagctttctctctccagtgcctctactacgtgagggaggcccatggcattgtggtgacggatgtggcctttctacctgagaagggtcgtggtccagagctccttgggtcccatgaaactgccctgttctctgtggctgtggacagtcgttgccagctgcatctgttgccctcacggcggagtgttcctgtgtggctcctgctcctgctgtgtgtcgggcttattattgtgaccatcctgctgctccagagtgcctttccaggtttcctt

SEQ ID NO: 7094 - DNA, 1845 bp, Homo sapiens
  source 1..1845: mol_type = genomic DNA
atggcggagcgggcgctagagcccgaggcggaggcggaggctgaggcgggcgcgggcggggaggcagcagccgaggagggcgcagcgggccgaaaggcgcggggccggccgcgactcacggagtcggaccgggcccggcgacggctcgagtcccggaagaagtacgacgtgcggcgcgtgtacctgggcgaggcgcacgggccctgggtggacctgcggcgccgcagcggctggagcgacgccaagctcgccgcctacctcatctctctggagcgcggccagcggagcggccgccacgggaagccttgggagcaggtccccaaaaagccaaagcggaagaaaaggcggcgacgcaacgtgaactgcctgaagaacgtggtgatctggtacgaggaccacaagcaccgctgcccgtacgagccgcacctggcggagctagaccccacttttggcctgtacaccacggccgtgtggcagtgcgaagctggccaccgctacttccaggacctgcattcgcccctgaagcccctcagcgactcagaccctgacagtgacaaagtgggcaatgggctggtggctggcagctctgactcatccagctctggctctgcctctgactctgaggagtctcctgagggccagccggtcaaggctgcggcagcggcagcggcagcgacgcccaccagcccggtgggcagcagcgggctcatcactcaggagggcgtgcacattccctttgacgtccaccacgtggaaagcctggccgagcagggtaccccgctgtgctccaacccagcaggcaatgggcctgaagccctggagacagtggtgtgcgtgccggtgcctgtgcaagtgggtgcgggccccagcgccctctttgagaacgtgccccaggaggccctgggtgaggtggtggccagctgccccatgccaggcatggtgcccggctcacaggtgatcatcattgcgggccctggttacgacgctctcacggccgagggcattcacctcaacatggcagcaggcagcggtgtccccggcagtggactgggcgaggaggtgccctgtgccatgatggagggtgtggcagcctacacccagacagagcccgagggtagccagcctagcaccatggacgccaccgcagtagcaggcatcgagaccaagaaagagaaggaggacctgtgcttgctaaagaaggaggagaaggaggagccagtagccccggagctggcaacaacggtgcctgagagcgcagagcctgaggcagaggcggacggggaggagctggacggcagcgacatgtcagccatcatctatgaaatccccaaggagcctgagaagaggcggcggagcaagcggtcgcgggtgatggatgctgacggcctgctcgagatgttccactgcccatacgagggctgcagccaagtctacgtggccctcagcagcttccagaaccacgtcaatcttgtgcatcggaaaggaaagaccaaagtgtgccctcatcctggctgtggcaagaagttctatttatccaaccacctgcggcggcacatgatcatccattcaggtgtccgtgaattcacctgcgagacctgcggcaagtccttcaagaggaagaaccacctggaggtacatcggcgcacccacaccggcgagacccccctgcagtgcgagatctgtggctaccagtgccggcagcgcgcgtcgctcaactggcacatgaagaagcacactgcggaggtgcagtacaacttcacgtgcgatcgctgcgggaagcgcttcgagaagctggacagcgtcaagttccacacgctcaaaagccacccggatcacaagcccacc

SEQ ID NO: 7095 - DNA, 1623 bp, Homo sapiens
  source 1..1623: mol_type = genomic DNA
atgccccgaaggaagcaaagccacccgcagcccgtgaaatgcgagggggtcaaagtggatactgaagactccctcgacgaaggacccggggccctggtattggagagtgatttgctactaggccaggatctggagtttgaggaggaagaggaagaggaggaaggcgacggcaacagtgaccagctcatgggcttcgagagagactcggaaggagactctctgggggccaggcctgggcttccctatgggctgagcgacgatgagtctgggggcggccgggcactaagtgcggagagtgaagttgaggagccagccaggggtccaggggaggccaggggtgagaggccaggcccagcctgccagctgtgtggggggccgacaggtgaggggccgtgttgtggggcaggagggccgggtggggggcccctgctgcccccacggctactgtactcatgccgcctctgcaccttcgtgtcccactactcgagccacctgaagcggcacatgcagacacacagcggagagaagccgttccgctgtggccgctgcccctacgcctcagcccagctcgtcaacctgacacgacatacccgcacccacactggcgagaagccctaccgctgtccccactgcccctttgcctgcagcagcctgggcaacctgaggcggcatcagcgtacccacgcagggccccccactcctccctgcccgacctgtggcttccgctgctgtactccacgaccagcccggcctcccagtcccacagagcaggagggggcggtgccccggcgacctgaagatgctctgctccttccagatttgagcctccatgtgccaccaggtggtgccagtttcctgccagactgtgggcagctgcggggtgaaggggagggcctctgcgggactggatcagaaccactgccagagctgctattcccttggacctgccggggctgtggacaagagctggaggagggtgagggtagtcggctgggagctgccatgtgtgggcgctgcatgcgaggagaggctggagggggtgccagtggggggccccagggccccagtgacaaaggctttgcctgtagcctctgcccctttgccactcactatcccaaccacctggcccggcacatgaagacacacagtggtgagaagcccttccgctgcgcccgctgtccttatgcctctgctcatctggataacctgaaacggcaccagcgcgtccatacaggagagaagccctacaagtgccccctctgcccttatgcctgtggcaatctggccaacctcaagcgtcatggtcgcatccactctggtgacaaaccttttcggtgtagcctttgcaactacagctgcaaccagagcatgaacctcaaacgtcacatgctgcggcacacaggcgagaagcccttccgctgtgccacctgcgcctataccacgggccactgggacaactacaagcgccaccagaaggtgcatggccacggtggggcaggagggcctggtctctctgcctctgagggctgggccccacctcatagcccaccctctgttttgagctctcggggcccaccagccctggggactgctggcagccgggctgtccacacagactcatcc

SEQ ID NO: 7096 - DNA, 1662 bp, Homo sapiens
  source 1..1662: mol_type = genomic DNA
atggcagctgctgatttgtcccatggacattatctttctggggacccagtttgccttcatgaagaaaagacaccagcaggaagaatagtggctgactgcctaacagattgttatcaggattcagtgacctttgacgatgtggctgtggacttcacccaggaggagtggactttactggactcaactcagagaagcctctacagtgacgtgatgctggagaactacaagaacctggccacagtaggaggtcagatcatcaaacccagtctaatctcttggttggaacaagaagagtcaaggacagttcagggaggagttctccaaggatgggaaatgcgacttgaaacccagtggtctatacttcagcaggactttttgaggggtcagacatccattgggatacaattggaaggaaaacacaatggaagggaactctgtgactgtgagcaatgtggagaagtcttcagtgaacactcatgccttaagacgcacgtgagaactcaaagtacagggaacactcatgactgtaatcagtatggaaaagatttccttaccctgtgtgagaaaacctctactggtgagaaactttctgagtttaatcagagtgaaaaaatcttcagcctgacaccaaatattgtataccagagaactagcacacaagaaaagtcatttgaatgtagtcactgtggaaaatccttcattaatgagtcataccttcaggcacatatgagaactcacaatggagaaaaactctacgaatggaggaattatgggccaggttttattgactctacaagcctttctgtgcttatagaaaccctcaatgcaaaaaagccctacaaatgtaaggaatgtggaaaaggctatagatacccagcctacctcagtattcacatgcgaacccacactggggagaaaccatatgaatgtaaggaatgtgggaaagccttcaattattccaactcatttcagatacatggaagaactcacactggagagaaaccctatgtatgtaaggaatgtgggaaagccttcactcagtactcgggccttagtatgcatgtacgatctcacagtggagacaagccctatgaatgtaaggaatgtgggaaatccttccttacatcctcacgccttattcaacatataagaactcacactggagagaagccttttgtatgtgttgaatgtgggaaagcctttgcagtttcctcaaatcttagtggacatttgagaactcacactgaagagaaggcctgtgagtgtaagatatgtgggaaagtatttgggtatccctcatgtcttaataatcacatgcgaacgcacagtgcccagaaaccatacacctgtaaggaatgtgggaaggcttttaactattccacccaccttaaaattcacatgcgaatccacactggagaaaaaccctatgagtgtaaacaatgtggaaaggccttcagtcattccagttcatttcaaatacatgaaaggactcacactggagagaaaccctatgaatgcaaggagtgtgggaaagccttcacgtgttccagttcctttagaattcatgaaaaaactcacacagaagagaaaccctataaatgtcagcaatgcgggaaagcttacagtcatccccgttcacttcgaagacatgaacaaattcac

SEQ ID NO: 7097 - DNA, 1179 bp, Homo sapiens
  source 1..1179: mol_type = genomic DNA
atggcatcaggcagggcacgctgcacccgaaaactccggaactgggtggtggagcaagtggagagtgggcagtttcccggagtgtgctgggatgatacagctaagaccatgttccggattccctggaaacatgcaggcaagcaggacttccgggaggaccaggatgctgccttcttcaaggcctgggcaatatttaagggaaagtataaggagggggacacaggaggtccagctgtctggaagactcgcctgcgctgtgcactcaacaagagttctgaatttaaggaggttcctgagaggggccgcatggatgttgctgagccctacaaggtgtatcagttgctgccaccaggaatcgtctctggccagccagggactcagaaagtaccatcaaagcgacagcacagttctgtgtcctctgagaggaaggaggaagaggatgccatgcagaactgcacactcagtccctctgtgctccaggactccctcaataatgaggaggagggggccagtgggggagcagtccattcagacattgggagcagcagcagcagcagcagccctgagccacaggaagttacagacacaactgaggccccctttcaaggggatcagaggtccctggagtttctgcttcctccagagccagactactcactgctgctcaccttcatctacaacgggcgcgtggtgggcgaggcccaggtgcaaagcctggattgccgccttgtggctgagccctcaggctctgagagcagcatggagcaggtgctgttccccaagcctggcccactggagcccacgcagcgcctgctgagccagcttgagaggggcatcctagtggccagcaacccccgaggcctcttcgtgcagcgcctttgccccatccccatctcctggaatgcaccccaggctccacctgggccaggcccgcatctgctgcccagcaacgagtgcgtggagctcttcagaaccgcctacttctgcagagacttggtcaggtactttcagggcctgggccccccaccgaagttccaggtaacactgaatttctgggaagagagccatggctccagccatactccacagaatcttatcacagtgaagatggagcaggcctttgcccgatacttgctggagcagactccagagcagcaggcagccattctgtccctggtg

SEQ ID NO: 7098 - DNA, 1365 bp, Homo sapiens
  source 1..1365: mol_type = genomic DNA
atggacacagtggtctttgaagacgtggttgtggatttcacgctggaggagtgggccttgctgaatcctgctcagagaaaactctacagagatgtcatgctggagaccttcaagcacctggcctcagtagataatgaggctcagcttaaagccagtgggtctatttctcagcaggatacttctggagaaaaattatccctcaaacagaaaatagaaaagttcacaagaaagaatatatgggcctcccttttaggaaaaaattgggaagaacatagcgttaaagacaagcacaacaccaaggagagacatttgagaaatccaagggtggagagaccatgtaaaagcagtaaaggtaataaacgtggaagaaccttcagaaagactcgaaattgtaatcgtcatctgcgcaagaattgttgtactagtgtaagacggtacgaatgcagtcagtgtggaaaactcttcacccattcctcatccctgataaggcacaaaagagctcactctggacaaaaattatataaatgtaaggaatgtgggaaagccttcagtcgcccttcctacctacagacgcatgagaaaactcacagtggagagaaaccctatgcctgtcaatcttgcgggaagacatttcttcgttcccactctctcactgaacatgtaaggactcacactggagagaaaccctacgaatgtgggcagtgtgggaaaggcttcagttgtcccaaatcctttcgcgcacatgtgatgatgcacgccggagggagaccgtatgagtgcaagcactgtgggaaagccttcaggtgtcagaaatcctttcgagtccatatgatcatgcacgccggagggagaccgtatgagtgcaagcagtgtgggaaagcctactgctgggcaacatcctttcaacgacacgtgagaattcacaacggggagaaaccctataagtgtggaaaatgcgggaaagcattcggttggccctcatccttacacaaacacgcgagaacgcatgctaaaaagaaacctgtgagtgggggcagcgtgggaaagtcttccgcgaggcctcgcccctccacagatgtcaaatcacaaactagagagaaagtctataaatgtgaaacgtgtgggaaaacgtatggttggtcctcatctttacacaaacatgagagaaagcacactggggagaaacctgtaaatgcagccagtgtgggaaaaccttcaggcgggctttgctcttccaaaaatgtaagaacgcagattggacagaagcccagtaaatgcgaaaaatgtgggaaagctttcagttgtcccaaagcctttcaaggtcatgtgagaagtcacacaggaaagaaatcctgtacatctaag

SEQ ID NO: 7099 - DNA, 627 bp, Homo sapiens
  source 1..627: mol_type = genomic DNA
atgggtaaaggagaccccaacaagccgcggggcaaaatgtcctcgtacgccttcttcgtgcagacctgccgggaagagcacaagaagaaacacccggactcttccgtcaatttcgcggaattctccaagaagtgttcggagagatggaagaccatgtctgcaaaggagaagtcgaagtttgaagatatggcaaaaagtgacaaagctcgctatgacagggagatgaaaaattacgttcctcccaaaggtgataagaaggggaagaaaaaggaccccaatgctcctaaaaggccaccatctgccttcttcctgttttgctctgaacatcgcccaaagatcaaaagtgaacaccctggcctatccattggggatactgcaaagaaattgggtgaaatgtggtctgagcagtcagccaaagataaacaaccatatgaacagaaagcagctaagctaaaggagaaatatgaaaaggatattgctgcatatcgtgccaagggcaaaagtgaagcaggaaagaagggccctggcaggccaacaggctcaaagaagaagaacgaaccagaagatgaggaggaggaggaggaagaagaagatgaagatgaggaggaagaggatgaagatgaagaa

SEQ ID NO: 7100 - DNA, 723 bp, Homo sapiens
  source 1..723: mol_type = genomic DNA
atgttgtcctctacagccatgtattcggctcctggcagagacttggggatggaaccgcacagagccgcgggccctttgcagctgcgattttcgccctacgttttcaacggaggtactatactggcaattgctggagaagattttgcaattgttgcttctgatactcgattgagtgaagggttttcaattcatacgcgggatagccccaaatgttacaaattaacagacaaaacagtcattggatgcagcggttttcatggagactgtcttacgctgacaaagattattgaagcaagactaaagatgtataagcattccaataataaggccatgactacgggggcaattgctgcaatgctgtctacaatcctgtattcaaggcgcttctttccatactatgtttacaacatcatcggtggacttgatgaagaaggaaagggggctgtatacagctttgatccagtagggtcttaccagagagactccttcaaggctggaggctcagcaagtgccatgctacagcccctgcttgacaaccaggttggttttaagaacatgcagaatgtggagcatgttccgctgtccttggacagagccatgcggctggtgaaagatgtcttcatttctgcggctgagagagatgtgtacactggggacgcactccggatctgcatagtgaccaaagagggcatcagggaggaaactgtttccttaaggaaggac

SEQ ID NO: 7101 - DNA, 1431 bp, Homo sapiens
  source 1..1431: mol_type = genomic DNA
atggatggattttatgaccagcaagtgccttacatggtcaccaatagtcagcgtgggagaaattgtaacgagaaaccaacaaatgtcaggaaaagaaaattcattaacagagatctggctcatgattcagaagaactctttcaagatctaagtcaattacaggaaacatggcttgcagaagctcaggtacctgacaatgatgagcagtttgtaccagactatcaggctgaaagtttggcttttcatggcctgccactgaaaatcaagaaagaaccccacagtccatgttcagaaatcagctctgcctgcagtcaagaacagccctttaaattcagctatggagaaaagtgcctgtacaatgtcagtgcctatgatcagaagccacaagtgggaatgaggccctccaacccccccacaccatccagcacgccagtgtccccactgcatcatgcatctccaaactcaactcatacaccgaaacctgaccgggccttcccagctcacctccctccatcgcagtccataccagatagcagctaccccatggaccacagatttcgccgccagctttctgaaccctgtaactcctttcctcctttgccgacgatgccaagggaaggacgtcctatgtaccaacgccagatgtctgagccaaacatccccttcccaccacaaggctttaagcaggagtaccacgacccagtgtatgaacacaacaccatggttggcagtgcggccagccaaagctttccccctcctctgatgattaaacaggaacccagagattttgcatatgactcagaagtgcctagctgccactccatttatatgaggcaagaaggcttcctggctcatcccagcagaacagaaggctgtatgtttgaaaagggccccaggcagttttatgatgacacctgtgttgtcccagaaaaattcgatggagacatcaaacaagagccaggaatgtatcgggaaggacccacataccaacggcgaggatcacttcagctctggcagtttttggtagctcttctggatgacccttcaaattctcattttattgcctggactggtcgaggcatggaatttaaactgattgagcctgaagaggtggcccgacgttggggcattcagaaaaacaggccagctatgaactatgataaacttagccgttcactccgctattactatgagaaaggaattatgcaaaaggtggctggagagagatatgtctacaagtttgtgtgtgatccagaagcccttttctccatggcctttccagataatcagcgtccactgctgaagacagacatggaacgtcacatcaacgaggaggacacagtgcctctttctcactttgatgagagcatggcctacatgccggaagggggctgctgcaacccccacccctacaacgaaggctacgtgtat

SEQ ID NO: 7102 - DNA, 3660 bp, Homo sapiens
  source 1..3660: mol_type = genomic DNA
atgggggtggactttgatgtgaagactttctgccacaacttgcgggcgactaagccaccatacgagtgcccggtggagacctgccgaaaggtctacaagagttacagtggtattgagtaccacctgtaccactatgaccacgacaacccaccacccccacaacaaactccactccgcaagcacaagaaaaaggggcgccagtcacgcccagccaacaagcagtcacccagcccctcagaggtctcacagtcaccaggccgtgaggtgatgagctatgcacaggcccagcgcatggtggaggtggacttgcatggccgcgtccaccgcatcagcatctttgacaacctggatgtggtgtcagaggatgaggaagcccccgaggaggcccctgagaatggcagcaacaaggagaacactgagacaccagctgctactcccaagtcaggcaaacataagaacaaggagaagcgcaaggactccaaccatcatcaccaccacaatgtttctgcgagcaccactcccaagctgccagaggtggtctatcgggagctggaacaggacacccctgatgccccaccccggccaacttcctattaccggtacatcgagaagtctgcagaggagctggacgaggaagtagagtatgacatggacgaggaggactacatctggctggatatcatgaatgagcgtcggaagacagagggtgtaagtcccatcccgcaggagatctttgagtacctaatggaccgactggagaaggagtcgtactttgagagtcataataaaggcgaccctaatgcgctagtggacgaggatgctgtttgctgtatctgcaatgatggtgagtgccagaacagcaatgtcatcctcttctgtgacatgtgcaacctggccgtgcaccaggagtgctacggtgtcccctatatccctgagggccagtggctgtgccgccgttgcctgcagtcaccctctcgtgctgtggattgtgccctgtgccccaacaagggcggtgccttcaagcagacagatgacgggcgctgggcccatgtggtgtgtgccttgtggatccctgaggtctgcttcgccaacacggtcttcctagagcctattgacagcattgagcacatcccaccagctcgctggaagctcacctgctacatttgcaaacaacggggctcaggggcctgcatccagtgccacaaggccaactgttacacagctttccatgtgacatgcgcccagcaggctggcctttacatgaagatggagcctgtgcgggagacaggcgccaacggcacctctttcagtgtccgcaagacagcctactgcgacatccacacgcctccaggttcagcacgccgactgcctgccctgtcccacagcgagggtgaggaggatgaagatgaggaggaggatgagggtaagggctggagctcagagaaagtcaagaaggccaaggccaagtcccggatcaaaatgaagaaggcacggaagatcctggcagagaagcgggcagcagcacctgtggtgtcagtgccctgcatcccaccacacaggcttagtaaaatcaccaaccgcctgaccatccaaaggaagagccagttcatgcagaggctgcacagctactggacactgaagcggcagtcacggaatggggtcccattgctacgtcgcctgcagacacacctgcaatctcagaggaactgtgaccaagttgggagagattctgaggataagaactgggcccttaaagaacagctcaagtcatggcagcggctccggcatgacttggagcgagctcggctgctcgtggaattgatccgcaagcgggaaaaactcaaaagggagacgatcaaggttcagcagattgccatggagatgcagctgactcctttcctcatcctccttcgcaaaaccttggagcagctccaagagaaggacacaggcaacatcttcagcgagccggtccctctgtctgaggtaaccgaattggacgaagtacctgactacctagaccacatcaaaaagcccatggactttttcaccatgaagcagaacttggaggcttaccgctacctgaattttgatgattttgaggaggacttcaacctcatcgtcagcaactgcctcaagtataacgccaaggacaccatcttctaccgggcagcagtgcggcttcgtgagcagggtggtgctgtgctccgccaggcccggcgccaggcagaaaaaatgggcattgactttgagacgggcatgcatatcccccacagcctggctggagatgaggccacacaccacactgaagatgcagccgaggaagagcggctggtcttgctggagaaccagaagcacctgccagtggaagaacagctaaagctgcttctggagcggctggacgaagtgaatgccagcaagcagagtgtgggccgctcacggcgtgcaaagatgatcaagaaagagatgacggcactgcggcggaagcttgcccatcagcgagagacgggacgtgatggccctgagcggcatggcccctcgagccggggtagtctgacaccccacccggcagcctgtgacaaggatgggcagacagatagtgcggcagaggagagcagcagccaggagacaagcaaaggcctgggtcccaacatgtcctcaacccccgcacatgaggtgggcaggagaacctcagttctgttctccaaaaagaacccgaagacagctggaccgcccaagaggccgggccggccccccaaaaaccgggagagccagatgacccccagccacggaggcagtcctgtggggcccccccagctccccatcatgagttccctgcgtcagcgcaagcggggtaggagcccccggcccagttcgagctcagacagcgacagtgataagtccacagaagaccccccaatggacttaccagccaatggcttcagcggtggaaaccaaccagtgaagaagagtttcttggtataccgtaatgactgcagccttccccggagcagctcagactctgagtccagcagcagtagcagtagcagcgctgcttcagaccggaccagcacaacgccctcaaaacaaggccggggcaaaccctccttctctcggggcactttcccagaggacagcagtgaggatacctcaggcactgagaatgaggcctactccgtgggcactggccgcggcgtgggccacagcatggtaaggaagagtctgggccggggagctggctggctgtcagaggatgaggactccccgctggatgctctggacctcgtgtgggccaaatgccgaggctatccatcatacccagctctgatcattgatccaaagatgccccgagaaggtatgttccaccatggggttcccatccctgtgcccccactggaggtgctgaaacttggggagcagatgacccaggaagcccgagagcatctctacctcgtcctcttctttgacaacaaacgaacctggcagtggctgcccaggaccaagctggttcctctgggtgtgaaccaggacctagacaaggagaagatgctggagggccgcaagtccaacatccgcaagtcagtacagatcgcctaccacagggctctgcagcaccgcagcaaggtgcaaggcgagcagagcagtgagaccagtgatagtgat

SEQ ID NO: 7103 - DNA, 1023 bp, Homo sapiens
  source 1..1023: mol_type = genomic DNA
atgcaggagggagaattggctatttctcctataagccctgtggcagccatgcctcccctaggcacccacgtgcaagccagatgtgaagctcaaattaacctgctgggtgaaggggggatctgcaagctgccaggaagactccgcatccagcccgcactgtggagcagggaggacgtgctgcactggctgcgctgggcagagcaggagtactctctgccatgcaccgcggagcacgggttcgagatgaacggacgcgccctctgcatcctcaccaaggacgacttccggcaccgtgcgcccagctcaggtgacgtcctgtatgagctgctccagtacatcaagacccagcggcgagccctggtgtgtggacccttttttggagggatcttcaggctgaagacgcccacccagcactctccagtccccccggaagaggtgactggcccctctcagatggacacccgaaggggccacctgctgcagccaccagacccagggcttaccagcaacttcggccacctggatgaccctggcctggcaaggtggacccctggcaaggaggagtccctcaacttatgtcactgtgcagagctcggctgcaggacccagggggtctgttccttccccgcgatgccgcaggcccccattgacggcaggatcgctgactgccgcctgctgtgggattacgtgtatcagctgctccttgatacccgatatgagccctacatcaagtgggaagacaaggacgccaagatcttccgagttgtggatccaaatgggctcgccagactctggggaaatcacaagaaccgggtgaacatgacctacgagaagatgtctcgtgccctgcgccactattataagcttaatatcattaagaaggaaccggggcagaaactcctgttcagatttctaaagactccgggaaagatggtccaggacaagcacagccacctggagccgctggagagccaggagcaggacagaatagagttcaaggacaagaggccagaaatctctccg

SEQ ID NO: 7104 - DNA, 690 bp, Homo sapiens
  source 1..690: mol_type = genomic DNA
atggacgtgttggctagttatagtatattccaggagctacaacttgtccacgacaccggctacttctcagctttaccatccctggaggagacctggcagcagacatgccttgaattggaacgctacctacagacggagccccggaggatctcagagacctttggtgaggacttggactgtttcctccacgcttcccctcccccgtgcattgaggaaagcttccgtcgcttagaccccctgctgctccccgtggaagcggccatctgtgagaagagctcggcagtggacatcttgctctctcgggacaagttgctatctgagacctgcctcagcctccagccggccagctcttctctagacagctacacagccgtcaaccaggcccagctcaacgcagtgacctcattaacgcccccatcgtcccctgagctcagccgccatctggtcaaaacctcacaaactctctctgccgtggatggcacggtgacgttgaaactggtggccaagaaggctgctctcagctccgtaaaggtgagaagccttataagtgctcatgggagggatgtgagtggcgttttgcacgaagcgatgagctcacgaggcactacaggaaacacacaggtgcaaagcccttcaaatgcaaccactgcgacaggtgtttttccaggtctgaccatcttgccctccaca

SEQ ID NO: 7105 - DNA, 2064 bp, Homo sapiens
  source 1..2064: mol_type = genomic DNA
atggacggctccttcgtccagcacagtgtgagggttctgcaggagctcaacaagcagcgggagaagggccagtactgcgacgccactctggacgtggggggcctggtgtttaaggcacactggagtgtccttgcctgctgcagtcactttttccagagcctctacggggatggctcagggggcagtgtcgtcctccctgctggcttcgctgagatctttggcctcttgttggactttttctacactggtcacctcgctctcacctcagggaaccgggatcaggtgctcctggcagccagggagttgcgagtgccagaggccgtagagctgtgccagagcttcaagcccaaaacttcagtgggacaggcagcaggtggccagagtgggctggggccccctgcctcccagaatgtgaacagccacgtcaaggagccggcaggcttggaagaagaggaagtttcgaggactctgggtctagtccccagggatcaggagcccagaggcagtcatagtcctcagaggccccagctccattccccagctcagagtgagggcccctcctccctctgtgggaaactgaagcaggccttgaagccttgtccccttgaggacaagaaacccgaggactgcaaagtgcccccaaggcccttagaggctgaaggtgcccagctgcagggcggcagtaatgagtgggaagtggtggttcaagtggaggatgatggggatggcgattacatgtctgagcctgaggctgtgctgaccaggaggaagtcaaatgtaatccgaaagccctgtgcagctgagccagccctgagcgcgggctccctagcagctgagcctgctgagaacagaaaaggtacagcggtgccggtcgaatgccccacatgtcataaaaagttcctcagcaaatattatctaaaagtccacaacaggaaacatactggggagaaaccctttgagtgtcccaaatgtgggaagtgttactttcggaaggagaacctcctggagcatgaagcccggaattgcatgaaccgctcggaacaggtcttcacgtgctctgtgtgccaggagacattccgccgaaggatggagctgcgggtgcacatggtgtctcacacaggggagatgccctacaagtgttcctcctgctcccagcagttcatgcagaagaaggacttgcagagccacatgatcaaacttcatggagcccccaagccccatgcatgccccacctgtgccaagtgcttcctgtctcggacagagctgcagctgcatgaagctttcaagcaccgtggtgagaagctgtttgtgtgtgaggagtgtgggcaccgggcctcgagccggaatggcctgcagatgcacatcaaggccaagcacaggaatgagaggccacacgtatgtgagttctgcagccacgccttcacccaaaaggccaatctcaacatgcacctgcgcacacacacgggtgagaagcccttccagtgccacctctgtggcaagaccttccgaacccaagccagcctggacaagcacaaccgcacccacaccggggaaaggcccttcagttgcgagttctgtgaacagcgcttcactgagaaggggcccctcctgaggcacgtggccagccgccatcaggagggccggccccacttctgccagatatgcggcaagaccttcaaagccgtggagcaactgcgtgtgcacgtcagacggcacaagggggtgaggaagtttgagtgcaccgagtgtggctacaagtttacccgacaggcccacctgcggaggcacatggagatccacgaccgggtagagaactacaacccgcggcagcgcaagctccgcaacctgatcatcgaggacgagaagatggtggtggtggcgctgcagccgcctgcagagctggaggtgggctcggcggaggtcattgtggagtccctggcccagggcggcctggcctcccagctccccggccagagactgtgtgcagaggagagcttcaccggcccaggtgtcctggagccctccctcatcatcacagctgctgtccccgaggactgtgacaca

SEQ ID NO: 7106 - DNA, 1710 bp, Homo sapiens
  source 1..1710: mol_type = genomic DNA
atgaaggagaagtccaagaatgcggccaagaccaggagggagaaggaaaatggcgagttttacgagcttgccaagctgctcccgctgccgtcggccatcacttcgcagctggacaaagcgtccatcatccgcctcaccacgagctacctgaagatgcgcgccgtcttccccgaaggtttaggagacgcgtggggacagccgagccgcgccgggcccctggacggcgtcgccaaggagctgggatcgcacttgctgcagactttggatggatttgtttttgtggtagcatctgatggcaaaatcatgtatatatccgagaccgcttctgtccatttaggcttatcccaggtggagctcacgggcaacagtatttatgaatacatccatccttctgaccacgatgagatgaccgctgtcctcacggcccaccagccgctgcaccaccacctgctccaagagtatgagatagagaggtcgttctttcttcgaatgaaatgtgtcttggcgaaaaggaacgcgggcctgacctgcagcggatacaaggtcatccactgcagtggctacttgaagatcaggcagtatatgctggacatgtccctgtacgactcctgctaccagattgtggggctggtggccgtgggccagtcgctgccacccagtgccatcaccgagatcaagctgtacagtaacatgttcatgttcagggccagccttgacctgaagctgatattcctggattccagggtgaccgaggtgacggggtacgagccgcaggacctgatcgagaagaccctataccatcacgtgcacggctgcgacgtgttccacctccgctacgcacaccacctcctgttggtgaagggccaggtcaccaccaagtactaccggctgctgtccaagcggggcggctgggtgtgggtgcagagctacgccaccgtggtgcacaacagccgctcgtcccggccccactgcatcgtgagtgtcaattatgtactcacggagattgaatacaaggaacttcagctgtccctggagcaggtgtccactgccaagtcccaggactcctggaggaccgccttgtctacctcacaagaaactaggaaattagtgaaacccaaaaataccaagatgaagacaaagctgagaacaaacccttaccccccacagcaatacagctcgttccaaatggacaaactggaatgcggccagctcggaaactggagagccagtccccctgcaagcgctgctgctcctccagaactgcagccccactcagaaagcagtgaccttctgtacacgccatcctacagcctgcccttctcctaccattacggacacttccctctggactctcacgtcttcagcagcaaaaagccaatgttgccggccaagttcgggcagccccaaggatccccttgtgaggtggcacgctttttcctgagcacactgccagccagcggtgaatgccagtggcattatgccaaccccctagtgcctagcagctcgtctccagctaaaaatcctccagagccaccggcgaacactgctaggcacagcctggtgccaagctacgaaggtgggtcaggtctgctcgtggggaaggtgggaggactgcgcacggccgggagccgaagcagccatggcggtgggtggcagatggagacagaaccctcacgctttgggcaaacttgccctctttctgcttctaag

SEQ ID NO: 7107 - DNA, 351 bp, Homo sapiens
  source 1..351: mol_type = genomic DNA
atggccctggagacggtgccgaaggacctgcggcatctgcgggcctgtttgctgtgttcgctggtcaagactatagaccagtttgaatatgatggttgtgacaattgtgatgcatatctacaaatgaagggtaaccgagagatggtatatgactgcactagctcttcctttgatggaatcattgcgatgatgagtccagaggacagctgggtctccaagtggcagcgagtcagtaactttaagccaggtgtatatgcggtgtcagtcactggtcgcctgccccaaggaatcgtgcgggagctgaaaagtcgaggagtggcctacaaatccagagacacagctataaagacc

SEQ ID NO: 7108 - DNA, 1308 bp, Homo sapiens
  source 1..1308: mol_type = genomic DNA
atgatggctacacagacattaagtatagacagctatcaagatgggcaacagatgcaagtagtaacagagttaaagacagaacaagatccaaactgctctgaacccgatgcagaaggagtgagccctccccctgtggagtctcagaccccgatggatgtggacaagcaggccatttataggcatccactatttccattattagctttgttgtttgaaaaatgtgaacaatctacacagggctctgaaggcacaacttctgccagttttgatgtagacatcgaaaattttgtaagaaagcaagagaaggaagggaaacctttcttttgtgaagatccagaaaccgataatttaatggtaaaagcaatccaggttttgcgcattcatcttcttgagctggaaaaggttaacgaactctgcaaagatttctgcagtcgatacattgcttgtctgaaaacaaaaatgaacagtgaaactctgttgagtggagagcctggaagcccgtactcaccagtgcagtcccagcagattcaaagtgccatcacaggcaccatcagccctcagggaattgtggtgccggcgtccgcgctgcagcagggaaacgtagccatggcgacggtggcaggtggcacagtgtatcagcctgtcacggtcgtcactccccaaggccaagtggtcacacagacattgtcgcctgggacaattaggatccagaactcccagcttcagttacagttaaaccaagatctcagcatcttgcatcaagatgatggttcatctaagaacaagaggggcgtcctgccaaagcatgccacgaacgtgatgcggtcctggctcttccagcacatcgggcatccctacccaacagaggatgagaaaaaacagattgctgctcagacaaatttgacactactccaagtcaacaactggttcatcaatgccagaagacgaattcttcagccaatgttggattcaagttgttcagagacccccaaaacaaagaaaaaaactgctcagaaccggccagttcagaggttttggcctgattctattgcatcaggagtcgcacagccaccgccgagcgagctcaccatgtcggaaggagctgttgtcaccatcaccacgcccgtgaacatgaacgtggacagccttcagtctctgtcctcggacggggccaccctggcggtgcagcaggtcatgatggcagggcagagcgaggacgagtctgtggacagcacagaggaggatgcgggtgccctggcccctgcccacatcagcgggctggtcttggagaacagtgactccctgcag

SEQ ID NO: 7109 - DNA, 2484 bp, Homo sapiens
  source 1..2484: mol_type = genomic DNA
atgcagaattctgtatcagtaccaccaaaagatgaaggtgaatcaaacatcccttctggaacaatacagagtaggaaaggtttgcagaataagagtcagtttaggaccattgcaccaaaaattgtgcccaaagtcctaacgtccagaatgctgccatgtcattcaccatcacgctctgatcaggtgaatctgggaccctccatcaactccaagctgctggggatgtccacccagaactatgccctgatgcaggttgctggccaggaggggacattttctcttgttgctctgccacatgttgcctcagctcagccaattcagaaacccagaatgtccctacctgaaaacctgaaacttcctattcctagatatcaaccccctagaaatagcaaagcatcaagaaagaaacccatcctgatctttcctaagagtggctgtagcaaagctcctgcccaaacccaaatgtgtcctcagatgtccccttccccacctcaccaccctgaactcctgtacaaacccagtccatttgaggaagtaccatcactagagcaagccccagccagcattagcacagctgcgctgaccaatggaagtgaccatggggacttgagaccaccagtgaccaacacccatggcagtctgaaccctcctgctaccccagcatcatccacaccagaggagcctgccaagcaggacctcacagctctttcagggaaagcacactttgtaagcaagataacatctagtaaaccttctgctgttgccagtgaaaaatttaaagaacaagttgatcttgcaaaaaccatgaccaatttatcaccaaccattcttggcaatgcagttcagttgatctcttcagtccccaaagggaaactgccaatcccaccctactcaagaatgaagacaatggaggtttacaaaatcaaatcagatgctaacattgcaggtttttctttaccaggacctaaggccgactgtgataagataccctccaccacagaaggctttaatgcagccaccaaggtggcaagcaggctacctgttccacaagtgtcacagcagagtgcctgtgaaagtgccttttgtccacccaccaaacttgatcttaaccacaaaacaaaactgaacagtggagcagcaaagagaaaaggaagaaaacggaaggtaccagatgaaattttggcatttcagggaaaaaggaggaaatatatcattaataagtgtagagatggtaaagaaagagtaaaaaatgatccccaagaattcagagaccaaaagctggggaccctgaaaaaataccgtagcattatgcccaaacctatcatggtcatacccactttggcctccctggcttctccaactacactacagtcccagatgcttgggggcctaggacaggatgttttgttaaataattcactcactcctaaatatcttggctgtaagcaagacaacagctcttcccctaagcccagctccgtgttcagaaatggattctctggcattaagaagccttggcacagatgtcacgtctgcaaccaccacttccagttcaaacagcaccttcgagaccacatgaatacacacaccaacagacgcccttacagttgtcggatttgtcgcaagtcctatgtacgtcctggcagcctgagcacacacatgaaacttcatcatggtgagaaccgtctgaagaaactcatgtgttgtgagttttgtgcaaaagtgtttggccacatccgagtctattttggccatctgaaagaagtgcatagggttgtgatcagcactgagcctgcgcccagtgaactgcagccaggagacataccaaagaacagagacatgagtgtgcgaggcatggagggatcattggagagggaaaacaagtccaacctggaagaagacttccttctaaaccaggcagacgaagtcaaattacaaatcaaatgtggtcgttgtcagattactgctcagtcttttgcggaaataaaatttcatttacttgatgttcatggagaggaaattgagggcaggctacaagaagggaccttcccaggaagcaaggggactcaggaagagttggtgcagcacgctagccccgactggaaaaggcatcctgagagagggaagccggagaaggttcattcctcctccgaggaatcacatgcatgtccaagactgaaaaggcagctccaccttcatcagaatggcgtggaaatgctcatggaaaatgaaggaccccagtcaggaaccaacaagccaagggaaacctgccagggccctgagtgtcctggcctccacacgtttctcttgtggtcccattcaggctttaactgcctgctttgtgcagagatgctgggacggaaagaggacctcctccaccactggaagcaccagcataactgtgaggacccttccaaactgtgggctattttaaatacggtctccaaccagggagtgatcgaactttccagtgaagctgagaaa

SEQ ID NO: 7110 - DNA, 231 bp, Homo sapiens
  source 1..231: mol_type = genomic DNA
atgggactgttgacatttagggatgtggccatagaattctctctggaggagtggcagtgcctggacactgcacagaagaatttatataggaatgtgatgttagagaactacagaaacctggccttcctgggtattgctgtctctaagccagacctcatcatctgtctggagaaagaaaaagagccctggaatatgaagcgagatgagatggtggatgaacccccaggtagg

SEQ ID NO: 7111 - DNA, 1167 bp, Homo sapiens
  source 1..1167: mol_type = genomic DNA
atggattcagtgtcatttgaagatgtggctgtggcctttactcaggaggagtgggctttgctggatccttctcaaaagaatctctacagagatgtgatgcaagaaatcttcaggaacctggcttctgtaggaaacaaatcagaagaccagaatatccaagatgacttcaaaaatcctgggagaaatctaagcagtcatgtggtagagagactgtttgaaattaaagaaggcagtcaatatggagaaaccttcagccaggattcaaatttgaatctgaataagaaagtttctactggagtaaagccatgtgaatgcagtgtgtgtggaaaagtcttcatatgtcattcagcccttcataggcacatcctgtctcacattggaaacaaactatttgagtgtgaggaatgtccagagaagttatatcattgcaaacaatgtgggaaagcctttatctctctcaccagtgttgacagacacatggtaacacacactagtaatgggccttataagggtccagtgtatgagaagccttttgattttcctagtgtatttcaaatgcctcagagcacttacactggagagaaaacatataaatgtaaacattgtgataaagccttcaattattcaagttatcttcgtgaacatgaaagaactcatactggagagaaaccctatgcatgtaagaaatgtggtaaatcattcactttttccagttctcttcgccaacatgaaagatctcatactggagagaaaccctatgaatgtaaggaatgtggcaaagccttcagtcgttccacttacttgggaatacatgaaagaacgcatactggagaaaaaccctatgaatgtataaaatgtggcaaagcctttagatgttccagagtcctcagagtccatgaaaggactcacagtggagaaaagccctatgaatgtaaacaatgtggtaaagccttcaaatattctagtaacctatgtgagcatgaaagaactcacactggagtgaaaccttatggatgtaaggaatgtggtaagtcgtttacttcttccagtgcccttcgaagccatgaaaggactcatactggagaaaaaccctatgaatgtaagaaatgtggtaaagccttcagttgttccagttcccttcgaaagcatgaaagagcttatatgtgg

SEQ ID NO: 7112 - DNA, 3225 bp, Homo sapiens
  source 1..3225: mol_type = genomic DNA
atgactactgcaaactgtggcgcccacgacgagctcgacttcaaactcgtctttggcgaggacggggcgccggcgccgccgcccccgggctcgcggcctgcagatcttgagccagatgattgtgcatccatttacatctttaatgtagatccacctccatctactttaaccacaccactttgcttaccacatcatggattaccgtctcactcttctgttttgtcaccatcgtttcagctccaaagtcacaaaaactatgaaggaacttgtgagattcctgaatctaaatatagcccattaggtggtcccaaaccctttgagtgcccaagtattcaaattacatctatctctcctaactgtcatcaagaattagatgcacatgaagatgacctacagataaatgacccagaacgggaatttttggaaaggccttctagagatcatctctatcttcctcttgagccatcctaccgggagtcttctcttagtcctagtcctgccagcagcatctcttctaggagttggttctctgatgcatcttcttgtgaatcgctttcacatatttatgatgatgtggactcagagttgaatgaagctgcagcccgatttacccttggatcccctctgacttctcctggtggctctccagggggctgccctggagaagaaacttggcatcaacagtatggacttggacactcattatcacccaggcaatctccttgccactctcctagatccagtgtcactgatgagaattggctgagccccaggccagcctcaggaccctcatcaaggcccacatccccctgtgggaaacggaggcactccagtgctgaagtttgttatgctgggtccctttcaccccatcactcacctgttccttcacctggtcactcccccaggggaagtgtgacagaagatacgtggctcaatgcttctgtccatggtgggtcaggccttggccctgcagtttttccatttcagtactgtgtagagactgacatccctctcaaaacaaggaaaacttctgaagatcaagctgccatactaccaggaaaattagagctgtgttcagatgaccaagggagtttatcaccagcccgggagacttcaatagatgatggccttggatctcagtatcctttaaagaaagattcatgtggtgatcagtttctttcagttccttcaccctttacctggagcaaaccaaagcctggccacacccctatatttcgcacatcttcattacctccactagactggcctttaccagctcattttggacaatgtgaactgaaaatagaagtgcaacctaaaactcatcatcgagcccattatgaaactgaaggtagccgaggggcagtaaaagcatctactgggggacatcctgttgtgaagctcctgggctataacgaaaagccaataaatctacaaatgtttattgggacagcagatgatcgatatttacgacctcatgcattttaccaggtgcatcgaatcactgggaagacagtcgctactgcaagccaagagataataattgccagtacaaaagttctggaaattccacttcttcctgaaaataatatgtcagccagtattgattgtgcaggtattttgaaactccgcaattcagatatagaacttcgaaaaggagaaactgatattggcagaaagaatactagagtacgacttgtgtttcgtgtacacatcccacagcccagtggaaaagtcctttctctgcagatagcctctatacccgttgagtgctcccagcggtctgctcaagaacttcctcatattgagaagtacagtatcaacagttgttctgtaaatggaggtcatgaaatggttgtgactggatctaattttcttccagaatccaaaatcatttttcttgaaaaaggacaagatggacgacctcagtgggaggtagaagggaagataatcagggaaaaatgtcaaggggctcacattgtccttgaagttcctccatatcataacccagcagttacagctgcagtgcaggtgcacttttatctttgcaatggcaagaggaaaaaaagccagtctcaacgttttacttatacaccagttttgatgaagcaagaacacagagaagagattgatttgtcttcagttccatctttgcctgtgcctcatcctgctcagacccagaggccttcctctgattcagggtgttcacatgacagtgtactgtcaggacagagaagtttgatttgctccatcccacaaacatatgcatccatggtgacctcatcccatctgccacagttgcagtgtagagatgagagtgttagtaaagaacagcatatgattccttctccaattgtacaccagccttttcaagtcacaccaacacctcctgtggggtcttcctatcagcctatgcaaactaatgttgtgtacaatggaccaacttgtcttcctattaatgctgcctctagtcaagaatttgattcagttttgtttcagcaggatgcaactctttctggtttagtgaatcttggctgtcaaccactgtcatccataccatttcattcttcaaattcaggctcaacaggacatctcttagcccatacacctcattctgtgcataccctgcctcatctgcaatcaatgggatatcattgttcaaatacaggacaaagatctctttcttctccagtggctgaccagattacaggtcagccttcgtctcagttacaacctattacatatggtccttcacattcagggtctgctacaacagcttccccagcagcttctcatcccttggctagttcaccgctttctgggccaccatctcctcagcttcagcctatgccttaccaatctcctagctcaggaactgcctcatcaccgtctccagccaccagaatgcattctggacagcactcaactcaagcacaaagtacgggccaggggggtctttctgcaccttcatccttaatatgtcacagtttgtgtgatccagcgtcatttccacctgatggggcaactgtgagcattaaacctgaaccagaagatcgagagcctaactttgcaaccattggtctgcaggacatcactttagatgatgtgaacgagataattgggagagacatgtcccagatttctgtttcccaaggagcaggggtgagcaggcaggctcccctcccgagtcctgagtccctggatttaggaagatctgatgggctc

SEQ ID NO: 7113 - DNA, 1440 bp, Homo sapiens
  source 1..1440: mol_type = genomic DNA
atggcttcagacagcatatttgagtcatttccttcgtacccacagtgcttcatgagagaatgcatacttggaatgaatccttctagagacgtccacgatgccagcacgagccgccgcttcacgccgccttccaccgcgctgagcccaggcaagatgagcgaggcgttgccgctgggcgccccggacgccggcgctgccctggccggcaagctgaggagcggcgaccgcagcatggtggaggtgctggccgaccacccgggcgagctggtgcgcaccgacagccccaacttcctctgctccgtgctgcctacgcactggcgctgcaacaagaccctgcccatcgctttcaaggtggtggccctaggggatgttccagatggcactctggtcactgtgatggctggcaatgatgaaaactactcggctgagctgagaaatgctaccgcagccatgaagaaccaggttgcaagatttaatgacctcaggtttgtcggtcgaagtggaagagggaaaagcttcactctgaccatcactgtcttcacaaacccaccgcaagtcgccacctaccacagagccatcaaaatcacagtggatgggccccgagaacctcgaagacatcggcagaaactagatgatcagaccaagcccgggagcttgtccttttccgagcggctcagtgaactggagcagctgcggcgcacagccatgagggtcagcccacaccacccagcccccacgcccaaccctcgtgcctccctgaaccactccactgcctttaaccctcagcctcagagtcagatgcaggatacaaggcagatccaaccatccccaccgtggtcctacgatcagtcctaccaatacctgggatccattgcctctccttctgtgcacccagcaacgcccatttcacctggacgtgccagcggcatgacaaccctctctgcagaactttccagtcgactctcaacggcacccgacctgacagcgttcagcgacccgcgccagttccccgcgctgccctccatctccgacccccgcatgcactatccaggcgccttcacctactccccgacgccggtcacctcgggcatcggcatcggcatgtcggccatgggctcggccacgcgctaccacacctacctgccgccgccctaccccggctcgtcgcaagcgcagggaggcccgttccaagccagctcgccctcctaccacctgtactacggcgcctcggccggctcctaccagttctccatggtgggcggcgagcgctcgccgccgcgcatcctgccgccctgcaccaacgcctccaccggctccgcgctgctcaaccccagcctcccgaaccagagcgacgtggtggaggccgagggcagccacagcaactcccccaccaacatggcgccctccgcgcgcctggaggaggccgtgtggaggccctac

SEQ ID NO: 7114 - DNA, 2337 bp, Homo sapiens
  source 1..2337: mol_type = genomic DNA
atggcagctaatggggactctcccccatggtccccggccctggctgcagagggacgtggcagctcatgtgaggcttcagtgtcatttgaggacgtgactgtggacttcagcaaggaggagtggcagcacttggaccctgcccagagacgcctgtactgggatgtgacactagagaactacagccacctgctctcagtggggtaccaaattcccaagtcagaggctgccttcaagttggagcaaggagaggggccatggatgctggagggggaagccccacatcagagctgttcaggtgaggctattgggaaaatgcagcaacagggaattcctggaggaattttcttccactgtgagagatttgatcaacccataggagaagattcattatgttctattttagaagaactgtggcaagataatgaccagctagagcaacgtcaggaaaaccagaataaccttttaagtcatgtgaaagtattgattaaggagaggggctatgaacataaaaacattgaaaaaataattcatgtgactaccaagcttgttccttcaattaaaagactccataactgtgacacaattttgaagcatactttaaactcacataatcataatagaaacagtgcaacaaagaaccttggcaagatttttggaaatggtaacaatttcccccatagcccttcctctactaagaatgagaatgctaaaacaggagcaaattcctgtgaacatgaccactatgaaaaacatctcagccacaaacaagctcccacccaccatcagaaaattcatcctgaggagaagctttatgtgtgtactgaatgtgtaatgggcttcactcagaagtcacatctgtttgagcatcagagaattcatgctggagaaaagtcccgtgaatgtgacaaaagcaacaaagtcttcccccagaaaccccaggttgatgtacatccaagtgtttatacaggagaaaaaccctatctgtgtactcaatgtgggaaagtctttaccctcaaatcaaacctcattacacatcaaaaaattcataccgggcagaaaccctacaaatgcagtgaatgtggaaaagcctttttccagagatcagacctctttagacatctgagaattcatacaggagaaaaaccttatgaatgcagtgaatgtggaaaaggcttctcccagaactcagacctcagtatacatcagaaaactcataccggagagaaacactatgaatgcaatgaatgtgggaaggctttcacaagaaaatcagcactcaggatgcatcagagaatccacacgggagagaaaccttatgtatgcgctgactgtgggaaggccttcatccagaaatcacatttcaacacacatcagagaattcatactggagaaaagccgtatgaatgcagtgactgtgggaaatccttcactaagaagtcacaactccatgtgcatcaaagaattcacaccggagagaaaccctatatatgtacagaatgtggaaaggtcttcactcacaggacaaacctcaccacacatcagaaaactcatactggggaaaaaccctatatgtgtgctgaatgtggaaaggcttttactgaccagtcaaatctcattaaacaccagaaaactcacactggagagaaaccctataagtgcaatggctgtggaaaagccttcatatggaagtcgcgcctcaaaatacatcagaaatctcatattggagagagacactatgaatgcaaggactgcgggaaagccttcatccagaaatcaacactaagcgtgcatcagagaatccatacaggagagaaaccgtacgtttgtcctgaatgcgggaaggcctttatccagaaatcgcacttcattgcgcatcatagaatccatactggagagaagccttatgaatgcagcgactgtgggaaatgcttcactaagaagtcacaactccgtgtgcatcagaaaatccacacaggtgagaagcccaatatatgtgctgaatgtggaaaggccttcactgaccgatcaaatctcataacacatcagaaaatccacactagggagaaaccctatgaatgtggtgactgcgggaaaaccttcacctggaagtcacgcctcaatatacatcagaagtctcatactggagaaagacactatgaatgtagtaaatgtgggaaagctttcatccagaaagccacactaagtatgcatcagataattcatacaggaaagaaaccttatgcttgtacagaatgtcagaaggcctttactgacagatcgaatctcattaaacaccagaaaatgcatagtggagaaaaacgctataaagccagtgac

SEQ ID NO: 7115 - DNA, 579 bp, Homo sapiens
  source 1..579: mol_type = genomic DNA
atggctgctgaaccagtagaagacaattgcatcaactttgtggcaatgaaatttattgacaatacgctttactttatagctgaagatgatgaaaacctggaatccgattactttggcaagcttgaatctaaattatcagtcataagaaatttgaatgaccaagttctcttcattgaccaaggaaatcggcctctatttgaagatatgactgattctgactgtagagataatgcaccccggaccatatttattataagtatgtataaagatagccagcctagaggtatggctgtaactatctctgtgaagtgtgagaaaatttcaactctctcctgtgagaacaaaattatttcctttaaggaaatgaatcctcctgataacatcaaggatacaaaaagtgacatcatattctttcagagaagtgtcccaggacatgataataagatgcaatttgaatcttcatcatacgaaggatactttctagcttgtgaaaaagagagagacctttttaaactcattttgaaaaaagaggatgaattgggggatagatctataatgttcactgttcaaaacgaagac

SEQ ID NO: 7116 - DNA, 792 bp, Homo sapiens
  source 1..792: mol_type = genomic DNA
atgccgcgctctttcctcgtcaggaagccctccgaccccaatcggaagcctaactacagcgagctgcaggactctaatccagagtttaccttccagcagccctacgaccaggcccacctgctggcagccatcccacctccggagatcctcaaccccaccgcctcgctgccaatgctcatctgggactctgtcctggcgccccaagcccagccaattgcctgggcctcccttcggctccaggagagtcccagggtggcagagctgacctccctgtcagatgaggacagtgggaaaggctcccagccccccagcccaccctcaccggctccttcgtccttctcctctacttcagtctcttccttggaggccgaggcctatgctgccttcccaggcttgggccaagtgcccaagcagctggcccagctctctgaggccaaggatctccaggctcgaaaggccttcaactgcaaatactgcaacaaggaatacctcagcctgggtgccctcaagatgcacatccgaagccacacgctgccctgcgtctgcggaacctgcgggaaggccttctctaggccctggctgctacaaggccatgtccggacccacactggcgagaagcccttctcctgtccccactgcagccgtgccttcgctgaccgctccaacctgcgggcccacctccagacccactcagatgtcaagaagtaccagtgccaggcgtgtgctcggaccttctcccgaatgtccctgctccacaagcaccaagagtccggctgctcaggatgtccccgc

SEQ ID NO: 7117 - DNA, 1080 bp, Homo sapiens
  source 1..1080: mol_type = genomic DNA
atggcgggacacctggcttcagattttgccttctcgccccctccaggtggtggaggtgatgggccaggggggccggagccgggctgggttgatcctcggacctggctaagcttccaaggccctcctggagggccaggaatcgggccgggggttgggccaggctctgaggtgtgggggattcccccatgccccccgccgtatgagttctgtggggggatggcgtactgtgggccccaggttggagtggggctagtgccccaaggcggcttggagacctctcagcctgagggcgaagcaggagtcggggtggagagcaactccgatggggcctccccggagccctgcaccgtcacccctggtgccgtgaagctggagaaggagaagctggagcaaaacccggaggagtcccaggacatcaaagctctgcagaaagaactcgagcaatttgccaagctcctgaagcagaagaggatcaccctgggatatacacaggccgatgtggggctcaccctgggggttctatttgggaaggtattcagccaaacgaccatctgccgctttgaggctctgcagcttagcttcaagaacatgtgtaagctgcggcccttgctgcagaagtgggtggaggaagctgacaacaatgaaaatcttcaggagatatgcaaagcagaaaccctcgtgcaggcccgaaagagaaagcgaaccagtatcgagaaccgagtgagaggcaacctggagaatttgttcctgcagtgcccgaaacccacactgcagcagatcagccacatcgcccagcagcttgggctcgagaaggatgtggtccgagtgtggttctgtaaccggcgccagaagggcaagcgatcaagcagcgactatgcacaacgagaggattttgaggctgctgggtctcctttctcagggggaccagtgtcctttcctctggccccagggccccattttggtaccccaggctatgggagccctcacttcactgcactgtactcctcggtccctttccctgagggggaagcctttccccctgtctctgtcaccactctgggctctcccatgcattcaaac

SEQ ID NO: 7118 - DNA, 1317 bp, Homo sapiens
  source 1..1317: mol_type = genomic DNA
atgaacttgccaagagctgagcgccttcgctccacaccgcagcgcagcctccgggactccgatggggaagacggtaaaatcgatgtcctgggagaggaggaagatgaagacgaggaggaggcggcgagccagcagttcctagagcagtcgctccagccggggctgcaggtggcccggtggggcggggttgcgcttccccgagagcacatcgagggcggcggcggcccgagcgacccctcagagtttggcaccgagttcagggcaccgccaaggtctgcggcggcctctgaagatgcccggcagccggcaaagcccccctcctcgtacatcgcgctcatcaccatggccatcctgcaaagcccgcacaagcgcctcacgctcagcggcatctgcgccttcattagtgaccgcttcccctactaccgccgcaagttccccgcctggcagaacagcatccgccacaacctctcgctgaacgactgcttcgtcaagatcccccgcgagccgggccgcccaggcaagggcaactactggagcctggaccccgcctcccaggacatgttcgacaatggcagctttctccggcgtaggaagcgtttccagcgccaccaaccgaccccgggagcccacctgccccaccccttccctctacctgctgcacacgccgccctgcacaacccccgcccaggccctctgcttggggcccctgccccgccgcagccagtcccgggggcctaccccaacaccggccccgggagacgcccttacgctctgctgcacccgcatcctcctcgctacctactgctctcggcccccgcctatgccggggcaccgaagaaagcagaaggcgcggacctggcgaccccggcacccttcccgtgctgcagccctcacttggtcctcagccttgggaggagggcaagggtctggcgtcgccaccgggaggcggatgcatctctttcagcattgagagtatcatgcaaggggtcaggggagcgggtacaggggctgcgcagagtttgtccccgaccgcgtggagctactgccccctgctccagcgaccgtcaagcctgtcggacaattttgcagcaacagcagcggcatcaggaggaggactgcgccaacggctgcgctcccaccaagggcgcggtgctgggcgggcacctgtcggccgcgtcggcgctgctgcggtatcaggcggtggcagagggctctgggctgacatcgctggccgcccctttgggcggagaggggacctcaccagtttttttagtatcgcccacgcccagttccctggccgagtccgcagggccctcc

SEQ ID NO: 7119 - DNA, 2118 bp, Homo sapiens
  source 1..2118: mol_type = genomic DNA
atggccctgcccagcccacaggttctaatggggttgccagcgttgctgatgggcccggcgcagcatacttcttggccctgtggctcagctgtccccacattgaagagcatggtaacctttgaagatgtggctgtatacttctcccaagaggagtgggagctccttgatgcagcccagaggcacctgtaccacagtgtgatgctggaaaaccttgagcttgtgacctcacttggttcttggcatggagtagagggtgagggggcccatcccaagcagaatgtttctgtagaagtgttacaggtcaggatccctaatgcagatccttccaccaagaaagctaactcctgtgacatgtgtgggccattcttgaaagacattttgcacctggctgagcatcagggaacacagtctgaggagaaaccctacacatgtggagcatgtgggagagacttttggttgaatgcaaaccttcaccagcaccagaaggagcacagtggagggaagccctttagatggtacaaggacagggacgcacttatgaagagctctaaagtccacctgtcagagaaccccttcacttgcagggaaggtgggaaggtcatcctgggcagctgtgacctcctccagcttcaagctgttgacagtgggcagaagccatattccaatcttgggcagcttccagaagtctgtaccacacagaaactcttcgagtgcagcaactgtggaaaagccttcctgaagagctccactctccccaaccatctgagaactcactctgaagagataccatttacatgcccaacaggtggaaatttcttagaggagaaatcaatccttggtaataaaaaatttcacactggggaaataccccatgtgtgtaaggagtgtgggaaggcctttagtcactcatctaagctgaggaagcaccagaaatttcacactgaagtaaaatattatgagtgcattgcatgtgggaaaaccttcaaccacaaactcacatttgttcatcatcagagaattcactcaggagaaagaccttatgagtgtgatgaatgtgggaaagccttcagtaacagatcacacctcattcggcatgagaaagttcacactggagaaaggccttttgagtgcctgaaatgtggaagagccttcagccaaagctccaatttccttcggcatcagaaagttcacacacaggtaagaccttatgagtgcagtcaatgtggtaaatccttcagccgaagctctgctctcattcagcactggagagttcacactggagaaagaccgtatgaatgcagtgaatgtggaagagcttttaacaataactccaaccttgctcagcaccagaaagttcacaccggagaacggccttttgagtgcagtgaatgtggaagagacttcagccaaagctcccatctccttcgacatcagaaagttcacactggagaacggccttttgaatgctgtgattgtggtaaagccttcagtaatagctccaccctcatccagcaccagaaagtacatactgggcaaaggccttatgagtgcagcgaatgtaggaaatccttcagccgcagctccagcctgattcagcactggagaattcacactggagaaaagccttacgagtgtagtgagtgtgggaaagcctttgctcacagctccactctcattgaacactggagagttcacacaaaagaaaggccttatgagtgcaatgaatgtgggaaattctttagccaaaactccattctcattaagcatcagaaagttcatactggagaaaagccttataaatgcagtgaatgtgggaaattctttagccgaaaatccagccttatttgtcactggagagttcacactggagaaaggccttacgaatgcagtgaatgtgggagagcctttagcagtaactcccacctggttcgtcatcagagagttcacacacaagaaaggccctatgagtgcatccagtgtggaaaagcctttagtgaaagatctacacttgttcggcaccagaaagttcacaccagagaaaggacttatgagtgtagccagtgtgggaaactcttcagccatctttgtaaccttgcacagcataaaaagattcatacc

SEQ ID NO: 7120 - DNA, 1215 bp, Homo sapiens
  source 1..1215: mol_type = genomic DNA
atggggccgcccctggcgccgcgcccggcccacgtacccggggaggccgggccccggaggacgagggaaagcaggccgggcgccgtgagcttcgcggacgtggccgtgtacttctctcccgaggagtgggaatgcctgcggccagcgcagagggccctgtaccgggacgtgatgcgggagaccttcggccacctgggcgcgctgggattttcagttcccaaacccgcttttatctcgtgggtggaaggagaagtggaggcgtggagcccggaggcccaggatcccgacggtgagagctctgcagctttcagcaggggccaaggacaggaagcaggatccagggatgggaatgaggagaaggaaaggctgaagaagtgtccaaaacaaaaagaggtggcgcatgaagtggctgtcaaggagtggtggcccagcgtcgcctgcccagagttctgcaaccctaggcagagccccatgaatccctggctcaaggacactctgacccgaagactgccccactcttgcccagactgtggccgcaacttcagctacccttccctcctggccagccaccagcgggtccactccggggagcggcccttctcctgcggccagtgtcaggcgcgtttctcccagcgcaggtacctgctccagcatcagttcatccacaccggcgagaagccctacccctgccccgactgcgggcgccgcttccgccagaggggttccctggctatccacaggcgggctcacaccggggagaagccttacgcgtgctcagactgcaagagtcgcttcacttacccctacctgctggccatccaccagcgcaagcacacgggcgagaagccctacagctgccccgattgcagcctccgtttcgcctacacctccctgctggccatccacaggcgcatacacaccggcgagaagccctacccctgtcctgactgcggccgccgcttcacctattcttccctcctcctcagtcaccggcgcattcactccgacagccggcccttcccctgcgtggagtgtgggaaaggcttcaagcgcaagaccgccctggaagcccatcggtggatccaccgctcctgcagcgagaggcgcgcgtggcagcaggccgtggtggggcgttcagagcccatccctgttttgggaggcaaggatcccccagttcacttccggcactttccagatatatttcaagagtgtggg

SEQ ID NO: 7121 - DNA, 1272 bp, Homo sapiens
  source 1..1272: mol_type = genomic DNA
atggcgtccatgcccccgacgcccgaggcccagggaccaatactgtttgaggatctggctgtgtatttttctcaagaggagtgcgtgactctgcaccctgcccagaggtccctcagcaaagatggtacaaaagagtctttggaggatgcggctttgatgggagaggaaggcaagcctgagattaatcagcagttaagcctagagtctatggaacttgacgagcttgccttagaaaagtaccccattgctgcaccccttgtcccttacccagaaaaatcctctgaggatggagttggaaaccctgaagcgaaaatattaagtggaactcccacttacaagagaagggtcatcagccttttagttaccattgaaaaccacaccccattagtagaactctctgaatatttaggaaccaacacactttctgaaattcttgattctccctgggaaggagccaaaaatgtgtacaaatgtcctgagtgtgaccaaaacttcagcgatcattcatacctagttttgcatcagaaaattcattcaggagagaaaaaacataaatgtggtgactgtggaaagatcttcaatcatagagccaacctgaggacacacaggagaatccatactggtgagaaaccttataagtgtgccaagtgcagtgccagctttcgccagcactctcatctatcccgacacatgaatagccacgtaaaggagaagccctatacatgtagcatatgtggtagaggttttatgtggctcccaggattggcacagcatcagaaaagccacagtgctgaaaacacctacgaatctactaactgtgataaacattttaatgagaaaccaaatcttgctttgcctgaggaaacattcgtatcaggcccccagtaccagcacactaagtgcatgaagagcttcaggcagtccttatatcctgccctttccgagaagagccacgacgaggactctgaacgctgcagcgatgatggggacaatttcttctcattctcaaaattcaagcccttacagtgtcctgactgtgacatgacctttccttgtttctctgagcttatttcccatcagaacattcatacagaggaaaggccccataagtgcaaaacatgcgaggaaagttttgctttggactcagaacttgcatgccaccagaagagccacatgctagcggaaccttttaaatgtaccgtgtgtgggaaaactttcaagtcgaatttgcatctcattactcataagcgaactcacataaaaaacaccacg

SEQ ID NO: 7122 - DNA, 951 bp, Homo sapiens
  source 1..951: mol_type = genomic DNA
atgtacaacatgatggagacggagctgaagccgccgggcccgcagcaaacttcggggggcggcggcggcaactccaccgcggcggcggccggcggcaaccagaaaaacagcccggaccgcgtcaagcggcccatgaatgccttcatggtgtggtcccgcgggcagcggcgcaagatggcccaggagaaccccaagatgcacaactcggagatcagcaagcgcctgggcgccgagtggaaacttttgtcggagacggagaagcggccgttcatcgacgaggctaagcggctgcgagcgctgcacatgaaggagcacccggattataaataccggccccggcggaaaaccaagacgctcatgaagaaggataagtacacgctgcccggcgggctgctggcccccggcggcaatagcatggcgagcggggtcggggtgggcgccggcctgggcgcgggcgtgaaccagcgcatggacagttacgcgcacatgaacggctggagcaacggcagctacagcatgatgcaggaccagctgggctacccgcagcacccgggcctcaatgcgcacggcgcagcgcagatgcagcccatgcaccgctacgacgtgagcgccctgcagtacaactccatgaccagctcgcagacctacatgaacggctcgcccacctacagcatgtcctactcgcagcagggcacccctggcatggctcttggctccatgggttcggtggtcaagtccgaggccagctccagcccccctgtggttacctcttcctcccactccagggcgccctgccaggccggggacctccgggacatgatcagcatgtatctccccggcgccgaggtgccggaacccgccgcccccagcagacttcacatgtcccagcactaccagagcggcccggtgcccggcacggccattaacggcacactgcccctctcacacatg

SEQ ID NO: 7123 - DNA, 1122 bp, Homo sapiens
  source 1..1122: mol_type = genomic DNA
atggccgccccgccgcgccccgcgccatcgccccccgccccgcggcgcctcgacacgagcgacgtcctgcagcagatcatggccatcaccgaccagagcctggacgaggcacaggccagaaagcatgctctgaattgccatcggatgaagcctgctctgttcagcgtgctctgtgagatcaaggaaaagacagtggtaagcatccgtggcattcaagacgaagatccccctgacgcccagctcctgaggctggataacatgctgctggctgagggcgtgtgcaggcccgagaagagaggaagaggaggagcggtggccagggccggcacagcaacaccaggtggctgtccaaatgacaatagcattgagcactctgactacagggccaagctgtcccagatccgacagatttaccactctgagctagagaaatatgaacaggcctgtcgtgagttcaccacgcacgtcaccaacctcctccaggagcagagcaggatgaggcctgtctcccctaaggagattgagcgcatggtcggcgccattcacggcaagttcagcgccatccagatgcagttgaagcagagcacctgtgaggcagtgatgaccctgcgttcgcggctgctcgatgccaggcgcaagcggcggaatttcagcaagcaggcgacggaagtgctgaatgagtatttttactcccatctgaacaacccttaccccagcgaagaagccaaagaagagctggccaggaagggcggcctcaccatctcccaggtctctaactggtttggcaacaaaagaatccggtataaaaagaacatggggaagtttcaagaagaggctaccatttacacgggtaaaacggctgtggataccacggaagttggggtcccagggaaccacgccagctgcctgtcaacacctagctccggctcctctggacccttcccgctgcccagcgctggggacgccttcctcaccctgcggactctggcctctctccagcctcctcctgggggaggctgcctgcagtcccaggcccagggtagctggcagggggccaccccccaacctgcaactgcctcacctgctggagaccctggcagcatcaactccagtacatctaat

SEQ ID NO: 7124 - DNA, 1926 bp, Homo sapiens
  source 1..1926: mol_type = genomic DNA
atggctgaggcggccccggccccgacatctgaatgggactccgagtgccttacatccctgcagccccttcctcttcctacacccccagcagcaaatgaggcacacctgcagacagcagctatctctctgtggacagtggtggccgccgtgcaggctatagagaggaaggtggagatccacagccggcgactcctacacctagaaggtcggacagggacagcagagaagaaactagccagctgtgaaaagacagttaccgagcttgggaaccagctggagggcaagtgggccgtgctgggaaccctgctgcaggagtacgggctgctgcagaggcggctggagaacttggagaacctgctgcgcaacaggaacttctggatcctgcggctccctccaggtattaagggagatatcccaaaggtgcctgtggcatttgatgatgtctccatctacttttccactccagagtgggaaaaattagaagaatggcaaaaggaactttacaagaatatcatgaagggcaactacgagtctctcatctccatggattatgctataaatcaacctgatgtcttatctcagattcaaccagaaggggaacataatacagaggaccaggcagggccagaggaaagtgagattcccacagaccccagtgaagagcctggtatttcaacatcagatattctgtcttggattaaacaagaagaagagcctcaggttggggccccaccggagtccaaggagagtgacgtgtacaaaagcacttatgctgatgaagagcttgtcatcaaagctgaaggccttgctagatcctcgttgtgccctgaggttccagtccctttctcttctccaccagcagcagcaaaggatgctttttcagatgtggctttcaaaagccagcagtctacatccatgacaccttttggacgtccagccactgacctgcctgaagcctctgagggacaagtgacttttactcagttgggtagctatcccctcccacctccagttggcgagcaggtgttctcatgccaccactgtggcaagaatctcagccaagacatgttgctgacccaccaatgtagccatgctactgagcaccccttaccctgtgcccagtgccctaagcactttactccacaggcggacctcagcagcacctcccaggaccatgccagcgagacaccccccacctgcccacactgtgccaggacttttactcacccatcaagacttacctaccatcttcgggtccataacagcactgagcgtcctttcccctgtcctgattgccccaagcgctttgctgaccaggctcgactcaccagccaccggagagctcatgcaagcgaaaggcccttccgctgtgcccagtgcggcaggagcttcagcttgaaaatcagcctcctgctccaccagcggggtcatgcacaagagcgccctttctcctgccctcagtgtggcattgacttcaacggccactcggccctgatccgccaccagatgatccacacaggcgagcgtccttacccctgcactgactgcagtaagagcttcatgcgcaaggagcacctgctgaaccaccggcggctgcacacaggcgagcggcccttcagttgtcctcactgtggcaagagcttcatccgcaagcaccacctaatgaaacaccagcgcatccacaccggggagcggccctacccctgctcctactgtggcaggagcttccgctacaaacagacactcaaggaccacctccgttcaggccacaatggaggctgtgggggtgatagtgacccatcaggtcagccacccaacccaccaggtcccctcataactgggcttgaaacttctggcctgggtgtcaacactgaaggtctagagaccaaccagtggtatggggaagggagtggagggggagttttg

SEQ ID NO: 7125 - DNA, 1515 bp, Homo sapiens
  source 1..1515: mol_type = genomic DNA
atgaaattcaagttacatgtgaattctgccaggcaatacaaggacctgtggaatatgagtgatgacaaaccctttctatgtactgcgcctggatgtggccagcgttttaccaacgaggatcatttggctgtccataaacataaacatgagatgacactgaaatttggtccagcacgtaatgacagtgtcattgtggctgatcagaccccaacaccaacaagattcttgaaaaactgtgaagaagtgggtttgtttaatgagttggcgagtccatttgagaatgaattcaagaaagcttcagaagatgacattaaaaaaatgcctctagatttatcccctcttgcaacacctatcataagaagcaaaattgaggagccttctgttgtagaaacaactcaccaggatagtcctttacctcacccagagtctactaccagtgatgagaaggaagtaccattggcacaaactgcacagcccacatcagctattgttcgtccagcatcattacaggttcccaatgtgctgcttacaagttctgactcaagtgtaattattcagcaggcagtaccttcaccaacctcaagtactgtaatcacccaggcaccatcctctaacaggccaattgtccctgtaccaggcccatttcctcttctgttacatcttcctaatggacaaaccatgcctgttgctattcctgcatcaattacaagttctaatgtgcatgttccagctgcagtcccactcgttcgaccagtcaccatggtgcctagtgttccaggaatcccaggtccttcctctccccaaccagtacagtcagaagcaaaaatgagattaaaagctgctttgacccagcaacatcctccagttaccaatggtgatactgtcaaaggtcatggtagcggattggttaggactcagtcagaggaatctcgaccgcagtcattacaacagccagccacatccactacagaaactccggcttctccagctcacacaactccacagacccaaagtacaagtggtcgtcggagaagagcagctaacgaagatcctgatgaaaaaaggagaaagtttttagagcgaaatagagcagcagcttcaagatgccgacaaaaaaggaaagtctgggttcagtctttagagaagaaagctgaagacttgagttcattaaatggtcagctgcagagtgaagtcaccctgctgagaaatgaagtggcacagctgaaacagcttcttctggctcataaagattgccctgtaaccgccatgcagaagaaatctggctatcatactgctgataaagatgatagttcagaagacatttcagtgccgagtagtccacatacagaagctatacagcatagttcggtcagcacatccaatggagtcagttcaacctccaaggcagaagctgtagccacttcagtcctcacccagatggcggaccagagtacagagcctgctctttcacagatcgttatggctccttcctcccagtcacagccctcaggaagt

SEQ ID NO: 7126 - DNA, 2073 bp, Homo sapiens
  source 1..2073: mol_type = genomic DNA
atggaaaagatctattccagaggggagcttcaccacttcattgacggctttaatgaagagaaaagcaactggatgcgctatgtgaatccagcacactctccccgggagcaaaacctggctgcgtgtcagaacgggatgaacatctacttctacaccattaagcccatccctgccaaccaggaacttcttgtgtggtattgtcgggactttgcagaaaggcttcactacccttatcccggagagctgacaatgatgaatctcacacaaacacagagcagtctaaagcaaccgagcactgagaaaaatgaactctgcccaaagaatgtcccaaagagagagtacagcgtgaaagaaatcctaaaattggactccaacccctccaaaggaaaggacctctaccgttctaacatttcacccctcacatcagaaaaggacctcgatgactttagaagacgtgggagccccgaaatgcccttctaccctcgggtcgtttaccccatccgggcccctctgccagaagactttttgaaagcttccctggcctacgggatcgagagacccacgtacatcactcgctcccccattccatcctccaccactccaagcccctctgcaagaagcagccccgaccaaagcctcaagagctccagccctcacagcagccctgggaatacggtgtcccctgtgggccccggctctcaagagcaccgggactcctacgcttacttgaacgcgtcctacggcacggaaggtttgggctcctaccctggctacgcacccctgccccacctcccgccagctttcatcccctcgtacaacgctcactaccccaagttcctcttgcccccctacggcatgaattgtaatggcctgagcgctgtgagcagcatgaatggcatcaacaactttggcctcttcccgaggctgtgccctgtctacagcaatctcctcggtgggggcagcctgccccaccccatgctcaaccccacttctctcccgagctcgctgccctcagatggagcccggaggttgctccagccggagcatcccagggaggtgcttgtcccggcgccccacagtgccttctcctttaccggggccgccgccagcatgaaggacaaggcctgtagccccacaagcgggtctcccacggcgggaacagccgccacggcagaacatgtggtgcagcccaaagctacctcagcagcgatggcagcccccagcagcgacgaagccatgaatctcattaaaaacaaaagaaacatgaccggctacaagacccttccctacccgctgaagaagcagaacggcaagatcaagtacgaatgcaacgtttgcgccaagactttcggccagctctccaatctgaaggtccacctgagagtgcacagtggagaacggcctttcaaatgtcagacttgcaacaagggctttactcagctcgcccacctgcagaaacactacctggtacacacgggagaaaagccacatgaatgccaggtctgccacaagagatttagcagcaccagcaatctcaagacccacctgcgactccattctggagagaaaccataccaatgcaaggtgtgccctgccaagttcacccagtttgtgcacctgaaactgcacaagcgtctgcacacccgggagcggccccacaagtgctcccagtgccacaagaactacatccatctctgtagcctcaaggttcacctgaaagggaactgcgctgcggccccggcgcctgggctgcccttggaagatctgacccgaatcaatgaagaaatcgagaagtttgacatcagtgacaatgctgaccggctcgaggacgtggaggatgacatcagtgtgatctctgtagtggagaaggaaattctggccgtggtcagaaaagagaaagaagaaactggcctgaaagtgtctttgcaaagaaacatggggaatggactcctctcctcagggtgcagcctttatgagtcatcagatctacccctcatgaagttgcctcccagcaacccactacctctggtacctgtaaaggtcaaacaagaaacagttgaaccaatggatcct

SEQ ID NO: 7127 - DNA, 2148 bp, Homo sapiens
  source 1..2148: mol_type = genomic DNA
atgccaagcaccagctttccagtcccttccaagtttccacttggccctgcggctgcggtcttcgggagaggagaaactttggggcccgcgccgcgcgccggcggcaccatgaagtcagcggaggaagaacactatggctatgcatcctccaacgtcagccccgccctgccgctccccacggcgcactccaccctgccggccccgtgccacaaccttcagacctccacaccgggcatcatcccgccggcggatcacccctcggggtacggggcagctttggacggtgggcccgcgggctacttcctctcctccggccacaccaggcctgatggggcccctgccctggagagtcctcgcatcgagataacctcgtgcttgggcctgtaccacaacaataaccagtttttccacgatgtggaggtggaagacgtcctccctagctccaaacggtccccctccacggccacgctgagtctgcccagcctggaggcctacagagacccctcgtgcctgagcccggccagcagcctgtcctcccggagctgcaactcagaggcctcctcctacgagtccaactactcgtacccgtacgcgtccccccagacgtcgccatggcagtctccctgcgtgtctcccaagaccacggaccccgaggagggctttccccgcgggctgggggcctgcacactgctgggttccccgcggcactccccctccacctcgccccgcgccagcgtcactgaggagagctggctgggtgcccgctcctccagacccgcgtccccgtgcaacaagaggaagtacagcctcaacggccggcagccgccctactcaccccaccactcgcccacgccgtccccgcacggctccccgcgggtcagcgtgaccgacgactcgtggttgggcaacaccacccagtacaccagctcggccatcgtggccgccatcaacgcgctgaccaccgacagcagcctggacctgggagatggcgtccctgtcaagtcccgcaagaccaccctggagcagccgccctcagtggcgctcaaggtggagcccgtcggggaggacctgggcagccccccgcccccggccgacttcgcgcccgaagactactcctctttccagcacatcaggaagggcggcttctgcgaccagtacctggcggtgccgcagcacccctaccagtgggcgaagcccaagcccctgtcccctacgtcctacatgagcccgaccctgcccgccctggactggcagctgccgtcccactcaggcccgtatgagcttcggattgaggtgcagcccaagtcccaccaccgagcccactacgagacggagggcagccggggggccgtgaaggcgtcggccggaggacaccccatcgtgcagctgcatggctacttggagaatgagccgctgatgctgcagcttttcattgggacggcggacgaccgcctgctgcgcccgcacgccttctaccaggtgcaccgcatcacagggaagaccgtgtccaccaccagccacgaggccatcctctccaacaccaaagtcctggagatcccactcctgccggagaacagcatgcgagccgtcattgactgtgccggaatcctgaaactcagaaactccgacattgaacttcggaaaggagagacggacatcgggaggaagaacacacgggtacggctggtgttccgcgttcacgtcccgcaacccagcggccgcacgctgtccctgcaggtggcctccaaccccatcgaatgctcccagcgctcagctcaggagctgcctctggtggagaagcagagcacggacagctatccggtcgtgggcgggaagaagatggtcctgtctggccacaacttcctgcaggactccaaggtcattttcgtggagaaagccccagatggccaccatgtctgggagatggaagcgaaaactgaccgggacctgtgcaagccgaattctctggtggttgagatcccgccatttcggaatcagaggataaccagccccgttcacgtcagtttctacgtctgcaacgggaagagaaagcgaagccagtaccagcgtttcacctaccttcccgccaacggtaacgccatctttctaaccgtaagccgtgaacatgagcgcgtggggtgctttttc

SEQ ID NO: 7128 - DNA, 1770 bp, Homo sapiens
  source 1..1770: mol_type = genomic DNA
atggccttccgggatgtggctgtggccttcacccagaaggagtggaagctattgagttctgctcagaggaccctgtacagggaggtgatgctggagaactacagccatctggtctccctgggaattgcattttccaaaccaaaactcatcgaacagctggagcaaggcgacgaaccttggagagaggagaacgaacatcttctggacctttgtccagagcctagaacagaattccagccaagttttccccacctggtggccttttctagctcgcagctcctcagacaatatgcgctaagtggccatcccacacagatcttcccaagctcatctgcaggaggtgacttccaactagaagctccaagatgctctagtgaaaaaggagaaagtggagagacagaaggccccgacagctcattaagaaagaggccaagcagaatttctaggacattcttcagcccacatcaaggtgacccagtagaatgggtagaagggaacagagaaggaggaacagaccttcgcctggcccaaaggatgagtcttggggggtcagacacaatgttgaagggagcagacacttcagaatctggagcagtcatacgtggaaactatagactgggacttagcaaaaagtcaagcctgttcagccaccagaagcatcatgtgtgccctgaatgcgggagaggcttttgccagagatcagaccttatcaagcaccagaggacacacaccggggagaagccatacctgtgtcctgagtgtgggcgtcggtttagccagaaggcctccctctccatacaccagaggaagcactcgggggagaagccgtatgtgtgcagggaatgtgggcgacacttcaggtatacatcctctctcactaatcacaagaggattcactccggggagaggccctttgtatgtcaggagtgtgggcgaggctttcgccagaagatagccctccttctacaccagaggacgcacttggaggagaagcccttcgtgtgtcctgagtgtgggagaggcttttgccagaaggcatcactcctccagcaccagagctcacacacaggggagaggcccttcctgtgccttgagtgtgggcgtagcttcaggcagcagtcactcctccttagtcaccaggtcacacactcaggagagaagccttatgtctgtgctgagtgtgggcacagctttcgccaaaaggtcactctcatcaggcaccagaggacacacacaggggagaagccttacctgtgcccccagtgtgggcggggttttagccagaaggtcaccctcattggacaccagaggacacacacaggggagaagccctacctgtgccctgattgtgggcgtggctttggtcagaaggtcaccctcatcagacaccagaggacacacacaggggagaagccttatctgtgccccaagtgtgggcgtgcatttggctttaagtcgctcctcacccgacaccagaggacacactcagaggaggagctttacgtagacagggtgtgtggacaaggacttggccagaagtcacaccttatctctgaccaaaggacacactcaggagagaagccctgcatttgcgatgaatgtgggcgcggctttggctttaagtctgccctcatccgacatcagcggacccattctggggagaagccgtatgtctgcagggagtgtgggcgtggctttagccagaagtctcacttgcatagacacaggaggaccaagtctggtcatcagctcctaccccaagaggtcttc

SEQ ID NO: 7129 - DNA, 1431 bp, Homo sapiens
  source 1..1431: mol_type = genomic DNA
atggatgctgatgagggtcaagacatgtcccaagtttcagggaaggaaagcccccctgtaagcgatactccagatgagggcgatgagcccatgccgatccccgaggacctctccaccacctcgggaggacagcaaagctccaagagtgacagagtcgtggccagtaatgttaaagtagagactcagagtgatgaagagaatgggcgtgcctgtgaaatgaatggggaagaatgtgcggaggatttacgaatgcttgatgcctcgggagagaaaatgaatggctcccacagggaccaaggcagctcggctttgtcgggagttggaggcattcgacttcctaacggaaaactaaagtgtgatatctgtgggatcatttgcatcgggcccaatgtgctcatggttcacaaaagaagccacactggagaacggcccttccagtgcaatcagtgcggggcctcattcacccagaagggcaacctgctccggcacatcaagctgcattccggggagaagcccttcaaatgccacctctgcaactacgcctgccgccggagggacgccctcactggccacctgaggacgcactccgtcattaaagaagaaactaatcacagtgaaatggcagaagacctgtgcaagataggatcagagagatctctcgtgctggacagactagcaagtaacgtcgccaaacgtaagagctctatgcctcagaaatttcttggggacaagggcctgtccgacacgccctacgacagcagcgccagctacgagaaggagaacgaaatgatgaagtcccacgtgatggaccaagccatcaacaacgccatcaactacctgggggccgagtccctgcgcccgctggtgcagacgcccccgggcggttccgaggtggtcccggtcatcagcccgatgtaccagctgcacaagccgctcgcggagggcaccccgcgctccaaccactcggcccaggacagcgccgtggagaacctgctgctgctctccaaggccaagttggtgccctcggagcgcgaggcgtccccgagcaacagctgccaagactccacggacaccgagagcaacaacgaggagcagcgcagcggtctcatctacctgaccaaccacatcgccccgcacgcgcgcaacgggctgtcgctcaaggaggagcaccgcgcctacgacctgctgcgcgccgcctccgagaactcgcaggacgcgctccgcgtggtcagcaccagcggggagcagatgaaggtgtacaagtgcgaacactgccgggtgctcttcctggatcacgtcatgtacaccatccacatgggctgccacggcttccgtgatccttttgagtgcaacatgtgcggctaccacagccaggaccggtacgagttctcgtcgcacataacgcgaggggagcaccgcttccacatgagc

SEQ ID NO: 7130 - DNA, 642 bp, Homo sapiens
  source 1..642: mol_type = genomic DNA
atgtcacagaggaaggccagagggccaccagccatgccaggggtggggcatagccagactcaggccaaagcacggttgctgccaggcgctgacaggaagaggagccgcctcagcaggacaaggcaggacccgtgggaagaaagaagctggagcaaccagagatggagcagagctacccctggccctcgagggaccagggctgggggcctggctcttggcaggagcgaggccagtcctgagaatgccgcgcgggagcggagccgggtcaggacgctgcgccaggccttcttggccttgcaggctgctctgcctgccgtgccgcccgacaccaagctctccaagttggacgtgctggtgctcgccgccagctacatagcccacctcacccgcacactcggccacgagttgcctggccctgcctggccgcccttcctgcgtggactccgctacttgcaccctctcaagaagtggccgatgcgatctcgtctctatgctggaggcctggggtactccgatcttgactccaccacagccagcacccccagccaaagaacaagagatgcagaggtggggtcccaagtccctggagaggcagatgctctcctttccaccacaccactctcaccagctcttggtgacaaa

SEQ ID NO: 7131 - DNA, 1056 bp, Homo sapiens; identical to SEQ ID NO: 6650
  source 1..1056: mol_type = genomic DNA

SEQ ID NO: 7132 - DNA, 1737 bp, Homo sapiens
  source 1..1737: mol_type = genomic DNA
atgcttcggtctgggccagcctctgggccgtccgtccccactggccgggccatgccgagtcgccgcgtcgccagaccgccggctgcgccggagctgggggccttagggtcccccgacctctcctcactctcgctcgccgtttccaggagcacagatgaattggagatcatcgacgagtacatcaaggagaacggcttcggcctggacgggggacagccgggcccgggcgaggggctgccacgcctggtgtctcgcggggctgcgtccctgagcacggtcaccctgggccctgtggcgcccccagccacgccgccgccttggggctgccccctgggccgactagtgtccccagcgccgggcccgggcccgcagccgcacctggtcatcacggagcagcccaagcagcgcggcatgcgcttccgctacgagtgcgagggccgctcggccggcagcatccttggggagagcagcaccgaggccagcaagacgctgcccgccatcgagctccgggattgtggagggctgcgggaggtggaggtgactgcctgcctggtgtggaaggactggcctcaccgagtccacccccacagcctcgtggggaaagactgcaccgacggcatctgcagggtgcggctccggcctcacgtcagcccccggcacagttttaacaacctgggcatccagtgtgtgaggaagaaggagattgaggctgccattgagcggaagattcaactgggcattgacccctacaacgctgggtccctgaagaaccatcaggaagtagacatgaatgtggtgaggatctgcttccaggcctcatatcgggaccagcagggacagatgcgccggatggatcctgtgctttccgagcccgtctatgacaagaaatccacaaacacatcagagctgcggatttgccgaattaacaaggaaagcgggccgtgcaccggtggcgaggagctctacttgctctgcgacaaggtgcagaaagaggacatatcagtggtgttcagcagggcctcctgggaaggtcgggctgacttctcccaggccgacgtgcaccgccagattgccattgtgttcaagacgccgccctacgaggacctggagattgtcgagcccgtgacagtcaacgtcttcctgcagcggctcaccgatggggtctgcagcgagccattgcctttcacgtacctgcctcgcgaccatgacagctacggcgtggacaagaagcggaaacgggggatgcccgacgtccttggggagctgaacagctctgacccccatggcatcgagagcaaacggcggaagaaaaagccggccatcctggaccacttcctgcccaaccacggctcaggcccgttcctcccgccgtcagccctgctgccagaccctgacttcttctctggcaccgtgtccctgcccggcctggagccccctggcgggcctgacctcctggacgatggctttgcctacgaccctacggcccccacactcttcaccatgctggacctgctgcccccggcaccgccacacgctagcgctgttgtgtgcagcggaggtgccggggccgtggttggggagacccccggccctgaaccactgacactggactcgtaccaggccccgggccccggggatggaggcaccgccagccttgtgggcagcaacatgttccccaatcattaccgcgaggcggcctttgggggcggcctcctatccccggggcctgaagccacg

SEQ ID NO: 7133 - DNA, 1728 bp, Homo sapiens
  source 1..1728: mol_type = genomic DNA
atggactcagtggcttttgaggatgtgtctgtgagcttcagccaggaggagtgggctctgctggctccttcacagaagaaactctacagagatgtgatgcaggaaacattcaagaacctggcatctataggggaaaaatgggaagacccgaatgttgaagatcaacacaaaaaccaaggacgaaatctaagaagccatacgggagagagactctgtgaaggtaaagaaggtagtcaatgtgcagaaaacttcagtcccaatctcagtgtgacgaagaagactgccggagtaaaaccatatgagtgtactatctgtggaaaagccttcatgcgtctctcatcccttactagacacatgaggtctcacactggatacgagctatttgagaagccatataaatgtaaggagtgtgagaaagcctttagttatctcaaatcctttcaaagacatgaaaggagtcacactggagaaaaaccctataaatgtaaacaatgtggaaaaaccttcatatatcaccagccctttcaaagacatgagcggactcacattggagaaaaaccctatgaatgtaagcaatgtggaaaagctcttagttgttccagttcgcttcgagttcatgaaaggattcacactggagaaaagccctatgaatgtaaacaatgtgggaaagccttcagttgttccagttctattcgagtacacgaaagaactcacactggagagaaaccctatgcatgtaaggaatgtgggaaagccttcatttcccacacaagtgttctaacacacatgataacacacaacggagatagaccttataaatgcaaagaatgtggaaaggcattcatttttcccagttttttacgagtacatgaaagaattcacactggagagaaaccctataaatgtaaacaatgtggtaaagccttcagatgttccacctccattcaaattcatgaaagaattcatactggagagaagccctataaatgtaaagaatgtgggaaatctttcagtgcacgcccagcctttcgagtacacgtgagagtgcatactggagagaaaccctataagtgtaaagaatgtgggaaagcctttagtagaatcagttactttcgaatacatgaaaggactcacactggagagaaaccctacgaatgtaaaaaatgtgggaaaactttcaattatcctctagatttgaaaatccacaagagaaatcacactggagaaaaaccctatgagtgtaaggaatgtgcaaaaaccttcatttctcttgagaactttcgaagacacatgatcacccacactggagacggaccttataaatgtagggactgtgggaaggtgttcatttttcctagtgcgttacgaacacatgaaagaactcacactggagagaaaccctatgaatgtaaacaatgtggaaaagcctttagttgttctagttacattcggatacataaaagaactcacactggggagaaaccttatgaatgtaaggaatgcgggaaggcctttatttatcccacaagctttcaaggacacatgagaatgcatactggagagaaaccctataaatgtaaagaatgtgggaaggcctttagtcttcacagttcctttcaaagacatacaagaattcacaattatgagaaacctcttgaatgtaagcaatgtggaaaagccttcagtgtgtccacatccttaaaaaaacatatgagaatgcacaatcga

SEQ ID NO: 7134 - DNA, 828 bp, Homo sapiens
  source 1..828: mol_type = genomic DNA
atggggagcaaggctctgccagcgcccatcccgctccacccgtcgctgcagctcaccaattactccttcctgcaggccgtgaacaccttcccggccacggtggaccacctgcagggcctgtacggtctcagcgcggtacagaccatgcacatgaaccactggacgctggggtatcccaatgtgcacgagatcacccgctccaccatcacggagatggcggcggcgcagggcctcgtggacgcgcgcttccccttcccggccctgccttttaccacccacctattccaccccaagcagggggccattgcccacgtcctcccagccctgcacaaggaccggccccgttttgactttgccaatttggcggtggctgccacgcaagaggatccgcctaagatgggagacctgagcaagctgagcccaggactgggtagccccatctcgggcctcagtaaattgactccggacagaaagccctctcgaggaaggttgccctccaaaacgaaaaaagagtttatctgcaagttttgcggcagacactttaccaaatcctacaatttgctcatccatgagaggacccacacggacgagaggccgtacacgtgtgacatctgccacaaggccttccggaggcaagatcacctgcgggatcacagatacatccattccaaagaaaaacccttcaaatgtcaggagtgtgggaaaggattttgtcagtctagaactctagcagttcacaaaactttacacatgcagacatcaagccctacagctgcgagcagtgcggcaaagtgttcaggcgaaactgtgatctgcggcggcacagcc

SEQ ID NO: 7135 - DNA, 2538 bp, Homo sapiens
  source 1..2538: mol_type = genomic DNA
atgttgtttaccgtaagctgtagtaaaatgagctcgattgttgacagagatgacagtagtatttttgatgggttggtggaagaagatgacaaggacaaagcgaaaagagtatctagaaacaaatctgaaaagaaacgtagagatcaatttaatgttctcattaaagaactgggatccatgcttcctggtaatgctagaaagatggacaaatctactgttctgcagaaaagcattgattttttacgaaaacataaagaaatcactgcacagtcagatgctagtgaaattcgacaggactggaaacctacattccttagtaatgaagagtttacacaattaatgttagaggctcttgatggtttttttttagcaatcatgacagatggaagcataatatatgtgtctgagagtgtaacttcattacttgaacatttaccatctgatcttgtggatcaaagtatatttaattttatcccagaaggggaacattcagaggtttataaaatactctctactcatctgctggaaagtgattcattaaccccagaatatttaaaatcaaaaaatcagttagaattctgttgtcacatgctgcgaggaacaatagacccaaaggagccatctacctatgaatatgtaaaatttataggaaatttcaaatctttaaacagtgtatcctcttcagcacacaatggttttgaaggaactatacaacgcacacataggccatcttatgaagatagagtttgttttgtagctactgtcaggttagctacacctcagttcatcaaggaaatgtgcactgttgaagaacccaatgaagagtttacatctagacatagtttagaatggaagtttctgtttctagatcacagggcaccacccataatagggtatttgccatttgaagttctgggaacatcaggctatgattactatcatgtggatgacctagaaaatttggcaaaatgtcatgagcacttaatgcaatatgggaaaggcaaatcatgttattataggttcctgactaaggggcaacagtggatttggcttcagactcattattatatcacttaccatcagtggaattcaaggccagagtttattgtttgtactcacactgtagtaagttatgcagaagttagggctgaaagacgacgagaacttggcattgaagagtctcttcctgagacagctgctgacaaaagccaagattctgggtcagataatcgtataaacacagtcagtctcaaggaagcattggaaaggtttgatcacagcccaaccccttctgcctcttctcggagttcaagaaaatcatctcacacggccgtctcagacccttcctcaacaccaaccaagatcccgacggatacgagcactccacccaggcagcatttaccagctcatgagaagatggtgcaaagaaggtcatcatttagtagtcagtccataaattcccagtctgttggttcatcattaacacagccagtgatgtctcaagctacaaatttaccaattccacaaggcatgtcccagtttcagttttcagctcaattaggagccatgcaacatctgaaagaccaattggaacaacggacacgcatgatagaagcaaatattcatcggcaacaagaagaactaagaaaaattcaagaacaacttcagatggtccatggtcaggggctgcagatgtttttgcaacaatcaaatcctgggttgaattttggttccgttcaactttcttctggaaattcatctaacatccagcaacttgcacctataaatatgcaaggccaagttgttcctactaaccagattcaaagtggaatgaatactggacacattggcacaactcagcacatgatacaacaacagactttacagagtacatcaactcagagtcaacaaaatgtactgagtgggcacagtcagcaaacatctctacccagtcagacacagagcactcttacagccccactgtataacactatggtgatttctcagcctgcagccggaagcatggtccagattccatctagtatgccacaaaacagcacccagagtgctgcagtaactacattcactcaggacaggcagataagattttctcaaggtcaacaacttgtgaccaaattagtgactgctcctgtagcttgtggggcagtcatggtacctagtactatgcttatgggccaggtggtgactgcatatcctacttttgctacacaacagcaacagtcacagacattgtcagtaacgcagcagcagcagcagcagagctcccaggagcagcagctcacttcagttcagcaaccatctcaggctcagctgacccagccaccgcaacaatttttacagacttctaggttgctccatgggaatccctcaactcaactcattctctctgctgcatttcctctacaacagagcaccttccctcagtcacatcaccagcaacatcagtctcagcaacagcagcaactcagccggcacaggactgacagcttgcccgacccttccaaggttcaaccacag

SEQ ID NO: 7136 - DNA, 1761 bp, Homo sapiens
  source 1..1761: mol_type = genomic DNA
atggcctccggtgcgtataacccgtatatagagataattgaacaacccaggcagaggggaatgcgttttagatacaaatgtgaagggcgatcagcaggcagcattccaggggagcacagcacagacaacaaccgaacatacccttctatccagattatgaactattatggaaaaggaaaagtgagaattacattagtaacaaagaatgacccatataaacctcatcctcatgatttagttggaaaagactgcagagacggctactatgaagcagaatttggacaagaacgcagacctttgtttttccaaaatttgggtattcgatgtgtgaagaaaaaagaagtaaaagaagctattattacaagaataaaggcaggaatcaatccattcaatgtccctgaaaaacagctgaatgatattgaagattgtgacctcaatgtggtgagactgtgttttcaagtttttctccctgatgaacatggtaatttgacgactgctcttcctcctgttgtctcgaacccaatttatgacaaccgtgctccaaatactgcagaattaaggatttgtcgtgtaaacaagaattgtggaagtgtcagaggaggagatgaaatatttctactttgtgacaaagttcagaaagatgacatagaagttcgttttgtgttgaacgattgggaagcaaaaggcatcttttcacaagctgatgtacaccgtcaagtagccattgttttcaaaactccaccatattgcaaagctatcacagaacccgtaacagtaaaaatgcagttgcggagaccttctgaccaggaagttagtgaatctatggattttagatatctgccagatgaaaaagatacttacggcaataaagcaaagaaacaaaagacaactctgcttttccagaaactgtgccaggatcacgttaattttcctgagagaccaagacctggtctcctcggttcaattggagaaggaagatacttcaaaaaagaaccaaacttgttttctcatgatgcagttgtgagagaaatgcctacaggggtttcaagtcaagcagaatcctactatccctcacctgggcccatctcaagtggattgtcacatcatgcctcaatggcacctctgccttcttcaagctggtcatcagtggcccaccccaccccacgctcaggcaatacaaacccactgagtagtttttcaacaaggacacttccttctaattcgcaaggtatcccaccattcctgagaatacctgttgggaatgatttaaatgcttctaatgcttgcatttacaacaatgccgatgacatagtcggaatggaagcgtcatccatgccatcagcagatttatatggtatttctgatcccaacatgctgtctaattgttctgtgaatatgatgacaaccagcagtgacagcatgggagagactgataatccaagacttctgagcatgaatcttgaaaacccctcatgtaattcagtgttagacccaagagacttgagacagctccatcagatgtcctcttccagtatgtcagcaggcgccaattccaatactactgtttttgtttcacaatcagatgcatttgagggatctgacttcagttgtgcagataacagcatgataaatgagtcgggaccatcaaacagtactaatccaaacagtcatggttttgttcaagatagtcagtattcaggtattggcagtatgcaaaatgagcaattgagtgactcctttccatatgaattttttcaagta

SEQ ID NO: 7137 - DNA, 2211 bp, Homo sapiens
  source 1..2211: mol_type = genomic DNA
atggatgacgacaaaccttttcaaccaaaaaacatttcaaaaatggcagaactctttatggaatgtgaagaagaagagctagagccatggcagaagaaagtagaagaaactcaggatgaggatgacgatgaactgatctttgttggagagatatcaagttcaaaaccagccatttcaaatattttgaacagaggccactccagctcatcttcaaaaggaataaagagtgagccacacagtccaggtattcctgaaatattcaggactgcaagtcaacgctgcagagacccaccatcaaatccagtggctgcctcgcctagatttcatcttgtatctaaatcttcacaaagctctgttactgttgagaatgcgtctaaacctgattttacaaagaattcacaagttggatcggataattcttcaattttactgtttgactcgacccaggaatcactaccaccatcccaagacataccagcaatttttagagaaggtatgaaaaatacttcatatgtgttgaaacatccttctacttctaaagtaaacagtgttactccaaaaaaaccaaagaccagtgaagatgttcctcagataaatccctccacttcattgcctttaattggctctcctccagtgacatcctcccaagttatgctgtcaaaaggtacaaatacctcatctccatatgatgctggagcagattacctaagagcttgtccaaagtgcaatgttcagttcaatcttttggatcctttgaaataccacatgaagcattgttgtccagacatgataactaaatttttgggagtaattgttaaatcagaacgtccatgtgatgaagacaagactgattcagagacaggaaagttgatcatgttagtcaatgagttttattatggaaggcatgaaggagtcactgagaaagagccaaagacttacacaacctttaaatgcttcagttgctcgaaagttcttaaaaataatattaggtttatgaaccacatgaaacatcacttggaacttgagaagcagaacaatgaaagctgggaaaaccacaccacctgccagcactgttaccggcaatatcccacacccttccaactgcagtgccacattgagagtacacacactccccatgagttttctactatttgcaaaatctgtgaattatcatttgaaacagagcatattcttttacaacatatgaaggacacccataaacctggtgaaatgccatatgtttgccaggtttgccagtttagatcatcaacattttctgatgtagaagctcattttagagcagcccatgaaaacactaagaacttgctatgtccattttgcctcaaagttagtaaaatggcaaccccctacatgaatcattacatgaagcatcagaaaaaaggagttcatcgttgcccaaaatgcagactacaatttttgaccagcaaggagaaagctgaacataaggcgcagcatcgtacatttataaagcctaaagaactagaaggattgcctcctggagcaaaagttactattcgagcttcacttggacctctccagtcaaaattaccaactgcacctttcggttgcgctccaggcacttcttttcttcaggtcacacctccgacatctcaaaatacaactgctagaaatcctagaaaatctaatgccagtagatctaagacaagtaagcttcatgcaactacatccactgcaagtaaagttaatacaagtaagccaaggggacgtatagctaagtccaaagcaaaaccctcttacaagcaaaagcgacagcgcaacagaaaaaataaaatgagccttgctttgaagaacataaggtgtcgtcggggcattcacaagtgcattgaatgtcattccaaaataaaagattttgcaagccacttttctatatacatccactgcagtttttgcaagtacaatactaactgtaacaaagcctttgtaaatcatatgatgagctctcatagcaaccatccaggtaaacggttttgtattttcaagaagcattcaggaactctcaggggcattactctagtgtgccttaaatgtgatttcctagctgattcttccggcttagatcgtatggctaaacacttaagtcaacgtaaaactcatacttgccaagttataatagagaatgtttccaaaagtacctcaacttctgaacccactactggctgctcattgaaa

SEQ ID NO: 7138 - DNA, 954 bp, Homo sapiens
  source 1..954: mol_type = genomic DNA
atgccgaagcgtgggaaaaagggagcggtggcggaagacggggatgagctcaggacagagccagaggccaagaagagtaagacggccgcaaagaaaaatgacaaagaggcagcaggagagggcccagccctgtatgaggaccccccagatcagaaaacctcacccagtggcaaacctgccacactcaagatctgctcttggaatgtggatgggcttcgagcctggattaagaagaaaggattagattgggtaaaggaagaagccccagatatactgtgccttcaagagaccaaatgttcagagaacaaactaccagctgaacttcaggagctgcctggactctctcatcaatactggtcagctccttcggacaaggaagggtacagtggcgtgggcctgctttcccgccagtgcccactcaaagtttcttacggcataggcgatgaggagcatgatcaggaaggccgggtgattgtggctgaatttgactcgtttgtgctggtaacagcatatgtacctaatgcaggccgaggtctggtacgactggagtaccggcagcgctgggatgaagcctttcgcaagttcctgaagggcctggcttcccgaaagccccttgtgctgtgtggagacctcaatgtggcacatgaagaaattgaccttcgcaaccccaaggggaacaaaaagaatgctggcttcacgccacaagagcgccaaggcttcggggaattactgcaggctgtgccactggctgacagctttaggcacctctaccccaacacaccctatgcctacaccttttggacttatatgatgaatgctcgatccaagaatgttggttggcgccttgattactttttgttgtcccactctctgttacctgcattgtgtgacagcaagatccgttccaaggccctcggcagtgatcactgtcctatcaccctatacctagcactg

SEQ ID NO: 7139 - DNA, 1386 bp, Homo sapiens; identical to SEQ ID NO: 6747
  source 1..1386: mol_type = genomic DNA

SEQ ID NO: 7140 - DNA, 381 bp, Homo sapiens
  source 1..381: mol_type = genomic DNA
atgtcgcaagggctcccggccgccggcagcgtcctgcagaggagcgtcgcggcgcccgggaaccagccgcagccgcagccgcagcagcagagccctgaggatgatgacaggaaggtccgaaggagagaaaaaaaccgagttgctgctcagagaagtcggaagaagcagacccagaaggctgacaagctccatgaggaatatgagagcctggagcaagaaaacaccatgctgcggagagagatcgggaagctgacagaggagctgaagcacctgacagaggcactgaaggagcacgagaagatgtgcccgctgctgctctgccctatgaactttgtgccagtgcctccccggccggaccctgtggccggctgcttgccccga

SEQ ID NO: 7141 - DNA, 1176 bp, Homo sapiens
  source 1..1176: mol_type = genomic DNA
atggcagggatcttagcctggttctggaacgagaggttttggctcccgcacaatgtcacctgggcggacctgaagaacacggaggaggccaccttcccgcaggctgaggacctctatctcgcttttcccctggccttctgtatcttcatggtgcggctcatcttcgagagatttgtagccaaaccgtgcgccatagccctcaacattcaggccaatggaccacaaattgctccgcccaatgccattctggaaaaggtcttcactgcaattacaaagcatcctgatgaaaagagattggaaggcctctccaagcaactggactgggatgttcgaagcattcagcgctggtttcgacaaagacgcaatcaggagaagccaagcacgctgacgaggttctgtgagagcatgtggagattttcattttacctttatgtatttacctacggagtcagattcctgaaaaagaccccctggttgtggaatacgaggcattgctggtacaactacccctatcagccactcacaactgaccttcactactattacatcctggagctgtcgttttattggtctttgatgttttctcagttcactgatatcaaaagaaaggactttggcattatgttcctgcaccaccttgtatctattttcttgattaccttttcatatgtcaacaatatggcccgagtaggaacgctggtcctttgtcttcatgattcagctgatgctcttctggaggctgccaaaatggcaaattatgccaagtttcagaaaatgtgtgatctcctgtttgttatgtttgccgtggtttttatcaccacacgactgggtatatttcctctctgggtgttaaataccacattatttgaaagctgggagatcgttggaccttacccttcctggtgggtttttaacctactgctattgctagtacaagggttgaactgcttctggtcttacttgattgtgaaaatagcttgcaaagctgtttcaagaggcaaggctgggaagtggaaccctttacatgtgtccaaggatgatcgaagtgatattgagtctagctcagatgaggaggactcagaacctccgggaaagaatccccacactgcgacaaccaccaatgggaccagtggtaccaacgggtatctcctgactggctcctgctccatggatgat

SEQ ID NO: 7142 - DNA, 774 bp, Homo sapiens
  source 1..774: mol_type = genomic DNA
atgcgcctctcctcctccccacctcgtggcccgcagcagctctccagctttggctccgtggactggctctcccagagcagctgctcagggccgacccacacccccaggcctgccgacttctccctggggagcctccctggcccgggccagacatccggcgccagggagccccctcaggccgtcagcatcaaggaggccgccgggtcctcaaatctgcctgcgccggagaggaccatggccgggttgagtaaggagccaaataccttgcgggccccccgtgtccgcacagccttcaccatggagcaggtccgcaccttggagggcgtcttccagcaccaccagtacctgagccctctggagcggaagaggctggccagggagatgcagctctcagaggtccagataaaaacctggtttcagaatcgccgcatgaaacacaaacggcaaatgcaggacccccagctgcacagccccttctcggggtctctccatgcgcccccagctttctactcaacgtcttctggccttgccaatggcctgcagctgctgtgcccttgggcacccctgtccgggccccaggctctgatgctgccccctggctccttctggggtctctgccaagtggcacaagaggccctggcatctgcgggagcttcctgctgcgggcagcctctggcgtcccacccccctaccccaggccggccttcgctgggaccagccctgtccacggggccccggggcctgtgtgctatgccacagacgggggatgcattt

SEQ ID NO: 7143 - DNA, 1038 bp, Homo sapiens
  source 1..1038: mol_type = genomic DNA
atggctctggacgtgaagtctcgggcaaagcgttatgagaagctggacttccttggggagggacagtttgccaccgtttacaaggccagagataagaacaccaaccaaattgtcgccattaagaaaatcaaacttggacatagatcagaagctaaagatggtataaatagaaccgccttaagagagataaaattattacaggagctaagtcatccaaatataattggtctccttgatgcttttggacataaatctaatattagccttgtctttgattttatggaaactgatctagaggttataataaaggataatagtcttgtgctgacaccatcacacatcaaagcctacatgttgatgactcttcaaggattagaatatttacatcaacattggatcctacatagggatctgaaaccaaacaacttgttgctagatgaaaatggagttctaaaactggcagattttggcctggccaaatcttttgggagccccaatagagcttatacacatcaggttgtaaccaggtggtatcgggcccccgagttactatttggagctaggatgtatggtgtaggtgtggacatgtgggctgttggctgtatattagcagagttacttctaagggttccttttttgccaggagattcagaccttgatcagctaacaagaatatttgaaactttgggcacaccaactgaggaacagtggccggacatgtgtagtcttccagattatgtgacatttaagagtttccctggaatacctttgcatcacatcttcagtgcagcaggagacgacttactagatctcatacaaggcttattcttatttaatccatgtgctcgaattacggccacacaggcactgaaaatgaagtatttcagtaatcggccagggccaacacctggatgtcagctgccaagaccaaactgtccagtggaaaccttaaaggagcaatcaaatccagctttggcaataaaaaggaaaagaacagaggccttagaacaaggaggattgcccaagaaactaattttt

SEQ ID NO: 7144 - DNA, 1800 bp, Homo sapiens
  source 1..1800: mol_type = genomic DNA
atggcagcctcggcgcaggtgtctgtgacctttgaggatgtggctgtgacattcacccaggaggagtggggacagttggatgcagcccagagaaccttgtatcaggaggtgatgctggagacctgcggacttctcatgtctctgggctgtcctttgttcaaaccagagctgatctaccagttggatcacagacaggagctatggatggctacaaaagacctctcccaaagctcctatccaggtgacaacacaaaacccaagaccacagagcctaccttttctcacctggccttgcctgaggaagtcttactccaggaacaactgacacaaggagcctcaaagaactcccaattagggcaatccaaggatcaggatgggccatctgaaatgcaagaagtccacttgaaaatagggataggcccccagcgggggaagctgctggagaaaatgagttctgaacgtgatggtttggggtcagatgatggtgtatgtacaaagattacacagaaacaagtttcaacagaaggtgatctctatgaatgtgattcacatggaccagttacagatgccttgattcgcgaagagaaaaattcctataaatgtgaggaatgcgggaaagtgtttaaaaagaatgccctccttgttcagcatgaacggattcacactcaagtgaagccctatgaatgcacagagtgtgggaaaacctttagcaagagcactcatcttcttcagcacctcatcatccacactggggagaagccctataagtgcatggagtgtgggaaggcttttaaccgcaggtcacacctcacacggcaccagcggattcacagtggagagaagccttataagtgcagtgaatgtggaaaggccttcacccaccgctccacttttgtcttgcatcacaggagccacactggagaaaaaccctttgtgtgcaaagagtgtggcaaagcctttcgagataggccaggtttcattcgacactacatcatccacacgggagagaagccctatgagtgcattgagtgtgggaaggccttcaaccgccggtcatacctcacgtggcaccaacagattcacactggagtgaaaccctttgaatgcaacgagtgtggaaaagctttttgcgagagtgcagacctcattcaacactacattatccacactggggagaagccctataagtgcatggagtgtgggaaggcgttcaaccgtaggtcacacctcaagcagcatcaacggattcacactggggagaagccttatgaatgcagtgaatgtggaaaggccttcacccactgctccacttttgtcttgcataaaaggacccacacaggagaaaaaccctatgaatgcaaagaatgtggaaaagcctttagtgatagggcagacctcattcgccacttcagcatccacactggagagaaaccctatgagtgcgtggagtgtggaaaggccttcaaccgcagctcacacctcacgaggcaccaacagattcacactggagagaaaccctatgaatgcatccagtgtgggaaagccttttgccggagcgcaaaccttattcgacactccatcattcacactggagagaagccgtatgaatgcagtgagtgtggaaaggcttttaatcgcggctcatccctcacacatcatcaaaggattcatactgggagaaaccctaccattgtaacagatgtgggaagaccttttatgactgcacagacttcagtcaacatccaggaacttttattagggaaagagtttttgaatatcaccactgaagaaaatctgtgg

SEQ ID NO: 7145 - DNA, 1206 bp, Homo sapiens
  source 1..1206: mol_type = genomic DNA
atgaatatccatatgaagagaaaaacaataaagaatatcaacacctttgagaacagaatgttaatgcttgatgggatgccggcagtcagagtcaaaacagagcttttggaatctgaacaagggtctccaaacgtccacaactatcccgatatggaagccgttcccctgttgctaaataatgtgaaaggggagcccccggaggactcgttatctgtagatcacttccaaacacaaactgagccagtggacttgtcaataaacaaagccaggacgtcccctactgccgtttcatcctccccagtttccatgacagcatctgcctcctcaccttcttcaacttcaacctcttcatcgtcttctagtcgtctagcctcatccccaactgttatcacatcagtatcttcagcgtcatcttcgtcaacagtattaactccagggccccttgtggcctctgcatctggtgttggaggccagcagtttttgcacattatccatcccgtaccgccttcaagtcccatgaatttacagtctaacaaactgagtcatgttcaccgcatccccgtggtggtacagtcggtgcctgttgtctacacagctgtaaggtcacctggaaatgtgaacaacactattgtcgtgccgcttttggaggatgggagaggccatggcaaagcacaaatggacccccgaggcctatctcccagacaaagtaaaagtgacagtgatgatgatgacctgccaaatgtgaccttagatagcgttaatgaaactggatctacggccctttccatagccagagcagtacaagaggtacatccgtccccagtatcaagggtccggggaaatcgaatgaataatcaaaagtttccttgttcaatttcaccatttagtattgagagcacaagacgccagagacggtctgaatccccagactccagaaaacggcgtatccacagatgtgattttgagggatgcaacaaagtgtacacaaaaagttctcacctgaaggctcaccggaggacacatacaggagagaaaccttacaagtgtacctgggaaggctgcacctggaagttcgctcgttcagatgaactgacgaggcattaccgcaaacatacgggagtgaagccattcaagtgcgcggactgtgatcgcagcttttcccggtcagatcatttggccctgcaccgccggaggcatatgttggtg

SEQ ID NO: 7146 - DNA, 1218 bp, Homo sapiens
  source 1..1218: mol_type = genomic DNA
atgcagcgaatgatccaacaatttgctgctgaatatacctcaaaaaatagctctactcaggaccccagccagcccaatagcacaaagaaccaaagcctgccgaaagcatctccagtcaccacctctcccacggctgcaactactcagaaccctgtgctcagcaaacttctcatggctgaccaagactcacctctggaccttactgtcagaaagtctcagtcagaacctagcgaacaagacggtgtacttgatctgtccactaagaaaagtccatgtgctggcagcacttccctgagccactctccaggctgctccagtactcaagggaacgggcgacctgggagacccagccagtaccgcccagacggacttcggagtggtgatggggtacctccaagaagcttacaggatggaaccagggaaggttttggacactccacatcactcaaagttccactggctcgatccctgcagattagtgaagaactactgagcagaaaccaattgtccacagctgccagccttgggccatctggattacagaatcatggacaacacttaatattatccagggaagcctcttgggcaaaaccacattacgagttcaacctcagccgtatgaagttcaggggaaatggtgcactcagcaacatcagtgaccttccttttcttgcagaaaactctgcctttccaaaaatggcacttcaagcaaaacaagatggaaaaaaggatgtgagccattcatctcctgtagatttaaagataccacaagttcgaggaatggatctttcttgggagtctcgcactggtgatcagtacagctatagctctttggtaatgggttcacaaacggagagcgcgcttagtaaaaaattaagggctattcttccaaaacaaagtagaaaaagcatgttagatgctggacccgattcttggggctcagatgctgagcagtctacctctggacagccatatcccacatcggatcaagaaggagaccctggctccaagcagcctcggaagaaaagagggcgttacagacagtacaacagtgagatactggaggaagcaatctcagtggttatgagtggaaaaatgagtgtttccaaagctcagagtatttatgggattccccacagtacactggagtacaaagtaaaggagaggctgggcactttgaaaaaccctccaaagaaaaagatgaaattaatgagtgga

SEQ ID NO: 7147 - DNA, 1293 bp, Homo sapiens
  source 1..1293: mol_type = genomic DNA
atgtttcatagtccgcggcggctctgctcggccctgctgcagagggacgcgcccggcctgcgccgcctgcccgccccagggctgcgccgcccgttgtccccgccggctgctgttcccaggcccgcatccccccggctgctggcggcggcctcggcggcctcgggcgccgcgaggtcgtgttcccgaacagtgtgttccatgggaaccggtacaagcagactctatagtgctctcgccaagacactgaacagcagcgctgcctcccagcacccagagtatttggtgtcacctgacccagagcatctggagcccattgatcctaaagagcttcttgaggaatgcagggccgtcctgcacacccgacctccccggttccagagggattttgtggatctgaggacagattgccctagtacccacccacctatcagggttatgcaatggaacatcctcgcccaagctcttggagaaggcaaagacaactttgtacagtgccctgttgaagcactcaaatgggaagaaaggaaatgtctcatcctggaagaaatcctggcctaccagcctgatatattgtgcctccaagaggtggaccactattttgacaccttccagccactcctcagtagactaggctatcaaggcacgtttttccccaaaccctggtcaccttgtctagatgtagaacacaacaatggaccagatggttgtgccttattttttcttcaaaaccgattcaagctagtcaacagtgccaatattaggctgacagccatgacattgaaaaccaaccaggtggccattgcacagaccctggagtgcaaggagtcaggccgacagttctgcatcgctgttacccatctaaaagcacgcactggctgggagcggtttcgatcagctcaaggctgtgacctccttcagaacctgcaaaacatcacccaaggagccaagattccccttattgtgtgtggggacttcaatgcagagccaacagaagaggtctacaaacactttgcttcctccagcctcaacctgaacagcgcctacaagctgctgagtgctgatgggcagtcagaacccccatacactacctggaagatccggacctcaggggagtgcaggcacaccctggattacatctggtattctaaacatgctctaaatgtaaggtcagctctcgatctgctcactgaagaacagattggacccaacaggttaccttccttcaattatccttcagaccacctgtctctagtgtgtgacttcagctttactgaggaatctgatggactttca

SEQ ID NO: 7148 - DNA, 1281 bp, Homo sapiens
  source 1..1281: mol_type = genomic DNA
atgactctagtcacagcaggaggggcttggacaggccctggttgttggcatgaagtgaaggatgaagagtcatcttctgaacagagcatttctatagcagtgtcacatgttaatacttccaaggcaggtttgcccgcacagacggctctcccttgtgacatatgtggccccatcttgaaagatattttgcacctggatgaacaccagggtacacaccatggactgaaacttcacacatgtggggcatgtgggagacaattctggttcagtgcaaaccttcatcagtaccagaagtgttacagtatagagcaacccttaagaagggataaaagtgaggcctcaattgtgaagaactgcacagttagcaaagaacctcatccgtcagagaagccctttacgtgtaaggaggagcagaaaaacttccaggctactttgggtggctgccaacaaaaggccatccacagtaagaggaagacacacaggagcactgagagtggggatgcatttcatggtgaacaaatgcattacaagtgcagtgaatgtgggaaagctttcagccgcaaagacacacttgtccagcaccagagaattcatagtggagagaagccttatgagtgcagcgaatgtgggaaagccttcagccgcaaagctacacttgtccagcatcagagaatccatactggagaaaggccttatgaatgcagcgaatgtggaaaaaccttcagtcgaaaagacaaccttactcagcacaagagaatccacactggagaaatgccttataagtgcaatgaatgtgggaaatattttagccatcactccaatctaattgtacaccagagagttcacaatggagcaaggccttataagtgcagtgattgtgggaaagtcttcagacacaaatctacacttgttcagcatgagagtattcacactggagaaaatccttatgattgcagtgattgtgggaaatcctttggccacaaatacaccctcattaaacatcagcgaattcacactgagtcaaagccgtttgagtgcattgaatgcgggaaattctttagtcgaagttctgactatattgcacaccagagggttcacactggtgaaaggccttttgtgtgcagtaaatgtgggaaagactttatcagaacctcccaccttgttcgacaccaaagagttcacactggagaaaggccatatgagtgcagtgaatgtgggaaggcctacagcttaagctcccacctcaatcggcaccagaaagttcacactgcaggcaggctt

SEQ ID NO: 7149 - DNA, 1779 bp, Homo sapiens
  source 1..1779: mol_type = genomic DNA
atggatagaatgacagaagatgctcttcgcttgaatctgttgaagcggagcttggacccagcagatgagcgagatgatgtcctggcaaagcgactcaaaatggaggggcatgaggccatggaacgtctgaaaatgttggcattgctcaaaaggaaggatttggcaaatcttgaggtgccacatgagttacccaccaaacaggatggcagtggtgtcaagggctatgaagaaaaacttaacgggaatctcaggcctcatggagacaacaggactgctggaaggccaggcaaagaaaacatcaatgatgagcctgtggatatgagtgctagacggagtgagccagagcgaggaaggctaactccctcaccagacatcattgttttgtctgacaatgaggcttccagtccccgttccagttccagaatggaagaaagactcaaagcagccaacttagagatgtttaaggggaaaggcattgaggagcggcagcagcttatcaagcagctgagggatgagctacgattggaagaagcccgactggtcctgttaaagaaactgagacagagtcagctacagaaagagaatgtggtccagaagactccagttgtacagaatgcagcatctattgttcagccatctcctgcccatgtgggacagcagggcctatctaagcttccctctcggcctggggcccaaggggttgaacctcaaaatttgagaacattacagggtcacagtgtcatccgttcagctaccaataccacccttccacacatgttgatgtctcaacgtgttattgcaccaaacccagcccagctacagggtcagcggggcccgcctaagcctggccttgtacgcaccacaacacccaacatgaatcccgccatcaattatcaaccgcagtcaagttcttctgttccatgtcagcgtacaacatcctctgccatctatatgaaccttgcttctcatatccagccagggacggtgaacagagtgtcctcgccacttcctagccccagcgccatgactgatgctgccaactcacaggctgcagccaaattggctcttcgcaaacagctggaaaagacactcctggagatcccaccccctaaacctcctgctcccttacttcatttcttgcctagtgcagccaatagcgagttcatctacatggtaggcttggaagaagtcgtacagagtgtcattgacagccaaggcaaaagctgtgcctcacttctgcgggttgaaccctttgtatgtgcccagtgccgcacagatttcacccctcactggaagcaagaaaagaatggtaagattctatgtgagcagtgtatgacctccaaccagaaaaaggctctaaaagctgaacacaccaaccggctgaaaaatgcatttgtgaaagccctacagcaggaacaggaaattgaacagcgattacagcagcaggcagccctctcccccactacggctccagctgtgtccagtgtcagtaaacaagagaccatcatgagacatcatacgcttcggcaggctccacagccccagagcagcctccagcgtggcatacccacatctgcccgctccatgctttcaaactttgcacaggcaccccagttgtctgtgccaggtggcctccttggtatgccaggtgtcaacattgcatacttgaatactggcatcggaggacacaaaggccccagtttggcagaccgacagcgtgaataccttttagacatgatccctccccggtctatatcgcagtccatcagtggacagaaa

SEQ ID NO: 7150 - DNA, 2028 bp, Homo sapiens
  source 1..2028: mol_type = genomic DNA
atgtcgcgccgggccctccggaggctgaggggggaacagcgcggccaggagcccctcgggcccggcgccttgcatttcgatctccgtgatgacgatgacgcggaagaagaagggcccaagcgggagcttggtgtccggcgtcccgggggcgcagggaaggagggcgtccgagtcaacaaccgcttcgagctgataaacattgacgatcttgaggatgaccctgtggtgaacggggagaggtctggctgtgcgctcacagacgctgtggcaccagggaacaaaggaaggggtcagcgtggaaacacagagagcaagacggatggagatgacaccgagacagtgccctcagagcagtctcatgcaagtggcaaactccggaagaagaaaaaaaaacagaaaaacaagaaaagcagcacgggagaagcatcggaaaacggactagaagatatcgatcgcatcctagagaggattgaggacagcactgggttgaaccgtcccggcccagctcccctgagctccaggaagcacgttctctacgtggagcacagacacttgaatccagacacagaactgaaaaggtattttggtgcccgggcaatcctgggggagcaaaggccacggcagagacaacgtgtgtaccccaagtgcacatggctgaccacccctaaaagcacctggccccgctacagcaaaccaggtctgtccatgcggctgctggaatcaaaaaaaggcctctccttctttgcgtttgagcacagtgaggagtaccagcaggctcagcacaagttcctggtggccgtggagtctatggagccgaacaacatcgtggttctgctccagacgagcccttaccacgttgactcactcctgcagctcagcgatgcctgccgctttcaagaggatcaggagatggctcgagacctcgtagagagagcgctgtacagcatggaatgtgcgttccaccccctgttcagtctcaccagtggggcctgccggctggattaccgcagacccgagaacaggagcttctacctggccctctacaagcagatgagcttcctggagaagcgaggctgcccgcgcacggcgctggagtactgcaagctcatcctgagtctcgagccggatgaggaccccctctgcatgctgctgctcatcgaccacctggccttgcgggcccggaactacgagtacctgatccgcctcttccaggagtgggaggctcatcggaacctgtcccagctccctaattttgccttctctgttccactggcgtatttcctgctgagccagcagacagacctccctgagtgtgagcagagctctgccaggcagaaggcctctctcctgatacagcaggcgctcaccatgttccctggagtcctcctgcccctgctcgagtcttgcagtgtgcggcccgacgccagcgtttccagtcaccgcttctttggacccaatgctgaaataagccagccccctgccctgagccagctggtgaacctgtaccttgggaggtcacactttctctggaaagagcccgccaccatgagctggctggaggagaacgtccacgaggttctgcaagcagtggacgccggggacccagccgtggaagcctgtgagaaccggcggaaggtgctctaccagcgtgcacccaggaatatccaccgccatgtgatcctctctgagatcaaggaagccgtcgctgccctgcccccggacgtgaccacgcagtctgtgatggggtttgatcctctgcctccttcggacacaatctactcctacgtcaggccagagaggctaagtcctatcagccatggaaacaccattgctctcttcttccggtcactgttgccaaactataccatggagggggagaggcccgaggaaggagtggctgggggtctgaaccgcaaccagggcctgaacaggctgatgctggctgtgcgcgacatgatggccaacttccacctcaacgacctggaggcaccgcacgaggacgacgctgagggggagggggagtgggac

SEQ ID NO: 7151 - DNA, 720 bp, Homo sapiens
  source 1..720: mol_type = genomic DNA
atgtccaaaccttcagaccacatcaagcggcccatgaacgccttcatggtatggtcccggggccagcggcgcaagatggcccaggaaaaccccaagatgcacaactcggagatcagcaaacgcctaggtgccgaatggaagcttctgtccgaggcagagaagcggccatacatcgatgaagccaagcggctacgcgcccagcacatgaaggagcaccctgactacaagtaccgacctcggcgcaagcccaagaacctgctcaagaaggacaggtatgtcttccccttgccctacctgggcgacacggacccgctcaaggcggctggcctgcccgtgggggcctccgacggcctcctgagcgcgcccgagaaagcccgggccttcttgccgccggcctcggcgccctactccctgctggaccccgcgcagtttagctcgagcgccatccagaagatgggcgaagtgccccacaccttggctaccggcgctctgccctacgcgtccaccctgggctaccagaacggcgccttcggcagcctcagctgccccagccagcacacgcacacgcacccgtcccccaccaaccctggctacgtggtgccctgtaactgtaccgcctggtctgcctccaccctgcagccccccgtcgcctacatcctcttcccaggcatgaccaagactggcatagacccttattcgtcagcccacgctacggccatg

SEQ ID NO: 7152 - DNA, 720 bp, Homo sapiens
  source 1..720: mol_type = genomic DNA
atgtccaaaccttcagaccacatcaagcggcccatgaacgccttcatggtatggtcccggggccagcggcgcaagatggcccaggaaaaccccaagatgcacaactcggagatcagcaaacgcctaggtgccgaatggaagcttctgtccgaggcagagaagcggccatacatcgatgaagccaagcggctacgcgcccagcacatgaaggagcaccctgactacaagtaccgacctcggcgcaagcccaagaacctgctcaagaaggacaggtatgtcttccccttgccctacctgggcgacacggacccgctcaaggcggctggcctgcccgtgggggcctctgacggcctcctgagcgcgcccgagaaagcccgggccttcttgccgccggcctcggcgccctactccctgctggaccccgcgcagtttagctcgagcgccatccagaagatgggcgaagtgccccacaccttggctaccggcgctctgccctacgcgtccaccctgggctaccagaacggcgccttcggcagcctcagctgccccagccagcacacgcacacgcacccgtcccccaccaaccctggctacgtggtgccctgtaactgtaccgcctggtctgcctccaccctgcagccccccgtcgcctacatcctcttcccaggcatgaccaagactggcatagacccttattcgtcagcccacgctacggccatg

SEQ ID NO: 7153 - DNA, 1218 bp, Homo sapiens
  source 1..1218: mol_type = genomic DNA
atgcgcggctctgtggagtgcacctggggttgggggcactgtgcccccagccccctgctcctttggactctacttctgtttgcagccccatttggcctgctgggggagaagacccgccaggtgtctctggaggtcatccctaactggctgggccccctgcagaacctgcttcatatacgggcagtgggcaccaattccacactgcactatgtgtggagcagcctggggcctctggcagtggtaatggtggccaccaacaccccccacagcaccctgagcgtcaactggagcctcctgctatcccctgagcccgatgggggcctgatggtgctccctaaggacagcattcagttttcttctgcccttgtttttaccaggctgcttgagtttgacagcaccaacgtgtccgatacggcagcaaagcctttgggaagaccatatcctccatactccttggccgatttctcttggaacaacatcactgattcattggatcctgccaccctgagtgccacatttcaaggccaccccatgaacgaccctaccaggacttttgccaatggcagcctggccttcagggtccaggccttttccaggtccagccgaccagcccaaccccctcgcctcctgcacacagcagacacctgtcagctagaggtggccctgattggagcctctccccggggaaaccgttccctgtttgggctggaggtagccacattgggccagggccctgactgcccctcaatgcaggagcagcactccatcgacgatgaatatgcaccggccgtcttccagttggaccagctactgtggggctccctcccatcaggctttgcacagtggcgaccagtggcttactcccagaagccggggggccgagaatcagccctgccctgccaagcttcccctcttcatcctgccttagcatactctcttccccagtcacccattgtccgagccttctttgggtcccagaataacttctgtgccttcaatctgacgttcggggcttccacaggccctggctattgggaccaacactacctcagctggtcgatgctcctgggtgtgggcttccctccagtggacggcttgtccccactagtcctgggcatcatggcagtggccctgggtgccccagggctcatgctgctagggggcggcttggttctgctgctgcaccacaagaagtactcagagtaccagtccataaat

SEQ ID NO: 7154 - DNA, 936 bp, Homo sapiens
  source 1..936: mol_type = genomic DNA
atggcggacggcgacagcggcagcgagcgcggcggcggcggtgggccgtgcgggttccagcccgcgtcccgcggcggcggcgagcaagagacgcaggagctggcctcgaagcggctggacatccagaacaagcgcttctacttagatgtgaagcagaacgccaagggccgcttcctcaagatcgccgaggtgggcgcgggcggttccaagagccgcctcacgctgtccatggcggtggccgccgagttccgcgactcgctgggcgacttcatagaacactacgcgcagctgggccctagcagccccgagcagctggcggcgggcgccgaggagggcggcgggccgcggcgcgcgctcaagagcgaattcttggtgcgtgagaaccgcaagtactacctggacctcaaggagaaccagcgcggccgcttcctgcgcatccgccaaacggtcaaccgcggcggtggcggcttcggcgcgggccccgggccgggcggcttgcagagcggccagaccatcgcgctgcctgcgcagggcctcatcgagttccgcgacgcgctggcgaagctcatagacgactacggaggcgaggacgacgagctggcaggcggcccgggaggcggcgccgggggcccagggggcggcctgtatggagagctcccggagggcacctccatcaccgtggactccaagcgcttcttcttcgatgtgggctgcaacaaatacggggtgtttctgcgagtgagcgaggtgaagccgtcctaccgcaatgccatcaccgtacccttcaaagcctggggcaagttcggaggcgccttttgccggtatgcggatgagatgaaagaaatccaggaacgacagagggataagctttatgagcgacgtggtgggggcagcggcggcggcgaagagtcagagggtgaggaggtggatgaggat

SEQ ID NO: 7155 - DNA, 720 bp, Homo sapiens
  source 1..720: mol_type = genomic DNA
atgtcgcgatccaaccggcagaaggagtacaaatgcggggacctggtgttcgccaagatgaagggctacccacactggccggcccggattgacgagatgcctgaggctgccgtgaaatcaacagccaacaaataccaagtcttttttttcgggacccacgagacggcattcctgggccccaaagacctcttcccttacgaggaatccaaggagaagtttggcaagcccaacaagaggaaagggttcagcgaggggctgtgggagatcgaaaacaaccctactgtcaaggcttccggctatcagtcctcccagaaaaagagctgtgtggaagagcctgaaccagagcccgaagctgcagagggtgacggtgataagaaggggaatgcagagggcagcagcgacgaggaagggaagctggtcattgatgagccagccaaggagaagaacgagaaaggagcgttgaagaggagagcaggggacttgctggaggactctcctaaacgtcccaaggaggcagaaaaccctgaaggagaggagaaggaggcagccaccttggaggttgagaggccccttcctatggaggtggaaaagaatagcaccccctctgagcccggctctggccgggggcctccccaagaggaagaagaagaggaggatgaagaggaagaggctaccaaggaagatgctgaggccccaggcatcagagatcatgagagcctg

SEQ ID NO: 7156 - DNA, 735 bp, Homo sapiens
  source 1..735: mol_type = genomic DNA
atggccgaggacctctctgcggccacgtcctacaccgaagatgatttctactgccccgtctgtcaggaggtgctcaaaacgcccgtgcggaccacggcctgtcagcacgttttctgtagaaaatgtttcctgactgcaatgagggaaagcggagcacattgtcccctatgtcgtggaaatgtgactagaagagagagagcatgtcctgaacgggccttagaccttgaaaatataatgaggaagttttctggtagctgcagatgctgtgcaaaacagattaaattctatcgcatgagacatcattacaaatcttgtaagaagtatcaggatgaatatggtgtttcttctatcattccaaactttcagatctctcaagattcagtagggaacagcaataggagtgaaacatccacatctgataacacagaaacttaccaagagaatacaagttcttctggtcatcctacttttaagtgtcccctgtgtcaagaatcaaattttaccagacagcgtttactggatcactgtaacagtaatcacctatttcagatagttcctgtgacatgtcctatttgtgtgtctcttccttggggagatcctagccagattaccagaaatttcgttagtcatctaaatcagagacatcaatttgattatggagaatttgtgaatcttcagctagatgaagaaacccaataccaaactgctgttgaagaatcttttcaagtaaacatc

SEQ ID NO: 7157 - DNA, 945 bp, Homo sapiens
  source 1..945: mol_type = genomic DNA
atggtgcagcagcggggcgcgagggccaagcgggacggcgggccgccgcccccgggacccgggccggccgaggagggggcgcgcgagcccggctggtgcaagaccccgagcggccacatcaagaggccgatgaacgcattcatggtgtggtcgcagcacgaacggcggaagatcatggaccagtggcccgacatgcacaacgccgagatctccaagcgcctgggccgccgctggcagctgctgcaggactcggagaagatcccgttcgtgcgggaggcggagcggctgcggctcaagcacatggcggattacccggactacaagtaccggccgcgcaaaaagagcaagggggcgcccgccaaggcgcggccccgcccccccggtggtagcggtggcggcagccggctcaagcccgggccgcagctgcctggccgcgggggccgccgagcagcgggagggcctttggggggcggggcggcggcgcccgaggacgacgatgaagacgacgacgaggagctgctggaagtgcgcctggtcgagaccccggggcgggagctgtggaggatggtcccggcgggacgggccgctcggggacaagcggagcgcgcccaagggccgtcgggcgagggggcggccgccgccgccgccgcctccccgacaccgtcggaggacgaggagccggaggaagaggaggaggaggcggcagcggctgaggaaggtgaagaggagacggtggcgtcgggggaggagtcgctgggctttctgtccaggctgccccctggcccggccggcctggactgcagcgccctggatcgcgacccggacctgcagcctccctcgggcacgtcgcacttcgagttcccggactactgcacccccgaggttaccgagatgatcgcgggggactggcgcccgtctagcatcgcagacctggttttcacctac

SEQ ID NO: 7158 - DNA, 405 bp, Homo sapiens
  source 1..405: mol_type = genomic DNA
atgatgctgagtccggaccaagcagcagattcggaccatcccagctcggcgcactcggatccggagtccctgggcggcacggacaccaaggtgctcggcagcgtgtcggacctggagccggtggaggaggccgagggcgacggcaagggcggcagccgagccgcgctctacccgcacccgcagcagctgagccgcgaggagaagcgccgccgccggcgcgccacggccaagtaccgctcggcccacgccacccgcgagcgcatccgcgtggaagccttcaacttggccttcgccgagctccgcaaattgctgcccacgctgcccccggacaagaagctctccaagatcgagatcctgcgcctggccatctgctacatctcctatctcaaccacgtcctggacgtg

SEQ ID NO: 7159 - DNA, 2001 bp, Homo sapiens
  source 1..2001: mol_type = genomic DNA
atgcatcaccaacagcgaatggctgccttagggacggacaaagagctgagtgatttactggatttcagtgcgatgttttcacctcctgtgagcagtgggaaaaatggaccaacttctttggcaagtggacattttactggctcaaatgtagaagacagaagtagctcagggtcctgggggaatggaggacatccaagcccgtccaggaactatggagatgggactccctatgaccacatgaccagcagggaccttgggtcacatgacaatctctctccaccttttgtcaattccagaatacaaagtaaaacagaaaggggctcatactcatcttatgggagagaatcaaacttacagggttgccaccagcagagtctccttggaggtgacatggatatgggcaacccaggaaccctttcgcccaccaaacctggttcccagtactatcagtattctagcaataatccccgaaggaggcctcttcacagtagtgccatggaggtacagacaaagaaagttcgaaaagttcctccaggtttgccatcttcagtctatgctccatcagcaagcactgccgactacaatagggactcgccaggctatccttcctccaaaccagcaaccagcactttccctagctccttcttcatgcaagatggccatcacagcagtgacccttggagctcctccagtgggatgaatcagcctggctatgcaggaatgttgggcaactcttctcatattccacagtccagcagctactgtagcctgcatccacatgaacgtttgagctatccatcacactcctcagcagacatcaattccagtcttcctccgatgtccactttccatcgtagtggtacaaaccattacagcacctcttcctgtacgcctcctgccaacgggacagacagtataatggcaaatagaggaagcggggcagccggcagctcccagactggagatgctctggggaaagcacttgcttcgatctattctccagatcacactaacaacagcttttcatcaaacccttcaactcctgttggctctcctccatctctctcagcaggcacagctgtttggtctagaaatggaggacaggcctcatcgtctcctaattatgaaggacccttacactctttgcaaagccgaattgaagatcgtttagaaagactggatgatgctattcatgttctccggaaccatgcagtgggcccatccacagctatgcctggtggtcatggggacatgcatggaatcattggaccttctcataatggagccatgggtggtctgggctcagggtatggaaccggccttctttcagccaacagacattcactcatggtggggacccatcgtgaagatggcgtggccctgagaggcagccattctcttctgccaaaccaggttccggttccacagcttcctgtccagtctgcgacttcccctgacctgaacccaccccaggacccttacagaggcatgccaccaggactacaggggcagagtgtctcctctggcagctctgagatcaaatccgatgacgagggtgatgagaacctgcaagacacgaaatcttcggaggacaagaaattagatgacgacaagaaggatatcaaatcaattactagcaataatgacgatgaggacctgacaccagagcagaaggcagagcgtgagaaggagcggaggatggccaacaatgcccgagagcgtctgcgggtccgtgacatcaacgaggctttcaaagagctcggccgcatggtgcagctccacctcaagagtgacaagccccagaccaagctcctgatcctccaccaggcggtggccgtcatcctcagtctggagcagcaagtccgagaaaggaatctgaatccgaaagctgcgtgtctgaaaagaagggaggaagagaaggtgtcctcagagcctccccctctctccttggccggcccacaccctggaatgggagacgcatcgaatcacatgggacagatg

SEQ ID NO: 7160 - DNA, 2013 bp, Homo sapiens
  source 1..2013: mol_type = genomic DNA
atgcatcaccaacagcgaatggctgccttagggacggacaaagagctgagtgatttactggatttcagtgcgatgttttcacctcctgtgagcagtgggaaaaatggaccaacttctttggcaagtggacattttactggctcaaatgtagaagacagaagtagctcagggtcctgggggaatggaggacatccaagcccgtccaggaactatggagatgggactccctatgaccacatgaccagcagggaccttgggtcacatgacaatctctctccaccttttgtcaattccagaatacaaagtaaaacagaaaggggctcatactcatcttatgggagagaatcaaacttacagggttgccaccagcagagtctccttggaggtgacatggatatgggcaacccaggaaccctttcgcccaccaaacctggttcccagtactatcagtattctagcaataatccccgaaggaggcctcttcacagtagtgccatggaggtacagacaaagaaagttcgaaaagttcctccaggtttgccatcttcagtctatgctccatcagcaagcactgccgactacaatagggactcgccaggctatccttcctccaaaccagcaaccagcactttccctagctccttcttcatgcaagatggccatcacagcagtgacccttggagctcctccagtgggatgaatcagcctggctatgcaggaatgttgggcaactcttctcatattccacagtccagcagctactgtagcctgcatccacatgaacgtttgagctatccatcacactcctcagcagacatcaattccagtcttcctccgatgtccactttccatcgtagtggtacaaaccattacagcacctcttcctgtacgcctcctgccaacgggacagacagtataatggcaaatagaggaagcggggcagccggcagctcccagactggagatgctctggggaaagcacttgcttcgatctattctccagatcacactaacaacagcttttcatcaaacccttcaactcctgttggctctcctccatctctctcagcaggcacagctgtttggtctagaaatggaggacaggcctcatcgtctcctaattatgaaggacccttacactctttgcaaagccgaattgaagatcgtttagaaagactggatgatgctattcatgttctccggaaccatgcagtgggcccatccacagctatgcctggtggtcatggggacatgcatggaatcattggaccttctcataatggagccatgggtggtctgggctcagggtatggaaccggccttctttcagccaacagacattcactcatggtggggacccatcgtgaagatggcgtggccctgagaggcagccattctcttctgccaaaccaggttccggttccacagcttcctgtccagtctgcgacttcccctgacctgaacccaccccaggacccttacagaggcatgccaccaggactacaggggcagagtgtctcctctggcagctctgagatcaaatccgatgacgagggtgatgagaacctgcaagacacgaaatcttcggaggacaagaaattagatgacgacaagaaggatatcaaatcaattactaggtcaagatctagcaataatgacgatgaggacctgacaccagagcagaaggcagagcgtgagaaggagcggaggatggccaacaatgcccgagagcgtctgcgggtccgtgacatcaacgaggctttcaaagagctcggccgcatggtgcagctccacctcaagagtgacaagccccagaccaagctcctgatcctccaccaggcggtggccgtcatcctcagtctggagcagcaagtccgagaaaggaatctgaatccgaaagctgcgtgtctgaaaagaagggaggaagagaaggtgtcctcggagcctccccctctctccttggccggcccacaccctggaatgggagacgcatcgaatcacatgggacagatg

SEQ ID NO: 7161 - DNA, 822 bp, Homo sapiens
  source 1..822: mol_type = genomic DNA
atgcccaagtactgcagggcgccgaactgctccaacactgcgggccgcctgggtgcagacaaccgccctgtgagcttctacaagttcccactgaaggatggtccccggctgcaggcctggctgcagcacatgggctgtgagcactgggtgcccagctgccaccagcacttgtgcagcgagcacttcacaccctcctgcttccagtggcgctggggtgtgcgctacctgcggcctgatgcagtgccctccatcttctcccggggaccacctgccaagagtcagcggaggacccgaagcacccagaagccagtctcgccgccgcctcccctacagaagaatacacccctgccccagagccctgccatcccagtctctggcccagtgcgcctagtggtgctgggccccacatcggggagccccaagactgtggccaccatgctcctgacccccctggcccctgcgccaactcctgagcggtcacaacctgaagtccctgcccaacaggcccagaccgggctgggcccagtgctgggagcactgcaacgccgggtgcggaggctgcaacggtgccaggagcggcaccaggcgcagctgcaggccctggaacggctggcacagcagctacacggggagagcctgctggcacgggcacgccggggtctgcagcgcctgacaacagcccagacccttggacctgaggaatcccaaaccttcaccatcatctgtggagggcctgacatagccatggtccttgcccaggaccctgcacctgccacagtggatgccaagccggagctcctggacactcggatccccagtgca

SEQ ID NO: 7162 - DNA, 903 bp, Homo sapiens
  source 1..903: mol_type = genomic DNA
atgccagggatcagcagtcagatcctcaccaatgctcagggacaggttattggaacccttccatgggtagtgaactcagctagtgtggcggccccagcaccagcccaaagcctgcaggtccaggccgtgaccccccagctgttgttgaacgcccagggccaggtgattgcgaccctggctagcagccccctgcctccacctgtggctgtccggaagccaagcacacctgagtcccctgctaagagtgaggtgcagcccatccagcccacaccaaccgtgccccagcctgctgtggtcattgccagcccagctccagccgccaagccatctgcctctgctcctatcccaattacctgctcagagacccccaccgtcagccagttggtgtccaagccacatactccaagtctggatgaggatgggatcaacttagaagagatccgggagtttgccaagaactttaagatccggcggctctcgctgggccttacacagacccaggtgggtcaggctctgactgcaacggaaggtccagcctacagccagtcagccatctgccggttcgagaagctagacatcacacccaagagtgcccagaagctaaagccggtgctggaaaagtggctaaacgaagctgaactgcggaaccaggaaggccagcagaacctgatggagtttgtgggaggcgagccctccaagaaacgcaaacgccgcacctccttcaccccccaggccatagaggctctcaatgcctattttgagaagaacccactgcccacaggccaggagatcactgaaattgctaaggagctcaactacgaccgtgaggtagtgcgggtctggttctgcaatcggcgccagacgctcaagaacaccagcaagctgaacgtctttcagatccct

SEQ ID NO: 7163 - DNA, 2613 bp, Homo sapiens
  source 1..2613: mol_type = genomic DNA
atggctgaggaatttgtgaccctcaaggatgtcggcatggacttcaccttgggagactgggagcagctcgggctggaacagggggacacgttctgggacacagcgttggacaattgccaggacctcttcctgctggaccccccaagacccaacctgacctcccacccagatggcagtgaagatctggagcctctggcaggaggaagcccagaagcaacaagccctgatgtgactgagaccaagaactctcctctgatggaggatttcttcgaagaaggattctcccaggagattatagagatgttatccaaggatggcttctggaactccaatttcggagaagcctgtatagaggacacctggttagatagtttgctaggcgatccagaaagtcttctgaggtctgatattgccaccaacggggaaagtcccacggaatgcaagagtcatgaattaaagagaggactcagtcctgtgtccaccgtttccacgggagaagattccatggtgcataatgtttctgaaaagaccctcacaccagctaagtctaaggaatataggggtgagtttttctcctactccgaccacagccagcaggattctgttcaggaaggggagaaaccatatcaatgtagtgaatgtgggaaaagcttcagtgggagttaccgtcttacccagcactggatcactcatactagggagaaacccactgtccatcaagagtgtgagcaaggttttgaccggaatgcttccctttctgtgtatccgaaaactcacacgggctacaaattctatgtgtgtaatgaatatgggacaacttttagtcagagtacatacctgtggcatcagaaaactcacactggagaaaaaccatgtaagagtcaagatagtgaccacccacccagtcatgacacacagcctggtgagcatcagaaaactcacacagatagtaagtcctacaactgtaacgaatgcggcaaggcttttacccggatcttccaccttactcggcaccagaagatccacactcggaaacgctatgagtgttccaagtgccaggcgaccttcaacttgagaaaacacctcatccaacatcagaaaactcacgctgcaaaaactacctctgagtgtcaggagtgtgggaagatttttaggcacagttcgctgctcattgaacaccaggctcttcatgctggagaggagccttataagtgtaacgaacgtgggaaatccttcaggcataactctaccctaaagatccatcagagggttcacagtggagagaagccttacaaatgcagtgagtgtgggaaggccttccaccggcacactcaccttaatgaacatcggcgaattcatacaggctacagaccccacaaatgtcaggaatgcgtcaggagtttcagccggccctcacatctgatgcgacatcaggccattcacaccgcagaaaagccctatagctgtgctgaatgcaaggagactttcagcgataacaatcgccttgtgcaacaccagaaaatgcacactgtcaaaaccccatatgaatgtcaggagtgcggagaacgcttcatttgcggctcaaccctgaagtgccacgagagtgttcacgccagagaaaaacaaggattttttgtgagtgggaagatcttggatcagaacccagaacagaaagagaagtgctttaagtgtaacaaatgtgagaaaacctttagctgcagcaaatacctaactcagcacgagaggattcacaccaggggagtgaagccctttgaatgtgaccagtgtgggaaagcctttggccaaagtactcggctcattcaccatcaaagaatccactctagagtgaggctgtataaatggggtgagcaagggaaagccatcagcagtgcctcccttatcaaacttcagtccttccacacaaaggagcacccttttaaatgtaacgaatgcggaaagaccttcagccacagtgcacacctctcaaaacatcagttaattcacgctggagagaatccctttaaatgtagtaagtgtgacagagtcttcacccagagaaactaccttgttcagcatgagcgaactcatgccagaaagaagccgttggtgtgtaacgaatgcgggaaaacgttccgtcagagctcatgcctttctaagcatcagagaattcactcaggtgagaagccctatgtatgtgattactgcgggaaggccttcggcctgagtgctgagcttgtccgccaccagagaattcacactggagaaaagccttatgtttgtcaggaatgcgggaaagccttcacccagagctcatgcctttctattcaccggagagttcacactggggagaagccctacagatgtggtgaatgtgggaaagcctttgcccagaaagcaaatctaacacagcaccagagaattcacacaggggagaagccttactcctgtaatgtgtgtggcaaagcttttgtcctcagtgcccatctcaaccagcacctgagagttcacacccaggagacactttatcagtgtcaacgttgccagaaagcctttcggtgccactcgagcctcagccgccatcagcgtgtacacaacaagcagcaatactgcctg

SEQ ID NO: 7164 - DNA, 1302 bp, Homo sapiens
  source 1..1302: mol_type = genomic DNA
atgccgaaccgtaaggccagccggaatgcttactatttcttcgtgcaggagaagatccccgaactacggcgacgaggcctgcctgtggctcgcgttgctgatgccatcccttactgctcctcagactgggcgcttctgagggaggaagaaaaggagaaatacgcagaaatggctcgagaatggagggccgctcagggaaaggaccctgggccctcagagaagcagaaacctgttttcacaccactgaggaggccaggcatgcttgtaccaaagcagaatgtttcacctccagatatgtcagctttgtctttaaaaggtgatcaagctctccttggaggcattttttattttttgaacatttttagccatggcgagctacctcctcattgtgaacagcgcttcctcccttgtgaaattggctgtgttaagtattctctccaagaaggtattatggcagatttccacagttttataaatcctggtgaaattccacgaggatttcgatttcattgtcaggctgcaagtgattctagtcacaagattcctatttcaaattttgaacgtgggcataaccaagcaactgtgttacaaaacctttatagatttattcatcccaacccagggaactggccacctatctactgcaagtctgatgatagaaccagagtcaactggtgtttgaagcatatggcaaaggcatcagaaatcaggcaagatctacaacttctcactgtagaggaccttgtagtggggatctaccaacaaaaatttctcaaggagccctctaagacttggattcgaagcctcctagatgtggccatgtgggattattctagcaacacaaggtgcaagtggcatgaagaaaatgatattctcttctgtgctttagctgtttgcaagaagattgcgtactgcatcagtaattctctggccactctctttggaatccagctcacagaggctcatgtaccactacaagattatgaggccagcaatagtgtgacacccaaaatggttgtattggatgcagggcgttaccagaagctaagggttgggagttcaggattctctcatttcaactcttctaatgaggaacaaagatcaaacacacccattggtgactacccatctagggcaaaaatttctggccaaaacagcagcgttcggggaagaggaattacccgcttactagagagcatttccaattcttccagcaatatccacaaattctccaactgtgacacttcactctcaccttacatgtcccaaaaagatggatacaaatctttctcttccttatct

SEQ ID NO: 7165 - DNA, 684 bp, Homo sapiens
  source 1..684: mol_type = genomic DNA
atgccgaccaattgcgctgcggcgggctgtgccactacctacaacaagcacattaacatcagcttccacaggtttcctttggatcctaaaagaagaaaagaatgggttcgcctggttaggcgcaaaaattttgtgccaggaaaacacacttttctttgttcaaagcactttgaagcctcctgttttgacctaacaggacaaactcgacgacttaaaatggatgctgttccaaccatttttgatttttgtacccatataaagtctatgaaactcaagtcaaggaatcttttgaagaaaaacaacagttgttctccagctggaccatctaatttaaaatcaaacattagtagtcagcaagtactacttgaacacagctatgcctttaggaatcctatggaggcaaaaaagaggatcattaaactggaaaaagaaatagcaagcttaagaagaaaaatgaaaacttgcctacaaaaggaacgcagagcaactcgaagatggatcaaagccacgtgtttggtaaagaatttagaagcaaatagtgtattacctaaaggtacatcagaacacatgttaccaactgccttaagcagtcttcctttggaagattttaagatccttgaacaagatcaacaagataaaacactgctaagtctaaatctaaaacagaccaagagtaccttcatt

SEQ ID NO: 7166 - DNA, 2283 bp, Homo sapiens
  source 1..2283: mol_type = genomic DNA
atgccgaacttctgcgctgcccccaactgcacgcggaagagcacgcagtccgacttggccttcttcaggttcccgcgggaccctgccagatgccagaagtgggtggagaactgtaggagagcagacttagaagataaaacacctgatcagctaaataaacattatcgattatgtgccaaacattttgagacctctatgatctgtagaactagtccttataggacagttcttcgagataatgcaataccaacaatatttgatcttaccagtcatttgaacaacccacatagtagacacagaaaacgaataaaagaactgagtgaagatgaaatcaggacactgaaacagaaaaaaattgatgaaacttctgagcaggaacaaaaacataaagaaaccaacaatagcaatgctcagaaccccagcgaagaagagggtgaagggcaagatgaggacattttacctctaacccttgaagagaaggaaaacaaagaatacctaaaatctctatttgaaatcttgattctgatgggaaagcaaaacatacctctggatggacatgaggctgatgaaatcccagaaggtctctttactccagataactttcaggcactgctggagtgtcggataaattctggtgaagaggttctgagaaagcggtttgagacaacagcagttaacacgttgttttgttcaaaaacacagcagaggcagatgctagagatctgtgagagctgtattcgagaagaaactctcagggaagtgagagactcacacttcttttccattatcactgacgatgtagtggacatagcaggggaagagcacctacctgtgttggtgaggtttgttgatgaatctcataacctaagagaggaatttataggcttcctgccttatgaagccgatgcagaaattttggctgtgaaatttcacactatgataactgagaagtggggattaaatatggagtattgtcgtggccaggcttacattgtctctagtggattttcttccaaaatgaaagttgttgcttctagacttttagagaaatatccccaagctatctacacactctgctcttcctgtgccttaaatatgtggttggcaaaatcagtacctgttatgggagtatctgttgcattaggaacaattgaggaagtttgttcttttttccatcgatcaccacaactgcttttagaacttgacaacgtaatttctgttctttttcagaacagtaaagaaaggggtaaagaactgaaggaaatctgccattctcagtggacaggcaggcatgatgcttttgaaattttagtggaactcctgcaagcacttgttttatgtttagatggtataaatagtgacacaaatattagatggaataactatatagctggccgagcatttgtactctgcagtgcagtgtcagattttgatttcattgttactattgttgttcttaaaaatgtcctatcttttacaagagcctttgggaaaaacctccaggggcaaacctctgatgtcttctttgcggccggtagcttgactgcagtactgcattcactcaacgaagtgatggaaaatattgaagtttatcatgaattttggtttgaggaagccacaaatttggcaaccaaacttgatattcaaatgaaactccctgggaaattccgcagagctcaccagggtaacttggaatctcagctaacctctgagagttactataaagaaaccctaagtgtcccaacagtggagcacattattcaggaacttaaagatatattctcagaacagcacctcaaagctcttaaatgcttatctctggtaccctcagtcatgggacaactcaaattcaatacgtcggaggaacaccatgctgacatgtatagaagtgacttacccaatcctgacacgctgtcagctgagcttcattgttggagaatcaaatggaaacacagggggaaagatatagagcttccgtccaccatctatgaagccctccacctgcctgacatcaagttttttcctaatgtgtatgcattgctgaaggtcctgtgtattcttcctgtgatgaaggttgagaatgagcggtatgaaaatggacgaaagcgtcttaaagcatatttgaggaacactttgacagaccaaaggtcaagtaacttggctttgcttaacataaattttgatataaaacacgacctggatttaatggtggacacatatattaaactctatacaagtaagtcagagcttcctacagataattccgaaactgtggaaaatacc

SEQ ID NO: 7167 - DNA, 1644 bp, Homo sapiens
  source 1..1644: mol_type = genomic DNA
atgaagaccccggcggacacagggtttgccttcccggattgggcctacaagccagagtcgtcccctggctcaaggcagatccagctgtggcactttatcctggagctgctgcggaaggaggagtaccagggcgtcattgcctggcagggggactacggggaattcgtcatcaaagaccctgatgaggtggcccggctgtggggcgttcgcaagtgcaagccccagatgaattacgacaagctgagccgggccctgcgctattactataacaagcgcattctgcacaagaccaaggggaaacggttcacctacaagttcaatttcaacaaactggtgctggtcaattacccattcattgatgtggggttggctgggggtgcagtgccccagagtgccccgccagtgccgtcgggtggtagccacttccgcttccctccctcaacgccctccgaggtgctgtcccccaccgaggacccccgctcaccaccagcctgctcttcatcttcatcttccctcttctcggctgtggtggcccgccgcctgggccgaggctcagtcagtgactgtagtgatggcacgtcagagctggaggaaccgctgggagaggatccccgcgcccgaccacccggccctccggatctgggtgccttccgagggcccccgctggcccgcctgccccatgaccctggtgtcttccgagtctatccccggcctcggggtggccctgaacccctcagccccttccctgtgtcgcctctggccggtcctggatccctgctgccccctcagctctccccggctctgcccatgacgcccacccacctggcctacactccctcgcccacgctgagcccgatgtaccccagtggtggcggggggcccagcggctcagggggaggctcccacttctccttcagccctgaggacatgaaacggtacctgcaggcccacacccaaagcgtctacaactaccacctcagcccccgcgccttcctgcactaccctgggctggtggtgccccagccccagcgccctgacaagtgcccgctgccgcccatggcacccgagaccccaccggtcccctcctcggcctcgtcatcctcttcttcttcttcctccccattcaagtttaagctccagccgcccccactcggacgccggcagcgggcagctggggagaaggccgtagccggtgctgacaagagcggtggcagtgcaggcgggctggctgagggggcaggggcgctagccccaccgcccccgccaccacagatcaaggtggagcccatctcggaaggcgagtcggaggaggtagaggtgactgacatcagtgatgaggatgaggaagacggggaggtgttcaagacgccccgtgccccacctgcaccccctaagcctgagcccggcgaggcacccggggcatcccagtgcatgcccctcaagctacgctttaagcggcgctggagtgaagactgtcgcctcgaagggggtgggggccccgctgggggctttgaggatgagggtgaggacaagaaggtgcgtggggaggggcctggggaggctggggggcccctcaccccaaggcgggtgagctctgacctccagcatgccacggcccagctctccctggagcaccgagactcc

SEQ ID NO: 7168 - DNA, 456 bp, Homo sapiens
  source 1..456: mol_type = genomic DNA
atggccaacctggagcgcaccttcatcgccatcaagccggacggcgtgcagcgcggcctggtgggcgagatcatcaagcgcttcgagcagaagggattccgcctcgtggccatgaagttcctccgggcctctgaagaacacctgaagcagcactacattgacctgaaagaccgaccattcttccctgggctggtgaagtacatgaactcagggccggttgtggccatggtctgggaggggctgaacgtggtgaagacaggccgagtgatgcttggggagaccaatccagcagattcaaagccaggcaccattcgtggggacttctgcattcaggttggcaggaacatcattcatggcagtgattcagtaaaaagtgctgaaaaagaaatcagcctatggtttaagcctgaagaactggttgactacaagtcttgtgctcatgactgggtctatgaa

SEQ ID NO: 7169 - DNA, 1281 bp, Homo sapiens
  source 1..1281: mol_type = genomic DNA
atggaggcaatggcggccagcacttccctgcctgaccctggagactttgaccggaacgtgccccggatctgtggggtgtgtggagaccgagccactggctttcacttcaatgctatgacctgtgaaggctgcaaaggcttcttcaggcgaagcatgaagcggaaggcactattcacctgccccttcaacggggactgccgcatcaccaaggacaaccgacgccactgccaggcctgccggctcaaacgctgtgtggacatcggcatgatgaaggagttcattctgacagatgaggaagtgcagaggaagcgggagatgatcctgaagcggaaggaggaggaggccttgaaggacagtctgcggcccaagctgtctgaggagcagcagcgcatcattgccatactgctggacgcccaccataagacctacgaccccacctactccgacttctgccagttccggcctccagttcgtgtgaatgatggtggagggagccatccttccaggcccaactccagacacactcccagcttctctggggactcctcctcctcctgctcagatcactgtatcacctcttcagacatgatggactcgtccagcttctccaatctggatctgagtgaagaagattcagatgacccttctgtgaccctagagctgtcccagctctccatgctgccccacctggctgacctggtcagttacagcatccaaaaggtcattggctttgctaagatgataccaggattcagagacctcacctctgaggaccagatcgtactgctgaagtcaagtgccattgaggtcatcatgttgcgctccaatgagtccttcaccatggacgacatgtcctggacctgtggcaaccaagactacaagtaccgcgtcagtgacgtgaccaaagccggacacagcctggagctgattgagcccctcatcaagttccaggtgggactgaagaagctgaacttgcatgaggaggagcatgtcctgctcatggccatctgcatcgtctccccagatcgtcctggggtgcaggacgccgcgctgattgaggccatccaggaccgcctgtccaacacactgcagacgtacatccgctgccgccacccgcccccgggcagccacctgctctatgccaagatgatccagaagctagccgacctgcgcagcctcaatgaggagcactccaagcagtaccgctgcctctccttccagcctgagtgcagcatgaagctaacgccccttgtgctcgaagtgtttggcaatgagatctcc

SEQ ID NO: 7170 - DNA, 2127 bp, Homo sapiens
  source 1..2127: mol_type = genomic DNA
atggcagagacactggagttcaacgacgtctatcaggaggtgaaaggttccatgaatgatggtcgactgaggttgagccgtcagggcatcatcttcaagaatagcaagacaggcaaagtggacaacatccaggctggggagttaacagaaggtatctggcgccgtgttgctctgggccatggacttaaactgcttacaaagaatggccatgtctacaagtatgatggcttccgagaatcggagtttgagaaactctctgatttcttcaaaactcactatcgccttgagctaatggagaaggacctttgtgtgaagggctggaactgggggacagtgaaatttggtgggcagctgctttcctttgacattggtgaccagccagtctttgagatacccctcagcaatgtgtcccagtgcaccacaggcaagaatgaggtgacactggaattccaccaaaacgatgacgcagaggtgtctctcatggaggtgcgcttctacgtcccacccacccaggaggatggtgtggaccctgttgaggcctttgcccagaatgtgttgtcaaaggcggatgtaatccaggccacgggagatgccatctgcatcttccgggagctgcagtgtctgactcctcgtggtcgttatgacattcggatctaccccacctttctgcacctgcatggcaagacctttgactacaagatcccctacaccacagtactgcgtctgtttttgttaccccacaaggaccagcgccagatgttctttgtgatcagcctggatcccccaatcaagcaaggccaaactcgctaccacttcctgatcctcctcttctccaaggacgaggacatttcgttgactctgaacatgaacgaggaagaagtggagaagcgctttgagggtcggctcaccaagaacatgtcaggatccctctatgagatggtcagccgggtcatgaaagcactggtaaaccgcaagatcacagtgccaggcaacttccaagggcactcaggggcccagtgcattacctgttcctacaaggcaagctcaggactgctctacccgctggagcggggcttcatctacgtccacaagccacctgtgcacatccgcttcgatgagatctcctttgtcaactttgctcgtggtaccactactactcgttcctttgactttgaaattgagaccaagcagggcactcagtataccttcagcagcattgagagggaggagtacgggaaactgtttgattttgtcaacgcgaaaaagctcaacatcaaaaaccgaggattgaaagagggcatgaacccaagctacgatgaatatgctgactctgatgaggaccagcatgatgcctacttggagaggatgaaggaggaaggcaagatccgggaggagaatgccaatgacagcagcgatgactcaggagaagaaaccgatgagtcattcaacccaggtgaagaggaggaagatgtggcagaggagtttgacagcaacgcctctgccagctcctccagtaatgagggtgacagtgaccgggatgagaagaagcggaaacagctcaaaaaggccaagatggccaaggaccgcaagagccgcaagaagcctgtggaggtgaagaagggcaaagaccccaatgcccccaagaggcccatgtctgcatacatgctgtggctcaatgccagccgagagaagatcaagtcagaccatcctggcatcagcatcacggatctttccaagaaggcaggcgagatctggaagggaatgtccaaagagaagaaagaggagtgggatcgcaaggctgaggatgccaggagggactatgaaaaagccatgaaagaatatgaagggggccgaggcgagtcttctaagagggacaagtcaaagaagaagaagaaagtaaaggtaaagatggaaaagaaatccacgccctctaggggctcatcatccaagtcgtcctcaaggcagctaagcgagagcttcaagagcaaagagtttgtgtctagtgatgagagctcttcgggagagaacaagagcaaaaagaagaggaggaggagcgaggactctgaagaagaagaactagccagtactccccccagctcagaggactcagcgtcaggatccgatgag

SEQ ID NO: 7171 - DNA, 231 bp, Homo sapiens
  source 1..231: mol_type = genomic DNA
atgccgaagagaaagtctccagagaatacagagggcaaagatggatccaaagtaactaaacaggagcccacaagacggtctgccagattgtcagcgaaacctgctccaccaaaacctgaacccaaaccaagaaaaacatctgctaagaaagaacctggagcaaagattagcagaggtgctaaagggaagaaggaggaaaagcaggaagctggaaaggaaggcacagaaaac

SEQ ID NO: 7172 - DNA, 750 bp, Homo sapiens
  source 1..750: mol_type = genomic DNA
atggccgaaggcggggctagcaaaggtggtggagaagagcccgggaagctgccggagccggcagaggaggaatcccaggttttgcgcggaactggccactgtaagtggttcaatgtgcgcatgggatttggattcatctccatgataaaccgagagggaagccccttggatattccagtcgatgtatttgtacaccaaagcaaactattcatggaaggatttagaagcctaaaagaaggagaaccagtggaattcacatttaaaaaatcttccaaaggccttgagtcaatacgggtaacaggacctggtgggagcccctgtttaggaagtgaaagaagacccaaagggaagacactacagaaaagaaaaccaaagggagatagatgctacaactgtggtggccttgatcatcatgctaaggaatgtagtctacctcctcagccaaagaagtgccattactgtcagagcatcatgcacatggtggcaaactgcccacataaaaatgttgcacagccacccgcgagttctcagggaagacaggaagcagaatcccagccatgcacttcaactctccctcgagaagtgggaggcgggcatggctgtacatcaccaccgtttcctcaggaggctagggcagagatctcagaacggtcaggcaggtcacctcaagaagcttcctccacgaagtcatctatagcaccagaagagcaaagcaaaaaggggccttcagttcaaaaaaggaaaaagaca

SEQ ID NO: 7173 - DNA, 624 bp, Homo sapiens
  source 1..624: mol_type = genomic DNA
atgtccagcgagcctccccctccttatcctgggggccccacagccccacttctggaagagaaaagtggagccccgcccaccccaggccgttcctccccagctgtgatgcagccccctccaggcatgccactgccccctgcggacattggccccccaccctatgagccgccgggtcacccaatgccccagcctggcttcatcccaccacacatgagtgcagatggcacctacatgcctccgggtttctaccctcctccaggcccccacccacccatgggctactaccccccagggccctacacgccagggccctaccctggccctgggggccacacagccacagtcctggtcccttcaggagctgccaccacggtgacagtgctgcagggagagatctttgagggagcgcctgtgcagacggtgtgtccccactgccagcaggccatcaccaccaagatctcctacgagattggcttgatgaatttcgtgctgggtttcttctgttgcttcatgggatgtgatctgggctgctgcctgatcccctgcctcatcaatgacttcaaggatgtgacgcacacatgccccagctgcaaagcctacatctacacgtacaagcgcctgtgc

SEQ ID NO: 7174 - DNA, 1095 bp, Homo sapiens
  source 1..1095: mol_type = genomic DNA
atggggaggaaaaaaatccagatctcccgcatcctggaccaaaggaatcggcaggtgacgttcaccaagcggaagttcgggctgatgaagaaggcctatgagctgagcgtgctctgtgactgtgagatagccctcatcatcttcaacagcgccaaccgcctcttccagtatgccagcacggacatggaccgtgtgctgctgaagtacacagagtacagcgagccccacgagagccgcaccaacactgacatcctcgagacgctgaagcggaggggcattggcctcgatgggccagagctggagccggatgaagggcctgaggagccaggagagaagtttcggaggctggcaggcgaagggggtgatccggccttgccccgaccccggctgtatcctgcagctcctgctatgcccagcccagatgtggtatacggggccttaccgccaccaggctgtgaccccagtgggcttggggaagcactgcccgcccagagccgcccatctcccttccgaccagcagcccccaaagccgggcccccaggcctggtgcaccctctcttctcaccaagccacctcaccagcaagacaccacccccactgtacctgccgacggaagggcggaggtcagacctgcctggtggcctggctgggccccgagggggactaaacacctccagaagcctctacagtggcctgcagaacccctgctccactgcaactcccggacccccactggggagcttccccttcctccccggaggccccccagtgggggccgaagcctgggcgaggagggtcccccaacccgcggcgcctccccgccgacccccccagtcagcatcaagtctgagcgcctctctccggcccccgggggccccggcgactttcctaagaccttcccctatcccttgctcctcgcccggtccctggcagagcctctgcggcctgggcccgccctgcgccggctgcccttggccgacggctggccccggtaggagatcacccggtggcaccagcccagagcgctcgccaggtacggcgagggcacgtggggaccccacctccctccaggcctcttcagagaagacccaacag

SEQ ID NO: 7175 - DNA, 378 bp, Homo sapiens
  source 1..378: mol_type = genomic DNA
atggtctctagcgaccggcccgtgtcactggaggacgaggtctcccatagtatgaaggagatgattggaggctgttgcgtttgctcagacgagagaggctgggccgagaacccgctggtttattgcgacgggcacggctgcagcgtcgcggtgcatcaagcttgctatggcattgttcaagtacccactggaccgtggttttgcaggaaatgtgaatctcaggagagagcagccagagtggcagagtctcgctctgttgcccaggctaaagtgcagtggtgtgatctcagcccactgcaacctctgctccccgggttcaagcgattctcctgcctcagcctcccaaatggtatgcaattcctgttggttagcctcatc

SEQ ID NO: 7176 - DNA, 765 bp, Homo sapiens
  source 1..765: mol_type = genomic DNA
atggtcatgagttcgtatatggtgaactccaagtatgtggaccccaagttccctccgtgcgaggagtatttgcagggcggctacctaggcgagcagggcgccgactactacggcggcggcgcgcagggcgcagacttccagcccccggggctctacccacggcccgacttcggtgagcagcctttcggaggcagcggccccgggcctggctcggcgctgcctgcgcggggtcacggacaagagccaggcggccccggcggtcactacgccgctccaggagagccttgcccagctcccccggcgcctccgccggcgcccctgcctggcgcccgggcctacagtcagtccgaccccaagcagccgccctccgggacggcactcaagcagccggccgtggtctacccctggatgaagaaggtgcacgtgaattcggtgaaccccaactacaccggtggggaacccaagcggtcccgaacggcctacacccggcagcaagtcctagaactggaaaaagaatttcattttaacaggtatctgacaaggcgccgtcggattgaaatcgctcacaccctgtgtctgtcggagcgccagatcaagatctggttccagaaccggaggatgaagtggaaaaaagatcataagctgcccaacactaaaggcaggtcatcgtcctcatcttcctcctcatcttgctcctcctcagtcgcccccagccagcatttacagccgatggccaaagaccaccacacggacctgacgacctta

SEQ ID NO: 7177 - DNA, 1185 bp, Homo sapiens
  source 1..1185: mol_type = genomic DNA
atgagcgggggcaagaagaagagtagtttccaaatcaccagcgtcaccacggactatgagggccctgggagcccaggggcttcggatccccctaccccacagcccccaaccgggcccccgccccgcctgcccaatggggagcccagccccgatccggggggcaagggcaccccccggaatggctccccaccacctggggccccttcctcccgtttccgggtggtgaagctgccccacggcctgggagagccttatcgccgcggtcgctggacgtgtgtggatgtttatgagcgagacctggagccccacagcttcggcggactcctggagggaattcgaggggcctcagggggcgccgggggcagatctttggattccaggttggagctggccagcctcggcctgggcgcccccaccccaccgtcaggcctgtctcagggccccacctcctggctccgtccaccccccacctctcctggacctcaggcccgctccttcactgggggactgggccagctggtggtgcccagcaaagccaaggcagagaaacccccactgtcggcctcctcaccccagcagcgccccccagagcctgagaccggtgagagtgcgggcacatcccgggctgccacgcccctgccctctctgagggtggaagcggaggctgggggctcaggggccaggacccctccactgtcccggaggaaagctgtagacatgcggctgcggatggagttgggtgctccagaagagatggggcaggtgcccccacttgactctcgccccagctccccggccctctacttcacccacgatgccagcctggttcacaaatctccagaccccttcggagcagtagcagctcagaagttcagcctggcccactccatgttggccatcagtggtcacctagacagcgacgatgatagtggctccggaagcctggttggcattgacaacaaaatcgagcaagccatggacttggtgaagtcccacctcatgtttgcggtccgggaggaggtggaggtgctgaaggagcagatccgggaactggcggagcggaacgctgcgctggagcaggagaatgggctgctgcgcgccctggccagcccggagcagctggctcagctgccctcctcgggggtcccacggcttgggccccctgcgcccaatgggccctccgtc

SEQ ID NO: 7178 - DNA, 1020 bp, Homo sapiens
  source 1..1020: mol_type = genomic DNA
atgtcctttcccaacagctctcctgctgctaatacttttttagtagattccttgatcagtgcctgcaggagtgacagtttttattccagcagcgccagcatgtacatgccaccacctagcgcagacatggggacctatggaatgcaaacctgtggactgctcccgtctctggccaaaagagaagtgaaccaccaaaatatgggtatgaatgtgcatccttatatacctcaagtagacagttggacagatccgaacagatcttgtcgaatagagcaacctgttacacagcaagtccccacttgctccttcaccaccaacattaaggaagaatccaattgctgcatgtattctgataagcgcaacaaactcatttcggccgaggtcccttcgtaccagaggctggtccctgagtcttgtcccgttgagaaccctgaggttcccgtccctggatattttagactgagtcagacctacgccaccgggaaaacccaagagtacaataatagccccgaaggcagctccactgtcatgctccagctcaaccctcgtggcgcggccaagccgcagctctccgctgcccagctgcagatggaaaagaagatgaacgagcccgtgagcggccaggagcccaccaaagtctcccaggtggagagccccgaggccaaaggcggccttcccgaagagaggagctgcctggctgaggtctccgtgtccagtcccgaagtgcaggagaaggaaagcaaagaggaaatcaagtctgatacaccaaccagcaattggctcactgcaaagagtggcagaaagaagaggtgcccttacactaagcaccaaacgctggaattagaaaaagagttcttgttcaatatgtacctcacccgcgagcgccgcctagagatcagtaagagcgttaacctcaccgacaggcaggtcaagatttggtttcaaaaccgccgaatgaaactcaagaagatgagccgagagaaccggatccgagaactgaccgccaacctcacgttttct

SEQ ID NO: 7179 - DNA, 573 bp, Homo sapiens
  source 1..573: mol_type = genomic DNA
atgaccgatccgtcgctggggctgacagtccccatggcgccgcctctggccccgctccctccccgggacccaaacggggcgggatccgagtggagaaagcccggggccgtgagcttcgccgacgtggccgtgtacttctcccgggaggagtggggctgcctgcggcccgcgcagagggccctgtaccgggacgtgatgcgggagacctacggccacctgggcgcgctcggtgagagccccacctgcttgcctgggccctgcgcctccacaggccctgccgcgcctctgggagctgcgtgtggagttgggggccccggggccgggcaggcggcctcctcgcagcgtggggtttgcgttcttctcccccaggagtcggaggcagcaagccggcgctcatctcctgggtggaggagaaggccgaactgtgggatccggctgcccaggatccggaggtggcgaagtgtccgacagaagcggacccagcagattccagaaacaaggaagaggaaagacaaagggaagggacgggagccctggagaagcccgaccctgtggccgccgggtctcctgggc

SEQ ID NO: 7180 - DNA, 324 bp, Homo sapiens
  source 1..324: mol_type = genomic DNA
atgaccaggaagatcttcacaaataccagggagcggtggaggcagcagaatgtcaacagcgcctttgccaagctgaggaagctcatccccactcaccctccagacaaaaagctgagcaaaaatgaaacgcttcgcctggcaatgaggtatatcaacttcttggtcaaggtcttgggggagcaaagcctgcaacaaacgggagtggctgctcaggggaacattctggggctcttccctcaaggaccccacctgccaggcctggaggacagaactctgcttgagaactaccaggttccttcacctggtccaagccaccacattcct

SEQ ID NO: 7181 - DNA, 666 bp, Homo sapiens
  source 1..666: mol_type = genomic DNA
atggtgaaatgctgctccgccattggatgtgcttctcgctgcttgccaaattcgaagttaaaaggactgacatttcacgtattccccacagatgaaaacatcaaaaggaaatgggtattagcaatgaaaagacttgatgtgaatgcagccggcatttgggagcctaaaaaaggagatgtgttgtgttcgaggcactttaagaagacagattttgacagaagtgctccaaatattaaactgaaacctggagtcataccttctatctttgattctccatatcacctacaggggaaaagagaaaaacttcattgtagaaaaaacttcaccctcaaaaccgttccagccactaactacaatcaccatcttgttggtgcttcctcatgtattgaagaattccaatcccagttcatttttgaacatagctacagtgtaatggacagtccaaagaaacttaagcataaattagatcatgtgatcggcgagctagaggatacaaaggaaagtctacggaatgttttagaccgagaaaaacgttttcagaaatcattgaggaagacaatcagggaattaaaggatgaatgtctgatcagccaagaaacagcaaatagactggacactttctgttgggactgttgtcaggagagcatagaacaggactatatttca

SEQ ID NO: 7182 - DNA, 378 bp, Homo sapiens
  source 1..378: mol_type = genomic DNA
atgggactgttgacattcagggatgtggccatagaattctctcgggaggagtgggaacacctggactcagatcagaagcttttatatggggatgtgatgttagagaactacggaaacctggtctctctgggtctcgctgtctctaagccggacctgatcacctttttggagcaaaggaaagagccctggaatgtgaagagtgcagagacagtagccatccagccagatatcttttctcatgatactcaaggcctcttaagaaagaagcttatagaagcatcattccaaaaagtgatattggatggatatgggagctgtggccctcagaatttaaacttaaggaaagagtgggaaagtgagggcaaaataatcctatgg

SEQ ID NO: 7183 - DNA, 459 bp, Homo sapiens
  source 1..459: mol_type = genomic DNA
atgacttcagagtcgacgtcacccccagttgtgcccccgctccactcccccaagtccccagtctggcccaccttccccttccacagggagggcagcagggtctgggagcggggtggtgtcccacctcgggacctacccagccctctgcccaccaagcggaccaggacctattcagcgacagcccgggcctcagctggccccgtgttcaagggcgtctgtaagcagttctcacgctcacagggccatggcttcatcacccccgagaacgggtccgaggacatcttcgtacatgtgtctgacatcgagggggagtacgtgccagtggagggcgacgaggtgacctacaagatgtgccctatccctcccaagaaccagaagttccaggccgtggaggtggtgctcactcagctggccccccacactccccacgagacgtggtctggccaggtcgtgggctcc

SEQ ID NO: 7184 - DNA, 1155 bp, Homo sapiens
  source 1..1155: mol_type = genomic DNA
atgagcaagccagccggatcaacaagccgcattttagatatcccctgcaaagtgtgtggcgaccgcagctcggggaagcactacggggtctacgcctgcgacggctgctcaggttttttcaaacggagcatccgaaggaataggacctatgtctgcaaatctggaaaccagggaggctgtccggtggacaagacgcacagaaaccagtgcagggcgtgtcggctgaagaagtgtttggaagtcaacatgaacaaagacgccgtgcagcacgagcgggggcctcggacgtccaccatccgcaagcaagtggccctctacttccgtggacacaaggaggagaacggggccgccgcgcactttccctcggcggcgctccctgcgccggccttcttcaccgcggtcacgcagctggagccgcacggcctggagctggccgcggtgtccaccactccagagcggcagaccctcgtgagcctggctcagcccacgcccaagtacccccatgaagtgaatgggaccccaatgtatctctatgaagtggccacggagtcggtgtgtgaatcagctgccagacttctcttcatgagcatcaagtgggctaagagtgtgccagccttctccacgctgtctttgcaagaccagctgatgcttttggaagatgcttggagagaactgtttgttctaggaatagcacaatgggccattccggttgatgctaacactctactggctgtatctggcatgaacggtgacaacacagattcccagaagctgaacaagatcatatctgaaatacaggctttacaagaggtggtggctcgatttagacaactccggttagatgctactgaatttgcctgtctaaaatgcatcgtcactttcaaagccgttcctacacatagtggttctgaactgagaagtttccggaatgctgccgccattgcagcccttcaagatgaggctcagctaacgctcaacagctacatccataccagatatcccactcaaccctgtcgctttggaaaactcctgttgcttttgccagctttacgttctattagcccatcaactatagaagaagtgtttttcaaaaaaaccatcggcaatgtgccaattacaagactgctttcagatatgtacaaatccagtgatatc

SEQ ID NO: 7185 - DNA, 1953 bp, Homo sapiens
  source 1..1953: mol_type = genomic DNA
atggcggacagtgcggaactaaagcaaatggttatgagccttagagtttctgaactccaagtactgttgggctacgccgggagaaacaagcacggacgcaaacacgaacttctcacaaaagccctgcatttgctaaaggctggctgtagtcctgctgtgcaaatgaaaattaaggaactctataggcggcggttcccacagaaaatcatgacgcctgcagacttgtccatccccaacgtacattcaagtcctatgccagcaactttgtctccatctaccattccacaactcacttacgatggtcaccctgcatcatcgccattactccctgtttctcttctgggacctaaacatgaactggaactcccacatcttacatcagctcttcacccagtccatccggatataaaacttcaaaaattaccattttatgatttactggatgaactgataaaacccaccagtctagcatcagacaacagtcagcgctttcgagaaacctgttttgcatttgccttgacaccacaacaagtgcagcaaatcagtagttccatggatatttctgggaccaaatgtgacttcacagtacaggtccagttaaggttttgtttatcagaaaccagttgtccacaagaagatcacttcccacccaatctttgtgtgaaagtgaatacaaaaccttgcagccttccaggttaccttccacctacaaaaaatggcgtggaaccaaagcgacccagccgaccaattaatatcacctcacttgtccgactgtccacaacagtaccaaacacgattgttgtttcttggactgcagaaattggaagaaactattccatggcagtatatcttgtaaaacagttgtcctcaacagttcttcttcagaggttacgagcaaagggaataaggaatccggatcattctagagctttaattaaagagaagttgactgcggatccagacagtgaaatagctacaaccagcctaagggtttctctactatgtccacttggtaaaatgcggctgacaattccgtgtcgggcccttacatgttctcatctacaatgttttgacgcaactctttacattcagatgaatgagaaaaaaccaacctgggtttgtcctgtctgtgataagaaggctccatatgaacaccttattattgatggcttgtttatggaaatcctaaagtactgtacagactgtgatgaaatacaatttaaggaggatggcacttgggcaccgatgagatcaaaaaaggaagtacaggaagtttctgcctcttacaatggagtcgatggatgcttgagctccacattggagcatcaggtagcgtctcaccaccagtcctcaaataaaaacaagaaagtagaagtgattgacctaaccatagacagttcatctgatgaagaggaagaagagccatctgccaagaggacctgtccttccctatctcccacatcaccactaaataataaaggcattttaagtcttccacatcaagcatctccagtatcccgcaccccaagccttcctgctgtagacacaagctacattaatacctccctcatccaagactataggcatcctttccacatgacacccatgccttacgacttacaaggattagatttctttcctttcttatcaggagacaatcagcattacaacacctccttgcttgccgctgcagcagcagcagtttcagatgatcaagacctcctacactcgtctcggtttttcccgtatacctcctcacagatgtttcttgatcagttaagtgcaggaggcagtacttctctgccaaccaccaatggaagcagtagtggcagtaacagcagcctggtttcttccaacagcctaagggaaagccatagccacaccgtcacaaacaggagcagcacggacacggcatccatctttggcatcataccagacattatttcattggac

SEQ ID NO: 7186 - DNA, 231 bp, Homo sapiens
  source 1..231: mol_type = genomic DNA
atggatctggtgaagaatcatctgatgtatgctgtgagagaggaggtggagatcctgaaggagcagatccgagagctggtggagaagaactcccagctagagcgtgagaacaccctgttgaagaccctggcaagcccagagcagctggagaagttccagtcctgtctgagccctgaagagccagctcccgaatccccacaagtgcccgaggcccctggtggttctgcggtc

SEQ ID NO: 7187 - DNA, 546 bp, Homo sapiens
  source 1..546: mol_type = genomic DNA
atgccgcgcgtcgtgcccgaccagagaagcaagttcgagaacgaggagttttttaggaagctgagccgcgagtgtgagattaagtacacgggcttcagggaccggccccacgaggaacgccaggcacgcttccagaacgcctgccgcgacggccgctcggaaatcgcttttgtggccacaggaaccaatctgtctctccagttttttccggccagctggcagggagaacagcgacaaacacctagccgagagtatgtcgacttagaaagagaagcaggcaaggtatatttgaaggctcccatgattctgaatggagtctgtgttatctggaaaggctggattgatctccaaagactggatggtatgggctgtctggagtttgatgaggagcgagcccagcaggaggatgcattagcacaacaggcctttgaagaggctcggagaaggacacgcgaatttgaagatagagacaggtctcatcgggaggaaatggaggtgagagtttcacagctgctggcagtaactggcaagaagacaacaagaccc

SEQ ID NO: 7188 - DNA, 771 bp, Homo sapiens
  source 1..771: mol_type = genomic DNA
atgccggcccgttgtgtggccgcccactgcggcaacaccaccaagtctgggaagtcgctgttccgctttcccaaggaccgggccgtgcggctgctctgggaccgcttcgtgcggggttgccgcgccgactggtacggaggcaatgaccgctcggtcatctgctctgaccactttgccccagcctgttttgacgtctcttcggttatccagaagaacctgcgcttctcccagcgcctgaggctggtggcaggcgccgtgcccaccctgcaccgggtgcccgccccggcacctaagaggggagaggagggagaccaagcaggccgcctggacacgcgaggagagctccaggcagccaggcattctgaggctgccccaggtccagtctcctgtacacgcccccgagctgggaagcaggctgcagcttcacagattacgtgtgaaaatgaacttgtgcaaacccaaccccatgctgataatccatctaatactgtcacttcagtacctactcactgtgaagaaggcccagtgcataaaagtacacaaatttctttgaaaaggccccgtcaccgtagtgtgggtattcaagccaaagtgaaagcgtttggaaaaagactgtgtaatgcaactactcagacagaggaattgtggtctagaacttcctctctctttgacatttactccagtgattcagaaacagatacagactgggatatcaagagtgaacagagtgatttgtcttatatggctgtacaggtgaaagaagaaacatgt

SEQ ID NO: 7189 - DNA, 720 bp, Homo sapiens
  source 1..720: mol_type = genomic DNA
atggtgagcaagggcgaggagctgttcaccggggtggtgcccatcctggtcgagctggacggcgacgtaaacggccacaagttcagcgtgtctggcgagggcgagggcgatgccacctacggcaagctgaccctgaagttcatctgcaccaccggcaagctgcccgtgccctggcccaccctcgtgaccaccctgacctacggcgtgcagtgcttcagccgctaccccgaccacatgaagcagcacgacttcttcaagtccgccatgcccgaaggctacgtccaggagcgcaccatcttcttcaaggacgacggcaactacaagacccgcgccgaggtgaagttcgagggcgacaccctggtgaaccgcatcgagctgaagggcatcgacttcaaggaggacggcaacatcctggggcacaagctggagtacaactacaacagccacaacgtctatatcatggccgacaagcagaagaacggcatcaaggcgaacttcaagatccgccacaacatcgaggacggcagcgtgcagctcgccgaccactaccagcagaacacccccatcggcgacggccccgtgctgctgcccgacaaccactacctgagcacccagtccgccctgagcaaagaccccaacgagaagcgcgatcacatggtcctgctggagttcgtgaccgccgccgggatcactctcggcatggacgagctgtacaagtcc

SEQ ID NO: 7190 - DNA, 708 bp, Homo sapiens
  source 1..708: mol_type = genomic DNA
atggtgagcaagggcgaggaggataacatggccatcatcaaggagttcatgcgcttcaaggtgcacatggagggctccgtgaacggccacgagttcgagatcgagggcgagggcgagggccgcccctacgagggcacccagaccgccaagctgaaggtgaccaagggtggccccctgcccttcgcctgggacatcctgtcccctcagttcatgtacggctccaaggcctacgtgaagcaccccgccgacatccccgactacttgaagctgtccttccccgagggcttcaagtgggagcgcgtgatgaacttcgaggacggcggcgtggtgaccgtgacccaggactcctccctgcaggacggcgagttcatctacaaggtgaagctgcgcggcaccaacttcccctccgacggccccgtaatgcagaagaagaccatgggctgggaggcctcctccgagcggatgtaccccgaggacggcgccctgaagggcgagatcaagcagaggctgaagctgaaggacggcggccactacgacgctgaggtcaagaccacctacaaggccaagaagcccgtgcagctgcccggcgcctacaacgtcaacatcaagttggacatcacctcccacaacgaggactacaccatcgtggaacagtacgaacgcgccgagggccgccactccaccggcggcatggacgagctgtacaag

SEQ ID NO: 7191 - DNA, 24 bp, synthetic construct
  misc_feature 1..24: note = Synthetic
  source 1..24: mol_type = other DNA
agtcaagaccctcgggctctgtgg

SEQ ID NO: 7192 - DNA, 24 bp, synthetic construct
  misc_feature 1..24: note = Synthetic
  source 1..24: mol_type = other DNA
caattacaccacgtctgcctacta

SEQ ID NO: 7193 - DNA, 24 bp, synthetic construct
  misc_feature 1..24: note = Synthetic
  source 1..24: mol_type = other DNA
ttcagacgtttcgcgcctggagct

SEQ ID NO: 7194 - DNA, 24 bp, synthetic construct
  misc_feature 1..24: note = Synthetic
  source 1..24: mol_type = other DNA
gataacgctaaccacaaggtattt

SEQ ID NO: 7195 - DNA, 24 bp, synthetic construct
  misc_feature 1..24: note = Synthetic
  source 1..24: mol_type = other DNA
ccacgcgagctagacgatcgatga

SEQ ID NO: 7196 - DNA, 24 bp, synthetic construct
  misc_feature 1..24: note = Synthetic
  source 1..24: mol_type = other DNA
taacacagtgcggcgctcccgcgt

SEQ ID NO: 7197 - DNA, 24 bp, synthetic construct
  misc_feature 1..24: note = Synthetic
  source 1..24: mol_type = other DNA
gctcatgtgagcaaacgtggtttg

SEQ ID NO: 7198 - DNA, 24 bp, synthetic construct
  misc_feature 1..24: note = Synthetic
  source 1..24: mol_type = other DNA
taccacgtgtgcaggatccgcggg

SEQ ID NO: 7199 - DNA, 24 bp, synthetic construct
  misc_feature 1..24: note = Synthetic
  source 1..24: mol_type = other DNA
tcgcctcgcgcacttggcccgatc

SEQ ID NO: 7200 - DNA, 24 bp, synthetic construct
  misc_feature 1..24: note = Synthetic
  source 1..24: mol_type = other DNA
cactaggcttgtcatttatacagc

SEQ ID NO: 7201 - DNA, 24 bp, synthetic construct
  misc_feature 1..24: note = Synthetic
  source 1..24: mol_type = other DNA
acgcaaccctctcaacagtaaggt

SEQ ID NO: 7202 - DNA, 24 bp, synthetic construct
  misc_feature 1..24: note = Synthetic
  source 1..24: mol_type = other DNA
aaagataagtctaccattgctcct

SEQ ID NO: 7203 - DNA, 24 bp, synthetic construct
  misc_feature 1..24: note = Synthetic
  source 1..24: mol_type = other DNA
tcaagcgatgccgacgaatcatgc

SEQ ID NO: 7204 - DNA, 24 bp, synthetic construct
  misc_feature 1..24: note = Synthetic
  source 1..24: mol_type = other DNA
gagcgtaataatggtacaactcgt

SEQ ID NO: 7205 - DNA, 24 bp, synthetic construct
  misc_feature 1..24: note = Synthetic
  source 1..24: mol_type = other DNA
ctgtgtggctttcatgcctacagc

SEQ ID NO: 7206 - DNA, 24 bp, synthetic construct
  misc_feature 1..24: note = Synthetic
  source 1..24: mol_type = other DNA
ttgtgttacactaagccagtgatg

SEQ ID NO: 7207 - DNA, 24 bp, synthetic construct
  misc_feature 1..24: note = Synthetic
  source 1..24: mol_type = other DNA
atcccgaccgcccggatcgtccgg

SEQ ID NO: 7208 - DNA, 24 bp, synthetic construct
  misc_feature 1..24: note = Synthetic
  source 1..24: mol_type = other DNA
tagctgctgaacatatgacaccag

SEQ ID NO: 7209 - DNA, 24 bp, synthetic construct
  misc_feature 1..24: note = Synthetic
  source 1..24: mol_type = other DNA
cttacgagaacggctatagtattt

SEQ ID NO: 7210 - DNA, 24 bp, synthetic construct
  misc_feature 1..24: note = Synthetic
  source 1..24: mol_type = other DNA
ccgtcagaatcctacggttacagc

SEQ ID NO: 7211 - DNA, 24 bp, synthetic construct
  misc_feature 1..24: note = Synthetic
  source 1..24: mol_type = other DNA
tggtttccggactgtcgctaactg

SEQ ID NO: 7212 - DNA, 24 bp, synthetic construct
  misc_feature 1..24: note = Synthetic
  source 1..24: mol_type = other DNA
cccgaattactaccgtaagagtgg

SEQ ID NO: 7213 - DNA, 24 bp, synthetic construct
  misc_feature 1..24: note = Synthetic
  source 1..24: mol_type = other DNA
ctattgaagcaggcaatagctctt

SEQ ID NO: 7214 - DNA, 24 bp, synthetic construct
  misc_feature 1..24: note = Synthetic
  source 1..24: mol_type = other DNA
aagagtattcattgcagcaagcag

SEQ ID NO: 7215 - DNA, 24 bp, synthetic construct
  misc_feature 1..24: note = Synthetic
  source 1..24: mol_type = other DNA
acccgacacgacgcgggcattcac

SEQ ID NO: 7216 - DNA, 24 bp, synthetic construct
  misc_feature 1..24: note = Synthetic
  source 1..24: mol_type = other DNA
gtgaatcgagagagaagctcattt

SEQ ID NO: 7217 - DNA, 24 bp, synthetic construct
  misc_feature 1..24: note = Synthetic
  source 1..24: mol_type = other DNA
ctgcagattgagcgggacaaacaa

SEQ ID NO: 7218 - DNA, 24 bp, synthetic construct
  misc_feature 1..24: note = Synthetic
  source 1..24: mol_type = other DNA
gcctacgggactttcccatcctac

SEQ ID NO: 7219 - DNA, 24 bp, synthetic construct
  misc_feature 1..24: note = Synthetic
  source 1..24: mol_type = other DNA
cggccaatcagcgagcactcttcc

SEQ ID NO: 7220 - DNA, 24 bp, synthetic construct
  misc_feature 1..24: note = Synthetic
  source 1..24: mol_type = other DNA
ttccggatggtgccaacctataca

SEQ ID NO: 7221 - DNA, 24 bp, synthetic construct
  misc_feature 1..24: note = Synthetic
  source 1..24: mol_type = other DNA
gcctcatccagttggcgaagtgtt

SEQ ID NO: 7222 - DNA, 24 bp, synthetic construct
  misc_feature 1..24: note = Synthetic
  source 1..24: mol_type = other DNA
tctcagccacggtccagcaaatgc

SEQ ID NO: 7223 - DNA, 24 bp, synthetic construct
  misc_feature 1..24: note = Synthetic
  source 1..24: mol_type = other DNA
ctttatatttcggcggccgagcag

SEQ ID NO: 7224 - DNA, 24 bp, synthetic construct
  misc_feature 1..24: note = Synthetic
  source 1..24: mol_type = other DNA
ggtatagtccatatttaatctctt

SEQ ID NO: 7225 - DNA, 24 bp, synthetic construct
  misc_feature 1..24: note = Synthetic
  source 1..24: mol_type = other DNA
gtagaccggtagatctaccatctg

SEQ ID NO: 7226 - DNA, 24 bp, synthetic construct
  misc_feature 1..24: note = Synthetic
  source 1..24: mol_type = other DNA
gtaggttcgccgtattcgctaaga

SEQ ID NO: 7227 - DNA, 24 bp, synthetic construct
  misc_feature 1..24: note = Synthetic
  source 1..24: mol_type = other DNA
tcgaaactcgtacagcctatacca

SEQ ID NO: 7228 - DNA, 24 bp, synthetic construct
  misc_feature 1..24: note = Synthetic
  source 1..24: mol_type = other DNA
ttaacgttataaggaggactctgt

SEQ ID NO: 7229 - DNA, 24 bp, synthetic construct
  misc_feature 1..24: note = Synthetic
  source 1..24: mol_type = other DNA
tacggcagaggagtactcggtccg

SEQ ID NO: 7230 - DNA, 24 bp, synthetic construct
  misc_feature 1..24: note = Synthetic
  source 1..24: mol_type = other DNA
taccgcaggcgaagttgcaatggt

SEQ ID NO: 7231 - DNA, 24 bp, synthetic construct
  misc_feature 1..24: note = Synthetic
  source 1..24: mol_type = other DNA
tcacacttgataggaagccaacta

SEQ ID NO: 7232 - DNA, 24 bp, synthetic construct
  misc_feature 1..24: note = Synthetic
  source 1..24: mol_type = other DNA
gaggtacagtgtaggtctctcacc

SEQ ID NO: 7233 - DNA, 24 bp, synthetic construct
  misc_feature 1..24: note = Synthetic
  source 1..24: mol_type = other DNA
ttacgcataaataagcccgcaaga

SEQ ID NO: 7234 - DNA, 24 bp, synthetic construct
  misc_feature 1..24: note = Synthetic
  source 1..24: mol_type = other DNA
cctttctaggcgccgtttcgcttg

SEQ ID NO: 7235 - DNA, 24 bp, synthetic construct
  misc_feature 1..24: note = Synthetic
  source 1..24: mol_type = other DNA
actgagcgttcagtcttctccaac

SEQ ID NO: 7236 - DNA, 24 bp, synthetic construct
  misc_feature 1..24: note = Synthetic
  source 1..24: mol_type = other DNA
taggtcttcgggttctgaagtatt

SEQ ID NO: 7237 - DNA, 24 bp, synthetic construct
  misc_feature 1..24: note = Synthetic
  source 1..24: mol_type = other DNA
ctgcgagcaactagaaggcaggag

SEQ ID NO: 7238 - DNA, 24 bp, synthetic construct
  misc_feature 1..24: note = Synthetic
  source 1..24: mol_type = other DNA
catgagcccgtggagtgtaacaga

SEQ ID NO: 7239 - DNA, 24 bp, synthetic construct
  misc_feature 1..24: note = Synthetic
  source 1..24: mol_type = other DNA
tctcaagcccgaccgtagacgttg

SEQ ID NO: 7240 - DNA, 24 bp, synthetic construct
  misc_feature 1..24: note = Synthetic
  source 1..24: mol_type = other DNA
actaggctcgtcgggaccgaggga

SEQ ID NO: 7241 - DNA, 24 bp, synthetic construct
  misc_feature 1..24: note = Synthetic
  source 1..24: mol_type = other DNA
gatttacttaatcgtaggagcact

SEQ ID NO: 7242 - DNA, 24 bp, synthetic construct
  misc_feature 1..24: note = Synthetic
  source 1..24: mol_type = other DNA
caggacaaggatgtgtaaatagtc

SEQ ID NO: 7243 - DNA, 24 bp, synthetic construct
  misc_feature 1..24: note = Synthetic
  source 1..24: mol_type = other DNA
tgatggtcttgtgcagacctaaac

SEQ ID NO: 7244 - DNA, 24 bp, synthetic construct
  misc_feature 1..24: note = Synthetic
  source 1..24: mol_type = other DNA
gtaggtctatcaacgctcctatag

SEQ ID NO: 7245 - DNA, 24 bp, synthetic construct
  misc_feature 1..24: note = Synthetic
  source 1..24: mol_type = other DNA
gtcgagcacagaattcttcgcctt

SEQ ID NO: 7246 - DNA, 24 bp, synthetic construct
  misc_feature 1..24: note = Synthetic
  source 1..24: mol_type = other DNA
gcggatatatcaccacctatgacg

SEQ ID NO: 7247 - DNA, 24 bp, synthetic construct
  misc_feature 1..24: note = Synthetic
  source 1..24: mol_type = other DNA
tttcgcctttagggactgatgtgg

SEQ ID NO: 7248 - DNA, 24 bp, synthetic construct
  misc_feature 1..24: note = Synthetic
  source 1..24: mol_type = other DNA
gtaccaactatctaagcagggtga

SEQ ID NO: 7249 - DNA, 24 bp, synthetic construct
  misc_feature 1..24: note = Synthetic
  source 1..24: mol_type = other DNA
agaagaatagtgctaggtacaggt

SEQ ID NO: 7250 - DNA, 24 bp, synthetic construct
  misc_feature 1..24: note = Synthetic
  source 1..24: mol_type = other DNA
cgacgaaattcggacacgccttgt

SEQ ID NO: 7251 - DNA, 24 bp, synthetic construct
  misc_feature 1..24: note = Synthetic
  source 1..24: mol_type = other DNA
gcattagtctatttacttgtgcta

SEQ ID NO: 7252 - DNA, 24 bp, synthetic construct
  misc_feature 1..24: note = Synthetic
  source 1..24: mol_type = other DNA
accgtttacctcagcccaagccgc

SEQ ID NO: 7253 - DNA, 24 bp, synthetic construct
  misc_feature 1..24: note = Synthetic
  source 1..24: mol_type = other DNA
gacgaaagcttcagcgcatctcgc

SEQ ID NO: 7254 - DNA, 24 bp, synthetic construct
  misc_feature 1..24: note = Synthetic
  source 1..24: mol_type = other DNA
ttggacagtcgttccagcatcaca

SEQ ID NO: 7255 - DNA, 24 bp, synthetic construct
  misc_feature 1..24: note = Synthetic
  source 1..24: mol_type = other DNA
cagatgaaagcactgtatctgtac

SEQ ID NO: 7256 - DNA, 24 bp, synthetic construct
  misc_feature 1..24: note = Synthetic
  source 1..24: mol_type = other DNA
tgtaggccgaacctcgtaagcccg

SEQ ID NO: 7257 - DNA, 24 bp, synthetic construct
  misc_feature 1..24: note = Synthetic
  source 1..24: mol_type = other DNA
aagccggcccattaagcccaagtt

SEQ ID NO: 7258 - DNA, 24 bp, synthetic construct
  misc_feature 1..24: note = Synthetic
  source 1..24: mol_type = other DNA
tcgcagtgggaaagacctcgatat

SEQ ID NO: 7259 - DNA, 24 bp, synthetic construct
  misc_feature 1..24: note = Synthetic
  source 1..24: mol_type = other DNA
gcctgctgtgaaaggaaatggcgc

SEQ ID NO: 7260 - DNA, 24 bp, synthetic construct
  misc_feature 1..24: note = Synthetic
  source 1..24: mol_type = other DNA
ataccttaagggtggcagtggagc

SEQ ID NO: 7261 - DNA, 24 bp, synthetic construct
  misc_feature 1..24: note = Synthetic
  source 1..24: mol_type = other DNA
aaatacacaaaccgatttattgac

SEQ ID NO: 7262 - DNA, 24 bp, synthetic construct
  misc_feature 1..24: note = Synthetic
  source 1..24: mol_type = other DNA
agctataaatacgtgtataaaccc

SEQ ID NO: 7263 - DNA, 24 bp, synthetic construct
  misc_feature 1..24: note = Synthetic
  source 1..24: mol_type = other DNA
tttgacccaggacggctatatcca

SEQ ID NO: 7264 - DNA, 24 bp, synthetic construct
  misc_feature 1..24: note = Synthetic
  source 1..24: mol_type = other DNA
cggcagtgtcaactaaggaggaca

SEQ ID NO: 7265 - DNA, 24 bp, synthetic construct
  misc_feature 1..24: note = Synthetic
  source 1..24: mol_type = other DNA
agttattgcattacgtatggtgga

SEQ ID NO: 7266 - DNA, 24 bp, synthetic construct
  misc_feature 1..24: note = Synthetic
  source 1..24: mol_type = other DNA
ctcgctcgcactagaattagttac

SEQ ID NO: 7267 - DNA, 24 bp, synthetic construct
  misc_feature 1..24: note = Synthetic
  source 1..24: mol_type = other DNA
ttagttatatcctttacgtacgtg

SEQ ID NO: 7268 - DNA, 24 bp, synthetic construct
  misc_feature 1..24: note = Synthetic
  source 1..24: mol_type = other DNA
agttcgtggcaaacaaacacgcag

SEQ ID NO: 7269 - DNA, 24 bp, synthetic construct
  misc_feature 1..24: note = Synthetic
  source 1..24: mol_type = other DNA
atcggttatacctttagcaagtgt

SEQ ID NO: 7270 - DNA, 24 bp, synthetic construct
  misc_feature 1..24: note = Synthetic
  source 1..24: mol_type = other DNA
tcgtatagtctttggccgtcatca

SEQ ID NO: 7271 - DNA, 24 bp, synthetic construct
  misc_feature 1..24: note = Synthetic
  source 1..24: mol_type = other DNA
ggcgtgctaaccgaggtgtacgca

SEQ ID NO: 7272 - DNA, 24 bp, synthetic construct
  misc_feature 1..24: note = Synthetic
  source 1..24: mol_type = other DNA
taaattatgggtcgattcgacaag

SEQ ID NO: 7273 - DNA, 24 bp, synthetic construct
  misc_feature 1..24: note = Synthetic
  source 1..24: mol_type = other DNA
atgagtagaccatagctcatcaaa

SEQ ID NO: 7274 - DNA, 24 bp, synthetic construct
  misc_feature 1..24: note = Synthetic
  source 1..24: mol_type = other DNA
aagaactgagggcgatatacgagc

SEQ ID NO: 7275 - DNA, 24 bp, synthetic construct
  misc_feature 1..24: note = Synthetic
  source 1..24: mol_type = other DNA
gccaatggccctacagccattcac

SEQ ID NO: 7276 - DNA, 24 bp, synthetic construct
  misc_feature 1..24: note = Synthetic
  source 1..24: mol_type = other DNA
gcggaccgcattgcctcaacacga

SEQ ID NO: 7277 - DNA, 24 bp, synthetic construct
  misc_feature 1..24: note = Synthetic
  source 1..24: mol_type = other DNA
gtcataattatgcttgttgcttct

SEQ ID NO: 7278 - DNA, 24 bp, synthetic construct
  misc_feature 1..24: note = Synthetic
  source 1..24: mol_type = other DNA
ccagtggcaggtggtaaattcctt

SEQ ID NO: 7279 - DNA, 24 bp, synthetic construct
  misc_feature 1..24: note = Synthetic
  source 1..24: mol_type = other DNA
cgtgtcgagcagcttcgaggcaac

SEQ ID NO: 7280 - DNA, 24 bp, synthetic construct
  misc_feature 1..24: note = Synthetic
  source 1..24: mol_type = other DNA
ctaactcctgttatggcgctaggc

SEQ ID NO: 7281 - DNA, 24 bp, synthetic construct
  misc_feature 1..24: note = Synthetic
  source 1..24: mol_type = other DNA
agagagttggccctcgagtaagag

SEQ ID NO: 7282 - DNA, 24 bp, synthetic construct
  misc_feature 1..24: note = Synthetic
  source 1..24: mol_type = other DNA
ctacctgtaagtgaggccacgtgc

SEQ ID NO: 7283 - DNA, 24 bp, synthetic construct
  misc_feature 1..24: note = Synthetic
  source 1..24: mol_type = other DNA
cggcgatcgaagtgagggctgcta

SEQ ID NO: 7284 - DNA, 24 bp, synthetic construct
  misc_feature 1..24: note = Synthetic
  source 1..24: mol_type = other DNA
gtagggtttcaaagttactacttt

SEQ ID NO: 7285 - DNA, 24 bp, synthetic construct
  misc_feature 1..24: note = Synthetic
  source 1..24: mol_type = other DNA
tgttcattcgcactaacctacatt

SEQ ID NO: 7286 - DNA, 24 bp, synthetic construct
  misc_feature 1..24: note = Synthetic
  source 1..24: mol_type = other DNA
gccggtatctcttccactgcttcc

SEQ ID NO: 7287 - DNA, 24 bp, synthetic construct
  misc_feature 1..24: note = Synthetic
  source 1..24: mol_type = other DNA
agcgaactggttcgccatgcacta

SEQ ID NO: 7288 - DNA, 24 bp, synthetic construct
  misc_feature 1..24: note = Synthetic
  source 1..24: mol_type = other DNA
atcccagaaacagcccactgcgta

SEQ ID NO: 7289 - DNA, 24 bp, synthetic construct
  misc_feature 1..24: note = Synthetic
  source 1..24: mol_type = other DNA
gaacaaattacggtggagctgcaa

SEQ ID NO: 7290 - DNA, 24 bp, synthetic construct
  misc_feature 1..24: note = Synthetic
  source 1..24: mol_type = other DNA
agtggccgatatccgaggtggaca

SEQ ID NO: 7291 - DNA, 24 bp, synthetic construct
  misc_feature 1..24: note = Synthetic
  source 1..24: mol_type = other DNA
atatatggatagccattccaagat

SEQ ID NO: 7292 - DNA, 24 bp, synthetic construct
  misc_feature 1..24: note = Synthetic
  source 1..24: mol_type = other DNA
gtgttataataccagtaattggaa

SEQ ID NO: 7293 - DNA, 24 bp, synthetic construct
  misc_feature 1..24: note = Synthetic
  source 1..24: mol_type = other DNA
agcaggagtgaggctagtacatga

SEQ ID NO: 7294 - DNA, 24 bp, synthetic construct
  misc_feature 1..24: note = Synthetic
  source 1..24: mol_type = other DNA
agtatcacagtttgcgtagtgaag

SEQ ID NO: 7295 - DNA, 24 bp, synthetic construct
  misc_feature 1..24: note = Synthetic
  source 1..24: mol_type = other DNA
ctcgggatgttggtggccgtgatt

SEQ ID NO: 7296 - DNA, 24 bp, synthetic construct
  misc_feature 1..24: note = Synthetic
  source 1..24: mol_type = other DNA
gtggcctgtgcttgggaacggtct

SEQ ID NO: 7297 - DNA, 24 bp, synthetic construct
  misc_feature 1..24: note = Synthetic
  source 1..24: mol_type = other DNA
cggctgcacttcacgttctcctaa

SEQ ID NO: 7298 - DNA, 24 bp, synthetic construct
  misc_feature 1..24: note = Synthetic
  source 1..24: mol_type = other DNA
gatctatcttccgtggttcttcag

SEQ ID NO: 7299 - DNA, 24 bp, synthetic construct
  misc_feature 1..24: note = Synthetic
  source 1..24: mol_type = other DNA
gagacccaagccggaatgtgtaca

SEQ ID NO: 7300 - DNA, 24 bp, synthetic construct
  misc_feature 1..24: note = Synthetic
  source 1..24: mol_type = other DNA
gaccaacatatgtacggagccttc

SEQ ID NO: 7301 - DNA, 24 bp, synthetic construct
  misc_feature 1..24: note = Synthetic
  source 1..24: mol_type = other DNA
agttgcaactgaagtggtatccgg

SEQ ID NO: 7302 - DNA, 24 bp, synthetic construct
  misc_feature 1..24: note = Synthetic
  source 1..24: mol_type = other DNA
ccctacttgcctgcttgtaagccg

SEQ ID NO: 7303 - DNA, 24 bp, synthetic construct
  misc_feature 1..24: note = Synthetic
  source 1..24: mol_type = other DNA
tttaaccacgacgagttatccgaa

SEQ ID NO: 7304 - DNA, 24 bp, synthetic construct
  misc_feature 1..24: note = Synthetic
  source 1..24: mol_type = other DNA
agtgtgccggaataattgactacg

SEQ ID NO: 7305 - DNA, 24 bp, synthetic construct
  misc_feature 1..24: note = Synthetic
  source 1..24: mol_type = other DNA
gggacttactcggtgactgtgccg

SEQ ID NO: 7306 - DNA, 24 bp, synthetic construct
  misc_feature 1..24: note = Synthetic
  source 1..24: mol_type = other DNA
cacggttggttccacaaatctggg

SEQ ID NO: 7307 - DNA, 24 bp, synthetic construct
  misc_feature 1..24: note = Synthetic
  source 1..24: mol_type = other DNA
ccattcaacccagcgtcagtccaa

SEQ ID NO: 7308 - DNA, 24 bp, synthetic construct
  misc_feature 1..24: note = Synthetic
  source 1..24: mol_type = other DNA
agcacatcggatttaccggaatcc

SEQ ID NO: 7309 - DNA, 24 bp, synthetic construct
  misc_feature 1..24: note = Synthetic
  source 1..24: mol_type = other DNA
catagcgagtatcaaccctacaga

SEQ ID NO: 7310 - DNA, 24 bp, synthetic construct
  misc_feature 1..24: note = Synthetic
  source 1..24: mol_type = other DNA
tgaagctcacggtataaaggtcgc

SEQ ID NO: 7311 - DNA, 24 bp, synthetic construct
  misc_feature 1..24: note = Synthetic
  source 1..24: mol_type = other DNA
aagtccgcttaatgcattactcat

SEQ ID NO: 7312 - DNA, 24 bp, synthetic construct
  misc_feature 1..24: note = Synthetic
  source 1..24: mol_type = other DNA
taccggctttgggtactataatcg

SEQ ID NO: 7313 - DNA, 24 bp, synthetic construct
  misc_feature 1..24: note = Synthetic
  source 1..24: mol_type = other DNA
cttgcctgtatgcgggccctggcc

SEQ ID NO: 7314 - DNA, 24 bp, synthetic construct
  misc_feature 1..24: note = Synthetic
  source 1..24: mol_type = other DNA
aacaaatcgaggataacaacttat

SEQ ID NO: 7315 - DNA, 24 bp, synthetic construct
  misc_feature 1..24: note = Synthetic
  source 1..24: mol_type = other DNA
gcacgggccgtttaaaggatacca

SEQ ID NO: 7316 - DNA, 24 bp, synthetic construct
  misc_feature 1..24: note = Synthetic
  source 1..24: mol_type = other DNA
gttggatagagatacatgaacgtg

SEQ ID NO: 7317 - DNA, 24 bp, synthetic construct
  misc_feature 1..24: note = Synthetic
  source 1..24: mol_type = other DNA
agcgaccgctcgtcaatgatcagg

SEQ ID NO: 7318 - DNA, 24 bp, synthetic construct
  misc_feature 1..24: note = Synthetic
  source 1..24: mol_type = other DNA
aagtaacagttctggaactttaat

SEQ ID NO: 7319 - DNA, 24 bp, synthetic construct
  misc_feature 1..24: note = Synthetic
  source 1..24: mol_type = other DNA
aaggagcgcggatatgatcgcaca

SEQ ID NO: 7320 - DNA, 24 bp, synthetic construct
  misc_feature 1..24: note = Synthetic
  source 1..24: mol_type = other DNA
tttcacaaatcgctcccgagtcct

SEQ ID NO: 7321 - DNA, 24 bp, synthetic construct
  misc_feature 1..24: note = Synthetic
  source 1..24: mol_type = other DNA
tctctggatgtttcagcgtagtgc

SEQ ID NO: 7322 - DNA, 24 bp, synthetic construct
  misc_feature 1..24: note = Synthetic
  source 1..24: mol_type = other DNA
ttacgcgggcccagcaattccaga

SEQ ID NO: 7323 - DNA, 24 bp, synthetic construct
  misc_feature 1..24: note = Synthetic
  source 1..24: mol_type = other DNA
acataccctgttctacttcgtgtt

SEQ ID NO: 7324 - DNA, 24 bp, synthetic construct
  misc_feature 1..24: note = Synthetic
  source 1..24: mol_type = other DNA
ttccgccgagatatctactgtaca

SEQ ID NO: 7325 - DNA, 24 bp, synthetic construct
  misc_feature 1..24: note = Synthetic
  source 1..24: mol_type = other DNA
ccgcaccgggtgaatactggaaca

SEQ ID NO: 7326 - DNA, 24 bp, synthetic construct
  misc_feature 1..24: note = Synthetic
  source 1..24: mol_type = other DNA
ttgcggtagatgagaaggagtggc

SEQ ID NO: 7327 - DNA, 24 bp, synthetic construct
  misc_feature 1..24: note = Synthetic
  source 1..24: mol_type = other DNA
gtttgccgttccgcgacgttccta

SEQ ID NO: 7328 - DNA, 24 bp, synthetic construct
  misc_feature 1..24: note = Synthetic
  source 1..24: mol_type = other DNA
tgtactccctttacaagaggtaga

SEQ ID NO: 7329 - DNA, 24 bp, synthetic construct
  misc_feature 1..24: note = Synthetic
  source 1..24: mol_type = other DNA
cgccgcacaagtgtcacagcggtg

SEQ ID NO: 7330 - DNA, 24 bp, synthetic construct
  misc_feature 1..24: note = Synthetic
  source 1..24: mol_type = other DNA
gtattcgttacacagcgcagcgcc

SEQ ID NO: 7331 - DNA, 24 bp, synthetic construct
  misc_feature 1..24: note = Synthetic
  source 1..24: mol_type = other DNA
ggtgaaaggtttgaggaacccggc

SEQ ID NO: 7332 - DNA, 24 bp, synthetic construct
  misc_feature 1..24: note = Synthetic
  source 1..24: mol_type = other DNA
gctttcaactaacgatgcgtcaaa

SEQ ID NO: 7333 - DNA, 24 bp, synthetic construct
  misc_feature 1..24: note = Synthetic
  source 1..24: mol_type = other DNA
attcaggacacgttccagcacgat

SEQ ID NO: 7334 - DNA, 24 bp, synthetic construct
  misc_feature 1..24: note = Synthetic
  source 1..24: mol_type = other DNA
acatatggtgttagaagatctgtg

SEQ ID NO: 7335 - DNA, 24 bp, synthetic construct
  misc_feature 1..24: note = Synthetic
  source 1..24: mol_type = other DNA
aaagctcgttgattccgagaaatg

SEQ ID NO: 7336 - DNA, 24 bp, synthetic construct
  misc_feature 1..24: note = Synthetic
  source 1..24: mol_type = other DNA
taagtgcacatccacttatgttta

SEQ ID NO: 7337 - DNA, 24 bp, synthetic construct
  misc_feature 1..24: note = Synthetic
  source 1..24: mol_type = other DNA
cgtccgtcgtttcacctgtactac

SEQ ID NO: 7338 - DNA, 24 bp, synthetic construct
  misc_feature 1..24: note = Synthetic
  source 1..24: mol_type = other DNA
gtcccgaatcgcgatgactaggag

SEQ ID NO: 7339 - DNA, 24 bp, synthetic construct
  misc_feature 1..24: note = Synthetic
  source 1..24: mol_type = other DNA
tgaccactatcgtcaagatccatc

SEQ ID NO: 7340 - DNA, 24 bp, synthetic construct
  misc_feature 1..24: note = Synthetic
  source 1..24: mol_type = other DNA
cttggagctcaggccaggtgtcgc

SEQ ID NO: 7341 - DNA, 24 bp, synthetic construct
  misc_feature 1..24: note = Synthetic
  source 1..24: mol_type = other DNA
tacagtaatgactatcaagactaa

SEQ ID NO: 7342 - DNA, 24 bp, synthetic construct
  misc_feature 1..24: note = Synthetic
  source 1..24: mol_type = other DNA
tagcaagcgaaccgtagaataatt

SEQ ID NO: 7343 - DNA, 24 bp, synthetic construct
  misc_feature 1..24: note = Synthetic
  source 1..24: mol_type = other DNA
ggaaccagacactgaacaaacagg

SEQ ID NO: 7344 - DNA, 24 bp, synthetic construct
  misc_feature 1..24: note = Synthetic
  source 1..24: mol_type = other DNA
aatggcccataatgcaaagagaat

SEQ ID NO: 7345 - DNA, 24 bp, synthetic construct
  misc_feature 1..24: note = Synthetic
  source 1..24: mol_type = other DNA
cactaactattgtagggatacggt

SEQ ID NO: 7346 - DNA, 24 bp, synthetic construct
  misc_feature 1..24: note = Synthetic
  source 1..24: mol_type = other DNA
agaggtgaatactttgatcattcc

SEQ ID NO: 7347 - DNA, 24 bp, synthetic construct
  misc_feature 1..24: note = Synthetic
  source 1..24: mol_type = other DNA
tttaacatttcctggatcattaag

SEQ ID NO: 7348 - DNA, 24 bp, synthetic construct
  misc_feature 1..24: note = Synthetic
  source 1..24: mol_type = other DNA
atactcgcgcggccgtcatcacac

SEQ ID NO: 7349 - DNA, 24 bp, synthetic construct
  misc_feature 1..24: note = Synthetic
  source 1..24: mol_type = other DNA
gtcagggttgatagtggctaactc

SEQ ID NO: 7350 - DNA, 24 bp, synthetic construct
  misc_feature 1..24: note = Synthetic
  source 1..24: mol_type = other DNA
aatgcctccgtagcgatgtacatg

SEQ ID NO: 7351 - DNA, 24 bp, synthetic construct
  misc_feature 1..24: note = Synthetic
  source 1..24: mol_type = other DNA
cgcagcgtcgcgcccggagggagt

SEQ ID NO: 7352 - DNA, 24 bp, synthetic construct
  misc_feature 1..24: note = Synthetic
  source 1..24: mol_type = other DNA
tcttctaatgtataaacgattagg

SEQ ID NO: 7353 - DNA, 24 bp, synthetic construct
  misc_feature 1..24: note = Synthetic
  source 1..24: mol_type = other DNA
atcgcgtaaagtcgtccatctagt

SEQ ID NO: 7354 - DNA, 24 bp, synthetic construct
  misc_feature 1..24: note = Synthetic
  source 1..24: mol_type = other DNA
ttcacttggccagcttaggagagg

SEQ ID NO: 7355 - DNA, 24 bp, synthetic construct
  misc_feature 1..24: note = Synthetic
  source 1..24: mol_type = other DNA
catgtagataaagacctccttcat

SEQ ID NO: 7356 - DNA, 24 bp, synthetic construct
  misc_feature 1..24: note = Synthetic
  source 1..24: mol_type = other DNA
cttatgcgcaaggtaggctaatct

SEQ ID NO: 7357 - DNA, 24 bp, synthetic construct
  misc_feature 1..24: note = Synthetic
  source 1..24: mol_type = other DNA
gcgagcgtcacacatgtcctggcc

SEQ ID NO: 7358 - DNA, 24 bp, synthetic construct
  misc_feature 1..24: note = Synthetic
  source 1..24: mol_type = other DNA
gaacccatccagtaacaaacatta

SEQ ID NO: 7359 - DNA, 24 bp, synthetic construct
  misc_feature 1..24: note = Synthetic
  source 1..24: mol_type = other DNA
tcaatgtaagggacctggaggtga

SEQ ID NO: 7360 - DNA, 24 bp, synthetic construct
  misc_feature 1..24: note = Synthetic
  source 1..24: mol_type = other DNA
gggttatggagatccagccgctag

SEQ ID NO: 7361 - DNA, 24 bp, synthetic construct
  misc_feature 1..24: note = Synthetic
  source 1..24: mol_type = other DNA
atctttccacaccctgtaacagga

SEQ ID NO: 7362 - DNA, 24 bp, synthetic construct
  misc_feature 1..24: note = Synthetic
  source 1..24: mol_type = other DNA
ttacaggcatgctctagccctaag

SEQ ID NO: 7363 - DNA, 24 bp, synthetic construct
  misc_feature 1..24: note = Synthetic
  source 1..24: mol_type = other DNA
gccgactaccaaattctagggtta

SEQ ID NO: 7364 - DNA, 24 bp, synthetic construct
  misc_feature 1..24: note = Synthetic
  source 1..24: mol_type = other DNA
acttaccgcttagggacgtatgta

SEQ ID NO: 7365 - DNA, 24 bp, synthetic construct
  misc_feature 1..24: note = Synthetic
  source 1..24: mol_type = other DNA
catcatgagtaaatcgcgtgagtc

SEQ ID NO: 7366 - DNA, 24 bp, synthetic construct
  misc_feature 1..24: note = Synthetic
  source 1..24: mol_type = other DNA
cgcgaggacgggagtcttcagata

SEQ ID NO: 7367 - DNA, 24 bp, synthetic construct
  misc_feature 1..24: note = Synthetic
  source 1..24: mol_type = other DNA
agactgggtgcatacaaagtaagt

SEQ ID NO: 7368 - DNA, 24 bp, synthetic construct
  misc_feature 1..24: note = Synthetic
  source 1..24: mol_type = other DNA
tggctctacgactcggcagacatt

SEQ ID NO: 7369 - DNA, 24 bp, synthetic construct
  misc_feature 1..24: note = Synthetic
  source 1..24: mol_type = other DNA
accaagaggccgataattaattta

SEQ ID NO: 7370 - DNA, 24 bp, synthetic construct
  misc_feature 1..24: note = Synthetic
  source 1..24: mol_type = other DNA
gttcatgtgatcggtgtgatctaa

SEQ ID NO: 7371 - DNA, 24 bp, synthetic construct
  misc_feature 1..24: note = Synthetic
  source 1..24: mol_type = other DNA
ggcagggatacattacacatgtgc

SEQ ID NO: 7372 - DNA, 24 bp, synthetic construct
  misc_feature 1..24: note = Synthetic
  source 1..24: mol_type = other DNA
tccggaggatgcgcaaagtgacac

SEQ ID NO: 7373 - DNA, 24 bp, synthetic construct
  misc_feature 1..24: note = Synthetic
  source 1..24: mol_type = other DNA
cacaaccctaacccgaatgcgaat

SEQ ID NO: 7374 - DNA, 24 bp, synthetic construct
  misc_feature 1..24: note = Synthetic
  source 1..24: mol_type = other DNA
gggcccggatccgcatgcgctatt

SEQ ID NO: 7375 - DNA, 24 bp, synthetic construct
  misc_feature 1..24: note = Synthetic
  source 1..24: mol_type = other DNA
ttcgtggtgtagtagcttaataga

SEQ ID NO: 7376 - DNA, 24 bp, synthetic construct
  misc_feature 1..24: note = Synthetic
  source 1..24: mol_type = other DNA
ggcgtcgacgaatttagttgagaa

SEQ ID NO: 7377 - DNA, 24 bp, synthetic construct
  misc_feature 1..24: note = Synthetic
  source 1..24: mol_type = other DNA
accgtagtcagccaaccattgcaa

SEQ ID NO: 7378 - DNA, 24 bp, synthetic construct
  misc_feature 1..24: note = Synthetic
  source 1..24: mol_type = other DNA
gacagaatggcgagactcatctac

SEQ ID NO: 7379 - DNA, 24 bp, synthetic construct
  misc_feature 1..24: note = Synthetic
  source 1..24: mol_type = other DNA
tgactcgtagggatgttcgtaggt

SEQ ID NO: 7380 - DNA, 24 bp, synthetic construct
  misc_feature 1..24: note = Synthetic
  source 1..24: mol_type = other DNA
cgttaagccttgtatcccgcttgc

SEQ ID NO: 7381 - DNA, 24 bp, synthetic construct
  misc_feature 1..24: note = Synthetic
  source 1..24: mol_type = other DNA
gcgcgctaagaggcctagtaactg

SEQ ID NO: 7382 - DNA, 24 bp, synthetic construct
  misc_feature 1..24: note = Synthetic
  source 1..24: mol_type = other DNA
ggttagtacgtagaagaaccaatg

SEQ ID NO: 7383 - DNA, 24 bp, synthetic construct
  misc_feature 1..24: note = Synthetic
  source 1..24: mol_type = other DNA
acgaaccttgtccgcactccgcgc

SEQ ID NO: 7384 - DNA, 24 bp, synthetic construct
  misc_feature 1..24: note = Synthetic
  source 1..24: mol_type = other DNA
attggtctcttacatgtggtctgt

SEQ ID NO: 7385 - DNA, 24 bp, synthetic construct
  misc_feature 1..24: note = Synthetic
  source 1..24: mol_type = other DNA
ttcgcttagcagatgcagtgctac

SEQ ID NO: 7386 - DNA, 24 bp, synthetic construct
  misc_feature 1..24: note = Synthetic
  source 1..24: mol_type = other DNA
gtttaatgtaatgtcttacacgcg

SEQ ID NO: 7387 - DNA, 24 bp, synthetic construct
  misc_feature 1..24: note = Synthetic
  source 1..24: mol_type = other DNA
aggcgcgtatacaatatgaccgaa

SEQ ID NO: 7388 - DNA, 24 bp, synthetic construct
  misc_feature 1..24: note = Synthetic
  source 1..24: mol_type = other DNA
gttgcagtatctgagagactgctt

SEQ ID NO: 7389 - DNA, 24 bp, synthetic construct
  misc_feature 1..24: note = Synthetic
  source 1..24: mol_type = other DNA
tgtcagcaatcacagcaggccatg

SEQ ID NO: 7390 - DNA, 24 bp, synthetic construct
  misc_feature 1..24: note = Synthetic
  source 1..24: mol_type = other DNA
ccgtggaggcggctgtgtgcgaag

SEQ ID NO: 7391 - DNA, 24 bp, synthetic construct
  misc_feature 1..24: note = Synthetic
  source 1..24: mol_type = other DNA
tcatgcaataaccgacgctagtag

SEQ ID NO: 7392 - DNA, 24 bp, synthetic construct
  misc_feature 1..24: note = Synthetic
  source 1..24: mol_type = other DNA
cctctccgactcacaatgtacttt

SEQ ID NO: 7393 - DNA, 24 bp, synthetic construct
  misc_feature 1..24: note = Synthetic
  source 1..24: mol_type = other DNA
gtccaaggctcaccgcacacccag

SEQ ID NO: 7394 - DNA, 24 bp, synthetic construct
  misc_feature 1..24: note = Synthetic
  source 1..24: mol_type = other DNA
atctgcttagacttctacggtaaa

SEQ ID NO: 7395 - DNA, 24 bp, synthetic construct
  misc_feature 1..24: note = Synthetic
  source 1..24: mol_type = other DNA
actaacaatctccatctcttaaca

SEQ ID NO: 7396 - DNA, 24 bp, synthetic construct
  misc_feature 1..24: note = Synthetic
  source 1..24: mol_type = other DNA
gagctacgtcatcatcggactaaa

SEQ ID NO: 7397 - DNA, 24 bp, synthetic construct
  misc_feature 1..24: note = Synthetic
  source 1..24: mol_type = other DNA
ctttgttgagcggagacattcctc

SEQ ID NO: 7398 - DNA, 24 bp, synthetic construct
  misc_feature 1..24: note = Synthetic
  source 1..24: mol_type = other DNA
actccgcatgccactccatatgta

SEQ ID NO: 7399 - DNA, 24 bp, synthetic construct
  misc_feature 1..24: note = Synthetic
  source 1..24: mol_type = other DNA
acgtgcaggaatgcgctggagcag

SEQ ID NO: 7400 - DNA, 24 bp, synthetic construct
  misc_feature 1..24: note = Synthetic
  source 1..24: mol_type = other DNA
gtagtatccagactttcttcgtga

SEQ ID NO: 7401 - DNA, 24 bp, synthetic construct
  misc_feature 1..24: note = Synthetic
  source 1..24: mol_type = other DNA
ctggaggttcatgcttgagtaagt

SEQ ID NO: 7402 - DNA, 24 bp, synthetic construct
  misc_feature 1..24: note = Synthetic
  source 1..24: mol_type = other DNA
aataccttacttgttagaaacggg

SEQ ID NO: 7403 - DNA, 24 bp, synthetic construct
  misc_feature 1..24: note = Synthetic
  source 1..24: mol_type = other DNA
ttggtcctatcttatgacgttacg

SEQ ID NO: 7404 - DNA, 24 bp, synthetic construct
  misc_feature 1..24: note = Synthetic
  source 1..24: mol_type = other DNA
aggctccgattgtgaggcataata

SEQ ID NO: 7405 - DNA, 24 bp, synthetic construct
  misc_feature 1..24: note = Synthetic
  source 1..24: mol_type = other DNA
ccttggcagcacagtcctaacttg

SEQ ID NO: 7406 - DNA, 24 bp, synthetic construct
  misc_feature 1..24: note = Synthetic
  source 1..24: mol_type = other DNA
agcttgttggctgcttaatgcagt

SEQ ID NO: 7407 - DNA, 24 bp, synthetic construct
  misc_feature 1..24: note = Synthetic
  source 1..24: mol_type = other DNA
aatcaaattactgtcgagcatgct

SEQ ID NO: 7408 - DNA, 24 bp, synthetic construct
  misc_feature 1..24: note = Synthetic
  source 1..24: mol_type = other DNA
gatcctggcggaaattccctcttt

SEQ ID NO: 7409 - DNA, 24 bp, synthetic construct
  misc_feature 1..24: note = Synthetic
  source 1..24: mol_type = other DNA
ccggcgcttaacggctaatactgg

SEQ ID NO: 7410 - DNA, 24 bp, synthetic construct
  misc_feature 1..24: note = Synthetic
  source 1..24: mol_type = other DNA
accctccgtcaccaagggattgaa

SEQ ID NO: 7411 - DNA, 24 bp, synthetic construct
  misc_feature 1..24: note = Synthetic
  source 1..24: mol_type = other DNA
tcatgcctggcatttcagtgacta

SEQ ID NO: 7412 - DNA, 24 bp, synthetic construct
  misc_feature 1..24: note = Synthetic
  source 1..24: mol_type = other DNA
ggacaggtgtggtgctgccgctca

SEQ ID NO: 7413 - DNA, 24 bp, synthetic construct
  misc_feature 1..24: note = Synthetic
  source 1..24: mol_type = other DNA
tactcacgccaggtcagggagctc

SEQ ID NO: 7414 - DNA, 24 bp, synthetic construct
  misc_feature 1..24: note = Synthetic
  source 1..24: mol_type = other DNA
cccgggtccagtgagagcttgcag

SEQ ID NO: 7415 - DNA, 24 bp, synthetic construct
  misc_feature 1..24: note = Synthetic
  source 1..24: mol_type = other DNA
gctagctcggttcaggcctcgaag

SEQ ID NO: 7416 - DNA, 24 bp, synthetic construct
  misc_feature 1..24: note = Synthetic
  source 1..24: mol_type = other DNA
ccgaggccatttcaattaaaggac

SEQ ID NO: 7417 - DNA, 24 bp, synthetic construct
  misc_feature 1..24: note = Synthetic
  source 1..24: mol_type = other DNA
ccgggatcttataagagctgagct

SEQ ID NO: 7418 - DNA, 24 bp, synthetic construct
  misc_feature 1..24: note = Synthetic
  source 1..24: mol_type = other DNA
cttgagctgtaatttagtagcaat

SEQ ID NO: 7419 - DNA, 24 bp, synthetic construct
  misc_feature 1..24: note = Synthetic
  source 1..24: mol_type = other DNA
tgtgtgacccggcctcttcaaata

SEQ ID NO: 7420 - DNA, 24 bp, synthetic construct
  misc_feature 1..24: note = Synthetic
  source 1..24: mol_type = other DNA
ggcgatgatagtgcaggcggtcgt

SEQ ID NO: 7421 - DNA, 24 bp, synthetic construct
  misc_feature 1..24: note = Synthetic
  source 1..24: mol_type = other DNA
aatctcggttaagggtatatagga

SEQ ID NO: 7422 - DNA, 24 bp, synthetic construct
  misc_feature 1..24: note = Synthetic
  source 1..24: mol_type = other DNA
acgtgcagtggctgcgtggtgagt

SEQ ID NO: 7423 - DNA, 24 bp, synthetic construct
  misc_feature 1..24: note = Synthetic
  source 1..24: mol_type = other DNA
tgcgttcgctaatccgatagcgcc

SEQ ID NO: 7424 - DNA, 24 bp, synthetic construct
  misc_feature 1..24: note = Synthetic
  source 1..24: mol_type = other DNA
caccatattgctaccgcctcgggt

SEQ ID NO: 7425 - DNA, 24 bp, synthetic construct
  misc_feature 1..24: note = Synthetic
  source 1..24: mol_type = other DNA
aagacgcacctcggatatgtccgc

SEQ ID NO: 7426 - DNA, 24 bp, synthetic construct
  misc_feature 1..24: note = Synthetic
  source 1..24: mol_type = other DNA
ctggttcaccgtcctttagtacct

SEQ ID NO: 7427 - DNA, 24 bp, synthetic construct
  misc_feature 1..24: note = Synthetic
  source 1..24: mol_type = other DNA
tactgcttatcacggataatttga

SEQ ID NO: 7428 - DNA, 24 bp, synthetic construct
  misc_feature 1..24: note = Synthetic
  source 1..24: mol_type = other DNA
ttaacggactgcggcttgcttact

SEQ ID NO: 7429 - DNA, 24 bp, synthetic construct
  misc_feature 1..24: note = Synthetic
  source 1..24: mol_type = other DNA
ttcccgtacatttgacgcgacttt

SEQ ID NO: 7430 - DNA, 24 bp, synthetic construct
  misc_feature 1..24: note = Synthetic
  source 1..24: mol_type = other DNA
gtgaaacttgagtagttgaataga

SEQ ID NO: 7431 - DNA, 24 bp, synthetic construct
  misc_feature 1..24: note = Synthetic
  source 1..24: mol_type = other DNA
ttatcctccattattcgcgagtcc

SEQ ID NO: 7432 - DNA, 24 bp, synthetic construct
  misc_feature 1..24: note = Synthetic
  source 1..24: mol_type = other DNA
cggcagtgtgccggcgatccctaa

SEQ ID NO: 7433 - DNA, 24 bp, synthetic construct
  misc_feature 1..24: note = Synthetic
  source 1..24: mol_type = other DNA
agggctcatagggttatgtactaa

SEQ ID NO: 7434 - DNA, 24 bp, synthetic construct
  misc_feature 1..24: note = Synthetic
  source 1..24: mol_type = other DNA
tggcccaatgaatagccggaaatc

SEQ ID NO: 7435 - DNA, 24 bp, synthetic construct
  misc_feature 1..24: note = Synthetic
  source 1..24: mol_type = other DNA
tgagcaaccggcaacctattgcat

SEQ ID NO: 7436 - DNA, 24 bp, synthetic construct
  misc_feature 1..24: note = Synthetic
  source 1..24: mol_type = other DNA
tggaagatatgatacttgaataaa

SEQ ID NO: 7437 - DNA, 24 bp, synthetic construct
  misc_feature 1..24: note = Synthetic
  source 1..24: mol_type = other DNA
cctgcgagcaaatgataggcgcta

SEQ ID NO: 7438 - DNA, 24 bp, synthetic construct
  misc_feature 1..24: note = Synthetic
  source 1..24: mol_type = other DNA
ggtataggccttcaaacgctagcc

SEQ ID NO: 7439 - DNA, 24 bp, synthetic construct
  misc_feature 1..24: note = Synthetic
  source 1..24: mol_type = other DNA
ggtattcactcacgcgtcgtttga

SEQ ID NO: 7440 - DNA, 24 bp, synthetic construct
  misc_feature 1..24: note = Synthetic
  source 1..24: mol_type = other DNA
acactatcttgccggattctccgg

SEQ ID NO: 7441 - DNA, 24 bp, synthetic construct
  misc_feature 1..24: note = Synthetic
  source 1..24: mol_type = other DNA
atcactagttccttgcgatgcatg

SEQ ID NO: 7442 - DNA, 24 bp, synthetic construct
  misc_feature 1..24: note = Synthetic
  source 1..24: mol_type = other DNA
gtttagaagcctagcgatttgagt

SEQ ID NO: 7443 - DNA, 24 bp, synthetic construct
  misc_feature 1..24: note = Synthetic
  source 1..24: mol_type = other DNA
cctgtcaagggccgcccgcctaat

SEQ ID NO: 7444 - DNA, 24 bp, synthetic construct
  misc_feature 1..24: note = Synthetic
  source 1..24: mol_type = other DNA
tttgaagaacgtctgaacagcggt

SEQ ID NO: 7445 - DNA, 24 bp, synthetic construct
  misc_feature 1..24: note = Synthetic
  source 1..24: mol_type = other DNA
tcttcacatgcccggagagactca

SEQ ID NO: 7446 - DNA, 24 bp, synthetic construct
  misc_feature 1..24: note = Synthetic
  source 1..24: mol_type = other DNA
ccacaagcaggcttagcgcgggca

SEQ ID NO: 7447 - DNA, 24 bp, synthetic construct
  misc_feature 1..24: note = Synthetic
  source 1..24: mol_type = other DNA
gctctggccagtctgccacatgtg

SEQ ID NO: 7448 - DNA, 24 bp, synthetic construct
  misc_feature 1..24: note = Synthetic
  source 1..24: mol_type = other DNA
cgcctgctcgggcgtgtagtcgca

SEQ ID NO: 7449 - DNA, 24 bp, synthetic construct
  misc_feature 1..24: note = Synthetic
  source 1..24: mol_type = other DNA
ccgcggtactgttgattgtctcga

SEQ ID NO: 7450 - DNA, 24 bp, synthetic construct
  misc_feature 1..24: note = Synthetic
  source 1..24: mol_type = other DNA
aacgagacacggtaaagtcgtctg

SEQ ID NO: 7451 - DNA, 24 bp, synthetic construct
  misc_feature 1..24: note = Synthetic
  source 1..24: mol_type = other DNA
ttctctatgagcgcagtggaccga

SEQ ID NO: 7452 - DNA, 24 bp, synthetic construct
  misc_feature 1..24: note = Synthetic
  source 1..24: mol_type = other DNA
gccggtctattccgaaatacgccg

SEQ ID NO: 7453 - DNA, 24 bp, synthetic construct
  misc_feature 1..24: note = Synthetic
  source 1..24: mol_type = other DNA
catgaagagcatatcttgcggacg

SEQ ID NO: 7454 - DNA, 24 bp, synthetic construct
  misc_feature 1..24: note = Synthetic
  source 1..24: mol_type = other DNA
ccctgttacccgctcgaatcaacc

SEQ ID NO: 7455 - DNA, 24 bp, synthetic construct
  misc_feature 1..24: note = Synthetic
  source 1..24: mol_type = other DNA
atatagctccgaaccgtcttgcga

SEQ ID NO: 7456 - DNA, 24 bp, synthetic construct
  misc_feature 1..24: note = Synthetic
  source 1..24: mol_type = other DNA
tgcgcgtcccgaccagaaagctgc

SEQ ID NO: 7457 - DNA, 24 bp, synthetic construct
  misc_feature 1..24: note = Synthetic
  source 1..24: mol_type = other DNA
tacgactgacaccgcgttccgttt

SEQ ID NO: 7458 - DNA, 24 bp, synthetic construct
  misc_feature 1..24: note = Synthetic
  source 1..24: mol_type = other DNA
gggagtcagaccactctacggcag

SEQ ID NO: 7459 - DNA, 24 bp, synthetic construct
  misc_feature 1..24: note = Synthetic
  source 1..24: mol_type = other DNA
gttacagtcgtcgaagttcaaagc

SEQ ID NO: 7460 - DNA, 24 bp, synthetic construct
  misc_feature 1..24: note = Synthetic
  source 1..24: mol_type = other DNA
cgagcccattggtctcgctagagt

SEQ ID NO: 7461 - DNA, 24 bp, synthetic construct
  misc_feature 1..24: note = Synthetic
  source 1..24: mol_type = other DNA
gaatacatgtatagctcacccgta

SEQ ID NO: 7462 - DNA, 24 bp, synthetic construct
  misc_feature 1..24: note = Synthetic
  source 1..24: mol_type = other DNA
acgcatacacgtttaggccgctac

SEQ ID NO: 7463 - DNA, 24 bp, synthetic construct
  misc_feature 1..24: note = Synthetic
  source 1..24: mol_type = other DNA
atattgtttcgtctgcgtgaggat

SEQ ID NO: 7464 - DNA, 24 bp, synthetic construct
  misc_feature 1..24: note = Synthetic
  source 1..24: mol_type = other DNA
cgcgagcctacttcctgatagtgc

SEQ ID NO: 7465 - DNA, 24 bp, synthetic construct
  misc_feature 1..24: note = Synthetic
  source 1..24: mol_type = other DNA
tttctcggagaggcggccgagcca

SEQ ID NO: 7466 - DNA, 24 bp, synthetic construct
  misc_feature 1..24: note = Synthetic
  source 1..24: mol_type = other DNA
gactcacgcattgactcagaatct

SEQ ID NO: 7467 - DNA, 24 bp, synthetic construct
  misc_feature 1..24: note = Synthetic
  source 1..24: mol_type = other DNA
atctcggctccacgatgtctgacg

SEQ ID NO: 7468 - DNA, 24 bp, synthetic construct
  misc_feature 1..24: note = Synthetic
  source 1..24: mol_type = other DNA
cttaagtccattaaatatgggtgg

SEQ ID NO: 7469 - DNA, 24 bp, synthetic construct
  misc_feature 1..24: note = Synthetic
  source 1..24: mol_type = other DNA
gaatctgccaaactgataggaccc

SEQ ID NO: 7470 - DNA, 24 bp, synthetic construct
  misc_feature 1..24: note = Synthetic
  source 1..24: mol_type = other DNA
tattgtacctctggcacacacccg

SEQ ID NO: 7471 - DNA, 24 bp, synthetic construct
  misc_feature 1..24: note = Synthetic
  source 1..24: mol_type = other DNA
caccgcttgcgaaatcctctttaa

SEQ ID NO: 7472 - DNA, 24 bp, synthetic construct
  misc_feature 1..24: note = Synthetic
  source 1..24: mol_type = other DNA
cctgcgtgtcctgatgcgagggcc

SEQ ID NO: 7473 - DNA, 24 bp, synthetic construct
  misc_feature 1..24: note = Synthetic
  source 1..24: mol_type = other DNA
catggagacgatacatgatgaatg

SEQ ID NO: 7474 - DNA, 24 bp, synthetic construct
  misc_feature 1..24: note = Synthetic
  source 1..24: mol_type = other DNA
gtgacttaaggtttaactgtgttt

SEQ ID NO: 7475 - DNA, 24 bp, synthetic construct
  misc_feature 1..24: note = Synthetic
  source 1..24: mol_type = other DNA
tccataagtgattaggtggatcta

SEQ ID NO: 7476 - DNA, 24 bp, synthetic construct
  misc_feature 1..24: note = Synthetic
  source 1..24: mol_type = other DNA
cgtatagctctaggtcacttcgtt

SEQ ID NO: 7477 - DNA, 24 bp, synthetic construct
  misc_feature 1..24: note = Synthetic
  source 1..24: mol_type = other DNA
cgcgcacttgcaggtgtgcaactg

SEQ ID NO: 7478 - DNA, 24 bp, synthetic construct
  misc_feature 1..24: note = Synthetic
  source 1..24: mol_type = other DNA
cctttgaactcgtacgaccgaagt

SEQ ID NO: 7479 - DNA, 24 bp, synthetic construct
  misc_feature 1..24: note = Synthetic
  source 1..24: mol_type = other DNA
ccgtcgcagatgggtaaaccaatc

SEQ ID NO: 7480 - DNA, 24 bp, synthetic construct
  misc_feature 1..24: note = Synthetic
  source 1..24: mol_type = other DNA
gaaactgtacagtaggaatgagtc

SEQ ID NO: 7481 - DNA, 24 bp, synthetic construct
  misc_feature 1..24: note = Synthetic
  source 1..24: mol_type = other DNA
gccgtacgcaatcccttcctagtt

SEQ ID NO: 7482 - DNA, 24 bp, synthetic construct
  misc_feature 1..24: note = Synthetic
  source 1..24: mol_type = other DNA
gcgtctacaaatttagctttagtc

SEQ ID NO: 7483 - DNA, 24 bp, synthetic construct
  misc_feature 1..24: note = Synthetic
  source 1..24: mol_type = other DNA
gaatctcggcaacggcatgggtta

SEQ ID NO: 7484 - DNA, 24 bp, synthetic construct
  misc_feature 1..24: note = Synthetic
  source 1..24: mol_type = other DNA
tcgtcggctaggtaggctgaggtt

SEQ ID NO: 7485 - DNA, 24 bp, synthetic construct
  misc_feature 1..24: note = Synthetic
  source 1..24: mol_type = other DNA
gtgctctcggtgcggaggatgtaa

SEQ ID NO: 7486 - DNA, 24 bp, synthetic construct
  misc_feature 1..24: note = Synthetic
  source 1..24: mol_type = other DNA
tatactaaccacgcccgttacaag

SEQ ID NO: 7487 - DNA, 24 bp, synthetic construct
  misc_feature 1..24: note = Synthetic
  source 1..24: mol_type = other DNA
ccttatccgctagtacccaggcta

SEQ ID NO: 7488 - DNA, 24 bp, synthetic construct
  misc_feature 1..24: note = Synthetic
  source 1..24: mol_type = other DNA
cgtgtcatgtatctcacgtacagt

SEQ ID NO: 7489 - DNA, 24 bp, synthetic construct
  misc_feature 1..24: note = Synthetic
  source 1..24: mol_type = other DNA
agccaccgtatcatgaacgcttcc

SEQ ID NO: 7490 - DNA, 24 bp, synthetic construct
  misc_feature 1..24: note = Synthetic
  source 1..24: mol_type = other DNA
atcatcttctttcagcgtgttgcg

SEQ ID NO: 7491 - DNA, 24 bp, synthetic construct
  misc_feature 1..24: note = Synthetic
  source 1..24: mol_type = other DNA
gatgggattcgagacttgctcttg

SEQ ID NO: 7492 - DNA, 24 bp, synthetic construct
  misc_feature 1..24: note = Synthetic
  source 1..24: mol_type = other DNA
aaagattgagttctcgctactagc

SEQ ID NO: 7493 - DNA, 24 bp, synthetic construct
  misc_feature 1..24: note = Synthetic
  source 1..24: mol_type = other DNA
ctgggtgtatcaaataggagcgat

SEQ ID NO: 7494 - DNA, 24 bp, synthetic construct
  misc_feature 1..24: note = Synthetic
  source 1..24: mol_type = other DNA
ccgccctctaccgtctgcgtaggc

SEQ ID NO: 7495 - DNA, 24 bp, synthetic construct
  misc_feature 1..24: note = Synthetic
  source 1..24: mol_type = other DNA
agtggcaggagttcccgtgattgc

SEQ ID NO: 7496 - DNA, 24 bp, synthetic construct
  misc_feature 1..24: note = Synthetic
  source 1..24: mol_type = other DNA
ctttctagttatctcagtcgtccg

SEQ ID NO: 7497 - DNA, 24 bp, synthetic construct
  misc_feature 1..24: note = Synthetic
  source 1..24: mol_type = other DNA
gctctaatcgcatcgaaagcgtgc

SEQ ID NO: 7498 - DNA, 24 bp, synthetic construct
  misc_feature 1..24: note = Synthetic
  source 1..24: mol_type = other DNA
cgtgctctctacattgcatgtcca

SEQ ID NO: 7499 - DNA, 24 bp, synthetic construct
  misc_feature 1..24: note = Synthetic
  source 1..24: mol_type = other DNA
ctcagagggacctggccttctgcg

SEQ ID NO: 7500 - DNA, 24 bp, synthetic construct
  misc_feature 1..24: note = Synthetic
  source 1..24: mol_type = other DNA
tgaagtgcgtggcgtgcgacgcct

SEQ ID NO: 7501 - DNA, 24 bp, synthetic construct
  misc_feature 1..24: note = Synthetic
  source 1..24: mol_type = other DNA
gccggtccgctcacgactaactaa

SEQ ID NO: 7502 - DNA, 24 bp, synthetic construct
  misc_feature 1..24: note = Synthetic
  source 1..24: mol_type = other DNA
acatttcacagtgtactccggccg

SEQ ID NO: 7503 - DNA, 24 bp, synthetic construct
  misc_feature 1..24: note = Synthetic
  source 1..24: mol_type = other DNA
ggtagccgccagcatttacttggc

SEQ ID NO: 7504 - DNA, 24 bp, synthetic construct
  misc_feature 1..24: note = Synthetic
  source 1..24: mol_type = other DNA
tccagcacgttgagaggagctgga

SEQ ID NO: 7505 - DNA, 24 bp, synthetic construct
  misc_feature 1..24: note = Synthetic
  source 1..24: mol_type = other DNA
gggccacataatcgactaggccta

SEQ ID NO: 7506 - DNA, 24 bp, synthetic construct
  misc_feature 1..24: note = Synthetic
  source 1..24: mol_type = other DNA
agttgggaccagagtttcaagctc

SEQ ID NO: 7507 - DNA, 24 bp, synthetic construct
  misc_feature 1..24: note = Synthetic
  source 1..24: mol_type = other DNA
gactgcagtagccgcagcggtacg

SEQ ID NO: 7508 - DNA, 24 bp, synthetic construct
  misc_feature 1..24: note = Synthetic
  source 1..24: mol_type = other DNA
ccggtatgcctttaaggcaatacc

SEQ ID NO: 7509 - DNA, 24 bp, synthetic construct
  misc_feature 1..24: note = Synthetic
  source 1..24: mol_type = other DNA
atcgtgtcacacccgcgaccttct

SEQ ID NO: 7510 - DNA, 24 bp, synthetic construct
  misc_feature 1..24: note = Synthetic
  source 1..24: mol_type = other DNA
gtgttctatccgtctatcttcact

SEQ ID NO: 7511 - DNA, 24 bp, synthetic construct
  misc_feature 1..24: note = Synthetic
  source 1..24: mol_type = other DNA
ggcgtgcatcctagataaatcatt

SEQ ID NO: 7512 - DNA, 24 bp, synthetic construct
  misc_feature 1..24: note = Synthetic
  source 1..24: mol_type = other DNA
cttcggaaggtctattgggagatc

SEQ ID NO: 7513 - DNA, 24 bp, synthetic construct
  misc_feature 1..24: note = Synthetic
  source 1..24: mol_type = other DNA
gttatcgggcctcgcgggatgcgc

SEQ ID NO: 7514 - DNA, 24 bp, synthetic construct
  misc_feature 1..24: note = Synthetic
  source 1..24: mol_type = other DNA
caccttagcacccgctctcaacca

SEQ ID NO: 7515 - DNA, 24 bp, synthetic construct
  misc_feature 1..24: note = Synthetic
  source 1..24: mol_type = other DNA
aggcgcacgattaagatagtctcg

SEQ ID NO: 7516 - DNA, 24 bp, synthetic construct
  misc_feature 1..24: note = Synthetic
  source 1..24: mol_type = other DNA
aaagttcacgaagtccgcagccgt

SEQ ID NO: 7517 - DNA, 24 bp, synthetic construct
  misc_feature 1..24: note = Synthetic
  source 1..24: mol_type = other DNA
acctcctcgaacgatgcacagttg

SEQ ID NO: 7518 - DNA, 24 bp, synthetic construct
  misc_feature 1..24: note = Synthetic
  source 1..24: mol_type = other DNA
ggcttggcctaactagttgaggcc

SEQ ID NO: 7519 - DNA, 24 bp, synthetic construct
  misc_feature 1..24: note = Synthetic
  source 1..24: mol_type = other DNA
ccacggtaaccgcaaagagcacgt

SEQ ID NO: 7520 - DNA, 24 bp, synthetic construct
  misc_feature 1..24: note = Synthetic
  source 1..24: mol_type = other DNA
ctgtactaagttggagtggtcgag

SEQ ID NO: 7521 - DNA, 24 bp, synthetic construct
  misc_feature 1..24: note = Synthetic
  source 1..24: mol_type = other DNA
accgtccggtctttattacccgtc

SEQ ID NO: 7522 - DNA, 24 bp, synthetic construct
  misc_feature 1..24: note = Synthetic
  source 1..24: mol_type = other DNA
ccacggccctcccggacgtttagg

SEQ ID NO: 7523 - DNA, 24 bp, synthetic construct
  misc_feature 1..24: note = Synthetic
  source 1..24: mol_type = other DNA
gcttcttcatcccgtttcaccaca

SEQ ID NO: 7524 - DNA, 24 bp, synthetic construct
  misc_feature 1..24: note = Synthetic
  source 1..24: mol_type = other DNA
ccagggctcccatgtatggttggt

SEQ ID NO: 7525 - DNA, 24 bp, synthetic construct
  misc_feature 1..24: note = Synthetic
  source 1..24: mol_type = other DNA
gcgttgcttgcgcgaggacagcaa

SEQ ID NO: 7526 - DNA, 24 bp, synthetic construct
  misc_feature 1..24: note = Synthetic
  source 1..24: mol_type = other DNA
tcctagtccgcagcctcaggtgat

SEQ ID NO: 7527 - DNA, 24 bp, synthetic construct
  misc_feature 1..24: note = Synthetic
  source 1..24: mol_type = other DNA
taatacccatgcggtacaccctgc

SEQ ID NO: 7528 - DNA, 24 bp, synthetic construct
  misc_feature 1..24: note = Synthetic
  source 1..24: mol_type = other DNA
ttcacaggttcagaggcgcatgct

SEQ ID NO: 7529 - DNA, 24 bp, synthetic construct
  misc_feature 1..24: note = Synthetic
  source 1..24: mol_type = other DNA
ctacgataagtcttgcgttagcca

SEQ ID NO: 7530 - DNA, 24 bp, synthetic construct
  misc_feature 1..24: note = Synthetic
  source 1..24: mol_type = other DNA
tcctagtataagacgccactcacc

SEQ ID NO: 7531 - DNA, 24 bp, synthetic construct
  misc_feature 1..24: note = Synthetic
  source 1..24: mol_type = other DNA
gcccgggctctcaatgtacgtcaa

SEQ ID NO: 7532 - DNA, 24 bp, synthetic construct
  misc_feature 1..24: note = Synthetic
  source 1..24: mol_type = other DNA
tgtggcgctacgtcttgtcgatct

SEQ ID NO: 7533 - DNA, 24 bp, synthetic construct
  misc_feature 1..24: note = Synthetic
  source 1..24: mol_type = other DNA
ctatcgtaaatcaggattctgcac

SEQ ID NO: 7534 - DNA, 24 bp, synthetic construct
  misc_feature 1..24: note = Synthetic
  source 1..24: mol_type = other DNA
cttgactactctgataagatgata

SEQ ID NO: 7535 - DNA, 24 bp, synthetic construct
  misc_feature 1..24: note = Synthetic
  source 1..24: mol_type = other DNA
tgctctgcttgtacctagtgcgtt

SEQ ID NO: 7536 - DNA, 24 bp, synthetic construct
  misc_feature 1..24: note = Synthetic
  source 1..24: mol_type = other DNA
agatactgtagtgaacaacgtcga

SEQ ID NO: 7537 - DNA, 24 bp, synthetic construct
  misc_feature 1..24: note = Synthetic
  source 1..24: mol_type = other DNA
attccataccgtctgggaattgaa

SEQ ID NO: 7538 - DNA, 24 bp, synthetic construct
  misc_feature 1..24: note = Synthetic
  source 1..24: mol_type = other DNA
ggcgcggtcccggaatgctacctc

SEQ ID NO: 7539 - DNA, 24 bp, synthetic construct
  misc_feature 1..24: note = Synthetic
  source 1..24: mol_type = other DNA
ttcctactaacacacgatacacac

SEQ ID NO: 7540 - DNA, 24 bp, synthetic construct
  misc_feature 1..24: note = Synthetic
  source 1..24: mol_type = other DNA
gccatcgttcgcgattgcgataag

SEQ ID NO: 7541 - DNA, 24 bp, synthetic construct
  misc_feature 1..24: note = Synthetic
  source 1..24: mol_type = other DNA
ctcgcttcgtagcgcaggtcagtg

SEQ ID NO: 7542 - DNA, 24 bp, synthetic construct
  misc_feature 1..24: note = Synthetic
  source 1..24: mol_type = other DNA
cctcacccacatatccgggcactt

SEQ ID NO: 7543 - DNA, 24 bp, synthetic construct
  misc_feature 1..24: note = Synthetic
  source 1..24: mol_type = other DNA
gttctggtttggcgtgagaacagc

SEQ ID NO: 7544 - DNA, 24 bp, synthetic construct
  misc_feature 1..24: note = Synthetic
  source 1..24: mol_type = other DNA
catgaaggacgttagtaaatgcat

SEQ ID NO: 7545 - DNA, 24 bp, synthetic construct
  misc_feature 1..24: note = Synthetic
  source 1..24: mol_type = other DNA
aaatatagccgtatcgcggcgtgt

SEQ ID NO: 7546 - DNA, 24 bp, synthetic construct
  misc_feature 1..24: note = Synthetic
  source 1..24: mol_type = other DNA
tcataattcaactttccagtaccg

SEQ ID NO: 7547 - DNA, 24 bp, synthetic construct
  misc_feature 1..24: note = Synthetic
  source 1..24: mol_type = other DNA
aggtagcctcggacagcgtggtct

SEQ ID NO: 7548 - DNA, 24 bp, synthetic construct
  misc_feature 1..24: note = Synthetic
  source 1..24: mol_type = other DNA
agtgcttcacacagcttcctactc

SEQ ID NO: 7549 - DNA, 24 bp, synthetic construct
  misc_feature 1..24: note = Synthetic
  source 1..24: mol_type = other DNA
ggctgcatctcgttggcttgacta

SEQ ID NO: 7550 - DNA, 24 bp, synthetic construct
  misc_feature 1..24: note = Synthetic
  source 1..24: mol_type = other DNA
tgatctctaccgccagacgggaat

SEQ ID NO: 7551 - DNA, 24 bp, synthetic construct
  misc_feature 1..24: note = Synthetic
  source 1..24: mol_type = other DNA
ccgtcttcagtcatctggatccta

SEQ ID NO: 7552 - DNA, 24 bp, synthetic construct
  misc_feature 1..24: note = Synthetic
  source 1..24: mol_type = other DNA
gtgcacaatgtgacagcatcccta

SEQ ID NO: 7553 - DNA, 24 bp, synthetic construct
  misc_feature 1..24: note = Synthetic
  source 1..24: mol_type = other DNA
gtccatggtccatacgtgacgcat

SEQ ID NO: 7554 - DNA, 24 bp, synthetic construct
  misc_feature 1..24: note = Synthetic
  source 1..24: mol_type = other DNA
gactaaccaatcaccattctccca

SEQ ID NO: 7555 - DNA, 24 bp, synthetic construct
  misc_feature 1..24: note = Synthetic
  source 1..24: mol_type = other DNA
ccgcagctgcattaactaacaata

SEQ ID NO: 7556 - DNA, 24 bp, synthetic construct
  misc_feature 1..24: note = Synthetic
  source 1..24: mol_type = other DNA
tcgcgtcatggtgggctagcatag

SEQ ID NO: 7557 - DNA, 24 bp, synthetic construct
  misc_feature 1..24: note = Synthetic
  source 1..24: mol_type = other DNA
tggcgattcatctcaatatcgttc

SEQ ID NO: 7558 - DNA, 24 bp, synthetic construct
  misc_feature 1..24: note = Synthetic
  source 1..24: mol_type = other DNA
tggcgtacccaagtgctgatcgcg

SEQ ID NO: 7559 - DNA, 24 bp, synthetic construct
  misc_feature 1..24: note = Synthetic
  source 1..24: mol_type = other DNA
ttcactattgtaagtgattaacgg

SEQ ID NO: 7560 - DNA, 24 bp, synthetic construct
  misc_feature 1..24: note = Synthetic
  source 1..24: mol_type = other DNA
gcccttggtcgaagacataaggtt

SEQ ID NO: 7561 - DNA, 24 bp, synthetic construct
  misc_feature 1..24: note = Synthetic
  source 1..24: mol_type = other DNA
ggtaatcacggctaaacttgccat

SEQ ID NO: 7562 - DNA, 24 bp, synthetic construct
  misc_feature 1..24: note = Synthetic
  source 1..24: mol_type = other DNA
tggtatgatatggcattgtgttga

SEQ ID NO: 7563 - DNA, 24 bp, synthetic construct
  misc_feature 1..24: note = Synthetic
  source 1..24: mol_type = other DNA
agtactccatatctgtataatggg

SEQ ID NO: 7564 - DNA, 24 bp, synthetic construct
  misc_feature 1..24: note = Synthetic
  source 1..24: mol_type = other DNA
actgctgatcaataactttgggtc

SEQ ID NO: 7565 - DNA, 24 bp, synthetic construct
  misc_feature 1..24: note = Synthetic
  source 1..24: mol_type = other DNA
gcacagcgcctgggtacagaaagc

SEQ ID NO: 7566 - DNA, 24 bp, synthetic construct
  misc_feature 1..24: note = Synthetic
  source 1..24: mol_type = other DNA
gcgatcaacgcgtcttgtaggcca

SEQ ID NO: 7567 - DNA, 24 bp, synthetic construct
  misc_feature 1..24: note = Synthetic
  source 1..24: mol_type = other DNA
gtcgttgcgtttcccgaccctcta

SEQ ID NO: 7568 - DNA, 24 bp, synthetic construct
  misc_feature 1..24: note = Synthetic
  source 1..24: mol_type = other DNA
cggacttctccaataagatgacca

SEQ ID NO: 7569 - DNA, 24 bp, synthetic construct
  misc_feature 1..24: note = Synthetic
  source 1..24: mol_type = other DNA
ttgtttccattagtgtgcgcaata

SEQ ID NO: 7570 - DNA, 24 bp, synthetic construct
  misc_feature 1..24: note = Synthetic
  source 1..24: mol_type = other DNA
aatccacgagacgccctgccatcc

SEQ ID NO: 7571 - DNA, 24 bp, synthetic construct
  misc_feature 1..24: note = Synthetic
  source 1..24: mol_type = other DNA
caacggcaaattacacgaaccctg

SEQ ID NO: 7572 - DNA, 24 bp, synthetic construct
  misc_feature 1..24: note = Synthetic
  source 1..24: mol_type = other DNA
tgctcactcgagttggcacaagtt

SEQ ID NO: 7573 - DNA, 24 bp, synthetic construct
  misc_feature 1..24: note = Synthetic
  source 1..24: mol_type = other DNA
tcaatatgcgcgggcttgcgcact

SEQ ID NO: 7574 - DNA, 24 bp, synthetic construct
  misc_feature 1..24: note = Synthetic
  source 1..24: mol_type = other DNA
ctccttctactttgctgaggatag

SEQ ID NO: 7575 - DNA, 24 bp, synthetic construct
  misc_feature 1..24: note = Synthetic
  source 1..24: mol_type = other DNA
actatgatgggctccaaccgcaca

SEQ ID NO: 7576 - DNA, 24 bp, synthetic construct
  misc_feature 1..24: note = Synthetic
  source 1..24: mol_type = other DNA
catggaccgactagttataaggtg

SEQ ID NO: 7577 - DNA, 24 bp, synthetic construct
  misc_feature 1..24: note = Synthetic
  source 1..24: mol_type = other DNA
gaaacctcacatggacctacgtgt

SEQ ID NO: 7578 - DNA, 24 bp, synthetic construct
  misc_feature 1..24: note = Synthetic
  source 1..24: mol_type = other DNA
tcatatacgtcaagacaagtacat

SEQ ID NO: 7579 - DNA, 24 bp, synthetic construct
  misc_feature 1..24: note = Synthetic
  source 1..24: mol_type = other DNA
gcgtcactctggtagcgaagactg

SEQ ID NO: 7580 - DNA, 24 bp, synthetic construct
  misc_feature 1..24: note = Synthetic
  source 1..24: mol_type = other DNA
catctcccactatctggttgagga

SEQ ID NO: 7581 - DNA, 24 bp, synthetic construct
  misc_feature 1..24: note = Synthetic
  source 1..24: mol_type = other DNA
tatctatgtctcagccgacgtgtc

SEQ ID NO: 7582 - DNA, 24 bp, synthetic construct
  misc_feature 1..24: note = Synthetic
  source 1..24: mol_type = other DNA
aattgtgggcgcaaaccacagcac

SEQ ID NO: 7583 - DNA, 24 bp, synthetic construct
  misc_feature 1..24: note = Synthetic
  source 1..24: mol_type = other DNA
tgaacaagtactccgttaggagag

SEQ ID NO: 7584 - DNA, 24 bp, synthetic construct
  misc_feature 1..24: note = Synthetic
  source 1..24: mol_type = other DNA
cagaaggctatagtgtactcaaga

SEQ ID NO: 7585 - DNA, 24 bp, synthetic construct
  misc_feature 1..24: note = Synthetic
  source 1..24: mol_type = other DNA
attgtcttcggaacaacgaagacg

SEQ ID NO: 7586 - DNA, 24 bp, synthetic construct
  misc_feature 1..24: note = Synthetic
  source 1..24: mol_type = other DNA
ccacagctcccggctgttagtagc

SEQ ID NO: 7587 - DNA, 24 bp, synthetic construct
  misc_feature 1..24: note = Synthetic
  source 1..24: mol_type = other DNA
ctactctggtgattcacggctcaa

SEQ ID NO: 7588 - DNA, 24 bp, synthetic construct
  misc_feature 1..24: note = Synthetic
  source 1..24: mol_type = other DNA
ccttaagcggtgtgttcttgccat

SEQ ID NO: 7589 - DNA, 24 bp, synthetic construct
  misc_feature 1..24: note = Synthetic
  source 1..24: mol_type = other DNA
tcgtgtcgagtggagttgatgttt

SEQ ID NO: 7590 - DNA, 24 bp, synthetic construct
  misc_feature 1..24: note = Synthetic
  source 1..24: mol_type = other DNA
tagtttaactgcaatagcccgttc

SEQ ID NO: 7591 - DNA, 24 bp, synthetic construct
  misc_feature 1..24: note = Synthetic
  source 1..24: mol_type = other DNA
tttcgaccatccgagccgcataag

SEQ ID NO: 7592 - DNA, 24 bp, synthetic construct
  misc_feature 1..24: note = Synthetic
  source 1..24: mol_type = other DNA
ctgttagtaacgtcacgaaggtcg

SEQ ID NO: 7593 - DNA, 24 bp, synthetic construct
  misc_feature 1..24: note = Synthetic
  source 1..24: mol_type = other DNA
ataggagttacctccgagtaaact

SEQ ID NO: 7594 - DNA, 24 bp, synthetic construct
  misc_feature 1..24: note = Synthetic
  source 1..24: mol_type = other DNA
gtgatcttacacgtgacgcatacc

SEQ ID NO: 7595 - DNA, 24 bp, synthetic construct
  misc_feature 1..24: note = Synthetic
  source 1..24: mol_type = other DNA
ttcttcgtcagtgacatcgtcctc

SEQ ID NO: 7596 - DNA, 24 bp, synthetic construct
  misc_feature 1..24: note = Synthetic
  source 1..24: mol_type = other DNA
tgggtgggagtaggcattcctact

SEQ ID NO: 7597 - DNA, 24 bp, synthetic construct
  misc_feature 1..24: note = Synthetic
  source 1..24: mol_type = other DNA
tactcatacagtctacagtgcaca

SEQ ID NO: 7598 - DNA, 24 bp, synthetic construct
  misc_feature 1..24: note = Synthetic
  source 1..24: mol_type = other DNA
tttgcagcgaaccgagagtttcgc

SEQ ID NO: 7599 - DNA, 24 bp, synthetic construct
  misc_feature 1..24: note = Synthetic
  source 1..24: mol_type = other DNA
cgtgtggcatatgattctagacgt

SEQ ID NO: 7600 - DNA, 24 bp, synthetic construct
  misc_feature 1..24: note = Synthetic
  source 1..24: mol_type = other DNA
gatagtcagaatttccagccgtta

SEQ ID NO: 7601 - DNA, 24 bp, synthetic construct
  misc_feature 1..24: note = Synthetic
  source 1..24: mol_type = other DNA
gcagtataatctatttcgagtaat

SEQ ID NO: 7602 - DNA, 24 bp, synthetic construct
  misc_feature 1..24: note = Synthetic
  source 1..24: mol_type = other DNA
caaagggataccagtcactcatcc

SEQ ID NO: 7603 - DNA, 24 bp, synthetic construct
  misc_feature 1..24: note = Synthetic
  source 1..24: mol_type = other DNA
ccatctgtcagggtaacccagttg

SEQ ID NO: 7604 - DNA, 24 bp, synthetic construct
  misc_feature 1..24: note = Synthetic
  source 1..24: mol_type = other DNA
aatccgccgtaatagtaaataatc

SEQ ID NO: 7605 - DNA, 24 bp, synthetic construct
  misc_feature 1..24: note = Synthetic
  source 1..24: mol_type = other DNA
accagggatgaacttgtacgaatg

SEQ ID NO: 7606 - DNA, 24 bp, synthetic construct
  misc_feature 1..24: note = Synthetic
  source 1..24: mol_type = other DNA
ggagttagaggtccttcgaggccg

SEQ ID NO: 7607 - DNA, 24 bp, synthetic construct
  misc_feature 1..24: note = Synthetic
  source 1..24: mol_type = other DNA
atcggaaccacttctgtttaagca

SEQ ID NO: 7608 - DNA, 24 bp, synthetic construct
  misc_feature 1..24: note = Synthetic
  source 1..24: mol_type = other DNA
catatggcgacccaggtggaaccg

SEQ ID NO: 7609 - DNA, 24 bp, synthetic construct
  misc_feature 1..24: note = Synthetic
  source 1..24: mol_type = other DNA
taagggagccatttgaacgcttat

SEQ ID NO: 7610 - DNA, 24 bp, synthetic construct
  misc_feature 1..24: note = Synthetic
  source 1..24: mol_type = other DNA
taactacgttgatggcttatccac

SEQ ID NO: 7611 - DNA, 24 bp, synthetic construct
  misc_feature 1..24: note = Synthetic
  source 1..24: mol_type = other DNA
cagcgcccaaagagttagagtggt

SEQ ID NO: 7612 - DNA, 24 bp, synthetic construct
  misc_feature 1..24: note = Synthetic
  source 1..24: mol_type = other DNA
tgatgctgatcgtgataggtggat

SEQ ID NO: 7613 - DNA, 24 bp, synthetic construct
  misc_feature 1..24: note = Synthetic
  source 1..24: mol_type = other DNA
gcagtatagattacgacgattgcc

SEQ ID NO: 7614 - DNA, 24 bp, synthetic construct
  misc_feature 1..24: note = Synthetic
  source 1..24: mol_type = other DNA
taagcacgtcgcaacagcattcag

SEQ ID NO: 7615 - DNA, 24 bp, synthetic construct
  misc_feature 1..24: note = Synthetic
  source 1..24: mol_type = other DNA
gtggtaacgccaaatatgaagcct

SEQ ID NO: 7616 - DNA, 24 bp, synthetic construct
  misc_feature 1..24: note = Synthetic
  source 1..24: mol_type = other DNA
cctcaagcacctcggtgactgcgc

SEQ ID NO: 7617 - DNA, 24 bp, synthetic construct
  misc_feature 1..24: note = Synthetic
  source 1..24: mol_type = other DNA
atacccgaccggttacaacacgac

SEQ ID NO: 7618 - DNA, 24 bp, synthetic construct
  misc_feature 1..24: note = Synthetic
  source 1..24: mol_type = other DNA
ctaccgggacactactcatgttcc

SEQ ID NO: 7619 - DNA, 24 bp, synthetic construct
  misc_feature 1..24: note = Synthetic
  source 1..24: mol_type = other DNA
gtccggctgacattaaagaattaa

SEQ ID NO: 7620 - DNA, 24 bp, synthetic construct
  misc_feature 1..24: note = Synthetic
  source 1..24: mol_type = other DNA
aacaacctcgccaaccgaaatatg

SEQ ID NO: 7621 - DNA, 24 bp, synthetic construct
  misc_feature 1..24: note = Synthetic
  source 1..24: mol_type = other DNA
cactagggcgagggagataatagg

SEQ ID NO: 7622 - DNA, 24 bp, synthetic construct
  misc_feature 1..24: note = Synthetic
  source 1..24: mol_type = other DNA
ctaagcattgtttactgaatctgg

SEQ ID NO: 7623 - DNA, 24 bp, synthetic construct
  misc_feature 1..24: note = Synthetic
  source 1..24: mol_type = other DNA
gcgaccgttcttccgctatagcgc

SEQ ID NO: 7624 - DNA, 24 bp, synthetic construct
  misc_feature 1..24: note = Synthetic
  source 1..24: mol_type = other DNA
ggtaaggcagtcaacattgattac

SEQ ID NO: 7625 - DNA, 24 bp, synthetic construct
  misc_feature 1..24: note = Synthetic
  source 1..24: mol_type = other DNA
tatgcacctgacacacgattggtg

SEQ ID NO: 7626 - DNA, 24 bp, synthetic construct
  misc_feature 1..24: note = Synthetic
  source 1..24: mol_type = other DNA
atacaatacaggattctgtccgta

SEQ ID NO: 7627 - DNA, 24 bp, synthetic construct
  misc_feature 1..24: note = Synthetic
  source 1..24: mol_type = other DNA
gttgcggaactcctgcccgcgggc

SEQ ID NO: 7628 - DNA, 24 bp, synthetic construct
  misc_feature 1..24: note = Synthetic
  source 1..24: mol_type = other DNA
actccgtaagtcgggtgggtgttc

SEQ ID NO: 7629 - DNA, 24 bp, synthetic construct
  misc_feature 1..24: note = Synthetic
  source 1..24: mol_type = other DNA
ggatcggaccaagtcttcgtcgca

SEQ ID NO: 7630 - DNA, 24 bp, synthetic construct
  misc_feature 1..24: note = Synthetic
  source 1..24: mol_type = other DNA
gagtccactacaggccgggcttga

SEQ ID NO: 7631 - DNA, 24 bp, synthetic construct
  misc_feature 1..24: note = Synthetic
  source 1..24: mol_type = other DNA
catacctttctatgcctcactcca

SEQ ID NO: 7632 - DNA, 24 bp, synthetic construct
  misc_feature 1..24: note = Synthetic
  source 1..24: mol_type = other DNA
tctaaagactatgatgtctccttg

SEQ ID NO: 7633 - DNA, 24 bp, synthetic construct
  misc_feature 1..24: note = Synthetic
  source 1..24: mol_type = other DNA
gactcgtcgcgaagacatgcggta

SEQ ID NO: 7634 - DNA, 24 bp, synthetic construct
  misc_feature 1..24: note = Synthetic
  source 1..24: mol_type = other DNA
acttgtataacgctttgtcctctc

SEQ ID NO: 7635 - DNA, 24 bp, synthetic construct
  misc_feature 1..24: note = Synthetic
  source 1..24: mol_type = other DNA
aatcataatagagccgtagcgata

SEQ ID NO: 7636 - DNA, 24 bp, synthetic construct
  misc_feature 1..24: note = Synthetic
  source 1..24: mol_type = other DNA
gtaaatgggacagctggcttaccc

SEQ ID NO: 7637 - DNA, 24 bp, synthetic construct
  misc_feature 1..24: note = Synthetic
  source 1..24: mol_type = other DNA
cctggtgcaagttagactaggcta

SEQ ID NO: 7638 - DNA, 24 bp, synthetic construct
  misc_feature 1..24: note = Synthetic
  source 1..24: mol_type = other DNA
agactcagagcgtccgagcgtatg

SEQ ID NO: 7639 - DNA, 24 bp, synthetic construct
  misc_feature 1..24: note = Synthetic
  source 1..24: mol_type = other DNA
acctatgcatggtgtgcttcattt

SEQ ID NO: 7640 - DNA, 24 bp, synthetic construct
  misc_feature 1..24: note = Synthetic
  source 1..24: mol_type = other DNA
ctgttacttggcgcgttcccggat

SEQ ID NO: 7641 - DNA, 24 bp, synthetic construct
  misc_feature 1..24: note = Synthetic
  source 1..24: mol_type = other DNA
agtaaagattccctcctagatctc

SEQ ID NO: 7642 - DNA, 24 bp, synthetic construct
  misc_feature 1..24: note = Synthetic
  source 1..24: mol_type = other DNA
ccacattaatttaggtgttatggc

SEQ ID NO: 7643 - DNA, 24 bp, synthetic construct
  misc_feature 1..24: note = Synthetic
  source 1..24: mol_type = other DNA
ctggccgtgctctcgcgggctcaa

SEQ ID NO: 7644 - DNA, 24 bp, synthetic construct
  misc_feature 1..24: note = Synthetic
  source 1..24: mol_type = other DNA
cattcgagcccatgtaacgtgctt

SEQ ID NO: 7645 - DNA, 24 bp, synthetic construct
  misc_feature 1..24: note = Synthetic
  source 1..24: mol_type = other DNA
ccgttgaaaggttagcttagctct

SEQ ID NO: 7646 - DNA, 24 bp, synthetic construct
  misc_feature 1..24: note = Synthetic
  source 1..24: mol_type = other DNA
ctaactaacgacggactacattga

SEQ ID NO: 7647 - DNA, 24 bp, synthetic construct
  misc_feature 1..24: note = Synthetic
  source 1..24: mol_type = other DNA
tttgcttcgccagaactgaacgac

SEQ ID NO: 7648 - DNA, 24 bp, synthetic construct
  misc_feature 1..24: note = Synthetic
  source 1..24: mol_type = other DNA
gtgtgttactcaccgagcctcatg

SEQ ID NO: 7649 - DNA, 24 bp, synthetic construct
  misc_feature 1..24: note = Synthetic
  source 1..24: mol_type = other DNA
gcgaagactccggaatgtcaaggg

SEQ ID NO: 7650 - DNA, 24 bp, synthetic construct
  misc_feature 1..24: note = Synthetic
  source 1..24: mol_type = other DNA
ttagtagtcccaaggcgtcgtgtg

SEQ ID NO: 7651 - DNA, 24 bp, synthetic construct
  misc_feature 1..24: note = Synthetic
  source 1..24: mol_type = other DNA
tcttatgatagtaccagtaagaaa

SEQ ID NO: 7652 - DNA, 24 bp, synthetic construct
  misc_feature 1..24: note = Synthetic
  source 1..24: mol_type = other DNA
ggcgggagggttgctgcacttacg

SEQ ID NO: 7653 - DNA, 24 bp, synthetic construct
  misc_feature 1..24: note = Synthetic
  source 1..24: mol_type = other DNA
tctggacatttattgatccatctc

SEQ ID NO: 7654 - DNA, 24 bp, synthetic construct
  misc_feature 1..24: note = Synthetic
  source 1..24: mol_type = other DNA
aatcggcgctaccatgcaataccg

SEQ ID NO: 7655 - DNA, 24 bp, synthetic construct
  misc_feature 1..24: note = Synthetic
  source 1..24: mol_type = other DNA
cccgaggttggttccaactttagg

SEQ ID NO: 7656 - DNA, 24 bp, synthetic construct
  misc_feature 1..24: note = Synthetic
  source 1..24: mol_type = other DNA
tctgtaatgctcaccgaactacat

SEQ ID NO: 7657 - DNA, 24 bp, synthetic construct
  misc_feature 1..24: note = Synthetic
  source 1..24: mol_type = other DNA
cctcatttgcaactgttcgaagcc

SEQ ID NO: 7658 - DNA, 24 bp, synthetic construct
  misc_feature 1..24: note = Synthetic
  source 1..24: mol_type = other DNA
tcctcttcgtgtcgtatcccaaga

SEQ ID NO: 7659 - DNA, 24 bp, synthetic construct
  misc_feature 1..24: note = Synthetic
  source 1..24: mol_type = other DNA
ggagtcgcccacgtgctgtggatt

SEQ ID NO: 7660 - DNA, 24 bp, synthetic construct
  misc_feature 1..24: note = Synthetic
  source 1..24: mol_type = other DNA
gaagatgaggtctgaaatcatgct

SEQ ID NO: 7661 - DNA, 24 bp, synthetic construct
  misc_feature 1..24: note = Synthetic
  source 1..24: mol_type = other DNA
ctactctcgtgggaatgataggac

SEQ ID NO: 7662 - DNA, 24 bp, synthetic construct
  misc_feature 1..24: note = Synthetic
  source 1..24: mol_type = other DNA
gctaggtcagatcccaaagtcaag

SEQ ID NO: 7663 - DNA, 24 bp, synthetic construct
  misc_feature 1..24: note = Synthetic
  source 1..24: mol_type = other DNA
ttacagtctgctaccggtttaaat

SEQ ID NO: 7664 - DNA, 24 bp, synthetic construct
  misc_feature 1..24: note = Synthetic
  source 1..24: mol_type = other DNA
gccacagtattagcacgactggct

SEQ ID NO: 7665 - DNA, 24 bp, synthetic construct
  misc_feature 1..24: note = Synthetic
  source 1..24: mol_type = other DNA
cctagcgtctcagtccgaaatacg

SEQ ID NO: 7666 - DNA, 24 bp, synthetic construct
  misc_feature 1..24: note = Synthetic
  source 1..24: mol_type = other DNA
accggctttaagggaatgccggaa

SEQ ID NO: 7667 - DNA, 24 bp, synthetic construct
  misc_feature 1..24: note = Synthetic
  source 1..24: mol_type = other DNA
gcgtgctcagccgctactaaacgt

SEQ ID NO: 7668 - DNA, 24 bp, synthetic construct
  misc_feature 1..24: note = Synthetic
  source 1..24: mol_type = other DNA
gtcaacggacatcgagtgatattg

SEQ ID NO: 7669 - DNA, 24 bp, synthetic construct
  misc_feature 1..24: note = Synthetic
  source 1..24: mol_type = other DNA
gggccgactaaatctacggtcacg

SEQ ID NO: 7670 - DNA, 24 bp, synthetic construct
  misc_feature 1..24: note = Synthetic
  source 1..24: mol_type = other DNA
aaagactacgtgggttagctttag

SEQ ID NO: 7671 - DNA, 24 bp, synthetic construct
  misc_feature 1..24: note = Synthetic
  source 1..24: mol_type = other DNA
gacgtttgcaggtgaccgtgctat

SEQ ID NO: 7672 - DNA, 24 bp, synthetic construct
  misc_feature 1..24: note = Synthetic
  source 1..24: mol_type = other DNA
tttggtaggtctcgttagctcctc

SEQ ID NO: 7673 - DNA, 24 bp, synthetic construct
  misc_feature 1..24: note = Synthetic
  source 1..24: mol_type = other DNA
cctacgacggcctggtcatattag

SEQ ID NO: 7674 - DNA, 24 bp, synthetic construct
  misc_feature 1..24: note = Synthetic
  source 1..24: mol_type = other DNA
caccagcacgcttgcaagatccga

SEQ ID NO: 7675 - DNA, 24 bp, synthetic construct
  misc_feature 1..24: note = Synthetic
  source 1..24: mol_type = other DNA
gtcttaatgaggtgtgtatactgt

SEQ ID NO: 7676 - DNA, 24 bp, synthetic construct
  misc_feature 1..24: note = Synthetic
  source 1..24: mol_type = other DNA
aacccaaactcagcgaacattgag

SEQ ID NO: 7677 - DNA, 24 bp, synthetic construct
  misc_feature 1..24: note = Synthetic
  source 1..24: mol_type = other DNA
gtagcccttacgtgcacaattatg

SEQ ID NO: 7678 - DNA, 24 bp, synthetic construct
  misc_feature 1..24: note = Synthetic
  source 1..24: mol_type = other DNA
agattgaggtcctcagctgcgtct

SEQ ID NO: 7679 - DNA, 24 bp, synthetic construct
  misc_feature 1..24: note = Synthetic
  source 1..24: mol_type = other DNA
acgtgaggaaatgttggtcccagg

SEQ ID NO: 7680 - DNA, 24 bp, synthetic construct
  misc_feature 1..24: note = Synthetic
  source 1..24: mol_type = other DNA
tgatatgtgtacagatcgattgtc

SEQ ID NO: 7681 - DNA, 24 bp, synthetic construct
  misc_feature 1..24: note = Synthetic
  source 1..24: mol_type = other DNA
agagctgcagctggtttgtgtcac

SEQ ID NO: 7682 - DNA, 24 bp, synthetic construct
  misc_feature 1..24: note = Synthetic
  source 1..24: mol_type = other DNA
gtgagatgtatttaacggtggcgg

SEQ ID NO: 7683 - DNA, 24 bp, synthetic construct
  misc_feature 1..24: note = Synthetic
  source 1..24: mol_type = other DNA
ctcatgcacggaacagaagtcgaa

SEQ ID NO: 7684 - DNA, 24 bp, synthetic construct
  misc_feature 1..24: note = Synthetic
  source 1..24: mol_type = other DNA
ctcgcgtatactcatcagtcattc

SEQ ID NO: 7685 - DNA, 24 bp, synthetic construct
  misc_feature 1..24: note = Synthetic
  source 1..24: mol_type = other DNA
tccgttccttcataggacctaggg

SEQ ID NO: 7686 - DNA, 24 bp, synthetic construct
  misc_feature 1..24: note = Synthetic
  source 1..24: mol_type = other DNA
tagtaggagtgatctggcggctct

SEQ ID NO: 7687 - DNA, 24 bp, synthetic construct
  misc_feature 1..24: note = Synthetic
  source 1..24: mol_type = other DNA
aattcgtgtatccattccatatta

SEQ ID NO: 7688 - DNA, 24 bp, synthetic construct
  misc_feature 1..24: note = Synthetic
  source 1..24: mol_type = other DNA
gcaaacatgtgtaggtgtagtgag

SEQ ID NO: 7689 - DNA, 24 bp, synthetic construct
  misc_feature 1..24: note = Synthetic
  source 1..24: mol_type = other DNA
ggacgtttcaattagtacgttgag

SEQ ID NO: 7690 - DNA, 24 bp, synthetic construct
  misc_feature 1..24: note = Synthetic
  source 1..24: mol_type = other DNA
ttcccggagtgtgaggcgcattgg

SEQ ID NO: 7691 - DNA, 24 bp, synthetic construct
  misc_feature 1..24: note = Synthetic
  source 1..24: mol_type = other DNA
ggacacgcatgaatccatggacaa

SEQ ID NO: 7692 - DNA, 24 bp, synthetic construct
  misc_feature 1..24: note = Synthetic
  source 1..24: mol_type = other DNA
ttgaaacactacatgcgtgattgg

SEQ ID NO: 7693 - DNA, 24 bp, synthetic construct
  misc_feature 1..24: note = Synthetic
  source 1..24: mol_type = other DNA
tccgaacctgtagaaccgaaggtt

SEQ ID NO: 7694 - DNA, 24 bp, synthetic construct
  misc_feature 1..24: note = Synthetic
  source 1..24: mol_type = other DNA
acaaacgctttggaggattcagac

SEQ ID NO: 7695 - DNA, 24 bp, synthetic construct
  misc_feature 1..24: note = Synthetic
  source 1..24: mol_type = other DNA
ttactctggtggtgaaagacgcat

SEQ ID NO: 7696 - DNA, 24 bp, synthetic construct
  misc_feature 1..24: note = Synthetic
  source 1..24: mol_type = other DNA
taacgggctcattcaaatctgatc

SEQ ID NO: 7697 - DNA, 24 bp, synthetic construct
  misc_feature 1..24: note = Synthetic
  source 1..24: mol_type = other DNA
gatacttgctcgaacatctctatc

SEQ ID NO: 7698 - DNA, 24 bp, synthetic construct
  misc_feature 1..24: note = Synthetic
  source 1..24: mol_type = other DNA
caatttccaacagtcgtcctgcga

SEQ ID NO: 7699 - DNA, 24 bp, synthetic construct
  misc_feature 1..24: note = Synthetic
  source 1..24: mol_type = other DNA
atatcacacagatccacaaactgt

SEQ ID NO: 7700 - DNA, 24 bp, synthetic construct
  misc_feature 1..24: note = Synthetic
  source 1..24: mol_type = other DNA
ctcaggtcatcgaagcagaacaat

SEQ ID NO: 7701 - DNA, 24 bp, synthetic construct
  misc_feature 1..24: note = Synthetic
  source 1..24: mol_type = other DNA
tatggtatgtattcagcgtaacaa

SEQ ID NO: 7702 - DNA, 24 bp, synthetic construct
  misc_feature 1..24: note = Synthetic
  source 1..24: mol_type = other DNA
gggaggtgttaccatgtatcttgc

SEQ ID NO: 7703 - DNA, 24 bp, synthetic construct
  misc_feature 1..24: note = Synthetic
  source 1..24: mol_type = other DNA
gtaggtccaacttatctccctctg

SEQ ID NO: 7704 - DNA, 24 bp, synthetic construct
  misc_feature 1..24: note = Synthetic
  source 1..24: mol_type = other DNA
tggaacatccgagaaccaccattt

SEQ ID NO: 7705 - DNA, 24 bp, synthetic construct
  misc_feature 1..24: note = Synthetic
  source 1..24: mol_type = other DNA
cggtgcgcgttattcgaggagata

SEQ ID NO: 7706 - DNA, 24 bp, synthetic construct
  misc_feature 1..24: note = Synthetic
  source 1..24: mol_type = other DNA
tcacacaatcgtctttaggtgtaa

SEQ ID NO: 7707 - DNA, 24 bp, synthetic construct
  misc_feature 1..24: note = Synthetic
  source 1..24: mol_type = other DNA
cactccggcccgaggtagactcat

SEQ ID NO: 7708 - DNA, 24 bp, synthetic construct
  misc_feature 1..24: note = Synthetic
  source 1..24: mol_type = other DNA
gttgacctttcacaacaaggtgat

SEQ ID NO: 7709 - DNA, 24 bp, synthetic construct
  misc_feature 1..24: note = Synthetic
  source 1..24: mol_type = other DNA
cgattaacacgttatctatttaat

SEQ ID NO: 7710 - DNA, 24 bp, synthetic construct
  misc_feature 1..24: note = Synthetic
  source 1..24: mol_type = other DNA
tctatagggtcccactcttggact

SEQ ID NO: 7711 - DNA, 24 bp, synthetic construct
  misc_feature 1..24: note = Synthetic
  source 1..24: mol_type = other DNA
catgacacaggtgcgccggaatga

SEQ ID NO: 7712 - DNA, 24 bp, synthetic construct
  misc_feature 1..24: note = Synthetic
  source 1..24: mol_type = other DNA
gactcccagaggcgaatgatacga

SEQ ID NO: 7713 - DNA, 24 bp, synthetic construct
  misc_feature 1..24: note = Synthetic
  source 1..24: mol_type = other DNA
gaacgagtacacacctcactccca

SEQ ID NO: 7714 - DNA, 24 bp, synthetic construct
  misc_feature 1..24: note = Synthetic
  source 1..24: mol_type = other DNA
tcactggtatgcgagcattaactg

SEQ ID NO: 7715 - DNA, 24 bp, synthetic construct
  misc_feature 1..24: note = Synthetic
  source 1..24: mol_type = other DNA
ctactctctggtttcctgaaagcc

SEQ ID NO: 7716 - DNA, 24 bp, synthetic construct
  misc_feature 1..24: note = Synthetic
  source 1..24: mol_type = other DNA
gaaaccagatccgacctaggtcgc

SEQ ID NO: 7717 - DNA, 24 bp, synthetic construct
  misc_feature 1..24: note = Synthetic
  source 1..24: mol_type = other DNA
ctgtttcctcaatgtattgcaaca

SEQ ID NO: 7718 - DNA, 24 bp, synthetic construct
  misc_feature 1..24: note = Synthetic
  source 1..24: mol_type = other DNA
ttgtacgacatacggctctacgag

SEQ ID NO: 7719 - DNA, 24 bp, synthetic construct
  misc_feature 1..24: note = Synthetic
  source 1..24: mol_type = other DNA
cccggctattcctacacgaaccac

SEQ ID NO: 7720 - DNA, 24 bp, synthetic construct
  misc_feature 1..24: note = Synthetic
  source 1..24: mol_type = other DNA
gtgttggagtcgagggtccatcga

SEQ ID NO: 7721 - DNA, 24 bp, synthetic construct
  misc_feature 1..24: note = Synthetic
  source 1..24: mol_type = other DNA
ctttgggctgccctgcgatcgttc

SEQ ID NO: 7722 - DNA, 24 bp, synthetic construct
  misc_feature 1..24: note = Synthetic
  source 1..24: mol_type = other DNA
cgtatagttgtttgaagagccaag

SEQ ID NO: 7723 - DNA, 24 bp, synthetic construct
  misc_feature 1..24: note = Synthetic
  source 1..24: mol_type = other DNA
tctcattctaacgcgctttccacg

SEQ ID NO: 7724 - DNA, 24 bp, synthetic construct
  misc_feature 1..24: note = Synthetic
  source 1..24: mol_type = other DNA
taggaacgcctatcacttgaattt

SEQ ID NO: 7725 - DNA, 24 bp, synthetic construct
  misc_feature 1..24: note = Synthetic
  source 1..24: mol_type = other DNA
tttgcaccttcggtgctgcgaaat

SEQ ID NO: 7726 - DNA, 24 bp, synthetic construct
  misc_feature 1..24: note = Synthetic
  source 1..24: mol_type = other DNA
gagcatgctcaccgcagaactcat

SEQ ID NO: 7727 - DNA, 24 bp, synthetic construct
  misc_feature 1..24: note = Synthetic
  source 1..24: mol_type = other DNA
ggatgcaggtagggtgtccagctt

SEQ ID NO: 7728 - DNA, 24 bp, synthetic construct
  misc_feature 1..24: note = Synthetic
  source 1..24: mol_type = other DNA
gctgatctaacgggaattgatgca

SEQ ID NO: 7729 - DNA, 24 bp, synthetic construct
  misc_feature 1..24: note = Synthetic
  source 1..24: mol_type = other DNA
gttgtcgctgacgcctgaaatctg

SEQ ID NO: 7730 - DNA, 24 bp, synthetic construct
  misc_feature 1..24: note = Synthetic
  source 1..24: mol_type = other DNA
tgtaagagcgggtagagcccagat

SEQ ID NO: 7731 - DNA, 24 bp, synthetic construct
  misc_feature 1..24: note = Synthetic
  source 1..24: mol_type = other DNA
agtacgtcgaatatcggccgttcg

SEQ ID NO: 7732 - DNA, 24 bp, synthetic construct
  misc_feature 1..24: note = Synthetic
  source 1..24: mol_type = other DNA
tgggacaactccgcaaagccgcct

SEQ ID NO: 7733 - DNA, 24 bp, synthetic construct
  misc_feature 1..24: note = Synthetic
  source 1..24: mol_type = other DNA
taatgagtaaatttactcagctcg

SEQ ID NO: 7734 - DNA, 24 bp, synthetic construct
  misc_feature 1..24: note = Synthetic
  source 1..24: mol_type = other DNA
cgccttgtacacgaacagcataat

SEQ ID NO: 7735 - DNA, 24 bp, synthetic construct
  misc_feature 1..24: note = Synthetic
  source 1..24: mol_type = other DNA
tctacgtttcagggtgtagttgac

SEQ ID NO: 7736 - DNA, 24 bp, synthetic construct
  misc_feature 1..24: note = Synthetic
  source 1..24: mol_type = other DNA
tgccacgtcccgcgctcatatatt

SEQ ID NO: 7737 - DNA, 24 bp, synthetic construct
  misc_feature 1..24: note = Synthetic
  source 1..24: mol_type = other DNA
acctggaacttaaacttagaatga

SEQ ID NO: 7738 - DNA, 24 bp, synthetic construct
  misc_feature 1..24: note = Synthetic
  source 1..24: mol_type = other DNA
actattataacatttgaaactgag

SEQ ID NO: 7739 - DNA, 24 bp, synthetic construct
  misc_feature 1..24: note = Synthetic
  source 1..24: mol_type = other DNA
ttctttaggcatagccgtaacccg

SEQ ID NO: 7740 - DNA, 24 bp, synthetic construct
  misc_feature 1..24: note = Synthetic
  source 1..24: mol_type = other DNA
ctgtcctggcatagaacagtagaa

SEQ ID NO: 7741 - DNA, 24 bp, synthetic construct
  misc_feature 1..24: note = Synthetic
  source 1..24: mol_type = other DNA
gccgcgggcgggccagtgagtcag

SEQ ID NO: 7742 - DNA, 24 bp, synthetic construct
  misc_feature 1..24: note = Synthetic
  source 1..24: mol_type = other DNA
aatgatgacctcttctatgacatg

SEQ ID NO: 7743 - DNA, 24 bp, synthetic construct
  misc_feature 1..24: note = Synthetic
  source 1..24: mol_type = other DNA
tggaagacaatactgttactttga

SEQ ID NO: 7744 - DNA, 24 bp, synthetic construct
  misc_feature 1..24: note = Synthetic
  source 1..24: mol_type = other DNA
acggaattggtgactcctataaat

SEQ ID NO: 7745 - DNA, 24 bp, synthetic construct
  misc_feature 1..24: note = Synthetic
  source 1..24: mol_type = other DNA
cgagccaaaccctcggacgtaata

SEQ ID NO: 7746 - DNA, 24 bp, synthetic construct
  misc_feature 1..24: note = Synthetic
  source 1..24: mol_type = other DNA
atggcgatatcaagtgcttaggat

SEQ ID NO: 7747 - DNA, 24 bp, synthetic construct
  misc_feature 1..24: note = Synthetic
  source 1..24: mol_type = other DNA
tctgacgcataggccctatgtgat

SEQ ID NO: 7748 - DNA, 24 bp, synthetic construct
  misc_feature 1..24: note = Synthetic
  source 1..24: mol_type = other DNA
gtctcgcagactgcgcaagagtcg

SEQ ID NO: 7749 - DNA, 24 bp, synthetic construct
  misc_feature 1..24: note = Synthetic
  source 1..24: mol_type = other DNA
tggcagggtatgatctaggaatat

SEQ ID NO: 7750 - DNA, 24 bp, synthetic construct
  misc_feature 1..24: note = Synthetic
  source 1..24: mol_type = other DNA
actgacacaagtctttcacataga

SEQ ID NO: 7751 - DNA, 24 bp, synthetic construct
  misc_feature 1..24: note = Synthetic
  source 1..24: mol_type = other DNA
gtggcctcatctgtagcatcgtgt

SEQ ID NO: 7752 - DNA, 24 bp, synthetic construct
  misc_feature 1..24: note = Synthetic
  source 1..24: mol_type = other DNA
tttgacgcttactcctgcccttca

SEQ ID NO: 7753 - DNA, 24 bp, synthetic construct
  misc_feature 1..24: note = Synthetic
  source 1..24: mol_type = other DNA
gtccgggactacacgcggactgtg

SEQ ID NO: 7754 - DNA, 24 bp, synthetic construct
  misc_feature 1..24: note = Synthetic
  source 1..24: mol_type = other DNA
cgatggagatgacggcccaacggc

SEQ ID NO: 7755 - DNA, 24 bp, synthetic construct
  misc_feature 1..24: note = Synthetic
  source 1..24: mol_type = other DNA
tcccataattagttactacgacaa

SEQ ID NO: 7756 - DNA, 24 bp, synthetic construct
  misc_feature 1..24: note = Synthetic
  source 1..24: mol_type = other DNA
gttcatgtaggacattgaacctat

SEQ ID NO: 7757 - DNA, 24 bp, synthetic construct
  misc_feature 1..24: note = Synthetic
  source 1..24: mol_type = other DNA
caatttctctatgtaatgctcgac

SEQ ID NO: 7758 - DNA, 24 bp, synthetic construct
  misc_feature 1..24: note = Synthetic
  source 1..24: mol_type = other DNA
ttgtcagtgattacgttcgtgttt

SEQ ID NO: 7759 - DNA, 24 bp, synthetic construct
  misc_feature 1..24: note = Synthetic
  source 1..24: mol_type = other DNA
taaagtaaacaacttggaactaga

SEQ ID NO: 7760 - DNA, 24 bp, synthetic construct
  misc_feature 1..24: note = Synthetic
  source 1..24: mol_type = other DNA
aatgtgcagctcgacgagttattt

SEQ ID NO: 7761 - DNA, 24 bp, synthetic construct
  misc_feature 1..24: note = Synthetic
  source 1..24: mol_type = other DNA
gttacataccctcgactattatcg

SEQ ID NO: 7762 - DNA, 24 bp, synthetic construct
  misc_feature 1..24: note = Synthetic
  source 1..24: mol_type = other DNA
aacttactgaaggttacactcgta

SEQ ID NO: 7763 - DNA, 24 bp, synthetic construct
  misc_feature 1..24: note = Synthetic
  source 1..24: mol_type = other DNA
atgcgggctcagggaaacataagg

SEQ ID NO: 7764 - DNA, 24 bp, synthetic construct
  misc_feature 1..24: note = Synthetic
  source 1..24: mol_type = other DNA
acagggagctatgcctggacgtgt

SEQ ID NO: 7765 - DNA, 24 bp, synthetic construct
  misc_feature 1..24: note = Synthetic
  source 1..24: mol_type = other DNA
aacaaagagaggcatactaaggcg

SEQ ID NO: 7766 - DNA, 24 bp, synthetic construct
  misc_feature 1..24: note = Synthetic
  source 1..24: mol_type = other DNA
aatggccatcagtccttcttagat

SEQ ID NO: 7767 - DNA, 24 bp, synthetic construct
  misc_feature 1..24: note = Synthetic
  source 1..24: mol_type = other DNA
ggcagcactaacgcctatattctt

SEQ ID NO: 7768 - DNA, 24 bp, synthetic construct
  misc_feature 1..24: note = Synthetic
  source 1..24: mol_type = other DNA
tacataacgggataggagtctgga

SEQ ID NO: 7769 - DNA, 24 bp, synthetic construct
  misc_feature 1..24: note = Synthetic
  source 1..24: mol_type = other DNA
taagtcggtctccagtgtactcgt

SEQ ID NO: 7770 - DNA, 24 bp, synthetic construct
  misc_feature 1..24: note = Synthetic
  source 1..24: mol_type = other DNA
ctaagtgatgagcattattgcctt

SEQ ID NO: 7771 - DNA, 24 bp, synthetic construct
  misc_feature 1..24: note = Synthetic
  source 1..24: mol_type = other DNA
gcgatgacgtacatatatgaacgt

SEQ ID NO: 7772 - DNA, 24 bp, synthetic construct
  misc_feature 1..24: note = Synthetic
  source 1..24: mol_type = other DNA
acgaggtcattaatcgctctcgcg

SEQ ID NO: 7773 - DNA, 24 bp, synthetic construct
  misc_feature 1..24: note = Synthetic
  source 1..24: mol_type = other DNA
acgttaaagggagtagcgagagct

SEQ ID NO: 7774 - DNA, 24 bp, synthetic construct
  misc_feature 1..24: note = Synthetic
  source 1..24: mol_type = other DNA
gctgggtcggactaagcgggtctg

SEQ ID NO: 7775 - DNA, 24 bp, synthetic construct
  misc_feature 1..24: note = Synthetic
  source 1..24: mol_type = other DNA
tcgccgcgtagcagacacgtgtga

SEQ ID NO: 7776 - DNA, 24 bp, synthetic construct
  misc_feature 1..24: note = Synthetic
  source 1..24: mol_type = other DNA
ttggccctcgggcatcgaggatgt

SEQ ID NO: 7777 - DNA, 24 bp, synthetic construct
  misc_feature 1..24: note = Synthetic
  source 1..24: mol_type = other DNA
tgagatacgtgataagttcacgtt

SEQ ID NO: 7778 - DNA, 24 bp, synthetic construct
  misc_feature 1..24: note = Synthetic
  source 1..24: mol_type = other DNA
ttccaaccgtcctgacaactgagt

SEQ ID NO: 7779 - DNA, 24 bp, synthetic construct
  misc_feature 1..24: note = Synthetic
  source 1..24: mol_type = other DNA
agattattagatgcttgcctcggt

SEQ ID NO: 7780 - DNA, 24 bp, synthetic construct
  misc_feature 1..24: note = Synthetic
  source 1..24: mol_type = other DNA
ctttcgatgatatagcggttagcc

SEQ ID NO: 7781 - DNA, 24 bp, synthetic construct
  misc_feature 1..24: note = Synthetic
  source 1..24: mol_type = other DNA
aggcgattattgtggacagagggt

SEQ ID NO: 7782 - DNA, 24 bp, synthetic construct
  misc_feature 1..24: note = Synthetic
  source 1..24: mol_type = other DNA
ggtgtatcacgtaactctgtctaa

SEQ ID NO: 7783 - DNA, 24 bp, synthetic construct
  misc_feature 1..24: note = Synthetic
  source 1..24: mol_type = other DNA
tggtcaacttcttcctgaccatct

SEQ ID NO: 7784 - DNA, 24 bp, synthetic construct
  misc_feature 1..24: note = Synthetic
  source 1..24: mol_type = other DNA
agatatccggatgtgcagaagcgg

SEQ ID NO: 7785 - DNA, 24 bp, synthetic construct
  misc_feature 1..24: note = Synthetic
  source 1..24: mol_type = other DNA
ctaacgggtgataacgcacgacca

SEQ ID NO: 7786 - DNA, 24 bp, synthetic construct
  misc_feature 1..24: note = Synthetic
  source 1..24: mol_type = other DNA
ccgctaaaccctggatgtccgact

SEQ ID NO: 7787 - DNA, 24 bp, synthetic construct
  misc_feature 1..24: note = Synthetic
  source 1..24: mol_type = other DNA
agcttccatgatcatttgcaatcc

SEQ ID NO: 7788 - DNA, 24 bp, synthetic construct
  misc_feature 1..24: note = Synthetic
  source 1..24: mol_type = other DNA
cttgccaccagtcttatcttcggg

SEQ ID NO: 7789 - DNA, 24 bp, synthetic construct
  misc_feature 1..24: note = Synthetic
  source 1..24: mol_type = other DNA
agcccacaaacatgtaccacgatg

SEQ ID NO: 7790 - DNA, 24 bp, synthetic construct
  misc_feature 1..24: note = Synthetic
  source 1..24: mol_type = other DNA
aagccacacggaagagctcaattc

SEQ ID NO: 7791 - DNA, 24 bp, synthetic construct
  misc_feature 1..24: note = Synthetic
  source 1..24: mol_type = other DNA
cataagtcaaccatcttcactccc

SEQ ID NO: 7792 - DNA, 24 bp, synthetic construct
  misc_feature 1..24: note = Synthetic
  source 1..24: mol_type = other DNA
ccgaatcccaagagttaatgcgcg

SEQ ID NO: 7793 - DNA, 24 bp, synthetic construct
  misc_feature 1..24: note = Synthetic
  source 1..24: mol_type = other DNA
cgagacaacgagttgcactccgta

SEQ ID NO: 7794 - DNA, 24 bp, synthetic construct
  misc_feature 1..24: note = Synthetic
  source 1..24: mol_type = other DNA
ggtaacccgcccatagacacggat

SEQ ID NO: 7795 - DNA, 24 bp, synthetic construct
  misc_feature 1..24: note = Synthetic
  source 1..24: mol_type = other DNA
acgacttaggcgggttatccaatg

SEQ ID NO: 7796 - DNA, 24 bp, synthetic construct
  misc_feature 1..24: note = Synthetic
  source 1..24: mol_type = other DNA
agtccctgtactgagtgcagacaa

SEQ ID NO: 7797 - DNA, 24 bp, synthetic construct
  misc_feature 1..24: note = Synthetic
  source 1..24: mol_type = other DNA
agatggtcgaatggtatcggcgca

SEQ ID NO: 7798 - DNA, 24 bp, synthetic construct
  misc_feature 1..24: note = Synthetic
  source 1..24: mol_type = other DNA
cagtaatctgaggcgccgcgagcc

SEQ ID NO: 7799 - DNA, 24 bp, synthetic construct
  misc_feature 1..24: note = Synthetic
  source 1..24: mol_type = other DNA
gaaagaacctcgagttgcggccgt

SEQ ID NO: 7800 - DNA, 24 bp, synthetic construct
  misc_feature 1..24: note = Synthetic
  source 1..24: mol_type = other DNA
gggcgactcgtctggtaccaatgt

SEQ ID NO: 7801 - DNA, 24 bp, synthetic construct
  misc_feature 1..24: note = Synthetic
  source 1..24: mol_type = other DNA
cgtagcctatacgaacttcaacaa

SEQ ID NO: 7802 - DNA, 24 bp, synthetic construct
  misc_feature 1..24: note = Synthetic
  source 1..24: mol_type = other DNA
agttatcgccgtgatctcgggata

SEQ ID NO: 7803 - DNA, 24 bp, synthetic construct
  misc_feature 1..24: note = Synthetic
  source 1..24: mol_type = other DNA
cttaaaggcgatctccacgggacc

SEQ ID NO: 7804 - DNA, 24 bp, synthetic construct
  misc_feature 1..24: note = Synthetic
  source 1..24: mol_type = other DNA
agcgtataggcttaggtcagtgac

SEQ ID NO: 7805 - DNA, 24 bp, synthetic construct
  misc_feature 1..24: note = Synthetic
  source 1..24: mol_type = other DNA
actctcggaataagggccatggag

SEQ ID NO: 7806 - DNA, 24 bp, synthetic construct
  misc_feature 1..24: note = Synthetic
  source 1..24: mol_type = other DNA
cacgccaagagtatacctgcagga

SEQ ID NO: 7807 - DNA, 24 bp, synthetic construct
  misc_feature 1..24: note = Synthetic
  source 1..24: mol_type = other DNA
cattgttgtgatttcgaggagggt

SEQ ID NO: 7808 - DNA, 24 bp, synthetic construct
  misc_feature 1..24: note = Synthetic
  source 1..24: mol_type = other DNA
agattgcgcctcagttcgacgcca

SEQ ID NO: 7809 - DNA, 24 bp, synthetic construct
  misc_feature 1..24: note = Synthetic
  source 1..24: mol_type = other DNA
aagttacgagctgtctttccaata

SEQ ID NO: 7810 - DNA, 24 bp, synthetic construct
  misc_feature 1..24: note = Synthetic
  source 1..24: mol_type = other DNA
ggactcgtgcattccagtgcagcc

SEQ ID NO: 7811 - DNA, 24 bp, synthetic construct
  misc_feature 1..24: note = Synthetic
  source 1..24: mol_type = other DNA
aaccatacagctcgaggcagtaaa

SEQ ID NO: 7812 - DNA, 24 bp, synthetic construct
  misc_feature 1..24: note = Synthetic
  source 1..24: mol_type = other DNA
aatgtaaactccgagtggcgaaga

SEQ ID NO: 7813 - DNA, 24 bp, synthetic construct
  misc_feature 1..24: note = Synthetic
  source 1..24: mol_type = other DNA
gcgaggaaagttaccagtcttgcg

SEQ ID NO: 7814 - DNA, 24 bp, synthetic construct
  misc_feature 1..24: note = Synthetic
  source 1..24: mol_type = other DNA
gggcgtaagtacaacatcgaatcg

SEQ ID NO: 7815 - DNA, 24 bp, synthetic construct
  misc_feature 1..24: note = Synthetic
  source 1..24: mol_type = other DNA
ccggcgttcacaggttcctctagg

SEQ ID NO: 7816 - DNA, 24 bp, synthetic construct
  misc_feature 1..24: note = Synthetic
  source 1..24: mol_type = other DNA
tccgcggtcgggtaagtacaatta

SEQ ID NO: 7817 - DNA, 24 bp, synthetic construct
  misc_feature 1..24: note = Synthetic
  source 1..24: mol_type = other DNA
atcatggcggtcggtacccaggtt

SEQ ID NO: 7818 - DNA, 24 bp, synthetic construct
  misc_feature 1..24: note = Synthetic
  source 1..24: mol_type = other DNA
ttcgccgcgacttactatattgag

SEQ ID NO: 7819 - DNA, 24 bp, synthetic construct
  misc_feature 1..24: note = Synthetic
  source 1..24: mol_type = other DNA
gcagtacatctaaagtatgcggcc

SEQ ID NO: 7820 - DNA, 24 bp, synthetic construct
  misc_feature 1..24: note = Synthetic
  source 1..24: mol_type = other DNA
ggagagtttgaaccttaacgaaga

SEQ ID NO: 7821 - DNA, 24 bp, synthetic construct
  misc_feature 1..24: note = Synthetic
  source 1..24: mol_type = other DNA
tgaagactttagactgattatggg

SEQ ID NO: 7822 - DNA, 24 bp, synthetic construct
  misc_feature 1..24: note = Synthetic
  source 1..24: mol_type = other DNA
gcaggctcacatatggtctgtacc

SEQ ID NO: 7823 - DNA, 24 bp, synthetic construct
  misc_feature 1..24: note = Synthetic
  source 1..24: mol_type = other DNA
aagtgataacataaacaatatatt

SEQ ID NO: 7824 - DNA, 24 bp, synthetic construct
  misc_feature 1..24: note = Synthetic
  source 1..24: mol_type = other DNA
gcgactaacacttgtagcagttta

SEQ ID NO: 7825 - DNA, 24 bp, synthetic construct
  misc_feature 1..24: note = Synthetic
  source 1..24: mol_type = other DNA
cctgaaatacctgctgaggaagtc

SEQ ID NO: 7826 - DNA, 24 bp, synthetic construct
  misc_feature 1..24: note = Synthetic
  source 1..24: mol_type = other DNA
gatgtgcccgagggatacgccgtc

SEQ ID NO: 7827 - DNA, 24 bp, synthetic construct
  misc_feature 1..24: note = Synthetic
  source 1..24: mol_type = other DNA
aatgcgtgatagaaccgatactgg

SEQ ID NO: 7828 - DNA, 24 bp, synthetic construct
  misc_feature 1..24: note = Synthetic
  source 1..24: mol_type = other DNA
aatgtgtacctggatccactcgct

SEQ ID NO: 7829 - DNA, 24 bp, synthetic construct
  misc_feature 1..24: note = Synthetic
  source 1..24: mol_type = other DNA
gcatatacgccttatcgaatgtgt

SEQ ID NO: 7830 - DNA, 24 bp, synthetic construct
  misc_feature 1..24: note = Synthetic
  source 1..24: mol_type = other DNA
tcagaacgcattgtaacgcaaggc

SEQ ID NO: 7831 - DNA, 24 bp, synthetic construct
  misc_feature 1..24: note = Synthetic
  source 1..24: mol_type = other DNA
gggccacatttacccgcaatgctc

SEQ ID NO: 7832 - DNA, 24 bp, synthetic construct
  misc_feature 1..24: note = Synthetic
  source 1..24: mol_type = other DNA
tcctaaagaggttgagtattggtc

SEQ ID NO: 7833 - DNA, 24 bp, synthetic construct
  misc_feature 1..24: note = Synthetic
  source 1..24: mol_type = other DNA
tcagcagatattaaatagatacta

SEQ ID NO: 7834 - DNA, 24 bp, synthetic construct
  misc_feature 1..24: note = Synthetic
  source 1..24: mol_type = other DNA
agggcaaactaagagggcacgacc

SEQ ID NO: 7835 - DNA, 24 bp, synthetic construct
  misc_feature 1..24: note = Synthetic
  source 1..24: mol_type = other DNA
gttccgagggaccacccgtatgac

SEQ ID NO: 7836 - DNA, 24 bp, synthetic construct
  misc_feature 1..24: note = Synthetic
  source 1..24: mol_type = other DNA
cacatgtgggacgtcaacaaatac

SEQ ID NO: 7837 - DNA, 24 bp, synthetic construct
  misc_feature 1..24: note = Synthetic
  source 1..24: mol_type = other DNA
aattatccataggtctatgagctt

SEQ ID NO: 7838 - DNA, 24 bp, synthetic construct
  misc_feature 1..24: note = Synthetic
  source 1..24: mol_type = other DNA
acgcgctagtctcaatggagaggg

SEQ ID NO: 7839 - DNA, 24 bp, synthetic construct
  misc_feature 1..24: note = Synthetic
  source 1..24: mol_type = other DNA
tcaagggacaagcctgtaccggga

SEQ ID NO: 7840 - DNA, 24 bp, synthetic construct
  misc_feature 1..24: note = Synthetic
  source 1..24: mol_type = other DNA
aattggagcaggccgcactgttac

SEQ ID NO: 7841 - DNA, 24 bp, synthetic construct
  misc_feature 1..24: note = Synthetic
  source 1..24: mol_type = other DNA
gattgtctacggctaacggttact

SEQ ID NO: 7842 - DNA, 24 bp, synthetic construct
  misc_feature 1..24: note = Synthetic
  source 1..24: mol_type = other DNA
tcctacgtgactaacgtccgtaca

SEQ ID NO: 7843 - DNA, 24 bp, synthetic construct
  misc_feature 1..24: note = Synthetic
  source 1..24: mol_type = other DNA
ctgagaatacgtcatcttcagcac

SEQ ID NO: 7844 - DNA, 24 bp, synthetic construct
  misc_feature 1..24: note = Synthetic
  source 1..24: mol_type = other DNA
accacgttcgatgagtaccgttac

SEQ ID NO: 7845 - DNA, 24 bp, synthetic construct
  misc_feature 1..24: note = Synthetic
  source 1..24: mol_type = other DNA
ccgagtggactcataactgtgcaa

SEQ ID NO: 7846 - DNA, 24 bp, synthetic construct
  misc_feature 1..24: note = Synthetic
  source 1..24: mol_type = other DNA
cacggccataattggttcagcgtg

SEQ ID NO: 7847 - DNA, 24 bp, synthetic construct
  misc_feature 1..24: note = Synthetic
  source 1..24: mol_type = other DNA
gacaatagagacagtttgacagac

SEQ ID NO: 7848 - DNA, 24 bp, synthetic construct
  misc_feature 1..24: note = Synthetic
  source 1..24: mol_type = other DNA
tagactgtggctgggaatcggtcc

SEQ ID NO: 7849 - DNA, 24 bp, synthetic construct
  misc_feature 1..24: note = Synthetic
  source 1..24: mol_type = other DNA
ggtattaatttggttgcacatcaa

SEQ ID NO: 7850 - DNA, 24 bp, synthetic construct
  misc_feature 1..24: note = Synthetic
  source 1..24: mol_type = other DNA
cagataggtaagtgtcactgatta

SEQ ID NO: 7851 - DNA, 24 bp, synthetic construct
  misc_feature 1..24: note = Synthetic
  source 1..24: mol_type = other DNA
agaccctcctcaacacaatactgt

SEQ ID NO: 7852 - DNA, 24 bp, synthetic construct
  misc_feature 1..24: note = Synthetic
  source 1..24: mol_type = other DNA
tcagttctgccgggtcacgtctcg

SEQ ID NO: 7853 - DNA, 24 bp, synthetic construct
  misc_feature 1..24: note = Synthetic
  source 1..24: mol_type = other DNA
aaagctcaacgggataatatatgg

SEQ ID NO: 7854 - DNA, 24 bp, synthetic construct
  misc_feature 1..24: note = Synthetic
  source 1..24: mol_type = other DNA
tataacccatatagactattactg

SEQ ID NO: 7855 - DNA, 24 bp, synthetic construct
  misc_feature 1..24: note = Synthetic
  source 1..24: mol_type = other DNA
ttcaaagtattgaagtgtgatagc

SEQ ID NO: 7856 - DNA, 24 bp, synthetic construct
  misc_feature 1..24: note = Synthetic
  source 1..24: mol_type = other DNA
aataggaggctactctcagtccgg

SEQ ID NO: 7857 - DNA, 24 bp, synthetic construct
  misc_feature 1..24: note = Synthetic
  source 1..24: mol_type = other DNA
tcgcgcacccatgcaatgaagaat

SEQ ID NO: 7858 - DNA, 24 bp, synthetic construct
  misc_feature 1..24: note = Synthetic
  source 1..24: mol_type = other DNA
ggacgtcgtagttaacaactctca

SEQ ID NO: 7859 - DNA, 24 bp, synthetic construct
  misc_feature 1..24: note = Synthetic
  source 1..24: mol_type = other DNA
agggtcctcggatttatagtgcaa

SEQ ID NO: 7860 - DNA, 24 bp, synthetic construct
  misc_feature 1..24: note = Synthetic
  source 1..24: mol_type = other DNA
ccctgcctacgtcgaagcgtcgcg

SEQ ID NO: 7861 - DNA, 24 bp, synthetic construct
  misc_feature 1..24: note = Synthetic
  source 1..24: mol_type = other DNA
aacggcctcgttcgtacaaggacc

SEQ ID NO: 7862 - DNA, 24 bp, synthetic construct
  misc_feature 1..24: note = Synthetic
  source 1..24: mol_type = other DNA
ttccaagagggcctgtttacgtct

SEQ ID NO: 7863 - DNA, 24 bp, synthetic construct
  misc_feature 1..24: note = Synthetic
  source 1..24: mol_type = other DNA
ctctaagtagattaaatcagggta

SEQ ID NO: 7864 - DNA, 24 bp, synthetic construct
  misc_feature 1..24: note = Synthetic
  source 1..24: mol_type = other DNA
gttcttcgagtaacaatcctgcag

SEQ ID NO: 7865 - DNA, 24 bp, synthetic construct
  misc_feature 1..24: note = Synthetic
  source 1..24: mol_type = other DNA
cgactaaatatgcttcccacgtgc

SEQ ID NO: 7866 - DNA, 24 bp, synthetic construct
  misc_feature 1..24: note = Synthetic
  source 1..24: mol_type = other DNA
ataggtccgagaattcaaccgcct

SEQ ID NO: 7867 - DNA, 24 bp, synthetic construct
  misc_feature 1..24: note = Synthetic
  source 1..24: mol_type = other DNA
tagatattaagcaacgggctgtta

SEQ ID NO: 7868 - DNA, 24 bp, synthetic construct
  misc_feature 1..24: note = Synthetic
  source 1..24: mol_type = other DNA
gagccacagttcgccacgagctat

SEQ ID NO: 7869 - DNA, 24 bp, synthetic construct
  misc_feature 1..24: note = Synthetic
  source 1..24: mol_type = other DNA
aacgcgatcatcctgtaagcctaa

SEQ ID NO: 7870 - DNA, 24 bp, synthetic construct
  misc_feature 1..24: note = Synthetic
  source 1..24: mol_type = other DNA
agaaccatgaagcggatttactga

SEQ ID NO: 7871 - DNA, 24 bp, synthetic construct
  misc_feature 1..24: note = Synthetic
  source 1..24: mol_type = other DNA
ccatgaggtaggccaagtgaccca

SEQ ID NO: 7872 - DNA, 24 bp, synthetic construct
  misc_feature 1..24: note = Synthetic
  source 1..24: mol_type = other DNA
acgagccctgcgatgtcgagtata

SEQ ID NO: 7873 - DNA, 24 bp, synthetic construct
  misc_feature 1..24: note = Synthetic
  source 1..24: mol_type = other DNA
gccgcacgagctacgtcgcataga

SEQ ID NO: 7874 - DNA, 24 bp, synthetic construct
  misc_feature 1..24: note = Synthetic
  source 1..24: mol_type = other DNA
tccggcattagctaatattcccac

SEQ ID NO: 7875 - DNA, 24 bp, synthetic construct
  misc_feature 1..24: note = Synthetic
  source 1..24: mol_type = other DNA
gtgctcgaccaacgcagatgccta

SEQ ID NO: 7876 - DNA, 24 bp, synthetic construct
  misc_feature 1..24: note = Synthetic
  source 1..24: mol_type = other DNA
gcacttaatcaatccacgtcaaga

SEQ ID NO: 7877 - DNA, 24 bp, synthetic construct
  misc_feature 1..24: note = Synthetic
  source 1..24: mol_type = other DNA
cagcgctagattggcaccgctgta

SEQ ID NO: 7878 - DNA, 24 bp, synthetic construct
  misc_feature 1..24: note = Synthetic
  source 1..24: mol_type = other DNA
gcctccagttctggtgtagacgaa

SEQ ID NO: 7879 - DNA, 24 bp, synthetic construct
  misc_feature 1..24: note = Synthetic
  source 1..24: mol_type = other DNA
cctgtttccgattcaggaggagga

SEQ ID NO: 7880 - DNA, 24 bp, synthetic construct
  misc_feature 1..24: note = Synthetic
  source 1..24: mol_type = other DNA
gtcattcttgcaggttgtgttcct

SEQ ID NO: 7881 - DNA, 24 bp, synthetic construct
  misc_feature 1..24: note = Synthetic
  source 1..24: mol_type = other DNA
taagaaagagatttagcgtcttgg

SEQ ID NO: 7882 - DNA, 24 bp, synthetic construct
  misc_feature 1..24: note = Synthetic
  source 1..24: mol_type = other DNA
tcacgcgctgacaggcctattgca

SEQ ID NO: 7883 - DNA, 24 bp, synthetic construct
  misc_feature 1..24: note = Synthetic
  source 1..24: mol_type = other DNA
tggaattcgcgccggagcctagag

SEQ ID NO: 7884 - DNA, 24 bp, synthetic construct
  misc_feature 1..24: note = Synthetic
  source 1..24: mol_type = other DNA
acatccatctgtcaattaggagct

SEQ ID NO: 7885 - DNA, 24 bp, synthetic construct
  misc_feature 1..24: note = Synthetic
  source 1..24: mol_type = other DNA
tgtgaggcacgaagtgccaacttg

SEQ ID NO: 7886 - DNA, 24 bp, synthetic construct
  misc_feature 1..24: note = Synthetic
  source 1..24: mol_type = other DNA
cactgtctcatcctgtctggctgg

SEQ ID NO: 7887 - DNA, 24 bp, synthetic construct
  misc_feature 1..24: note = Synthetic
  source 1..24: mol_type = other DNA
ccagagtaagtatagcgaaattaa

SEQ ID NO: 7888 - DNA, 24 bp, synthetic construct
  misc_feature 1..24: note = Synthetic
  source 1..24: mol_type = other DNA
ggaagtcggcctgtggacttgtct

SEQ ID NO: 7889 - DNA, 24 bp, synthetic construct
  misc_feature 1..24: note = Synthetic
  source 1..24: mol_type = other DNA
ggatgagcgacacttctaacagcc

SEQ ID NO: 7890 - DNA, 24 bp, synthetic construct
  misc_feature 1..24: note = Synthetic
  source 1..24: mol_type = other DNA
cttatagccattggctcttctcac

SEQ ID NO: 7891 - DNA, 24 bp, synthetic construct
  misc_feature 1..24: note = Synthetic
  source 1..24: mol_type = other DNA
agcgactttgggattggtgggacg

SEQ ID NO: 7892 - DNA, 24 bp, synthetic construct
  misc_feature 1..24: note = Synthetic
  source 1..24: mol_type = other DNA
ccagctagccagataatacagaag

SEQ ID NO: 7893 - DNA, 24 bp, synthetic construct
  misc_feature 1..24: note = Synthetic
  source 1..24: mol_type = other DNA
tgcataggccttgtattgcttgtt

SEQ ID NO: 7894 - DNA, 24 bp, synthetic construct
  misc_feature 1..24: note = Synthetic
  source 1..24: mol_type = other DNA
cggatgtctagatcctccagacgt

SEQ ID NO: 7895 - DNA, 24 bp, synthetic construct
  misc_feature 1..24: note = Synthetic
  source 1..24: mol_type = other DNA
tgcacggtggccaataacggagac

SEQ ID NO: 7896 - DNA, 24 bp, synthetic construct
  misc_feature 1..24: note = Synthetic
  source 1..24: mol_type = other DNA
catatacagctgggagttacccaa

SEQ ID NO: 7897 - DNA, 24 bp, synthetic construct
  misc_feature 1..24: note = Synthetic
  source 1..24: mol_type = other DNA
ctggtaatcgcgcataaccaaaca

SEQ ID NO: 7898 - DNA, 24 bp, synthetic construct
  misc_feature 1..24: note = Synthetic
  source 1..24: mol_type = other DNA
cggaggcggttcactccgctagga

SEQ ID NO: 7899 - DNA, 24 bp, synthetic construct
  misc_feature 1..24: note = Synthetic
  source 1..24: mol_type = other DNA
gaatttccagctcttggaatggcc

SEQ ID NO: 7900 - DNA, 24 bp, synthetic construct
  misc_feature 1..24: note = Synthetic
  source 1..24: mol_type = other DNA
tacactgtagccgcatagatgcga

SEQ ID NO: 7901 - DNA, 24 bp, synthetic construct
  misc_feature 1..24: note = Synthetic
  source 1..24: mol_type = other DNA
acgtgagcttcatttcggtagtcg

SEQ ID NO: 7902 - DNA, 24 bp, synthetic construct
  misc_feature 1..24: note = Synthetic
  source 1..24: mol_type = other DNA
taaactaaggaccatgtagtatag

SEQ ID NO: 7903 - DNA, 24 bp, synthetic construct
  misc_feature 1..24: note = Synthetic
  source 1..24: mol_type = other DNA
aggaagtgcttatgaacgatttac

SEQ ID NO: 7904 - DNA, 24 bp, synthetic construct
  misc_feature 1..24: note = Synthetic
  source 1..24: mol_type = other DNA
cgtcgactaaacgtgacgggctgt

SEQ ID NO: 7905 - DNA, 24 bp, synthetic construct
  misc_feature 1..24: note = Synthetic
  source 1..24: mol_type = other DNA
cagtacttcatttccgattgcaga

SEQ ID NO: 7906 - DNA, 24 bp, synthetic construct
  misc_feature 1..24: note = Synthetic
  source 1..24: mol_type = other DNA
aattattcacgggtgagccgtcta

SEQ ID NO: 7907 - DNA, 24 bp, synthetic construct
  misc_feature 1..24: note = Synthetic
  source 1..24: mol_type = other DNA
gcccagtccgagccacctgattgt

SEQ ID NO: 7908 - DNA, 24 bp, synthetic construct
  misc_feature 1..24: note = Synthetic
  source 1..24: mol_type = other DNA
attcccagatagtcgctttgagca

SEQ ID NO: 7909 - DNA, 24 bp, synthetic construct
  misc_feature 1..24: note = Synthetic
  source 1..24: mol_type = other DNA
ctgtccctatgttgtgaaggaata

SEQ ID NO: 7910 - DNA, 24 bp, synthetic construct
  misc_feature 1..24: note = Synthetic
  source 1..24: mol_type = other DNA
gaggaaacacatcgacctggcctt

SEQ ID NO: 7911 - DNA, 24 bp, synthetic construct
  misc_feature 1..24: note = Synthetic
  source 1..24: mol_type = other DNA
agcatagtgaacaagtatggagtc

SEQ ID NO: 7912 - DNA, 24 bp, synthetic construct
  misc_feature 1..24: note = Synthetic
  source 1..24: mol_type = other DNA
gtgcgctttgcttcaccggaacgt

SEQ ID NO: 7913 - DNA, 24 bp, synthetic construct
  misc_feature 1..24: note = Synthetic
  source 1..24: mol_type = other DNA
actcgcagtactgggtgtaaccta

SEQ ID NO: 7914 - DNA, 24 bp, synthetic construct
  misc_feature 1..24: note = Synthetic
  source 1..24: mol_type = other DNA
ctatggaaccagggcgccgacgtg

SEQ ID NO: 7915 - DNA, 24 bp, synthetic construct
  misc_feature 1..24: note = Synthetic
  source 1..24: mol_type = other DNA
ggacgatgcagtagtttacaattg

SEQ ID NO: 7916 - DNA, 24 bp, synthetic construct
  misc_feature 1..24: note = Synthetic
  source 1..24: mol_type = other DNA
gccatggacacctagcaacaagct

SEQ ID NO: 7917 - DNA, 24 bp, synthetic construct
  misc_feature 1..24: note = Synthetic
  source 1..24: mol_type = other DNA
cggcaaacttaactgtacctggtg

SEQ ID NO: 7918 - DNA, 24 bp, synthetic construct
  misc_feature 1..24: note = Synthetic
  source 1..24: mol_type = other DNA
cgttaccacttacggtttcgtcag

SEQ ID NO: 7919 - DNA, 24 bp, synthetic construct
  misc_feature 1..24: note = Synthetic
  source 1..24: mol_type = other DNA
ctcgccacaatacacgcagtagat

SEQ ID NO: 7920 - DNA, 24 bp, synthetic construct
  misc_feature 1..24: note = Synthetic
  source 1..24: mol_type = other DNA
gttagtttggcggcgcattctcct

SEQ ID NO: 7921 - DNA, 24 bp, synthetic construct
  misc_feature 1..24: note = Synthetic
  source 1..24: mol_type = other DNA
ggtcagagaggtcagtatcgaact

SEQ ID NO: 7922 - DNA, 24 bp, synthetic construct
  misc_feature 1..24: note = Synthetic
  source 1..24: mol_type = other DNA
caccaacggctcatcattagccca

SEQ ID NO: 7923 - DNA, 24 bp, synthetic construct
  misc_feature 1..24: note = Synthetic
  source 1..24: mol_type = other DNA
atttatacgttcccagtacgaggt

SEQ ID NO: 7924 - DNA, 24 bp, synthetic construct
  misc_feature 1..24: note = Synthetic
  source 1..24: mol_type = other DNA
ggttcgcgggcgactcacaattat

SEQ ID NO: 7925 - DNA, 24 bp, synthetic construct
  misc_feature 1..24: note = Synthetic
  source 1..24: mol_type = other DNA
atcggatgcccatcggaagctatg

SEQ ID NO: 7926 - DNA, 24 bp, synthetic construct
  misc_feature 1..24: note = Synthetic
  source 1..24: mol_type = other DNA
ttaatgactccgcaatagtttctg

SEQ ID NO: 7927 - DNA, 24 bp, synthetic construct
  misc_feature 1..24: note = Synthetic
  source 1..24: mol_type = other DNA
taccagtaatctggacgtatcgtt

SEQ ID NO: 7928 - DNA, 24 bp, synthetic construct
  misc_feature 1..24: note = Synthetic
  source 1..24: mol_type = other DNA
tgactgctacggactcttcccatt

SEQ ID NO: 7929 - DNA, 24 bp, synthetic construct
  misc_feature 1..24: note = Synthetic
  source 1..24: mol_type = other DNA
cgctataatccggcctggtattat

SEQ ID NO: 7930 - DNA, 24 bp, synthetic construct
  misc_feature 1..24: note = Synthetic
  source 1..24: mol_type = other DNA
tatccgttaaccgtctaatcgaaa

SEQ ID NO: 7931 - DNA, 24 bp, synthetic construct
  misc_feature 1..24: note = Synthetic
  source 1..24: mol_type = other DNA
acacaacgcgggtcaaacccttct

SEQ ID NO: 7932 - DNA, 24 bp, synthetic construct
  misc_feature 1..24: note = Synthetic
  source 1..24: mol_type = other DNA
gagggcaaatcttgcaaatccgct

SEQ ID NO: 7933 - DNA, 24 bp, synthetic construct
  misc_feature 1..24: note = Synthetic
  source 1..24: mol_type = other DNA
gaataagaagtacagtccattgag

SEQ ID NO: 7934 - DNA, 24 bp, synthetic construct
  misc_feature 1..24: note = Synthetic
  source 1..24: mol_type = other DNA
gggagccggtgtggaacgactagc

SEQ ID NO: 7935 - DNA, 24 bp, synthetic construct
  misc_feature 1..24: note = Synthetic
  source 1..24: mol_type = other DNA
ctagcgtcagcctggcttcagttc

SEQ ID NO: 7936 - DNA, 24 bp, synthetic construct
  misc_feature 1..24: note = Synthetic
  source 1..24: mol_type = other DNA
gatacatgcatatccctcaattag

SEQ ID NO: 7937 - DNA, 24 bp, synthetic construct
  misc_feature 1..24: note = Synthetic
  source 1..24: mol_type = other DNA
gctaagtgggtatttcgtgatgca

SEQ ID NO: 7938 - DNA, 24 bp, synthetic construct
  misc_feature 1..24: note = Synthetic
  source 1..24: mol_type = other DNA
agtcttgaaccttctttaagtatt

SEQ ID NO: 7939 - DNA, 24 bp, synthetic construct
  misc_feature 1..24: note = Synthetic
  source 1..24: mol_type = other DNA
gtgggcagatcactgttgtaaacg

SEQ ID NO: 7940 - DNA, 24 bp, synthetic construct
  misc_feature 1..24: note = Synthetic
  source 1..24: mol_type = other DNA
gaccgagtcaacaggttccgtaaa

SEQ ID NO: 7941 - DNA, 24 bp, synthetic construct
  misc_feature 1..24: note = Synthetic
  source 1..24: mol_type = other DNA
tctgcatacattacggtgttgtac

SEQ ID NO: 7942 - DNA, 24 bp, synthetic construct
  misc_feature 1..24: note = Synthetic
  source 1..24: mol_type = other DNA
ggcggtatttgctggcattgttga

SEQ ID NO: 7943 - DNA, 24 bp, synthetic construct
  misc_feature 1..24: note = Synthetic
  source 1..24: mol_type = other DNA
ccaggaagagggttaacccacagc

SEQ ID NO: 7944 - DNA, 24 bp, synthetic construct
  misc_feature 1..24: note = Synthetic
  source 1..24: mol_type = other DNA
agatagccagaacaaatttcccga

SEQ ID NO: 7945 - DNA, 24 bp, synthetic construct
  misc_feature 1..24: note = Synthetic
  source 1..24: mol_type = other DNA
ggtccaacggaaggtacgtatcat

SEQ ID NO: 7946 - DNA, 24 bp, synthetic construct
  misc_feature 1..24: note = Synthetic
  source 1..24: mol_type = other DNA
gaatgatgctccttgtatcactta

SEQ ID NO: 7947 - DNA, 24 bp, synthetic construct
  misc_feature 1..24: note = Synthetic
  source 1..24: mol_type = other DNA
gctccacgtgcccaccagagaccc

SEQ ID NO: 7948 - DNA, 24 bp, synthetic construct
  misc_feature 1..24: note = Synthetic
  source 1..24: mol_type = other DNA
taatgagaaaggtagtgaagccgc

SEQ ID NO: 7949 - DNA, 24 bp, synthetic construct
  misc_feature 1..24: note = Synthetic
  source 1..24: mol_type = other DNA
atcagccggtgaaggcaagatggg

SEQ ID NO: 7950 - DNA, 24 bp, synthetic construct
  misc_feature 1..24: note = Synthetic
  source 1..24: mol_type = other DNA
ttctggttgctaattctgtgcata

SEQ ID NO: 7951 - DNA, 24 bp, synthetic construct
  misc_feature 1..24: note = Synthetic
  source 1..24: mol_type = other DNA
ggaacgacgatgcggtatcacccg

SEQ ID NO: 7952 - DNA, 24 bp, synthetic construct
  misc_feature 1..24: note = Synthetic
  source 1..24: mol_type = other DNA
cgcgttacattataccctcgtacc

SEQ ID NO: 7953 - DNA, 24 bp, synthetic construct
  misc_feature 1..24: note = Synthetic
  source 1..24: mol_type = other DNA
ctactcgaccagaaacgcgtatgc

SEQ ID NO: 7954 - DNA, 24 bp, synthetic construct
  misc_feature 1..24: note = Synthetic
  source 1..24: mol_type = other DNA
acctggctccactacggctctccc

SEQ ID NO: 7955 - DNA, 24 bp, synthetic construct
  misc_feature 1..24: note = Synthetic
  source 1..24: mol_type = other DNA
ttagctgtgttgttccgtttgccg

SEQ ID NO: 7956 - DNA, 24 bp, synthetic construct
  misc_feature 1..24: note = Synthetic
  source 1..24: mol_type = other DNA
cacccatccaacgatttgcgtatg

SEQ ID NO: 7957 - DNA, 24 bp, synthetic construct
  misc_feature 1..24: note = Synthetic
  source 1..24: mol_type = other DNA
gaagacatagctattgttgagaga

SEQ ID NO: 7958 - DNA, 24 bp, synthetic construct
  misc_feature 1..24: note = Synthetic
  source 1..24: mol_type = other DNA
aaagatctgccacccaattgccct

SEQ ID NO: 7959 - DNA, 24 bp, synthetic construct
  misc_feature 1..24: note = Synthetic
  source 1..24: mol_type = other DNA
gccgcgacctgtgcctgtgcggaa

SEQ ID NO: 7960 - DNA, 24 bp, synthetic construct
  misc_feature 1..24: note = Synthetic
  source 1..24: mol_type = other DNA
ccggtcttacaagaggaaactaga

SEQ ID NO: 7961 - DNA, 24 bp, synthetic construct
  misc_feature 1..24: note = Synthetic
  source 1..24: mol_type = other DNA
ccgttgttccgacttactggacaa

SEQ ID NO: 7962 - DNA, 24 bp, synthetic construct
  misc_feature 1..24: note = Synthetic
  source 1..24: mol_type = other DNA
atgaggctcagctcatcacatcga

SEQ ID NO: 7963 - DNA, 24 bp, synthetic construct
  misc_feature 1..24: note = Synthetic
  source 1..24: mol_type = other DNA
ctcagtattgggctaagttgggtg

SEQ ID NO: 7964 - DNA, 24 bp, synthetic construct
  misc_feature 1..24: note = Synthetic
  source 1..24: mol_type = other DNA
gcactaccgtcgaggaagtcaaca

SEQ ID NO: 7965 - DNA, 24 bp, synthetic construct
  misc_feature 1..24: note = Synthetic
  source 1..24: mol_type = other DNA
ccagctcggcctttaggatcactt

SEQ ID NO: 7966 - DNA, 24 bp, synthetic construct
  misc_feature 1..24: note = Synthetic
  source 1..24: mol_type = other DNA
tttcctggttgcaaacaaagtgga

SEQ ID NO: 7967 - DNA, 24 bp, synthetic construct
  misc_feature 1..24: note = Synthetic
  source 1..24: mol_type = other DNA
gaaagaatgaacctccagtgaaag

SEQ ID NO: 7968 - DNA, 24 bp, synthetic construct
  misc_feature 1..24: note = Synthetic
  source 1..24: mol_type = other DNA
cccgctagccagttccactcacat

SEQ ID NO: 7969 - DNA, 24 bp, synthetic construct
  misc_feature 1..24: note = Synthetic
  source 1..24: mol_type = other DNA
agccttcgttaggcatgatgccag

SEQ ID NO: 7970 - DNA, 24 bp, synthetic construct
  misc_feature 1..24: note = Synthetic
  source 1..24: mol_type = other DNA
cttatgcgagagaagccgcgtacg

SEQ ID NO: 7971 - DNA, 24 bp, synthetic construct
  misc_feature 1..24: note = Synthetic
  source 1..24: mol_type = other DNA
tcatgatgcggtcagagcaagccg

SEQ ID NO: 7972 - DNA, 24 bp, synthetic construct
  misc_feature 1..24: note = Synthetic
  source 1..24: mol_type = other DNA
attagcaacggcagaatctgtggg

SEQ ID NO: 7973 - DNA, 24 bp, synthetic construct
  misc_feature 1..24: note = Synthetic
  source 1..24: mol_type = other DNA
actccagatgagagaacatcatat

SEQ ID NO: 7974 - DNA, 24 bp, synthetic construct
  misc_feature 1..24: note = Synthetic
  source 1..24: mol_type = other DNA
ttggtcgtagtaccctagcgccaa

SEQ ID NO: 7975 - DNA, 24 bp, synthetic construct
  misc_feature 1..24: note = Synthetic
  source 1..24: mol_type = other DNA
cttatattccggtgctggagctcc

SEQ ID NO: 7976 - DNA, 24 bp, synthetic construct
  misc_feature 1..24: note = Synthetic
  source 1..24: mol_type = other DNA
tcagcgaccgggacgtcaatgcaa

SEQ ID NO: 7977 - DNA, 24 bp, synthetic construct
  misc_feature 1..24: note = Synthetic
  source 1..24: mol_type = other DNA
tctgggcgccataacacacgtgtc

SEQ ID NO: 7978 - DNA, 24 bp, synthetic construct
  misc_feature 1..24: note = Synthetic
  source 1..24: mol_type = other DNA
gattgaacggtacacgggctggca

SEQ ID NO: 7979 - DNA, 24 bp, synthetic construct
  misc_feature 1..24: note = Synthetic
  source 1..24: mol_type = other DNA
gaacgccgggaggtggtcggtcgg

SEQ ID NO: 7980 - DNA, 24 bp, synthetic construct
  misc_feature 1..24: note = Synthetic
  source 1..24: mol_type = other DNA
tagcatgcgtctgagtcaagtatt

SEQ ID NO: 7981 - DNA, 24 bp, synthetic construct
  misc_feature 1..24: note = Synthetic
  source 1..24: mol_type = other DNA
gctcacggtctatccgtggaaaca

SEQ ID NO: 7982 - DNA, 24 bp, synthetic construct
  misc_feature 1..24: note = Synthetic
  source 1..24: mol_type = other DNA
agggatgccctactatattactcc

SEQ ID NO: 7983 - DNA, 24 bp, synthetic construct
  misc_feature 1..24: note = Synthetic
  source 1..24: mol_type = other DNA
gcatgggaagtggacacgtacgca

SEQ ID NO: 7984 - DNA, 24 bp, synthetic construct
  misc_feature 1..24: note = Synthetic
  source 1..24: mol_type = other DNA
cagtctgggccgtcgtgcccagtt

SEQ ID NO: 7985 - DNA, 24 bp, synthetic construct
  misc_feature 1..24: note = Synthetic
  source 1..24: mol_type = other DNA
ccactcttatcgtatatttcacgt

SEQ ID NO: 7986 - DNA, 24 bp, synthetic construct
  misc_feature 1..24: note = Synthetic
  source 1..24: mol_type = other DNA
tccgcggaatacagtggtctgtct

SEQ ID NO: 7987 - DNA, 24 bp, synthetic construct
  misc_feature 1..24: note = Synthetic
  source 1..24: mol_type = other DNA
acgtccgattgagccatcagggtt

SEQ ID NO: 7988 - DNA, 24 bp, synthetic construct
  misc_feature 1..24: note = Synthetic
  source 1..24: mol_type = other DNA
gtaagtcgtgttcctaggtatcct

SEQ ID NO: 7989 - DNA, 24 bp, synthetic construct
  misc_feature 1..24: note = Synthetic
  source 1..24: mol_type = other DNA
gaggagacgctttgacgtgcagtt

SEQ ID NO: 7990 - DNA, 24 bp, synthetic construct
  misc_feature 1..24: note = Synthetic
  source 1..24: mol_type = other DNA
ccggtgttcaccgggtacgagcct

SEQ ID NO: 7991 - DNA, 24 bp, synthetic construct
  misc_feature 1..24: note = Synthetic
  source 1..24: mol_type = other DNA
ccatacgcgaaagcaatcaacaca

SEQ ID NO: 7992 - DNA, 24 bp, synthetic construct
  misc_feature 1..24: note = Synthetic
  source 1..24: mol_type = other DNA
caggtcagatgtagcatgcgaatt

SEQ ID NO: 7993 - DNA, 24 bp, synthetic construct
  misc_feature 1..24: note = Synthetic
  source 1..24: mol_type = other DNA
acacagggcagctcagtaacactc

SEQ ID NO: 7994 - DNA, 24 bp, synthetic construct
  misc_feature 1..24: note = Synthetic
  source 1..24: mol_type = other DNA
ttcagaactctagaagaatccagc

SEQ ID NO: 7995 - DNA, 24 bp, synthetic construct
  misc_feature 1..24: note = Synthetic
  source 1..24: mol_type = other DNA
gtctacctgctgccttggttctct

SEQ ID NO: 7996 - DNA, 24 bp, synthetic construct
  misc_feature 1..24: note = Synthetic
  source 1..24: mol_type = other DNA
tgagatgactattcgcccgttatg

SEQ ID NO: 7997 - DNA, 24 bp, synthetic construct
  misc_feature 1..24: note = Synthetic
  source 1..24: mol_type = other DNA
gttgcgcgacgccgagccggttct

SEQ ID NO: 7998 - DNA, 24 bp, synthetic construct
  misc_feature 1..24: note = Synthetic
  source 1..24: mol_type = other DNA
ggttaatgaagtcgctgggtcccg

SEQ ID NO: 7999 - DNA, 24 bp, synthetic construct
  misc_feature 1..24: note = Synthetic
  source 1..24: mol_type = other DNA
tttatctatgagggttcccggtga

SEQ ID NO: 8000 - DNA, 24 bp, synthetic construct
  misc_feature 1..24: note = Synthetic
  source 1..24: mol_type = other DNA
tcgcagtaggatccctcggcaagg

SEQ ID NO: 8001 - DNA, 24 bp, synthetic construct
  misc_feature 1..24: note = Synthetic
  source 1..24: mol_type = other DNA
cgcctacttccacagtcggaatcc

SEQ ID NO: 8002 - DNA, 24 bp, synthetic construct
  misc_feature 1..24: note = Synthetic
  source 1..24: mol_type = other DNA
ttccaatcgcccattcacctttac

SEQ ID NO: 8003 - DNA, 24 bp, synthetic construct
  misc_feature 1..24: note = Synthetic
  source 1..24: mol_type = other DNA
acgaacttctggtctgtataagct

SEQ ID NO: 8004 - DNA, 24 bp, synthetic construct
  misc_feature 1..24: note = Synthetic
  source 1..24: mol_type = other DNA
gtctctgcgaagactggagtagct

SEQ ID NO: 8005 - DNA, 24 bp, synthetic construct
  misc_feature 1..24: note = Synthetic
  source 1..24: mol_type = other DNA
tctacatgtctaattgccagttct

SEQ ID NO: 8006 - DNA, 24 bp, synthetic construct
  misc_feature 1..24: note = Synthetic
  source 1..24: mol_type = other DNA
ttcagttcgacacgcacttcactc

SEQ ID NO: 8007 - DNA, 24 bp, synthetic construct
  misc_feature 1..24: note = Synthetic
  source 1..24: mol_type = other DNA
tgacaacccatttgaagtgcagct

SEQ ID NO: 8008 - DNA, 24 bp, synthetic construct
  misc_feature 1..24: note = Synthetic
  source 1..24: mol_type = other DNA
ctgattatgccgtattcttgctat

SEQ ID NO: 8009 - DNA, 24 bp, synthetic construct
  misc_feature 1..24: note = Synthetic
  source 1..24: mol_type = other DNA
catcggcgatacccttgcttaaga

SEQ ID NO: 8010 - DNA, 24 bp, synthetic construct
  misc_feature 1..24: note = Synthetic
  source 1..24: mol_type = other DNA
cactgctttacaagaggatcccgc

SEQ ID NO: 8011 - DNA, 24 bp, synthetic construct
  misc_feature 1..24: note = Synthetic
  source 1..24: mol_type = other DNA
ataggcgctattcctccgagggct

SEQ ID NO: 8012 - DNA, 24 bp, synthetic construct
  misc_feature 1..24: note = Synthetic
  source 1..24: mol_type = other DNA
ggtaggcgtgttatcaattccaac

SEQ ID NO: 8013 - DNA, 24 bp, synthetic construct
  misc_feature 1..24: note = Synthetic
  source 1..24: mol_type = other DNA
tgaaggcgacctcttcccgtaata

SEQ ID NO: 8014 - DNA, 24 bp, synthetic construct
  misc_feature 1..24: note = Synthetic
  source 1..24: mol_type = other DNA
tgtcaaatcacgaccctgagtgca

SEQ ID NO: 8015 - DNA, 24 bp, synthetic construct
  misc_feature 1..24: note = Synthetic
  source 1..24: mol_type = other DNA
tatgtatactagtcgacagcggac

SEQ ID NO: 8016 - DNA, 24 bp, synthetic construct
  misc_feature 1..24: note = Synthetic
  source 1..24: mol_type = other DNA
cgtattgtgtgaggcgattggata

SEQ ID NO: 8017 - DNA, 24 bp, synthetic construct
  misc_feature 1..24: note = Synthetic
  source 1..24: mol_type = other DNA
tacagcgagcgacggtcgttgagg

SEQ ID NO: 8018 - DNA, 24 bp, synthetic construct
  misc_feature 1..24: note = Synthetic
  source 1..24: mol_type = other DNA
gatgccgatggtcccatattacgt

SEQ ID NO: 8019 - DNA, 24 bp, synthetic construct
  misc_feature 1..24: note = Synthetic
  source 1..24: mol_type = other DNA
cctgaacacataatgtcttgggtt

SEQ ID NO: 8020 - DNA, 24 bp, synthetic construct
  misc_feature 1..24: note = Synthetic
  source 1..24: mol_type = other DNA
acgaggcgctgcgatgttgatcat

SEQ ID NO: 8021 - DNA, 24 bp, synthetic construct
  misc_feature 1..24: note = Synthetic
  source 1..24: mol_type = other DNA
gaagatactctttggacatcctgc

SEQ ID NO: 8022 - DNA, 24 bp, synthetic construct
  misc_feature 1..24: note = Synthetic
  source 1..24: mol_type = other DNA
tcactgtctgggcccgctaggctg

SEQ ID NO: 8023 - DNA, 24 bp, synthetic construct
  misc_feature 1..24: note = Synthetic
  source 1..24: mol_type = other DNA
atcatacggagataaattattgca

SEQ ID NO: 8024 - DNA, 24 bp, synthetic construct
  misc_feature 1..24: note = Synthetic
  source 1..24: mol_type = other DNA
cttcaaccgaataagataacttag

SEQ ID NO: 8025 - DNA, 24 bp, synthetic construct
  misc_feature 1..24: note = Synthetic
  source 1..24: mol_type = other DNA
ctaccgtgcacataacttaagcac

SEQ ID NO: 8026 - DNA, 24 bp, synthetic construct
  misc_feature 1..24: note = Synthetic
  source 1..24: mol_type = other DNA
agcgcaccgggcaaacttcataca

SEQ ID NO: 8027 - DNA, 24 bp, synthetic construct
  misc_feature 1..24: note = Synthetic
  source 1..24: mol_type = other DNA
attgaactaacacgcaagcatgga

SEQ ID NO: 8028 - DNA, 24 bp, synthetic construct
  misc_feature 1..24: note = Synthetic
  source 1..24: mol_type = other DNA
ctgtattaagcgtgcagcaatggg

SEQ ID NO: 8029 - DNA, 24 bp, synthetic construct
  misc_feature 1..24: note = Synthetic
  source 1..24: mol_type = other DNA
ttaaagggcctaaatagaccattt

SEQ ID NO: 8030 - DNA, 24 bp, synthetic construct
  misc_feature 1..24: note = Synthetic
  source 1..24: mol_type = other DNA
attcgagaatcctcgtaactaatg

SEQ ID NO: 8031 - DNA, 24 bp, synthetic construct
  misc_feature 1..24: note = Synthetic
  source 1..24: mol_type = other DNA
gcggtatgactcagatagggcgag

SEQ ID NO: 8032 - DNA, 24 bp, synthetic construct
  misc_feature 1..24: note = Synthetic
  source 1..24: mol_type = other DNA
ctatcgttccgtaatgtttacatg

SEQ ID NO: 8033 - DNA, 24 bp, synthetic construct
  misc_feature 1..24: note = Synthetic
  source 1..24: mol_type = other DNA
accgtgtccgctacacgcaaatat

SEQ ID NO: 8034 - DNA, 24 bp, synthetic construct
  misc_feature 1..24: note = Synthetic
  source 1..24: mol_type = other DNA
aatcaatcgctccacatagtggtc

SEQ ID NO: 8035 - DNA, 24 bp, synthetic construct
  misc_feature 1..24: note = Synthetic
  source 1..24: mol_type = other DNA
ctgattcagcttgacgagcttgtt

SEQ ID NO: 8036 - DNA, 24 bp, synthetic construct
  misc_feature 1..24: note = Synthetic
  source 1..24: mol_type = other DNA
ttcttctgcaggagttcggtattg

SEQ ID NO: 8037 - DNA, 24 bp, synthetic construct
  misc_feature 1..24: note = Synthetic
  source 1..24: mol_type = other DNA
gtgcccattagcaacacatggcct

SEQ ID NO: 8038 - DNA, 24 bp, synthetic construct
  misc_feature 1..24: note = Synthetic
  source 1..24: mol_type = other DNA
caagactagtacgtccgtattgtt

SEQ ID NO: 8039 - DNA, 24 bp, synthetic construct
  misc_feature 1..24: note = Synthetic
  source 1..24: mol_type = other DNA
cttaagtcatggcttgctagctac

SEQ ID NO: 8040 - DNA, 24 bp, synthetic construct
  misc_feature 1..24: note = Synthetic
  source 1..24: mol_type = other DNA
aggagtactggagaaacgtgcgcc

SEQ ID NO: 8041 - DNA, 24 bp, synthetic construct
  misc_feature 1..24: note = Synthetic
  source 1..24: mol_type = other DNA
atgataacttatgtagccgtatcg

SEQ ID NO: 8042 - DNA, 24 bp, synthetic construct
  misc_feature 1..24: note = Synthetic
  source 1..24: mol_type = other DNA
ttgtcagtacagcggtcaggtggg

SEQ ID NO: 8043 - DNA, 24 bp, synthetic construct
  misc_feature 1..24: note = Synthetic
  source 1..24: mol_type = other DNA
caaaccatgacacacttcaaaccg

SEQ ID NO: 8044 - DNA, 24 bp, synthetic construct
  misc_feature 1..24: note = Synthetic
  source 1..24: mol_type = other DNA
caagcgttgtcagcacgcgctcga

SEQ ID NO: 8045 - DNA, 24 bp, synthetic construct
  misc_feature 1..24: note = Synthetic
  source 1..24: mol_type = other DNA
tagcggtctgaagtaagagctgtc

SEQ ID NO: 8046 - DNA, 24 bp, synthetic construct
  misc_feature 1..24: note = Synthetic
  source 1..24: mol_type = other DNA
cctacgtcctttgaattgccatga

SEQ ID NO: 8047 - DNA, 24 bp, synthetic construct
  misc_feature 1..24: note = Synthetic
  source 1..24: mol_type = other DNA
gggcctttgcaaggctcttgttgt

SEQ ID NO: 8048 - DNA, 24 bp, synthetic construct
  misc_feature 1..24: note = Synthetic
  source 1..24: mol_type = other DNA
acccgtcgttgcaattgcatgcga

SEQ ID NO: 8049 - DNA, 24 bp, synthetic construct
  misc_feature 1..24: note = Synthetic
  source 1..24: mol_type = other DNA
acacgatgtaacggacaggtagta

SEQ ID NO: 8050 - DNA, 24 bp, synthetic construct
  misc_feature 1..24: note = Synthetic
  source 1..24: mol_type = other DNA
atgttccgagaccaccgtgcacga

SEQ ID NO: 8051 - DNA, 24 bp, synthetic construct
  misc_feature 1..24: note = Synthetic
  source 1..24: mol_type = other DNA
tattaggtcggcaactgagcgccg

SEQ ID NO: 8052 - DNA, 24 bp, synthetic construct
  misc_feature 1..24: note = Synthetic
  source 1..24: mol_type = other DNA
atggcttgcagcggagttctgagt

SEQ ID NO: 8053 - DNA, 24 bp, synthetic construct
  misc_feature 1..24: note = Synthetic
  source 1..24: mol_type = other DNA
atgcgtcatggatccgtaactctt

SEQ ID NO: 8054 - DNA, 24 bp, synthetic construct
  misc_feature 1..24: note = Synthetic
  source 1..24: mol_type = other DNA
ggcagcaggagcttgcgcgcttgt

SEQ ID NO: 8055 - DNA, 24 bp, synthetic construct
  misc_feature 1..24: note = Synthetic
  source 1..24: mol_type = other DNA
gtttgcaggtttcctatatatcgg

SEQ ID NO: 8056 - DNA, 24 bp, synthetic construct
  misc_feature 1..24: note = Synthetic
  source 1..24: mol_type = other DNA
tatcaagatctctcgggttcaagc

SEQ ID NO: 8057 - DNA, 24 bp, synthetic construct
  misc_feature 1..24: note = Synthetic
  source 1..24: mol_type = other DNA
ttcatgagagaaacacctcccgcg

SEQ ID NO: 8058 - DNA, 24 bp, synthetic construct
  misc_feature 1..24: note = Synthetic
  source 1..24: mol_type = other DNA
gcattaaagtggctcctcaggccc

SEQ ID NO: 8059 - DNA, 24 bp, synthetic construct
  misc_feature 1..24: note = Synthetic
  source 1..24: mol_type = other DNA
cgtctcgcacgatgtcggttccag

SEQ ID NO: 8060 - DNA, 24 bp, synthetic construct
  misc_feature 1..24: note = Synthetic
  source 1..24: mol_type = other DNA
atgggttccactaggccttgcgca

SEQ ID NO: 8061 - DNA, 24 bp, synthetic construct
  misc_feature 1..24: note = Synthetic
  source 1..24: mol_type = other DNA
acccattaccgttacaaagcagat

SEQ ID NO: 8062 - DNA, 24 bp, synthetic construct
  misc_feature 1..24: note = Synthetic
  source 1..24: mol_type = other DNA
ggagacgtagggatcgccctcagt

SEQ ID NO: 8063 - DNA, 24 bp, synthetic construct
  misc_feature 1..24: note = Synthetic
  source 1..24: mol_type = other DNA
ggattgtcgattacctgtacaatc

SEQ ID NO: 8064 - DNA, 24 bp, synthetic construct
  misc_feature 1..24: note = Synthetic
  source 1..24: mol_type = other DNA
tcccatatcgcacctcaccaaccg

SEQ ID NO: 8065 - DNA, 24 bp, synthetic construct
  misc_feature 1..24: note = Synthetic
  source 1..24: mol_type = other DNA
cgtgtgtcacctcggcttcccacc

SEQ ID NO: 8066 - DNA, 24 bp, synthetic construct
  misc_feature 1..24: note = Synthetic
  source 1..24: mol_type = other DNA
atagaatctagtgttatacctcac

SEQ ID NO: 8067 - DNA, 24 bp, synthetic construct
  misc_feature 1..24: note = Synthetic
  source 1..24: mol_type = other DNA
tagcctggcagtagcatcgcaacg

SEQ ID NO: 8068 - DNA, 24 bp, synthetic construct
  misc_feature 1..24: note = Synthetic
  source 1..24: mol_type = other DNA
gtaagttgatccaacatattaact

SEQ ID NO: 8069 - DNA, 24 bp, synthetic construct
  misc_feature 1..24: note = Synthetic
  source 1..24: mol_type = other DNA
cccgtcagcggatcgcccgtttaa

SEQ ID NO: 8070 - DNA, 24 bp, synthetic construct
  misc_feature 1..24: note = Synthetic
  source 1..24: mol_type = other DNA
tgccaactgtcctcggatcgtgat

SEQ ID NO: 8071 - DNA, 24 bp, synthetic construct
  misc_feature 1..24: note = Synthetic
  source 1..24: mol_type = other DNA
gaaccggctagctccgttggtttg

SEQ ID NO: 8072 - DNA, 24 bp, synthetic construct
  misc_feature 1..24: note = Synthetic
  source 1..24: mol_type = other DNA
ggtttcgatacgatgaacaacacg

SEQ ID NO: 8073 - DNA, 24 bp, synthetic construct
  misc_feature 1..24: note = Synthetic
  source 1..24: mol_type = other DNA
gacagctctctgttggtcactaaa

SEQ ID NO: 8074 - DNA, 24 bp, synthetic construct
  misc_feature 1..24: note = Synthetic
  source 1..24: mol_type = other DNA
gcaatcccgtcgaattcacgcttt

SEQ ID NO: 8075 - DNA, 24 bp, synthetic construct
  misc_feature 1..24: note = Synthetic
  source 1..24: mol_type = other DNA
tattgcactagtggccgatgagga

SEQ ID NO: 8076 - DNA, 24 bp, synthetic construct
  misc_feature 1..24: note = Synthetic
  source 1..24: mol_type = other DNA
ctaggactagagaggtcgcggaaa

SEQ ID NO: 8077 - DNA, 24 bp, synthetic construct
  misc_feature 1..24: note = Synthetic
  source 1..24: mol_type = other DNA
agacgtaactcactgagatcattc

SEQ ID NO: 8078 - DNA, 24 bp, synthetic construct
  misc_feature 1..24: note = Synthetic
  source 1..24: mol_type = other DNA
gtctttccagagacagcagctacc

SEQ ID NO: 8079 - DNA, 24 bp, synthetic construct
  misc_feature 1..24: note = Synthetic
  source 1..24: mol_type = other DNA
agttcgtgaagagctgggtgtgcg

SEQ ID NO: 8080 - DNA, 24 bp, synthetic construct
  misc_feature 1..24: note = Synthetic
  source 1..24: mol_type = other DNA
atgcacagcgttaggatgctttgt

SEQ ID NO: 8081 - DNA, 24 bp, synthetic construct
  misc_feature 1..24: note = Synthetic
  source 1..24: mol_type = other DNA
cagggtcacggactacgagtcatc

SEQ ID NO: 8082 - DNA, 24 bp, synthetic construct
  misc_feature 1..24: note = Synthetic
  source 1..24: mol_type = other DNA
aacaaattatgcgcttccaccagg

SEQ ID NO: 8083 - DNA, 24 bp, synthetic construct
  misc_feature 1..24: note = Synthetic
  source 1..24: mol_type = other DNA
aataattatatgaatcgctgaatg

SEQ ID NO: 8084 - DNA, 24 bp, synthetic construct
  misc_feature 1..24: note = Synthetic
  source 1..24: mol_type = other DNA
ggttagttactttgatttcgagct

SEQ ID NO: 8085 - DNA, 24 bp, synthetic construct
  misc_feature 1..24: note = Synthetic
  source 1..24: mol_type = other DNA
taaaggtcgatctttagttagtgg

SEQ ID NO: 8086 - DNA, 24 bp, synthetic construct
  misc_feature 1..24: note = Synthetic
  source 1..24: mol_type = other DNA
ggtggaataaatgagggtcttgtt

SEQ ID NO: 8087 - DNA, 24 bp, synthetic construct
  misc_feature 1..24: note = Synthetic
  source 1..24: mol_type = other DNA
tgaaccaaacgtagaagccatgtg

SEQ ID NO: 8088 - DNA, 24 bp, synthetic construct
  misc_feature 1..24: note = Synthetic
  source 1..24: mol_type = other DNA
gaactacagcataccaaatccctt

SEQ ID NO: 8089 - DNA, 24 bp, synthetic construct
  misc_feature 1..24: note = Synthetic
  source 1..24: mol_type = other DNA
gagaagataggatatttaaccggt

SEQ ID NO: 8090 - DNA, 24 bp, synthetic construct
  misc_feature 1..24: note = Synthetic
  source 1..24: mol_type = other DNA
tcgtaaatgtgatgaggtagcatc

SEQ ID NO: 8091 - DNA, 24 bp, synthetic construct
  misc_feature 1..24: note = Synthetic
  source 1..24: mol_type = other DNA
tcacgattcgtcttctctacacta

SEQ ID NO: 8092 - DNA, 24 bp, synthetic construct
  misc_feature 1..24: note = Synthetic
  source 1..24: mol_type = other DNA
cgtgtccacctgtcactggtatct

SEQ ID NO: 8093 - DNA, 24 bp, synthetic construct
  misc_feature 1..24: note = Synthetic
  source 1..24: mol_type = other DNA
aggtttacgtcgcctgtccaggcg

SEQ ID NO: 8094 - DNA, 24 bp, synthetic construct
  misc_feature 1..24: note = Synthetic
  source 1..24: mol_type = other DNA
ctgccgaggacaaattacgatggc

SEQ ID NO: 8095 - DNA, 24 bp, synthetic construct
  misc_feature 1..24: note = Synthetic
  source 1..24: mol_type = other DNA
ttgcgattgacagcatcaatgaca

SEQ ID NO: 8096 - DNA, 24 bp, synthetic construct
  misc_feature 1..24: note = Synthetic
  source 1..24: mol_type = other DNA
caagttctcgcatgttaactccgt

SEQ ID NO: 8097 - DNA, 24 bp, synthetic construct
  misc_feature 1..24: note = Synthetic
  source 1..24: mol_type = other DNA
tcgatttaggtgtgactagcagat

SEQ ID NO: 8098 - DNA, 24 bp, synthetic construct
  misc_feature 1..24: note = Synthetic
  source 1..24: mol_type = other DNA
atcatagcgacaggatctggttag

SEQ ID NO: 8099 - DNA, 24 bp, synthetic construct
  misc_feature 1..24: note = Synthetic
  source 1..24: mol_type = other DNA
tttaccgacggatgattgaagtta

SEQ ID NO: 8100 - DNA, 24 bp, synthetic construct
  misc_feature 1..24: note = Synthetic
  source 1..24: mol_type = other DNA
atacgtctcagttcgacactaaat

SEQ ID NO: 8101 - DNA, 24 bp, synthetic construct
  misc_feature 1..24: note = Synthetic
  source 1..24: mol_type = other DNA
cccttgctccctgaggtacaagcc

SEQ ID NO: 8102 - DNA, 24 bp, synthetic construct
  misc_feature 1..24: note = Synthetic
  source 1..24: mol_type = other DNA
cacccatatccctacgatagcagc

SEQ ID NO: 8103 - DNA, 24 bp, synthetic construct
  misc_feature 1..24: note = Synthetic
  source 1..24: mol_type = other DNA
tctagaaagccctaagtcccacct

SEQ ID NO: 8104 - DNA, 24 bp, synthetic construct
  misc_feature 1..24: note = Synthetic
  source 1..24: mol_type = other DNA
gcggcacacgctcctgcatggaca

SEQ ID NO: 8105 - DNA, 24 bp, synthetic construct
  misc_feature 1..24: note = Synthetic
  source 1..24: mol_type = other DNA
cgggagcaggcatcggtaatgagg

SEQ ID NO: 8106 - DNA, 24 bp, synthetic construct
  misc_feature 1..24: note = Synthetic
  source 1..24: mol_type = other DNA
cattccgagcgcattgacggccga

SEQ ID NO: 8107 - DNA, 24 bp, synthetic construct
  misc_feature 1..24: note = Synthetic
  source 1..24: mol_type = other DNA
ccgaggtgttggcgtgcgtgcttt

SEQ ID NO: 8108 - DNA, 24 bp, synthetic construct
  misc_feature 1..24: note = Synthetic
  source 1..24: mol_type = other DNA
ggagataggacgcttctaagaggg

SEQ ID NO: 8109 - DNA, 24 bp, synthetic construct
  misc_feature 1..24: note = Synthetic
  source 1..24: mol_type = other DNA
tctgggcgatacttctcccataaa

SEQ ID NO: 8110 - DNA, 24 bp, synthetic construct
  misc_feature 1..24: note = Synthetic
  source 1..24: mol_type = other DNA
aacaattcaccgtatcgtctcgga

SEQ ID NO: 8111 - DNA, 24 bp, synthetic construct
  misc_feature 1..24: note = Synthetic
  source 1..24: mol_type = other DNA
ggaattcgatgttaaccgcttata

SEQ ID NO: 8112 - DNA, 24 bp, synthetic construct
  misc_feature 1..24: note = Synthetic
  source 1..24: mol_type = other DNA
cgtcatctagtgacacgctcgaac

SEQ ID NO: 8113 - DNA, 24 bp, synthetic construct
  misc_feature 1..24: note = Synthetic
  source 1..24: mol_type = other DNA
tgctgatacgccgtagtacggtct

SEQ ID NO: 8114 - DNA, 24 bp, synthetic construct
  misc_feature 1..24: note = Synthetic
  source 1..24: mol_type = other DNA
ttactgcgtaaccaggatgatcaa

SEQ ID NO: 8115 - DNA, 24 bp, synthetic construct
  misc_feature 1..24: note = Synthetic
  source 1..24: mol_type = other DNA
gaggtactgtgcccacaactgaac

SEQ ID NO: 8116 - DNA, 24 bp, synthetic construct
  misc_feature 1..24: note = Synthetic
  source 1..24: mol_type = other DNA
ctatgtgtcgttgatttcaacatt

SEQ ID NO: 8117 - DNA, 24 bp, synthetic construct
  misc_feature 1..24: note = Synthetic
  source 1..24: mol_type = other DNA
tgagccgtgcctcatacacgaata

SEQ ID NO: 8118 - DNA, 24 bp, synthetic construct
  misc_feature 1..24: note = Synthetic
  source 1..24: mol_type = other DNA
cctatctccgtgttgcggtcccat

SEQ ID NO: 8119 - DNA, 24 bp, synthetic construct
  misc_feature 1..24: note = Synthetic
  source 1..24: mol_type = other DNA
acgagctcagcgccctcatttgcc

SEQ ID NO: 8120 - DNA, 24 bp, synthetic construct
  misc_feature 1..24: note = Synthetic
  source 1..24: mol_type = other DNA
cacggtttaattgtaataggaaat

SEQ ID NO: 8121 - DNA, 24 bp, synthetic construct
  misc_feature 1..24: note = Synthetic
  source 1..24: mol_type = other DNA
agtagaggctgtcagacctagcga

SEQ ID NO: 8122 - DNA, 24 bp, synthetic construct
  misc_feature 1..24: note = Synthetic
  source 1..24: mol_type = other DNA
aatataagctctacgcttaaagtt

SEQ ID NO: 8123 - DNA, 24 bp, synthetic construct
  misc_feature 1..24: note = Synthetic
  source 1..24: mol_type = other DNA
tgcgtgctacttccaatcgcacgt

SEQ ID NO: 8124 - DNA, 24 bp, synthetic construct
  misc_feature 1..24: note = Synthetic
  source 1..24: mol_type = other DNA
tggcctaaataggcgctcgcacca

SEQ ID NO: 8125 - DNA, 24 bp, synthetic construct
  misc_feature 1..24: note = Synthetic
  source 1..24: mol_type = other DNA
gcttcgctagagtagaaatctccc

SEQ ID NO: 8126 - DNA, 24 bp, synthetic construct
  misc_feature 1..24: note = Synthetic
  source 1..24: mol_type = other DNA
taatcggcgtttccagcgaacggg

SEQ ID NO: 8127 - DNA, 24 bp, synthetic construct
  misc_feature 1..24: note = Synthetic
  source 1..24: mol_type = other DNA
tatctgaagatgaaatgtgtgcta

SEQ ID NO: 8128 - DNA, 24 bp, synthetic construct
  misc_feature 1..24: note = Synthetic
  source 1..24: mol_type = other DNA
caaggtctctagaacacttgcgcc

SEQ ID NO: 8129 - DNA, 24 bp, synthetic construct
  misc_feature 1..24: note = Synthetic
  source 1..24: mol_type = other DNA
atcgagaggtcagacacatttacc

SEQ ID NO: 8130 - DNA, 24 bp, synthetic construct
  misc_feature 1..24: note = Synthetic
  source 1..24: mol_type = other DNA
tcagtcacctggaagcttaccatc

SEQ ID NO: 8131 - DNA, 24 bp, synthetic construct
  misc_feature 1..24: note = Synthetic
  source 1..24: mol_type = other DNA
cgagtttaataagtctgcccacgg

SEQ ID NO: 8132 - DNA, 24 bp, synthetic construct
  misc_feature 1..24: note = Synthetic
  source 1..24: mol_type = other DNA
gaagccatccgcactgctgacggg

SEQ ID NO: 8133 - DNA, 24 bp, synthetic construct
  misc_feature 1..24: note = Synthetic
  source 1..24: mol_type = other DNA
gcttgaaagaatctcaagatggac

SEQ ID NO: 8134 - DNA, 24 bp, synthetic construct
  misc_feature 1..24: note = Synthetic
  source 1..24: mol_type = other DNA
tttgtggatccgaggtgaaacatt

SEQ ID NO: 8135 - DNA, 24 bp, synthetic construct
  misc_feature 1..24: note = Synthetic
  source 1..24: mol_type = other DNA
ttaaatacgcgattattgtgtagc

SEQ ID NO: 8136 - DNA, 24 bp, synthetic construct
  misc_feature 1..24: note = Synthetic
  source 1..24: mol_type = other DNA
atattcaccaaatgcgcctggtga

SEQ ID NO: 8137 - DNA, 24 bp, synthetic construct
  misc_feature 1..24: note = Synthetic
  source 1..24: mol_type = other DNA
gagcccatagtttccgtctgacaa

SEQ ID NO: 8138 - DNA, 24 bp, synthetic construct
  misc_feature 1..24: note = Synthetic
  source 1..24: mol_type = other DNA
gcacatcagccgccgatcctaccc

SEQ ID NO: 8139 - DNA, 24 bp, synthetic construct
  misc_feature 1..24: note = Synthetic
  source 1..24: mol_type = other DNA
ggcaattgcggcgctatcacctaa

SEQ ID NO: 8140 - DNA, 24 bp, synthetic construct
  misc_feature 1..24: note = Synthetic
  source 1..24: mol_type = other DNA
gtgagtcggcgtcccgtcctgcga

SEQ ID NO: 8141 - DNA, 24 bp, synthetic construct
  misc_feature 1..24: note = Synthetic
  source 1..24: mol_type = other DNA
tgcgagtcctagatgactatacct

SEQ ID NO: 8142 - DNA, 24 bp, synthetic construct
  misc_feature 1..24: note = Synthetic
  source 1..24: mol_type = other DNA
agactcttctcagcgaaaccacct

SEQ ID NO: 8143 - DNA, 24 bp, synthetic construct
  misc_feature 1..24: note = Synthetic
  source 1..24: mol_type = other DNA
ccaacctcagttgcttgtaatccc

SEQ ID NO: 8144 - DNA, 24 bp, synthetic construct
  misc_feature 1..24: note = Synthetic
  source 1..24: mol_type = other DNA
atcacacatgtgatgcgtagttag

SEQ ID NO: 8145 - DNA, 24 bp, synthetic construct
  misc_feature 1..24: note = Synthetic
  source 1..24: mol_type = other DNA
acaaatgttaaagcgcttcctgat

SEQ ID NO: 8146 - DNA, 24 bp, synthetic construct
  misc_feature 1..24: note = Synthetic
  source 1..24: mol_type = other DNA
tgaactaaagctatcgccctagtc

SEQ ID NO: 8147 - DNA, 24 bp, synthetic construct
  misc_feature 1..24: note = Synthetic
  source 1..24: mol_type = other DNA
gacatttggcgccgccatgtagta

SEQ ID NO: 8148 - DNA, 24 bp, synthetic construct
  misc_feature 1..24: note = Synthetic
  source 1..24: mol_type = other DNA
ggtggtataccttggcaagctggg

SEQ ID NO: 8149 - DNA, 24 bp, synthetic construct
  misc_feature 1..24: note = Synthetic
  source 1..24: mol_type = other DNA
attgcgcacctctggaccggtctg

SEQ ID NO: 8150 - DNA, 24 bp, synthetic construct
  misc_feature 1..24: note = Synthetic
  source 1..24: mol_type = other DNA
tctgcctcgaatattgtttaattg

SEQ ID NO: 8151 - DNA, 24 bp, synthetic construct
  misc_feature 1..24: note = Synthetic
  source 1..24: mol_type = other DNA
ggcctcacctgagttgctagggcg

SEQ ID NO: 8152 - DNA, 24 bp, synthetic construct
  misc_feature 1..24: note = Synthetic
  source 1..24: mol_type = other DNA
ctaagcgcggatcaacgctggccg

SEQ ID NO: 8153 - DNA, 24 bp, synthetic construct
  misc_feature 1..24: note = Synthetic
  source 1..24: mol_type = other DNA
gggcgtcaagctgttctggatgct

SEQ ID NO: 8154 - DNA, 24 bp, synthetic construct
  misc_feature 1..24: note = Synthetic
  source 1..24: mol_type = other DNA
ttacataggctttccgcaggagtc

SEQ ID NO: 8155 - DNA, 24 bp, synthetic construct
  misc_feature 1..24: note = Synthetic
  source 1..24: mol_type = other DNA
gtagaatcgagagggcgagacttc

SEQ ID NO: 8156 - DNA, 24 bp, synthetic construct
  misc_feature 1..24: note = Synthetic
  source 1..24: mol_type = other DNA
ggtcctaagacagaaccggccctg

SEQ ID NO: 8157 - DNA, 24 bp, synthetic construct
  misc_feature 1..24: note = Synthetic
  source 1..24: mol_type = other DNA
gttcctggatagaatctcggctta

SEQ ID NO: 8158 - DNA, 24 bp, synthetic construct
  misc_feature 1..24: note = Synthetic
  source 1..24: mol_type = other DNA
tcggtaccagagtcgaagccgttg

SEQ ID NO: 8159 - DNA, 24 bp, synthetic construct
  misc_feature 1..24: note = Synthetic
  source 1..24: mol_type = other DNA
aaagtattgctgtctgtagtacct

SEQ ID NO: 8160 - DNA, 24 bp, synthetic construct
  misc_feature 1..24: note = Synthetic
  source 1..24: mol_type = other DNA
gtaaacacccaaggccgtcagtcc

SEQ ID NO: 8161 - DNA, 24 bp, synthetic construct
  misc_feature 1..24: note = Synthetic
  source 1..24: mol_type = other DNA
gtatataactcggctatgtcttgc

SEQ ID NO: 8162 - DNA, 24 bp, synthetic construct
  misc_feature 1..24: note = Synthetic
  source 1..24: mol_type = other DNA
aaggcacagagttacagcacgatg

SEQ ID NO: 8163 - DNA, 24 bp, synthetic construct
  misc_feature 1..24: note = Synthetic
  source 1..24: mol_type = other DNA
attggcacgcggtttaacgggatc

SEQ ID NO: 8164 - DNA, 24 bp, synthetic construct
  misc_feature 1..24: note = Synthetic
  source 1..24: mol_type = other DNA
acagcagggttgctctatggacca

SEQ ID NO: 8165 - DNA, 24 bp, synthetic construct
  misc_feature 1..24: note = Synthetic
  source 1..24: mol_type = other DNA
cacccgggagctcggattcgtagt

SEQ ID NO: 8166 - DNA, 24 bp, synthetic construct
  misc_feature 1..24: note = Synthetic
  source 1..24: mol_type = other DNA
cactgtcgcccaggaagtgttcat

SEQ ID NO: 8167 - DNA, 24 bp, synthetic construct
  misc_feature 1..24: note = Synthetic
  source 1..24: mol_type = other DNA
gtagtaacaacccataagttgctg

SEQ ID NO: 8168 - DNA, 24 bp, synthetic construct
  misc_feature 1..24: note = Synthetic
  source 1..24: mol_type = other DNA
gtagggactggcatcccgtgaacg

SEQ ID NO: 8169 - DNA, 24 bp, synthetic construct
  misc_feature 1..24: note = Synthetic
  source 1..24: mol_type = other DNA
acgaatactggtgatacatcagca

SEQ ID NO: 8170 - DNA, 24 bp, synthetic construct
  misc_feature 1..24: note = Synthetic
  source 1..24: mol_type = other DNA
ttgttggtattacaagttgacaag

SEQ ID NO: 8171 - DNA, 24 bp, synthetic construct
  misc_feature 1..24: note = Synthetic
  source 1..24: mol_type = other DNA
attggtgtggtcggagggctttgc

SEQ ID NO: 8172 - DNA, 24 bp, synthetic construct
  misc_feature 1..24: note = Synthetic
  source 1..24: mol_type = other DNA
agttgtggacaaactcggatgtga

SEQ ID NO: 8173 - DNA, 24 bp, synthetic construct
  misc_feature 1..24: note = Synthetic
  source 1..24: mol_type = other DNA
gggttatccgctcgtcggaagtta

SEQ ID NO: 8174 - DNA, 24 bp, synthetic construct
  misc_feature 1..24: note = Synthetic
  source 1..24: mol_type = other DNA
agggacaaactgatattccggaaa

SEQ ID NO: 8175 - DNA, 24 bp, synthetic construct
  misc_feature 1..24: note = Synthetic
  source 1..24: mol_type = other DNA
ccattccgcgtgaagtgaactcgg

SEQ ID NO: 8176 - DNA, 24 bp, synthetic construct
  misc_feature 1..24: note = Synthetic
  source 1..24: mol_type = other DNA
caccaccttcacagatctctacgt

SEQ ID NO: 8177 - DNA, 24 bp, synthetic construct
  misc_feature 1..24: note = Synthetic
  source 1..24: mol_type = other DNA
ggactttcaactttacagatcgtg

SEQ ID NO: 8178 - DNA, 24 bp, synthetic construct
  misc_feature 1..24: note = Synthetic
  source 1..24: mol_type = other DNA
tccagaatagttgactaagctcat

SEQ ID NO: 8179 - DNA, 24 bp, synthetic construct
  misc_feature 1..24: note = Synthetic
  source 1..24: mol_type = other DNA
aagatatagccaatgtacacaaca

SEQ ID NO: 8180 - DNA, 24 bp, synthetic construct
  misc_feature 1..24: note = Synthetic
  source 1..24: mol_type = other DNA
atgcgtcggttaatctattctcat

SEQ ID NO: 8181 - DNA, 24 bp, synthetic construct
  misc_feature 1..24: note = Synthetic
  source 1..24: mol_type = other DNA
cgcgggttaattccctccgttccc

SEQ ID NO: 8182 - DNA, 24 bp, synthetic construct
  misc_feature 1..24: note = Synthetic
  source 1..24: mol_type = other DNA
ctcaaggactaaccgagacgttgc

SEQ ID NO: 8183 - DNA, 24 bp, synthetic construct
  misc_feature 1..24: note = Synthetic
  source 1..24: mol_type = other DNA
agagacggagctgaatagacgcaa

SEQ ID NO: 8184 - DNA, 24 bp, synthetic construct
  misc_feature 1..24: note = Synthetic
  source 1..24: mol_type = other DNA
gcatttgaaactcctcagatggtg

SEQ ID NO: 8185 - DNA, 24 bp, synthetic construct
  misc_feature 1..24: note = Synthetic
  source 1..24: mol_type = other DNA
ggctcgagcccttctgagcgaagt

SEQ ID NO: 8186 - DNA, 24 bp, synthetic construct
  misc_feature 1..24: note = Synthetic
  source 1..24: mol_type = other DNA
cgcaatctggtgtgtatgatcgta

SEQ ID NO: 8187 - DNA, 24 bp, synthetic construct
  misc_feature 1..24: note = Synthetic
  source 1..24: mol_type = other DNA
acggcatgcagaattctatacatg

SEQ ID NO: 8188 - DNA, 24 bp, synthetic construct
  misc_feature 1..24: note = Synthetic
  source 1..24: mol_type = other DNA
tgagtgctgtgtgaacggctaatg

SEQ ID NO: 8189 - DNA, 24 bp, synthetic construct
  misc_feature 1..24: note = Synthetic
  source 1..24: mol_type = other DNA
gacaccttaagtgcgcgtgcgtca

SEQ ID NO: 8190 - DNA, 24 bp, synthetic construct
  misc_feature 1..24: note = Synthetic
  source 1..24: mol_type = other DNA
agactcctaattccacgactcaac

SEQ ID NO: 8191 - DNA, 24 bp, synthetic construct
  misc_feature 1..24: note = Synthetic
  source 1..24: mol_type = other DNA
aaatgcagcattaggtagggcgga

SEQ ID NO: 8192 - DNA, 24 bp, synthetic construct
  misc_feature 1..24: note = Synthetic
  source 1..24: mol_type = other DNA
attatgcccatgtgctcaggagct

SEQ ID NO: 8193 - DNA, 24 bp, synthetic construct
  misc_feature 1..24: note = Synthetic
  source 1..24: mol_type = other DNA
tgaacgtttcttgcacgtcctccc

SEQ ID NO: 8194 - DNA, 24 bp, synthetic construct
  misc_feature 1..24: note = Synthetic
  source 1..24: mol_type = other DNA
gcctgcttcgggccatacttacca

SEQ ID NO: 8195 - DNA, 24 bp, synthetic construct
  misc_feature 1..24: note = Synthetic
  source 1..24: mol_type = other DNA
taccgctggagtactaagcacttt

SEQ ID NO: 8196 - DNA, 24 bp, synthetic construct
  misc_feature 1..24: note = Synthetic
  source 1..24: mol_type = other DNA
cgatgctatttgcgaggaggtagc

SEQ ID NO: 8197 - DNA, 24 bp, synthetic construct
  misc_feature 1..24: note = Synthetic
  source 1..24: mol_type = other DNA
tagtaggttgcgtaagccgtccca

SEQ ID NO: 8198 - DNA, 24 bp, synthetic construct
  misc_feature 1..24: note = Synthetic
  source 1..24: mol_type = other DNA
ggttacgtacccggacatgtaagc

SEQ ID NO: 8199 - DNA, 24 bp, synthetic construct
  misc_feature 1..24: note = Synthetic
  source 1..24: mol_type = other DNA
cggcgccgatcttgcgaaggtgca

SEQ ID NO: 8200 - DNA, 24 bp, synthetic construct
  misc_feature 1..24: note = Synthetic
  source 1..24: mol_type = other DNA
ccagtaccagcacgtctacaagct

SEQ ID NO: 8201 - DNA, 24 bp, synthetic construct
  misc_feature 1..24: note = Synthetic
  source 1..24: mol_type = other DNA
aaacgctactgaggacgctccata

SEQ ID NO: 8202 - DNA, 24 bp, synthetic construct
  misc_feature 1..24: note = Synthetic
  source 1..24: mol_type = other DNA
cactcatgtctacacaacgttgcc

SEQ ID NO: 8203 - DNA, 24 bp, synthetic construct
  misc_feature 1..24: note = Synthetic
  source 1..24: mol_type = other DNA
gtagtgtttgtcttaacttatgcc

SEQ ID NO: 8204 - DNA, 24 bp, synthetic construct
  misc_feature 1..24: note = Synthetic
  source 1..24: mol_type = other DNA
tcacatacgctttcaaggccgacc

SEQ ID NO: 8205 - DNA, 24 bp, synthetic construct
  misc_feature 1..24: note = Synthetic
  source 1..24: mol_type = other DNA
cgaaggagtattgagacagcgggc

SEQ ID NO: 8206 - DNA, 24 bp, synthetic construct
  misc_feature 1..24: note = Synthetic
  source 1..24: mol_type = other DNA
cgctatttacgactagaccgtgga

SEQ ID NO: 8207 - DNA, 24 bp, synthetic construct
  misc_feature 1..24: note = Synthetic
  source 1..24: mol_type = other DNA
tatgtgagtcctgtgtggcagcag

SEQ ID NO: 8208 - DNA, 24 bp, synthetic construct
  misc_feature 1..24: note = Synthetic
  source 1..24: mol_type = other DNA
cctcagttaagtaagcccgtatgc

SEQ ID NO: 8209 - DNA, 24 bp, synthetic construct
  misc_feature 1..24: note = Synthetic
  source 1..24: mol_type = other DNA
ttctaaccgaatcaacttaaagcg

SEQ ID NO: 8210 - DNA, 24 bp, synthetic construct
  misc_feature 1..24: note = Synthetic
  source 1..24: mol_type = other DNA
atcccataactggcgtttgtagag

SEQ ID NO: 8211 - DNA, 24 bp, synthetic construct
  misc_feature 1..24: note = Synthetic
  source 1..24: mol_type = other DNA
cgcttgctcacatcggaagaacct

SEQ ID NO: 8212 - DNA, 24 bp, synthetic construct
  misc_feature 1..24: note = Synthetic
  source 1..24: mol_type = other DNA
ctgcgaaggaataaaggctttgcc

SEQ ID NO: 8213 - DNA, 24 bp, synthetic construct
  misc_feature 1..24: note = Synthetic
  source 1..24: mol_type = other DNA
ttctacctaaagatgccctagcca

SEQ ID NO: 8214 - DNA, 24 bp, synthetic construct
  misc_feature 1..24: note = Synthetic
  source 1..24: mol_type = other DNA
tgttcaaggagcgcccacaggaaa

SEQ ID NO: 8215 - DNA, 24 bp, synthetic construct
  misc_feature 1..24: note = Synthetic
  source 1..24: mol_type = other DNA
ttcagcgggactctccggcagcta

SEQ ID NO: 8216 - DNA, 24 bp, synthetic construct
  misc_feature 1..24: note = Synthetic
  source 1..24: mol_type = other DNA
agtgctggccatggttgccctgta

SEQ ID NO: 8217 - DNA, 24 bp, synthetic construct
  misc_feature 1..24: note = Synthetic
  source 1..24: mol_type = other DNA
aattaggtcgtcacatgaggaaac

SEQ ID NO: 8218 - DNA, 24 bp, synthetic construct
  misc_feature 1..24: note = Synthetic
  source 1..24: mol_type = other DNA
gataaggttgccgctaacaattaa

SEQ ID NO: 8219 - DNA, 24 bp, synthetic construct
  misc_feature 1..24: note = Synthetic
  source 1..24: mol_type = other DNA
atacataccgatctgttgtcccga

SEQ ID NO: 8220 - DNA, 24 bp, synthetic construct
  misc_feature 1..24: note = Synthetic
  source 1..24: mol_type = other DNA
gatctggcgcactattcgtctgaa

SEQ ID NO: 8221 - DNA, 24 bp, synthetic construct
  misc_feature 1..24: note = Synthetic
  source 1..24: mol_type = other DNA
ccctttcaagtaggtgattcttcc

SEQ ID NO: 8222 - DNA, 24 bp, synthetic construct
  misc_feature 1..24: note = Synthetic
  source 1..24: mol_type = other DNA
ctgcggccataatgtttcctatgg

SEQ ID NO: 8223 - DNA, 24 bp, synthetic construct
  misc_feature 1..24: note = Synthetic
  source 1..24: mol_type = other DNA
gtgctctggttaccgtacttatgt

SEQ ID NO: 8224 - DNA, 24 bp, synthetic construct
  misc_feature 1..24: note = Synthetic
  source 1..24: mol_type = other DNA
ggtacatttctgggtttgcacggt

SEQ ID NO: 8225 - DNA, 24 bp, synthetic construct
  misc_feature 1..24: note = Synthetic
  source 1..24: mol_type = other DNA
taggattgccgttgacatcagtac

SEQ ID NO: 8226 - DNA, 24 bp, synthetic construct
  misc_feature 1..24: note = Synthetic
  source 1..24: mol_type = other DNA
tatagaaggtgcgtcaagatgcac

SEQ ID NO: 8227 - DNA, 24 bp, synthetic construct
  misc_feature 1..24: note = Synthetic
  source 1..24: mol_type = other DNA
acgtcccaaacacggaattcgagt

SEQ ID NO: 8228 - DNA, 24 bp, synthetic construct
  misc_feature 1..24: note = Synthetic
  source 1..24: mol_type = other DNA
tcaccgtcaagtagtcagtagatg

SEQ ID NO: 8229 - DNA, 24 bp, synthetic construct
  misc_feature 1..24: note = Synthetic
  source 1..24: mol_type = other DNA
atggcgctccacgtctcaatgcac

SEQ ID NO: 8230 - DNA, 24 bp, synthetic construct
  misc_feature 1..24: note = Synthetic
  source 1..24: mol_type = other DNA
cggacaaatgacaaattcctacgc

SEQ ID NO: 8231 - DNA, 24 bp, synthetic construct
  misc_feature 1..24: note = Synthetic
  source 1..24: mol_type = other DNA
gtagatcgcctggacggtcagtca

SEQ ID NO: 8232 - DNA, 24 bp, synthetic construct
  misc_feature 1..24: note = Synthetic
  source 1..24: mol_type = other DNA
atcattcggctccagtacctgtag

SEQ ID NO: 8233 - DNA, 24 bp, synthetic construct
  misc_feature 1..24: note = Synthetic
  source 1..24: mol_type = other DNA
tgacacagcggaaggcagcattcc

SEQ ID NO: 8234 - DNA, 24 bp, synthetic construct
  misc_feature 1..24: note = Synthetic
  source 1..24: mol_type = other DNA
atcatttgtgttgttacgttatta

SEQ ID NO: 8235 - DNA, 24 bp, synthetic construct
  misc_feature 1..24: note = Synthetic
  source 1..24: mol_type = other DNA
cctcctctccgaacctgcgctatg

SEQ ID NO: 8236 - DNA, 24 bp, synthetic construct
  misc_feature 1..24: note = Synthetic
  source 1..24: mol_type = other DNA
aagctaacaataggaaatggcatt

SEQ ID NO: 8237 - DNA, 24 bp, synthetic construct
  misc_feature 1..24: note = Synthetic
  source 1..24: mol_type = other DNA
acgcggtccgtagtcaggatccgc

SEQ ID NO: 8238 - DNA, 24 bp, synthetic construct
  misc_feature 1..24: note = Synthetic
  source 1..24: mol_type = other DNA
atttgccacatagcaagacaaaga

SEQ ID NO: 8239 - DNA, 24 bp, synthetic construct
  misc_feature 1..24: note = Synthetic
  source 1..24: mol_type = other DNA
tgtgcgagccggcctctgaggcaa

SEQ ID NO: 8240 - DNA, 24 bp, synthetic construct
  misc_feature 1..24: note = Synthetic
  source 1..24: mol_type = other DNA
ccctgaaggtggccttcgtatagg

SEQ ID NO: 8241 - DNA, 24 bp, synthetic construct
  misc_feature 1..24: note = Synthetic
  source 1..24: mol_type = other DNA
tgaagacctcgcgcgctgcagtgt

SEQ ID NO: 8242 - DNA, 24 bp, synthetic construct
  misc_feature 1..24: note = Synthetic
  source 1..24: mol_type = other DNA
acacacctatgcggtgggacttac

SEQ ID NO: 8243 - DNA, 24 bp, synthetic construct
  misc_feature 1..24: note = Synthetic
  source 1..24: mol_type = other DNA
actagccataatagtccacccggc

SEQ ID NO: 8244 - DNA, 24 bp, synthetic construct
  misc_feature 1..24: note = Synthetic
  source 1..24: mol_type = other DNA
ttccgttaatgtcaagtagaaggt

SEQ ID NO: 8245 - DNA, 24 bp, synthetic construct
  misc_feature 1..24: note = Synthetic
  source 1..24: mol_type = other DNA
gccaccggcctagaccggcatcgg

SEQ ID NO: 8246 - DNA, 24 bp, synthetic construct
  misc_feature 1..24: note = Synthetic
  source 1..24: mol_type = other DNA
tctccatcactacacttagtagag

SEQ ID NO: 8247 - DNA, 24 bp, synthetic construct
  misc_feature 1..24: note = Synthetic
  source 1..24: mol_type = other DNA
ccaactcactaatcctcaacgatg

SEQ ID NO: 8248 - DNA, 24 bp, synthetic construct
  misc_feature 1..24: note = Synthetic
  source 1..24: mol_type = other DNA
gttagataaacggccgttcgctag

SEQ ID NO: 8249 - DNA, 24 bp, synthetic construct
  misc_feature 1..24: note = Synthetic
  source 1..24: mol_type = other DNA
acgcacaatatacaccgattacag

SEQ ID NO: 8250 - DNA, 24 bp, synthetic construct
  misc_feature 1..24: note = Synthetic
  source 1..24: mol_type = other DNA
agcgatttgggacacactcaggag

SEQ ID NO: 8251 - DNA, 24 bp, synthetic construct
  misc_feature 1..24: note = Synthetic
  source 1..24: mol_type = other DNA
cgatgtaacttggctaggaaatta

SEQ ID NO: 8252 - DNA, 24 bp, synthetic construct
  misc_feature 1..24: note = Synthetic
  source 1..24: mol_type = other DNA
cgaaagaatagtgatccaccagga

SEQ ID NO: 8253 - DNA, 24 bp, synthetic construct
  misc_feature 1..24: note = Synthetic
  source 1..24: mol_type = other DNA
caaggcgaactactcctatctacc

SEQ ID NO: 8254 - DNA, 24 bp, synthetic construct
  misc_feature 1..24: note = Synthetic
  source 1..24: mol_type = other DNA
agagttctcttcttacttcttaca

SEQ ID NO: 8255 - DNA, 24 bp, synthetic construct
  misc_feature 1..24: note = Synthetic
  source 1..24: mol_type = other DNA
agaaattatcaattgttatatacc

SEQ ID NO: 8256 - DNA, 24 bp, synthetic construct
  misc_feature 1..24: note = Synthetic
  source 1..24: mol_type = other DNA
tagatttggttatgcatttattga

SEQ ID NO: 8257 - DNA, 24 bp, synthetic construct
  misc_feature 1..24: note = Synthetic
  source 1..24: mol_type = other DNA
ctacaggacaatcaaagcgtgtgc

SEQ ID NO: 8258 - DNA, 24 bp, synthetic construct
  misc_feature 1..24: note = Synthetic
  source 1..24: mol_type = other DNA
gcgctaactaccaagtataggcac

SEQ ID NO: 8259 - DNA, 24 bp, synthetic construct
  misc_feature 1..24: note = Synthetic
  source 1..24: mol_type = other DNA
cctgtcgtataacctatgtgagac

SEQ ID NO: 8260 - DNA, 24 bp, synthetic construct
  misc_feature 1..24: note = Synthetic
  source 1..24: mol_type = other DNA
ctagtggaactccttcgccgcgtc

SEQ ID NO: 8261 - DNA, 24 bp, synthetic construct
  misc_feature 1..24: note = Synthetic
  source 1..24: mol_type = other DNA
ttaagcaatgtcccactgcaggtc

SEQ ID NO: 8262 - DNA, 24 bp, synthetic construct
  misc_feature 1..24: note = Synthetic
  source 1..24: mol_type = other DNA
aggctccggttgagatcaagagcc

SEQ ID NO: 8263 - DNA, 24 bp, synthetic construct
  misc_feature 1..24: note = Synthetic
  source 1..24: mol_type = other DNA
cttccctgtcagggtaaagtgtaa

SEQ ID NO: 8264 - DNA, 24 bp, synthetic construct
  misc_feature 1..24: note = Synthetic
  source 1..24: mol_type = other DNA
cctgtgcaaacgagggtgagcatt

SEQ ID NO: 8265 - DNA, 24 bp, synthetic construct
  misc_feature 1..24: note = Synthetic
  source 1..24: mol_type = other DNA
tatgagcgcttgcacatcctttag

SEQ ID NO: 8266 - DNA, 24 bp, synthetic construct
  misc_feature 1..24: note = Synthetic
  source 1..24: mol_type = other DNA
ccgccaatcccatttcagggcttc

SEQ ID NO: 8267 - DNA, 24 bp, synthetic construct
  misc_feature 1..24: note = Synthetic
  source 1..24: mol_type = other DNA
ccaggatccaggacagaattggac

SEQ ID NO: 8268 - DNA, 24 bp, synthetic construct
  misc_feature 1..24: note = Synthetic
  source 1..24: mol_type = other DNA
catcccttctctttatccctggga

SEQ ID NO: 8269 - DNA, 24 bp, synthetic construct
  misc_feature 1..24: note = Synthetic
  source 1..24: mol_type = other DNA
cacttcggttggctgtgctgaggg

SEQ ID NO: 8270 - DNA, 24 bp, synthetic construct
  misc_feature 1..24: note = Synthetic
  source 1..24: mol_type = other DNA
ggcaccacagttcatcgcgttggc

SEQ ID NO: 8271 - DNA, 24 bp, synthetic construct
  misc_feature 1..24: note = Synthetic
  source 1..24: mol_type = other DNA
tatcctgtggaatctcgggaggag

SEQ ID NO: 8272 - DNA, 24 bp, synthetic construct
  misc_feature 1..24: note = Synthetic
  source 1..24: mol_type = other DNA
aggcacgtagaggataggtctacc

SEQ ID NO: 8273 - DNA, 24 bp, synthetic construct
  misc_feature 1..24: note = Synthetic
  source 1..24: mol_type = other DNA
ggtggtaacggcatcttaatgcca

SEQ ID NO: 8274 - DNA, 24 bp, synthetic construct
  misc_feature 1..24: note = Synthetic
  source 1..24: mol_type = other DNA
cgttatatgggtgcggttataaac

SEQ ID NO: 8275 - DNA, 24 bp, synthetic construct
  misc_feature 1..24: note = Synthetic
  source 1..24: mol_type = other DNA
ggagggtgccgatgacccatcaaa

SEQ ID NO: 8276 - DNA, 24 bp, synthetic construct
  misc_feature 1..24: note = Synthetic
  source 1..24: mol_type = other DNA
tagtagttctcgaactgccggcgc

SEQ ID NO: 8277 - DNA, 24 bp, synthetic construct
  misc_feature 1..24: note = Synthetic
  source 1..24: mol_type = other DNA
tatagtacgagggcgcataacgcg

SEQ ID NO: 8278 - DNA, 24 bp, synthetic construct
  misc_feature 1..24: note = Synthetic
  source 1..24: mol_type = other DNA
cagtccagggcgattgtagtaggg

SEQ ID NO: 8279 - DNA, 24 bp, synthetic construct
  misc_feature 1..24: note = Synthetic
  source 1..24: mol_type = other DNA
ggtgcaacgtacggcggcggcttg

SEQ ID NO: 8280 - DNA, 24 bp, synthetic construct
  misc_feature 1..24: note = Synthetic
  source 1..24: mol_type = other DNA
caaccgaatttgtgccatatatat

SEQ ID NO: 8281 - DNA, 24 bp, synthetic construct
  misc_feature 1..24: note = Synthetic
  source 1..24: mol_type = other DNA
tatctctcacctagttggtgcccg

SEQ ID NO: 8282 - DNA, 24 bp, synthetic construct
  misc_feature 1..24: note = Synthetic
  source 1..24: mol_type = other DNA
ccgagggtatgacttccaatacga

SEQ ID NO: 8283 - DNA, 24 bp, synthetic construct
  misc_feature 1..24: note = Synthetic
  source 1..24: mol_type = other DNA
tgcaccgtacgtgttgcccaccta

SEQ ID NO: 8284 - DNA, 24 bp, synthetic construct
  misc_feature 1..24: note = Synthetic
  source 1..24: mol_type = other DNA
cattgatgacgattatctttatcg

SEQ ID NO: 8285 - DNA, 24 bp, synthetic construct
  misc_feature 1..24: note = Synthetic
  source 1..24: mol_type = other DNA
ttgtggtgtggccaaactgcccac

SEQ ID NO: 8286 - DNA, 24 bp, synthetic construct
  misc_feature 1..24: note = Synthetic
  source 1..24: mol_type = other DNA
gagcactgtactgcacccgtctca

SEQ ID NO: 8287 - DNA, 24 bp, synthetic construct
  misc_feature 1..24: note = Synthetic
  source 1..24: mol_type = other DNA
cattatgtccaatattgggatagg

SEQ ID NO: 8288 - DNA, 24 bp, synthetic construct
  misc_feature 1..24: note = Synthetic
  source 1..24: mol_type = other DNA
ctgagatttcgcacgttaacttgg

SEQ ID NO: 8289 - DNA, 24 bp, synthetic construct
  misc_feature 1..24: note = Synthetic
  source 1..24: mol_type = other DNA
cgagaccctatggagcgttaagat

SEQ ID NO: 8290 - DNA, 24 bp, synthetic construct
  misc_feature 1..24: note = Synthetic
  source 1..24: mol_type = other DNA
ctgcctgactacaagagatgcttg

SEQ ID NO: 8291 - DNA, 24 bp, synthetic construct
  misc_feature 1..24: note = Synthetic
  source 1..24: mol_type = other DNA
gctatagccaaggctccctaaagt

SEQ ID NO: 8292 - DNA, 24 bp, synthetic construct
  misc_feature 1..24: note = Synthetic
  source 1..24: mol_type = other DNA
gctggtggagaacttctcatcgta

SEQ ID NO: 8293 - DNA, 24 bp, synthetic construct
  misc_feature 1..24: note = Synthetic
  source 1..24: mol_type = other DNA
ccgcctagtaggcagagccttaat

SEQ ID NO: 8294 - DNA, 24 bp, synthetic construct
  misc_feature 1..24: note = Synthetic
  source 1..24: mol_type = other DNA
tgagggttacctgtgatatccgcg

SEQ ID NO: 8295 - DNA, 24 bp, synthetic construct
  misc_feature 1..24: note = Synthetic
  source 1..24: mol_type = other DNA
gtttgaattcatgcagcgaccatt

SEQ ID NO: 8296 - DNA, 24 bp, synthetic construct
  misc_feature 1..24: note = Synthetic
  source 1..24: mol_type = other DNA
attatcgtggatcaagtttccatc

SEQ ID NO: 8297 - DNA, 24 bp, synthetic construct
  misc_feature 1..24: note = Synthetic
  source 1..24: mol_type = other DNA
tcagctatgcggcgctaagacgag

SEQ ID NO: 8298 - DNA, 24 bp, synthetic construct
  misc_feature 1..24: note = Synthetic
  source 1..24: mol_type = other DNA
atccgaccactgactatcgagtcc

SEQ ID NO: 8299 - DNA, 24 bp, synthetic construct
  misc_feature 1..24: note = Synthetic
  source 1..24: mol_type = other DNA
actagacgaggcacagataggtcg

SEQ ID NO: 8300 - DNA, 24 bp, synthetic construct
  misc_feature 1..24: note = Synthetic
  source 1..24: mol_type = other DNA
tgacagcagaacaccctggcgtcc

SEQ ID NO: 8301 - DNA, 24 bp, synthetic construct
  misc_feature 1..24: note = Synthetic
  source 1..24: mol_type = other DNA
tgctgaatcggtttcggaacgaat

SEQ ID NO: 8302 - DNA, 24 bp, synthetic construct
  misc_feature 1..24: note = Synthetic
  source 1..24: mol_type = other DNA
ctggcgtacgccgccaaggcggca

SEQ ID NO: 8303 - DNA, 24 bp, synthetic construct
  misc_feature 1..24: note = Synthetic
  source 1..24: mol_type = other DNA
aaactagcctatacatcgaagaaa

SEQ ID NO: 8304 - DNA, 24 bp, synthetic construct
  misc_feature 1..24: note = Synthetic
  source 1..24: mol_type = other DNA
tggccaccgatcacgcagggagcg

SEQ ID NO: 8305 - DNA, 24 bp, synthetic construct
  misc_feature 1..24: note = Synthetic
  source 1..24: mol_type = other DNA
cgttgcggcctcggatagcggttt

SEQ ID NO: 8306 - DNA, 24 bp, synthetic construct
  misc_feature 1..24: note = Synthetic
  source 1..24: mol_type = other DNA
aaggcagccgcaatgtgcgctaac

SEQ ID NO: 8307 - DNA, 24 bp, synthetic construct
  misc_feature 1..24: note = Synthetic
  source 1..24: mol_type = other DNA
aagacctagacggcgattcatccg

SEQ ID NO: 8308 - DNA, 24 bp, synthetic construct
  misc_feature 1..24: note = Synthetic
  source 1..24: mol_type = other DNA
cccaacacaaacatcacctcttcg

SEQ ID NO: 8309 - DNA, 24 bp, synthetic construct
  misc_feature 1..24: note = Synthetic
  source 1..24: mol_type = other DNA
ttatgcgaatggcttgttaggttt

SEQ ID NO: 8310 - DNA, 24 bp, synthetic construct
  misc_feature 1..24: note = Synthetic
  source 1..24: mol_type = other DNA
ttgtgaggttcttcggcacaaggt

SEQ ID NO: 8311 - DNA, 24 bp, synthetic construct
  misc_feature 1..24: note = Synthetic
  source 1..24: mol_type = other DNA
gccatgcatgaccagcacgaactt

SEQ ID NO: 8312 - DNA, 24 bp, synthetic construct
  misc_feature 1..24: note = Synthetic
  source 1..24: mol_type = other DNA
ggtagggtgggtaaataaacgacg

SEQ ID NO: 8313 - DNA, 24 bp, synthetic construct
  misc_feature 1..24: note = Synthetic
  source 1..24: mol_type = other DNA
tacgaggtccggtgtaaatagatt

SEQ ID NO: 8314 - DNA, 24 bp, synthetic construct
  misc_feature 1..24: note = Synthetic
  source 1..24: mol_type = other DNA
caggtttgcgtaagtgcgcggctg

SEQ ID NO: 8315 - DNA, 24 bp, synthetic construct
  misc_feature 1..24: note = Synthetic
  source 1..24: mol_type = other DNA
cgtaacggccgcgctcctaacacc

SEQ ID NO: 8316 - DNA, 24 bp, synthetic construct
  misc_feature 1..24: note = Synthetic
  source 1..24: mol_type = other DNA
tccaggttgcccgttccttcgtga

SEQ ID NO: 8317 - DNA, 24 bp, synthetic construct
  misc_feature 1..24: note = Synthetic
  source 1..24: mol_type = other DNA
tggcctcttattccgactgagctt

SEQ ID NO: 8318 - DNA, 24 bp, synthetic construct
  misc_feature 1..24: note = Synthetic
  source 1..24: mol_type = other DNA
aatcagggccaacggttcttgaac

SEQ ID NO: 8319 - DNA, 24 bp, synthetic construct
  misc_feature 1..24: note = Synthetic
  source 1..24: mol_type = other DNA
acacaagaactaaagggtaggaag

SEQ ID NO: 8320 - DNA, 24 bp, synthetic construct
  misc_feature 1..24: note = Synthetic
  source 1..24: mol_type = other DNA
tacaagtgggtatgatcgactcga

SEQ ID NO: 8321 - DNA, 24 bp, synthetic construct
  misc_feature 1..24: note = Synthetic
  source 1..24: mol_type = other DNA
aaagggcgcagcacctgcctacgt

SEQ ID NO: 8322 - DNA, 24 bp, synthetic construct
  misc_feature 1..24: note = Synthetic
  source 1..24: mol_type = other DNA
cacgttacgcttacgacggtgacc

SEQ ID NO: 8323 - DNA, 24 bp, synthetic construct
  misc_feature 1..24: note = Synthetic
  source 1..24: mol_type = other DNA
actctaccactccattccactgcc

SEQ ID NO: 8324 - DNA, 24 bp, synthetic construct
  misc_feature 1..24: note = Synthetic
  source 1..24: mol_type = other DNA
aactcaccgatctaccagtaaaga

SEQ ID NO: 8325 - DNA, 24 bp, synthetic construct
  misc_feature 1..24: note = Synthetic
  source 1..24: mol_type = other DNA
ttcgaagtggcagctattatggtt

SEQ ID NO: 8326 - DNA, 24 bp, synthetic construct
  misc_feature 1..24: note = Synthetic
  source 1..24: mol_type = other DNA
gtcgcattctgagtctcggtcgtt

SEQ ID NO: 8327 - DNA, 24 bp, synthetic construct
  misc_feature 1..24: note = Synthetic
  source 1..24: mol_type = other DNA
gacacacttgccgtgtagtgatac

SEQ ID NO: 8328 - DNA, 24 bp, synthetic construct
  misc_feature 1..24: note = Synthetic
  source 1..24: mol_type = other DNA
cgcctagccgtctgtcattaggct

SEQ ID NO: 8329 - DNA, 24 bp, synthetic construct
  misc_feature 1..24: note = Synthetic
  source 1..24: mol_type = other DNA
ttggacgctactctggtgggtcgc

SEQ ID NO: 8330 - DNA, 24 bp, synthetic construct
  misc_feature 1..24: note = Synthetic
  source 1..24: mol_type = other DNA
cattacccgaaacaatcggctcat

SEQ ID NO: 8331 - DNA, 24 bp, synthetic construct
  misc_feature 1..24: note = Synthetic
  source 1..24: mol_type = other DNA
aaatctctgatcaaatagcgttgc

SEQ ID NO: 8332 - DNA, 24 bp, synthetic construct
  misc_feature 1..24: note = Synthetic
  source 1..24: mol_type = other DNA
gggttgcgataaactgttacaccc

SEQ ID NO: 8333 - DNA, 24 bp, synthetic construct
  misc_feature 1..24: note = Synthetic
  source 1..24: mol_type = other DNA
acaaatttgggtctcgaacgacac

SEQ ID NO: 8334 - DNA, 24 bp, synthetic construct
  misc_feature 1..24: note = Synthetic
  source 1..24: mol_type = other DNA
tagattagacacagaagtttatgt

SEQ ID NO: 8335 - DNA, 24 bp, synthetic construct
  misc_feature 1..24: note = Synthetic
  source 1..24: mol_type = other DNA
gctagaaacactggtcaggccaag

SEQ ID NO: 8336 - DNA, 24 bp, synthetic construct
  misc_feature 1..24: note = Synthetic
  source 1..24: mol_type = other DNA
gcagcaggcagtctctgccatccg

SEQ ID NO: 8337 - DNA, 24 bp, synthetic construct
  misc_feature 1..24: note = Synthetic
  source 1..24: mol_type = other DNA
tgggagtacaccgatatagggagc

SEQ ID NO: 8338 - DNA, 24 bp, synthetic construct
  misc_feature 1..24: note = Synthetic
  source 1..24: mol_type = other DNA
gaggcgcggtctcagatagaatac

SEQ ID NO: 8339 - DNA, 24 bp, synthetic construct
  misc_feature 1..24: note = Synthetic
  source 1..24: mol_type = other DNA
tttgactataagccgtcataacag

SEQ ID NO: 8340 - DNA, 24 bp, synthetic construct
  misc_feature 1..24: note = Synthetic
  source 1..24: mol_type = other DNA
aatgtaccgggcgagtgtttatat

SEQ ID NO: 8341 - DNA, 24 bp, synthetic construct
  misc_feature 1..24: note = Synthetic
  source 1..24: mol_type = other DNA
acttgtgaaataagtaagcaccgt

SEQ ID NO: 8342 - DNA, 24 bp, synthetic construct
  misc_feature 1..24: note = Synthetic
  source 1..24: mol_type = other DNA
gcaagggcgatccctgacattctc

SEQ ID NO: 8343 - DNA, 24 bp, synthetic construct
  misc_feature 1..24: note = Synthetic
  source 1..24: mol_type = other DNA
agacagattccgaaagtctacagc

SEQ ID NO: 8344 - DNA, 24 bp, synthetic construct
  misc_feature 1..24: note = Synthetic
  source 1..24: mol_type = other DNA
aaccttcaaccatgataataagaa

SEQ ID NO: 8345 - DNA, 24 bp, synthetic construct
  misc_feature 1..24: note = Synthetic
  source 1..24: mol_type = other DNA
tcaatctcgtatgtacagcagata

SEQ ID NO: 8346 - DNA, 24 bp, synthetic construct
  misc_feature 1..24: note = Synthetic
  source 1..24: mol_type = other DNA
tcgtcctcacagactctcgagccg

SEQ ID NO: 8347 - DNA, 24 bp, synthetic construct
  misc_feature 1..24: note = Synthetic
  source 1..24: mol_type = other DNA
gtagaactcattgtttaatcatta

SEQ ID NO: 8348 - DNA, 24 bp, synthetic construct
  misc_feature 1..24: note = Synthetic
  source 1..24: mol_type = other DNA
ccttgaggtcgggattgcgcacct

SEQ ID NO: 8349 - DNA, 24 bp, synthetic construct
  misc_feature 1..24: note = Synthetic
  source 1..24: mol_type = other DNA
gggatgtagtgatacacatcataa

SEQ ID NO: 8350 - DNA, 24 bp, synthetic construct
  misc_feature 1..24: note = Synthetic
  source 1..24: mol_type = other DNA
tggccaccgactatgtaatcggcc

SEQ ID NO: 8351 - DNA, 24 bp, synthetic construct
  misc_feature 1..24: note = Synthetic
  source 1..24: mol_type = other DNA
gtacgatttcccgccttagctaag

SEQ ID NO: 8352 - DNA, 24 bp, synthetic construct
  misc_feature 1..24: note = Synthetic
  source 1..24: mol_type = other DNA
gccataagtaaacagtaaaccttg

SEQ ID NO: 8353 - DNA, 24 bp, synthetic construct
  misc_feature 1..24: note = Synthetic
  source 1..24: mol_type = other DNA
gtatattcttcaacggattggccg

SEQ ID NO: 8354 - DNA, 24 bp, synthetic construct
  misc_feature 1..24: note = Synthetic
  source 1..24: mol_type = other DNA
tgaccgacgactgttcagatctat

SEQ ID NO: 8355 - DNA, 24 bp, synthetic construct
  misc_feature 1..24: note = Synthetic
  source 1..24: mol_type = other DNA
cgtgattgcttcttggcgcaccga

SEQ ID NO: 8356 - DNA, 24 bp, synthetic construct
  misc_feature 1..24: note = Synthetic
  source 1..24: mol_type = other DNA
tcgggtctgctcaatactaacacg

SEQ ID NO: 8357 - DNA, 24 bp, synthetic construct
  misc_feature 1..24: note = Synthetic
  source 1..24: mol_type = other DNA
cgatcaccacgccagctagcgatc

SEQ ID NO: 8358 - DNA, 24 bp, synthetic construct
  misc_feature 1..24: note = Synthetic
  source 1..24: mol_type = other DNA
aataacgaggacttaaatgccgca

SEQ ID NO: 8359 - DNA, 24 bp, synthetic construct
  misc_feature 1..24: note = Synthetic
  source 1..24: mol_type = other DNA
cactatcaataacgattcatgaca

SEQ ID NO: 8360 - DNA, 24 bp, synthetic construct
  misc_feature 1..24: note = Synthetic
  source 1..24: mol_type = other DNA
ggcaatctctgcgtcactttcccg

SEQ ID NO: 8361 - DNA, 24 bp, synthetic construct
  misc_feature 1..24: note = Synthetic
  source 1..24: mol_type = other DNA
cttattgttcgccctagcccaggc

SEQ ID NO: 8362 - DNA, 24 bp, synthetic construct
  misc_feature 1..24: note = Synthetic
  source 1..24: mol_type = other DNA
gcatgggctagttgagcatttgtg

SEQ ID NO: 8363 - DNA, 24 bp, synthetic construct
  misc_feature 1..24: note = Synthetic
  source 1..24: mol_type = other DNA
caggattcccttgatactatacag

SEQ ID NO: 8364 - DNA, 24 bp, synthetic construct
  misc_feature 1..24: note = Synthetic
  source 1..24: mol_type = other DNA
gaataaattgatatgcaggcgtgg

SEQ ID NO: 8365 - DNA, 24 bp, synthetic construct
  misc_feature 1..24: note = Synthetic
  source 1..24: mol_type = other DNA
cttgtcccgacgtaaacgacgggc

SEQ ID NO: 8366 - DNA, 24 bp, synthetic construct
  misc_feature 1..24: note = Synthetic
  source 1..24: mol_type = other DNA
gacgatctaatctaaccaagtcag

SEQ ID NO: 8367 - DNA, 24 bp, synthetic construct
  misc_feature 1..24: note = Synthetic
  source 1..24: mol_type = other DNA
ggctgatcttctgccacacgggaa

SEQ ID NO: 8368 - DNA, 24 bp, synthetic construct
  misc_feature 1..24: note = Synthetic
  source 1..24: mol_type = other DNA
ggcgtagaggttgcgttctctgct

SEQ ID NO: 8369 - DNA, 24 bp, synthetic construct
  misc_feature 1..24: note = Synthetic
  source 1..24: mol_type = other DNA
catctcctgaccggatgagttcaa

SEQ ID NO: 8370 - DNA, 24 bp, synthetic construct
  misc_feature 1..24: note = Synthetic
  source 1..24: mol_type = other DNA
cccttcatgcggcgattattcttc

SEQ ID NO: 8371 - DNA, 24 bp, synthetic construct
  misc_feature 1..24: note = Synthetic
  source 1..24: mol_type = other DNA
cgggcatttaagcgctcagtggtt

SEQ ID NO: 8372 - DNA, 24 bp, synthetic construct
  misc_feature 1..24: note = Synthetic
  source 1..24: mol_type = other DNA
ggttgtgtgattgccaggacaatt

SEQ ID NO: 8373 - DNA, 24 bp, synthetic construct
  misc_feature 1..24: note = Synthetic
  source 1..24: mol_type = other DNA
cctgggcaattcaggagatccctg

SEQ ID NO: 8374 - DNA, 24 bp, synthetic construct
  misc_feature 1..24: note = Synthetic
  source 1..24: mol_type = other DNA
tcgaggcctgatgattcccatgga

SEQ ID NO: 8375 - DNA, 24 bp, synthetic construct
  misc_feature 1..24: note = Synthetic
  source 1..24: mol_type = other DNA
ccggtatttagagcgacgattgtc

SEQ ID NO: 8376 - DNA, 24 bp, synthetic construct
  misc_feature 1..24: note = Synthetic
  source 1..24: mol_type = other DNA
ctacgtgagccttaatgtacgtgg

SEQ ID NO: 8377 - DNA, 24 bp, synthetic construct
  misc_feature 1..24: note = Synthetic
  source 1..24: mol_type = other DNA
cgtcaaccctatatacactatcta

SEQ ID NO: 8378 - DNA, 24 bp, synthetic construct
  misc_feature 1..24: note = Synthetic
  source 1..24: mol_type = other DNA
gtacttcccgggcgtaaacctgtc

SEQ ID NO: 8379 - DNA, 24 bp, synthetic construct
  misc_feature 1..24: note = Synthetic
  source 1..24: mol_type = other DNA
ggcagtgatgccgtcgcgtacgca

SEQ ID NO: 8380 - DNA, 24 bp, synthetic construct
  misc_feature 1..24: note = Synthetic
  source 1..24: mol_type = other DNA
aggtagtatgtcttggcgcgacgc

SEQ ID NO: 8381 - DNA, 24 bp, synthetic construct
  misc_feature 1..24: note = Synthetic
  source 1..24: mol_type = other DNA
agagcctacgtgtgaagtaagtca

SEQ ID NO: 8382 - DNA, 24 bp, synthetic construct
  misc_feature 1..24: note = Synthetic
  source 1..24: mol_type = other DNA
ccacattcttcgcacattgggtgc

SEQ ID NO: 8383 - DNA, 24 bp, synthetic construct
  misc_feature 1..24: note = Synthetic
  source 1..24: mol_type = other DNA
gtattggtccgttctcgcaatcgc

SEQ ID NO: 8384 - DNA, 24 bp, synthetic construct
  misc_feature 1..24: note = Synthetic
  source 1..24: mol_type = other DNA
aaagagcagtattaactgtggtat

SEQ ID NO: 8385 - DNA, 24 bp, synthetic construct
  misc_feature 1..24: note = Synthetic
  source 1..24: mol_type = other DNA
gcctggcgacacctagattccata

SEQ ID NO: 8386 - DNA, 24 bp, synthetic construct
  misc_feature 1..24: note = Synthetic
  source 1..24: mol_type = other DNA
ttgtgtaggaagacttcttggcga

SEQ ID NO: 8387 - DNA, 24 bp, synthetic construct
  misc_feature 1..24: note = Synthetic
  source 1..24: mol_type = other DNA
tttgaaatcgtatttattgtggga

SEQ ID NO: 8388 - DNA, 24 bp, synthetic construct
  misc_feature 1..24: note = Synthetic
  source 1..24: mol_type = other DNA
ttgcgattcatcatcttgaaccga

SEQ ID NO: 8389 - DNA, 24 bp, synthetic construct
  misc_feature 1..24: note = Synthetic
  source 1..24: mol_type = other DNA
ctttaccgatttatacattcggtt

SEQ ID NO: 8390 - DNA, 24 bp, synthetic construct
  misc_feature 1..24: note = Synthetic
  source 1..24: mol_type = other DNA
tatataccggtcctcgatttacaa

SEQ ID NO: 8391 - DNA, 24 bp, synthetic construct
  misc_feature 1..24: note = Synthetic
  source 1..24: mol_type = other DNA
gccgttacacctcgtccacctgca

SEQ ID NO: 8392 - DNA, 24 bp, synthetic construct
  misc_feature 1..24: note = Synthetic
  source 1..24: mol_type = other DNA
ttatcaggtaaactgaggctgagc

SEQ ID NO: 8393 - DNA, 24 bp, synthetic construct
  misc_feature 1..24: note = Synthetic
  source 1..24: mol_type = other DNA
agtggagacgttatgcaaggtgta

SEQ ID NO: 8394 - DNA, 24 bp, synthetic construct
  misc_feature 1..24: note = Synthetic
  source 1..24: mol_type = other DNA
caactgatggagatgtcaatacag

SEQ ID NO: 8395 - DNA, 24 bp, synthetic construct
  misc_feature 1..24: note = Synthetic
  source 1..24: mol_type = other DNA
tgcgctgattgtagtgtgcaatta

SEQ ID NO: 8396 - DNA, 24 bp, synthetic construct
  misc_feature 1..24: note = Synthetic
  source 1..24: mol_type = other DNA
taaatggtacgcggttgggatggc

SEQ ID NO: 8397 - DNA, 24 bp, synthetic construct
  misc_feature 1..24: note = Synthetic
  source 1..24: mol_type = other DNA
cacagtcaggctgcgagccatgtg

SEQ ID NO: 8398 - DNA, 24 bp, synthetic construct
  misc_feature 1..24: note = Synthetic
  source 1..24: mol_type = other DNA
cgaagcagcatgtcagataggcat

SEQ ID NO: 8399 - DNA, 24 bp, synthetic construct
  misc_feature 1..24: note = Synthetic
  source 1..24: mol_type = other DNA
ctaggtcctttgtctagactattg

SEQ ID NO: 8400 - DNA, 24 bp, synthetic construct
  misc_feature 1..24: note = Synthetic
  source 1..24: mol_type = other DNA
tcgcagtttctggtgtctcgaatg

SEQ ID NO: 8401 - DNA, 24 bp, synthetic construct
  misc_feature 1..24: note = Synthetic
  source 1..24: mol_type = other DNA
accaaatcccgttgggtgcgagag

SEQ ID NO: 8402 - DNA, 24 bp, synthetic construct
  misc_feature 1..24: note = Synthetic
  source 1..24: mol_type = other DNA
tgtgtcggtaccaatctttctgct

SEQ ID NO: 8403 - DNA, 24 bp, synthetic construct
  misc_feature 1..24: note = Synthetic
  source 1..24: mol_type = other DNA
gaagtgaacgaagtgatcacgtca

SEQ ID NO: 8404 - DNA, 24 bp, synthetic construct
  misc_feature 1..24: note = Synthetic
  source 1..24: mol_type = other DNA
ctttgttggattccaccacctacc

SEQ ID NO: 8405 - DNA, 24 bp, synthetic construct
  misc_feature 1..24: note = Synthetic
  source 1..24: mol_type = other DNA
ctacagtgtcgcgagctcggaggc

SEQ ID NO: 8406 - DNA, 24 bp, synthetic construct
  misc_feature 1..24: note = Synthetic
  source 1..24: mol_type = other DNA
tctagacgtgtgaagggagctagg

SEQ ID NO: 8407 - DNA, 24 bp, synthetic construct
  misc_feature 1..24: note = Synthetic
  source 1..24: mol_type = other DNA
gtgagaggtgattctaatggctac

SEQ ID NO: 8408 - DNA, 24 bp, synthetic construct
  misc_feature 1..24: note = Synthetic
  source 1..24: mol_type = other DNA
cgcggtgctgatcccgcttctggt

SEQ ID NO: 8409 - DNA, 24 bp, synthetic construct
  misc_feature 1..24: note = Synthetic
  source 1..24: mol_type = other DNA
tttgcagcttgaccacacgtctgc

SEQ ID NO: 8410 - DNA, 24 bp, synthetic construct
  misc_feature 1..24: note = Synthetic
  source 1..24: mol_type = other DNA
tgatggtgttaacatcggcctgac

SEQ ID NO: 8411 - DNA, 24 bp, synthetic construct
  misc_feature 1..24: note = Synthetic
  source 1..24: mol_type = other DNA
attgagaccaacatgcctaagtta

SEQ ID NO: 8412 - DNA, 24 bp, synthetic construct
  misc_feature 1..24: note = Synthetic
  source 1..24: mol_type = other DNA
aatacttcgcgttagatgtcttca

SEQ ID NO: 8413 - DNA, 24 bp, synthetic construct
  misc_feature 1..24: note = Synthetic
  source 1..24: mol_type = other DNA
cctgagctccacgaactgattgga

SEQ ID NO: 8414 - DNA, 24 bp, synthetic construct
  misc_feature 1..24: note = Synthetic
  source 1..24: mol_type = other DNA
ccgataataattcgatataagcac

SEQ ID NO: 8415 - DNA, 24 bp, synthetic construct
  misc_feature 1..24: note = Synthetic
  source 1..24: mol_type = other DNA
tgaccaatatcgaggtttcgtacc

SEQ ID NO: 8416 - DNA, 24 bp, synthetic construct
  misc_feature 1..24: note = Synthetic
  source 1..24: mol_type = other DNA
ggctttcccgaaatgctgcacggg

SEQ ID NO: 8417 - DNA, 24 bp, synthetic construct
  misc_feature 1..24: note = Synthetic
  source 1..24: mol_type = other DNA
ctgctgagctgggcacatgcccta

SEQ ID NO: 8418 - DNA, 24 bp, synthetic construct
  misc_feature 1..24: note = Synthetic
  source 1..24: mol_type = other DNA
atcgagcgccgatactctcgcagc

SEQ ID NO: 8419 - DNA, 24 bp, synthetic construct
  misc_feature 1..24: note = Synthetic
  source 1..24: mol_type = other DNA
tttccttcacaggcgcttcttata

SEQ ID NO: 8420 - DNA, 24 bp, synthetic construct
  misc_feature 1..24: note = Synthetic
  source 1..24: mol_type = other DNA
tggttcgagtcaggctagagttca

SEQ ID NO: 8421 - DNA, 24 bp, synthetic construct
  misc_feature 1..24: note = Synthetic
  source 1..24: mol_type = other DNA
cacgcgacaatgtgccaaacatcg

SEQ ID NO: 8422 - DNA, 24 bp, synthetic construct
  misc_feature 1..24: note = Synthetic
  source 1..24: mol_type = other DNA
accacagtaccaaaccggatacta

SEQ ID NO: 8423 - DNA, 24 bp, synthetic construct
  misc_feature 1..24: note = Synthetic
  source 1..24: mol_type = other DNA
ttagtagtcttcgtgtagatagat

SEQ ID NO: 8424 - DNA, 24 bp, synthetic construct
  misc_feature 1..24: note = Synthetic
  source 1..24: mol_type = other DNA
tggctgtcataagggaacaggtag

SEQ ID NO: 8425 - DNA, 24 bp, synthetic construct
  misc_feature 1..24: note = Synthetic
  source 1..24: mol_type = other DNA
tcaatgaagtcgaccgtcaccgcc

SEQ ID NO: 8426 - DNA, 24 bp, synthetic construct
  misc_feature 1..24: note = Synthetic
  source 1..24: mol_type = other DNA
cgacatcctaaatccatggctatc

SEQ ID NO: 8427 - DNA, 24 bp, synthetic construct
  misc_feature 1..24: note = Synthetic
  source 1..24: mol_type = other DNA
cattgggcatccactgagctgagc

SEQ ID NO: 8428 - DNA, 24 bp, synthetic construct
  misc_feature 1..24: note = Synthetic
  source 1..24: mol_type = other DNA
ttcgacaatatcgcagctggatca

SEQ ID NO: 8429 - DNA, 24 bp, synthetic construct
  misc_feature 1..24: note = Synthetic
  source 1..24: mol_type = other DNA
cgaatgcagaccttgcgaaagaca

SEQ ID NO: 8430 - DNA, 24 bp, synthetic construct
  misc_feature 1..24: note = Synthetic
  source 1..24: mol_type = other DNA
agtgaccctcctcgttgatttgca

SEQ ID NO: 8431 - DNA, 24 bp, synthetic construct
  misc_feature 1..24: note = Synthetic
  source 1..24: mol_type = other DNA
tgattcctactgtggctttgagct

SEQ ID NO: 8432 - DNA, 24 bp, synthetic construct
  misc_feature 1..24: note = Synthetic
  source 1..24: mol_type = other DNA
gaccgactcatgtcgcggcctgtg
